United States Patent Application Publication US 2020/0163878 A1 - sequence listing, part 10

SEQ ID NO: 42057 - RNA, 1701 nt, Artificial Sequence
  derived and/or modified CDS sequence (wt) from hemagglutinin__InfluenzaA__AGL09792
augaagacuaucauugcuuugagcuacauucuaugucugguuuucgcucaaaaacuuccuggaaaugacaauagcacggcaacgcugugccuugggcaccaugcaguaccaaacggaacgauagugaaaacaaucacgaaugaccgaauugaaguuacuaaugcuacugagcugguucagaauuccucaauaggugaaauaugcgacaguccucaucagauccuugauggagaaaacugcacacuaauagaugcucuauugggagacccucagugugauggcuuucaaaauaagaaaugggaccuuuuuguugaacgaagcaaagccuacagcaacuguuacccuuaugaugugccggauuaugccucccuuaggucacuaguugccucauccggcacacuggaguuuaacaaugaaagcuucaauugggcuggagucacucaaaacggaacaaguucugcuugcauaaggggaucuaauaguaguuucuuuaguagauuaaauugguugacccacuuaaacuucaaauacccagcauugaacgugacuaugccaaacaaugagcaauuugacaaauuguacauuugggggguucaccacccggguacggacaaggaccaaaucuuccuguaugcucaaucaucaggaagaaucacaguaucuaccaaaagaagccaacaagcuguaaucccgaauaucggaucuagacccagaauaaggaauaucccuagcagaauaagcaucuauuggacaauaguaaaaccgggagacauacuuuugauuaacagcacagggaaucuaauugcuccuagggguuacuucaaaauacgaagugggaaaagcucaauaaugagaucagaugcacccauuggcaaaugcaaaucugaauguaucacuccaaauggaagcauucccaaugacaaaccauuccaaaauguaaacaggaucacauacggggccugucccagauauguuaagcaaagcacucugaaauuggcaacaggaaugcgaaauguaccagagaaacaaacuagaggcauauuuggcgcaauagcggguuucauagaaaaugguugggagggaaugguggaugguugguacgguuucaggcaucaaaauucugagggaagaggacaagcagcagaucucaaaagcacucaagcagcaaucgaucaaaucaaugggaagcugaaucgauugaucgggaaaaccaacgagaaauuccaucagauugaaaaagaauucucagaaguagaagggagaauccaggaccuugagaaauauguugaggacacaaaaauagaucucuggucauacaacgcggagcuucuuguugcccuggagaaccaacauacaauugaucuaacugacucagaaaugaacaaacuguuugaaaaaacaaagaagcaacugagggaaaaugcugaggauaugggcaaugguuguuucaaaauauaccacaaaugugacaaugccugcauaggaucaaucagaaauggaacuuaugaccacgauguauacagggaugaagcauuaaacaaccgguuccagaucaagggaguugagcugaagucaggguacaaagauuggauccuauggauuuccuuugccauaucauguuuuuugcuuuguguugcuuuguugggguucaucaugugggccugccaaaagggcaacauuaggugcaacauuugcauuuga

SEQ ID NO: 42058 - RNA, 1701 nt, Artificial Sequence
  derived and/or modified CDS sequence (wt) from hemagglutinin__InfluenzaA__AGL09794
augaagacuaucauugcuuugagcuacauucuaugucugguuuucgcucaaaaacuuccuggaaaugacaauagcacggcaacgcugugccuugggcaccaugcaguaccaaacggaacgauagugaaaacaaucacgaaugaccgaauugaaguuacuaaugcuacugagcugguucagaauuccucaauaggugaaauaugcgacaguccucaucagauccuugauggagaaaacugcacacuaauagaugcucuauugggagacccucagugugauggcuuucaaaauaagaaaugggaccuuuuuguugaacgaagcaaagccuacagcaacuguuacccuuaugaugugccggauuaugccucccuuaggucacuaguugccucauccggcacacuggaguuuaacaaugaaagcuucaauugggcuggagucacucaaaacggaacaaguucugcuugcauaaggggaucuaauaguaguuucuuuaguagauuaaauugguugacccacuuaaacuucaaauacccagcauugaacgugacuaugccaaacaaugagcaauuugacaaauuguacauuugggggguucaccacccggguacggacaaggaccaaaucuuccuguaugcucaaucaucaggaagaaucacaguaucuaccaaaagaagccaacaagcuguaaucccgaauaucggaucuagacccagaauaaggaauaucccuagcagaauaagcaucuauuggacaauaguaaaaccgggagacauacuuuugauuaacagcacagggaaucuaauugcuccuagggguuacuucaaaauacgaagugggaaaagcucaauaaugagaucagauacacccauuggcaaaugcaaaucugaauguaucacuccaaauggaagcauucccaaugacaaaccauuccaaaauguaaacaggaucacauacggggccugucccagauauguuaagcaaagcacucugaaauuggcaacaggaaugcgaaauguaccagagaaacaaacuagaggcauauuuggcgcaauagcggguuucauagaaaaugguugggagggaaugguggaugguugguacgguuucaggcaucaaaauucugagggaagaggacaagcagcagaucucaaaagcacucaagcagcaaucgaucaaaucaaugggaagcugaaucgauugaucgggaaaaccaacgagaaauuccaucagauugaaaaagaauucucagaaguagaagggagaauucaggaccuugagaaauauguugaggacacaaaaauagaucucuggucauacaacgcggagcuucuuguugcccuggagaaccaacauacaauugaucuaacugacucagaaaugaacaaacuguuugaaaaaacaaagaagcaacugagggaaaaugcugaggauaugggcaaugguuguuucaaaauauaccacaaaugugacaaugccugcauaggaucaaucagaaauggaacuuaugaccacgauguauacagggaugaagcauuaaacaaccgguuccagaucaagggaguugagcugaagucaggguacaaagauuggauccuauggauuuccuuugccauaucauguuuuuugcuuuguguugcuuuguugggguucaucaugugggccugccaaaagggcaacauuaggugcaacauuugcauuuga

SEQ ID NO: 42059 - RNA, 1701 nt, Artificial Sequence
  derived and/or modified CDS sequence (wt) from hemagglutinin__InfluenzaA__AGL09795
augaagacuaucauugcuuugagcuacauucuaugucugguuuucgcucaaaaacuuccuggaaaugacaauagcacggcaacgcugugccuugggcaccaugcaguaccaaacggaacgauagugaaaacaaucacgaaugaccgaauugaaguuacuaaugcuacugagcugguucagaauuccucaauaggugaaauaugcgacaguccucaucagauccuugauggagaaaacugcacacuaauagaugcucuauugggagacccucagugugauggcuuucaaaauaagaaaugggaccuuuuuguugaacgaagcaaagccuacagcaacuguuacccuuaugaugugccggauuaugccucccuuaggucacuaguugccucauccggcacacuggaguuuaacaaugaaagcuucaauugggcuggagucacucaaaacggaacaaguucugcuugcauaaggggaucuaauaguaguuucuuuaguagauuaaauugguugacccacuuaaacuucaaauacccagcauugaacgugacuaugccaaacaaugagcaauuugacaaauuguacauuugggggguucaccacccggguacggacaaggaccaaaucuuccuguaugcucaaucaucaggaagaaucacaguaucuaccaaaagaagccaacaagcuguaaucccgaauaucggaucuagacccagaauaaggaauaucccuagcagaauaagcaucuauuggacaauaguaaaaccgggagacauacuuuugauuaacagcacagggaaucuaauugcuccuagggguuacuucaaaauacgaagugggaaaagcucaauaaugagaucagaugcacccauuggcaaaugcaaaucugaauguaucacuccaaauggaagcauucccaaugacaaaccauuccaaaauguaaacaggaucacauacggggccugucccagauauguuaagcaaagcacucugaaauuggcaacaggaaugcgaaauguaccagagaaacaaacuagaggcauauuuggcgcaauagcggguuucauagaaaaugguugggagggaaugguggaugguugguacgguuucaggcaucaaaauucugagggaagaggacaagcagcagaucucaaaagcacucaagcagcaaucgaucaaaucaaugggaagcugaaucgauugaucgggaaaaccaacgagaaauuccaucagauugaaaaagaauucucagaaguagaagggagaauucaggaccuugagaaauauguugaggacacaaaaauagaucucuggucauacaacgcggagcuucuuguugcccuggagaaccaacauacaauugaucuaacugacucagaaaugaacaaacuguuugaaaaaacaaagaagcaacugagggaaaaugcugaggauaugggcaaugguuguuucaaaauauaccacaaaugugacaaugccugcauaggaucaaucagaaauggaacuuaugaccacgauguauacagggaugaagcauuaaacaaccgguuccagaucaagggaguugagcugaagucaggguacaaagauuggauccuauggauuuccuuugccauaucauguuuuuugcuuuguguugcuuuguugggguucaucaugugggccugccaaaagggcaacauuaggugcaacauuugcauuuga

SEQ ID NO: 42060 - RNA, 1701 nt, Artificial Sequence
  derived and/or modified CDS sequence (wt) from hemagglutinin__InfluenzaA__AGL09797
augaagacuaucauugcuuugagcuacauucuaugucugguuuucucucaaaaacuuccuggaaaugacaauagcacggcaacgcugugccuugggcaccaugcaguaccaaacggaacgauagugaaaacaaucacgaaugaccgaauugaaguuacuaaugcuacugagcugguucagaauuccucaauaggugaaauaugcgacaguccucaucagauccuugauggagaaaacugcacacuaauagaugcucuauugggagacccucagugugauggcuuucaaaauaagaaaugggaccuuuuuguugaacgaagcaaagccuacagcaacuguuacccuuaugaugugccggauuaugccucccuuaggucacuaguugccucauccggcacacuggaguuuaacaaugaaagcuucaauugggcuggagucacucaaaacggaacaaguucugcuugcauaaggggaucuaauaguaguuucuuuaguagauuaaauugguugacccacuuaaacuucaaauacccagcauugaacgugacuaugccaaacaaugagcaauuugacaaauuguacauuugggggguucaccacccggguacggacaaggaccaaaucuuccuguaugcucaaucaucaggaagaaucacaguaucuaccaaaagaagccaacaagcuguaaucccgaauaucggaucuagacccagaauaaggaauaucccuagcagaauaagcaucuauuggacaauaguaaaaccgggagacauacuuuugauuaacagcacagggaaucuaauugcuccuagggguuacuucaaaauacgaagugggaaaagcucaauaaugagaucagaugcacccauuggcaaaugcaaaucugaauguaucacuccaaauggaagcauucccaaugacaaaccauuccaaaauguaaacaggaucacauacggggccugucccagauauguuaagcaaagcacucugaaauuggcaacaggaaugcgaaauguaccagagaaacaaacuagaggcauauuuggcgcaauagcggguuucauagaaaaugguugggagggaaugguggaugguugguacgguuucaggcaucaaaauucugagggaagaggacaagcagcagaucucaaaagcacucaagcagcaaucgaucaaaucaaugggaagcugaaucgauugaucgggaaaaccaacgagaaauuccaucagauugaaaaagaauucucagaaguagaagggagaauucaggaccuugagaaauauguugaggacacaaaaauagaucucuggucauacaacgcggagcuucuuguugcccuggagaaccaacauacaauugaucuaacugacucagaaaugaacaaacuguuugaaaaaacaaagaagcaacugagggaaaaugcugaggauaugggcaaugguuguuucaaaauauaccacaaaugugacaaugccugcauaggaucaaucagaaauggaacuuaugaccacgauguauacagggaugaagcauuaaacaaccgguuccagaucaagggaguugagcugaagucaggguacaaagauuggauccuauggauuuccuuugccauaucauguuuuuugcuuuguguugcuuuguugggguucaucaugugggccugccaaaagggcaacauuaggugcaacauuugcauuuga

SEQ ID NO: 42061 - RNA, 1701 nt, Artificial Sequence
  derived and/or modified CDS sequence (wt) from hemagglutinin__InfluenzaA__AGL09798
augaagacuaucauugcuuugagcuacauucuaugucugguuuucgcucaaaaacuuccuggaaaugacaauagcacggcaacgcugugccuugggcaccaugcaguaccaaacggaacgauagugaaaacaaucacgaaugaccgaauugaaguuacuaaugcuacugagcugguucagaauuccucaauaggugaaauaugcgacaguccucaucagauccuugauggagaaaacugcacacuaauagaugcucuauugggagacccucagugugauggcuuucaaaauaagaaaugggaccuuuuuguugaacgaagcaaagccuacagcaacuguuacccuuaugaugugccggauuaugccucccuuaggucacuaguugccucauccggcacacuggaguuuaacaaugaaagcuucaauugggcuggagucacucaaaacggaacaaguucugcuugcauaaggggaucuaauaguaguuucuuuaguagauuaaauugguugacccacuuaaacuucaaauacccagcauugaacgugacuaugccaaacaaugagcaauuugacaaauuguacauuugggggguucaccacccggguacggacaaggaccaaaucuuccuguaugcucaaucaucaggaagaaucacaguaucuaccaaaagaagccaacaagcuguaaucccgaauaucggaucuagacccagaauaaggaauaucccuagcagaauaagcaucuauuggacaauaguaaaaccgggagacauacuuuugauuaacagcacagggaaucuaauugcuccuagggguuacuucaaaauacgaagugggaaaagcucaauaaugagaucagaugcacccauuggcaaaugcaaaucugaauguaucacuccaaauggaagcauucccaaugacaaaccauuccaaaauguaaacaggaucacauacggggccugucccagauauguuaagcaaagcacucugaaauuggcaacaggaaugcgaaauguaccagagaaacaaacuagaggcauauuuggcgcaauagcggguuucauagaaaaugguugggagggaaugguggaugguugguacgguuucaggcaucaaaauuuugagggaagaggacaagcagcagaucucaaaagcacucaagcagcaaucgaucaaaucaaugggaagcugaaucgauugaucgggaaaaccaacgagaaauuccaucagauugaaaaagaauucucagaaguagaagggagaauucaggaccuugagaaauauguugaggacacaaaaauagaucucuggucauacaacgcggagcuucuuguugcccuggagaaccaacauacaauugaucuaacugacucagaaaugaacaaacuguuugaaaaaacaaagaagcaacugagggaaaaugcugaggauaugggcaaugguuguuucaaaauauaccacaaaugugacaaugccugcauaggaucaaucagaaauggaacuuaugaccacuauguauacagggaugaagcauuaaacaaccgguuccagaucaagggaguugagcugaagucaggguacaaagauuggauccuauggauuuccuuugccauaucauguuuuuugcuuuguguugcuuuguugggguucaucaugugggccugccaaaagggcaacauuaggugcaacauuugcauuuga

SEQ ID NO: 42062 - RNA, 1701 nt, Artificial Sequence; identical to SEQ ID NO: 42060
  derived and/or modified CDS sequence (wt) from hemagglutinin__InfluenzaA__AGL09799

SEQ ID NO: 42063 - RNA, 1701 nt, Artificial Sequence
  derived and/or modified CDS sequence (wt) from hemagglutinin__InfluenzaA__AGL09800
augaagacuaucauugcuuugagcuacauucuaugucugguuuucgcucaaaaacuuccuggaaaugacaauagcacggcaacgcugugccuugggcaccaugcaguaccaaacggaacgauagugaaaacaaucacgaaugaccgaauugaaguuacuaaugcuacugagcugguucagaauuccucaauaggugaaauaugcgacaguccucaucagauccuugauggagaaaacugcacacuaauagaugcucuauugggagacccucagugugauggcuuucaaaauaagaaaugggaccuuuuuguugaacgaagcaaagccuacagcaacuguuacccuuaugaugugccggauuaugccucccuuaggucacuaguugccucuuccggcacacuggaguuuaacaaugaaagcuucaauugggcuggagucacucaaaacggaacaaguucugcuugcauaaggggaucuaauaguaguuucuuuaguagauuaaauugguugacccacuuaaacuucaaauacccagcauugaacgugacuaugccaaacaaugaacaauuugacaaauuguacauuugggggguucaccacccggguacggacaaggaccaaaucuuccuguaugcucaaucaucaggaagaaucacaguaucuaccaaaagaagccaacaagcuguaaucccgaauaucggaucuagacccagaauaaggaauaucccuagcagaauaagcaucuauuggacaauaguaaaaccgggagacauacuuuugauuaacagcacagggaaucuaauugcuccuagggguuacuucaaaauacgaagugggaaaagcucaauaaugagaucagaugcacccauuggcaaaugcaagucugaaugcaucacuccaaauggaagcauucccaaugacaaaccauuccaaaauguaaacaggaucacauacggggccugucccagauauguuaagcaaagcacucugaaauuggcaacaggaaugcgaaauguaccagagaaacaaacuagaggcauauuuggcgcaauagcggguuucauagaaaaugguugggagggaaugguggaugguugguacgguuucaggcaucaaaauucugagggaagaggacaagcagcagaucucaaaagcacucaagcagcaaucgaucaaaucaaugggaagcugaaucgauugaucgggaaaaccaacgagaaauuucaucagauugaaaaagaauucucagaaguagaagggagaauucaggaccucgagaaauauguugaggacacaaaaauagaucucuggucauacaacgcggagcuucuuguugcccuggagaaccaacauacaauugaucuaacugacucagaaaugaacaaacuguuugaaaaaacaaagaagcaacugagggaaaaugcugaggauaugggcaaugguuguuucaaaauauaccacaaaugugacaaugccugcauaggaucaaucagaaauggaacuuaugaccacgauguauacagggaugaagcauuaaacaaccgguuccagaucaagggaguugagcugaagucaggguacaaagauuggauccuauggauuuccuuugccauaucauguuuuuugcuuuguguugcuuuguugggguucaucaugugggccugccaaaagggcaacauuaggugcaacauuugcauuuga

SEQ ID NO: 42064 - RNA, 1701 nt, Artificial Sequence
  derived and/or modified CDS sequence (wt) from hemagglutinin__InfluenzaA__AGL09801
augaagacuaucauugcuuugagcuacauucuaugucugguuuucgcucaaaaacuuccuggaaaugacaauagcacggcaacgcugugccuugggcaccaugcaguaccaaacggaacgauagugaaaacaaucacgaaugaccgaauugaaguuacuaaugcuacugagcugguucagaauuccucaauaggugaaauaugcgacaguccucaucagauucuugauggagaaaacugcacacuaauagaugcucuauugggagacccucagugugauggcuuucaaaauaagaaaugggaccuuuuuguugaacgaagcaaagccuacagcaacuguuacccuuaugaugugccggauuaugccucccucaggucacuaguugcuucauccggcacacuggaguuuaacaaugaaagcuucaauuggacuggagucacucaaaacggaacaaguucugcuugcauaaggagaucuaauaguaguuucuuuaguagauuaaauugguugacccacuuaaacuucaaauacccagcauugaacgugacuaugccaaacaaugaacaauuugacaaauuguacauuugggggguucaccacccagguacggacaaggaccaaaucuuccuguaugcucaaucaucaggaagaaucacaguaucuaccaaaagaagccaacaagcuguaaucccaaauaucggaucuagacccagaauaaggaauaucccuagcagaauaagcaucuauuggacaauaguaaaaccgggagacauacuuuugauuaacagcacagggaaucuaauugcuccuagggguuacuucaaaauacgaagugggaaaagcucaauaaugagaucagaugcacccauuggcaaaugcaagucugaaugcaucacuccaaauggaagcauucccaaugacaaaccauuccaaaauguaaacaggaucacauacggggccugucccagauauguuaagcaaagcacucugaaauuggcaacaggaaugcgaaauguaccagagaaacaaacuagaggcauauuuggcgcaauagcagguuucauagaaaaugguugggagggaaugguggaugguugguacgguuucaggcaucaaaauucugagggaagaggacaagcagcagaucucaaaagcacccaagcagcaaucgaucaaaucaaugggaagcugaaucgauugaucgggaaaaccaacgagaaauuccaucagauugaaaaagaauucucagaaguagaagggagaauucaggaccuugagaaauauguugaggacacuaaaauagaucucuggucauacaacgcggagcuucuuguugcccuggagaaccaacauacaauugaucuaacugacucagaaaugaacaaacuguuugaaaaaacaaagaagcaacugagggaaaaugcugaggauaugggcaaugguuguuucaaaauauaccacaaaugugacaaugccugcauaggaucaauaagaaauggaacuuaugaccacaauguguacagggaugaagcauuaaacaaccgguuccagaucaagggaguugagcugaagucaggguacaaagauuggauccuauggauuuccuuugccauaucauguuuuuugcuuuguguugcuuuguugggguucaucaugugggccugccaaaagggcaacauuaggugcaacauuugcauuuga

SEQ ID NO: 42065 - RNA, 1701 nt, Artificial Sequence
  derived and/or modified CDS sequence (wt) from hemagglutinin__InfluenzaA__AGL09802
augaagacuaucauugcuuugagcuacauucuaugucugguuuucgcucaaaaacuuccuggaaaugacaauagcacggcaacgcugugccuugggcaccaugcaguaccaaacggaacgauagugaaaacaaucacgaaugaccgaauugaaguuacuaaugcuacugagcugguucagaauuccucaauaggugaaauaugcgacaguccucaucagauucuugauggagaaaacugcacacuaauagaugcucuauugggagacccucagugugauggcuuucaaaauaagaaaugggaccuuuuuguugaacgaagcaaagccuacagcaacuguuacccuuaugaugugccggauuaugccucccucaggucacuaguugccucauccggcacacuggaguuuaacaaugaaagcuucaauuggacuggagucacucaaaacggaacaaguucugcuugcauaaggagaucuaauaguaguuucuuuaguagauuaaauugguugacccacuuaaacuucaaauacccagcauugaacgugacuaugccaaacaaugaacaauuugacaaauuguacauuugggggguucaccacccagguacggacaaggaccaaaucuuccuguaugcucaaucaucaggaagaaucacaguaucuaccaaaagaagccaacaagcuguaaucccaaauaucggaucuagacccagaauaaggaauaucccuagcagaauaagcaucuauuggacaauaguaaaaccgggagacauacuuuugauuaacagcacagggaaucuaauugcuccuagggguuacuucaaaauacgaagugggaaaagcucaauaaugagaucagaugcacccauuggcaaaugcaagucugaaugcaucacuccaaauggaagcauucccaaugacaaaccauuccaaaauguaaacaggaucacauacggggccugucccagauauguuaagcaaagcacucugaaauuggcaacaggaaugcgaaauguaccagagaaacaaacuagaggcauauuuggcgcaauagcagguuucauagaaaaugguugggagggaaugguggaugguugguacgguuucaggcaucaaaauucugagggaagaggacaagcagcagaucucaaaagcacccaagcagcaaucgaucaaaucaaugggaagcugaaucgauugaucgggaaaaccaacgagaaauuccaucagauugaaaaagaauucucagaaguagaagggagaauucaggaccuugagaaauauguugaggacacuaaaauagaucucuggucauacaacgcggagcuucuuguugcccuggagaaccaacauacaauugaucuaacugacucagaaaugaacaaacuguuugaaaaaacaaagaagcaacugagggaaaaugcugaggauaugggcaaugguuguuucaaaauauaccacaaaugugacaaugccugcauaggaucaauaagaaauggaacuuaugaccacaauguguacagggaugaagcauuaaacaaccgguuccagaucaagggaguugagcugaagucaggguacaaagauuggauccuauggauuuccuuugccauaucauguuuuuugcuuuguguugcuuuguugggguucaucaugugggccugccaaaagggcaacauuaggugcaacauuugcauuuga

SEQ ID NO: 42066 - RNA, 1701 nt, Artificial Sequence
  derived and/or modified CDS sequence (wt) from hemagglutinin__InfluenzaA__AGL09803
augaagacuaucauugcuuugagcuacauucuaugucugguuuucgcucaaaaacuuccuggaaaugacaauagcacggcaacgcugugccuugggcaccaugcaguaccaaacggaacgauagugaaaacaaucacgaaugaccgaauugaaguuacuaaugcuacugagcugguucagaauuccucaauaggugaaauaugcgacaguccucaucagauccuugauggagaaaacuguacacuaauagaugcucuauugggagacccucagugugauggcuuucaaaauaagaaaugggaccuuuuuguugaacgaagcaaagccuacagcaacuguuacccuuaugaugugccggauuaugccucccucaggucacuaguugccucauccggcacacuggaauuuaacaaugaaagcuucaauuggacuggagucacucaaaacggaacaaguucugcuugcauaaggagaucuaauaguaguuucuuuaguagauuaaauugguugacccacuuaaacuucaaauacccagcauugaacgugacuaugccaaacaaugaacaauuugacaaauuguacauuugggggguucaccacccggguacggacaaggaccaaaucuuccuguaugcucaaucaucaggaagaaucacaguaucuaccaaaagaagccaacaagcuguaaucccgaauaucggaucuagacccagaauaaggaauaucccuagcagaauaagcaucuauuggacaauaguaaaaccaggagacauacuuuugauuaacagcacagggaaucuaauugcuccuagggguuacuucaaaauacgaagugggaaaagcucaauaaugagaucagaugcacccauuggcaaaugcaagucugaaugcaucacuccaaauggaagcauuccaaaugacaaaccauuccaaaauguaaacaggaucacauacggggccugucccagauauguuaagcaaagaacucugaaauuggcaacaggaaugcgaaacguaccagagaaacaaacuagaggcauauuuggcgcaauagcggguuucauagaaaaugguugggagggaaugguggaugguugguacgguuucaggcaucaaaauucugaaggaagaggacaagcagcagaucucaaaagcacucaagcagcaaucgaucaaaucaaugggaagcugaaucgauugaucgggaaaaccaacgagaaauuccaucagauugaaaaagaauucucagaaguagaagggagaauucaggaccuugagaaauauguugaggacacuaaaauagaucucuggucauacaacgcggagcuucuuguugcccuggagaaccaacauacaauugaucugacugacucagaaaugaacaaacuguuugaaaaaacaaagaagcaacugagggaaaaugcugaggauaugggcaaugguuguuucaaaauauaccacaaaugugacaaugccugcauaggaucaaucagaaauggaacuuaugaccacgauguauacagggaugaagcauuaaacaaccgguuccagaucaagggaguugagcugaagucaggguacaaagauuggauccuauggauuuccuuugccauaucauguuuuuugcuuuguguugcuuuguugggguucaucaugugggccugccaaaagggcaacauuaggugcaacauuugcauuuga

SEQ ID NO: 42067 - RNA, 1701 nt, Artificial Sequence; identical to SEQ ID NO: 41905
  derived and/or modified CDS sequence (wt) from hemagglutinin__InfluenzaA__AGL09804

SEQ ID NO: 42068 - RNA, 1701 nt, Artificial Sequence
  derived and/or modified CDS sequence (wt) from hemagglutinin__InfluenzaA__AGL09805
augaagacuaucauugcuuugagcuacauucuaugucugguuuucgcucaaaaacuuccuggaaaugacaauagcacggcaacgcugugccuugggcaccaugcaguaccaaacggaacgauagugaaaacaaucacgaaugaccaaauugaaguuacuaaugcuacugagcugguucagaauuccucaauaggugaaauaugcgacaguccucaucagauccuugauggagaaaacugcacacuaauagaugcucuauugggagacccucagugugauggcuuucaaaauaagaaaugggaccuuuuuguugaacgaagcaaagccuacagcaacuguuacccuuaugaugugccggauuaugccucccuuaggucacuaguugccucauccggcacacuggaguuuaacaaugaaagcuucaauugggcuggagucacucaaaacggaacaaguucugcuugcauaaggggaucuaauaguaguuucuuuaguagauuaaauugguugacccacuuaaacuucaaguacccagcauugaacgugacuaugccaaacaaugaacaauuugacaaauuguacauuugggggguucaccacccggguacggacaaggaccaaaucuuccuguaugcucaaucaucaggaagaaucacaguaucuaccaaaagaagccaacaagcuguaaucccgaauaucggaucuagacccagaauaaggaauaucccuagcagaauaagcaucuauuggacaauaguaaaaccgggagacauacuuuugauuaacagcacagggaaucuaauugcuccuagggguuacuucaaaauacgaagugggaaaagcucaauaaugagaucagaugcacccauuggcaaaugcaagucugaaugcaucacuccaaauggaagcauucccaaugacaaaccauuccaaaauguaaacaggaucacauacggggccugucccagauauguuaagcaaagcacucugaaauuggcaacaggaaugcgaaauguaccagagaaacaaacuagaggcauauuuggcgcaauagcggguuucauagaaaaugguugggagggaaugguggaugguugguacgguuucaggcaucaaaauucugagggaagaggacaagcagcagaucucaaaagcacucaagcagcaaucgaucaaaucaaugggaagcugaaucgauugaucgggaaaaccaacgagaaauuccaucagauugagaaagaauucucagaaguagaagggagaauucaggaccuugagaaauauguugaggacacaaaaauagaucucuggucauacaacgcagagcuucuuguugcccuggagaaccaacauacaauugaucuaacugacucagaaaugaacaaacuguuugaaaaaacaaagaagcaacugagggaaaaugcugaggauaugggcaaugguuguuucaaaauauaccacaaaugugacaaugccugcauaggaucaaucagaaauggaacuuaugaccacgauguauacagggaugaagcauuaaacaaccgguuccagaucaagggaguugagcugaagucaggguacaaagauuggauccuauggauuuccuuugccauaucauguuuuuugcuuuguguugcuuuguugggguucaucaugugggccugccaaaagggcaacauuaggugcaacauuugcauuuga

SEQ ID NO: 42069 - RNA, 1701 nt, Artificial Sequence; identical to SEQ ID NO: 42038
  derived and/or modified CDS sequence (wt) from hemagglutinin__InfluenzaA__AGL09806

SEQ ID NO: 42070 - RNA, 1701 nt, Artificial Sequence; identical to SEQ ID NO: 42068
  derived and/or modified CDS sequence (wt) from hemagglutinin__InfluenzaA__AGL09807

SEQ ID NO: 42071 - RNA, 1701 nt, Artificial Sequence
  derived and/or modified CDS sequence (wt) from hemagglutinin__InfluenzaA__AGL09808
augaagacuaucauugcuuugagcuacauucuaugucugguuuucgcucaaaaacuuccuggaaaugacaauagcacggcaacgcugugccuugggcaccaugcaguaccaaacggaacgauagugaaaacaaucacgaaugaccaaauugaaguuacuaaugcuacugagcugguucagaauuccucaauaggugaaauaugcgacaguccucaucagauccuugauggagaaaacugcacacuaauagaugcucuauugggagacccucagugugauggcuuucaaaauaagaaaugggaccuuuuuguugaacgaagcaaagccuacagcaacuguuacccuuaugaugugccggauuaugccucccuuaggucacuaguugccucauccggcacacuggaguuuaacaaugaaagcuucaauugggcuggagucacucaaaacggaacaaguucugcuugcauaaggggaucuaauaguaguuucuuuaguagauuaaauugguugacccacuuaaacuucaaguacccagcauugaacgugacuaugccaaacaaugaacaauuugacaaauuguacauuugggggguucaccacccggguacggacaaggaccaaaucuuccuguaugcucaaucaucaggaagaaucacaguaucuaccaaaagaagccaacaagcuguaaucccgaaugucggaucuagacccagaauaaggaauaucccuagcagaauaagcaucuauuggacaauaguaaaaccgggagacauacuuuugauuaacagcacagggaaucuaauugcuccuagggguuacuucaaaauacgaagugggaaaagcucaauaaugagaucagaugcacccauuggcaaaugcaagucugaaugcaucacuccaaauggaagcauucccaaugacaaaccauuccaaaauguaaacaggaucacauacggggccugucccagauauguuaagcaaagcacucugaaauuggcaacaggaaugcgaaauguaccagagaaacaaacuagaggcauauuuggcgcaauagcggguuucauagaaaaugguugggagggaaugguggaugguugguacgguuucaggcaucaaaauucugagggaagaggacaagcagcagaucucaaaagcacucaagcagcaaucgaucaaaucaaugggaagcugaaucgauugaucgggaaaaccaacgagaaauuccaucagauugagaaagaauucucagaaguagaagggagaauucaggaccuugagaaauauguugaggacacaaaaauagaucucuggucauacaacgcagagcuucuuguugcccuggagaaccaacauacaauugaucuaacugacucagaaaugaacaaacuguuugaaaaaacaaagaagcaacugagggaaaaugcugaggauaugggcaaugguuguuucaaaauauaccacaaaugugacaaugccugcauaggaucaaucagaaauggaacuuaugaccacgauguauacagggaugaagcauuaaacaaccgguuccagaucaagggaguugagcugaagucaggguacaaagauuggauccuauggauuuccuuugccauaucauguuuuuugcuuuguguugcuuuguugggguucaucaugugggccugccaaaagggcaacauuaggugcaacauuugcauuuga

SEQ ID NO: 42072 - RNA, 1701 nt, Artificial Sequence
  derived and/or modified CDS sequence (wt) from hemagglutinin__InfluenzaA__AGL09809
augaaggcaauacuaguaguuaugcuauauacauuugcaaccgcaaaugcagacacauuauguauagguuaucaugcgaacaauucaacagacacuguagacacaguacuagaaaagaauguaacaguaacacacucuguuaaucuucuagaagacaagcauaacgggaaacuaugcaaacuaagagggguagccccauugcauuuggguaaauguaacauugcuggcuggauccugggaaauccagagugugaaucacucuccacagcaagcucaugguccuacauuguggaaacaucugguucagacaauggaacguguuacccaggagauuucaucgauuaugaggagcuaagagagcaauugagcucagugucaucauuugaaagguuugagauauuccccaaaacaaguucauggccaaaucaugacucgaacaaagguguaacggcagcauguccucaugcuggagcaaaaggcuucuacaaaaauuuaauauggcuaguuaaaaaaggaaauucauacccaaagcucagcauauccuacauuaaugacaaagggaaagaaguccucgugcuauggggcauucaccauccaucuacuacugcugaccaacaaagucucuaucagaaugcagauacauauguuuuuguggggacaucaagauacagcaagaaguucaagccggaaauagcaauaagacccaaagugagggaucaagaagggagaaugaacuauuacuggacacuaguagagccgggagacaaaauaacauucgaagcaacuggaaaucuagugguaccgagauaugcauuugcaauggaaagaaaugcuggaucugguauuaucauuucagauacaccaguucacgauugcaauacaacuugucagacacccaagggugcuauaaacaccagccucccauuucagaauauacauccgaucacaauuggaaaauguccaaaauauguaaaaagcacaaaauugagacuggccacaggauugaggaaugucccgucuauucaaucuagaggccuauuuggggccauugcuggcuucauugaagggggguggacagggaugguagauggaugguacgguuaucaccaucaaaaugagcaggggucaggauaugcagccgaccugaagagcacacagaaugccauugacaagauuacuaacaaaguaaauucuguuauugaaaagaugaauacacaguucacagcaguagguaaagaguucaaccaccuggaaaaaagaauagagaauuuaaauaaaaaaguugaugaugguuuccuggacauuuggacuuacaaugccgaacuguugguucuauuggaaaaugaaagaacuuuggacuaccacgauucaaaugugaagaacuuauaugaaaagguaagaaaccaguuaaaaaacaaugccaaggaaauuggaaauggcugcuuugaauuuuaccacaaaugcgauaacacgugcauggaaagugucaaaaaugggacuuaugauuacccaaaauacucagaggaagcaaaauuaaacagagaagaaauagaugggguaaagcuggaaucaacaaggauuuaccagauuuuggcgaucuauucaacugccgcuaguucauugguacugguagucucccugggggcaaucaguuuuuggaugugcucuaaugggucucuacaguguagaauauguauuuaa

SEQ ID NO: 42073 - RNA, 1701 nt, Artificial Sequence
  derived and/or modified CDS sequence (wt) from hemagglutinin__InfluenzaA__AGL09810
augaagacuaucauugcuuugagcuacauucuaugucugguuuucgcucaaaaacuuccuggaaaugacaauagcacggcaacgcugugccuugggcaccaugcaguaccaaacggaacgauagugaaaacaaucacgaaugaccgaauugaaguuacuaaugcuacugagcugguucagaauuccucaauaggagaaauaugcgacaguccucaucagauccuugauggagaaaacugcacacuaauagaugcucuauugggagacccucagugugauggcuuucaaaauaagaaaugggaccuuuuuguugaacgaagcaaagccuacagcaacuguuacccuuaugaugugccggauuaugccucccuuaggucacuaguugccucauccggcacacuggaguuuagcaaugaaagcuucaauuggacuggagucacucaaaacggaacaaguucugcuugcauaaggagaucuaauaguaguuucuuuaguagauuaaauugguugacccacuuaaacuucaaauacccagcauugaacgugacuaugccaaacaaugaacaauuugacaaauuguacauuugggggguucaccacccggguacggacaaggaccaaaucuuccuguaugcucaaucaucaggaagaaucacaguaucuaccaaaagaagccaacaagcuguaaucccgaauaucggaucuagacccagaauaaggaauaucccuagcagaauaagcaucuauuggacaauaguaaaaccgggagacauacuuuugauuaacagcacagggaaucuaauugcuccuagggguuacuucaaaauacgaagugggaaaagcucaauaaugagaucagaugcacccauuggcaaaugcaagucugaaugcaucacuccaaauggaagcauucccaaugacaaaccauuccaaaauguaaacaggaucacauacgggaccugucccagauauguuaagcaaagcacucugaaauuggcaacaggaaugcgaaauguaccagagaaacaaacuagaggcauauuuggcgcaauagcggguuucauagaaaaugguugggagggaaugguggaugguugguacgguuucaggcaucaaaauucugagggaagaggacaagcagcagaucucaaaagcacucaagcagcaaucgaucaaaucaaugggaagcugaaucgauugaucgggaaaaccaacgagaaauuccaucagauugaaaaagaauucucagaaguagaagggagaauucaggaccuugagaaauauguugaggacacuaaaauagaucucuggucauacaacgcggagcuucuuguugcccuggagaaccaacauacaauugaucuaacugacucagaaaugaacaaacuguuugaaaaaacaaagaagcaacugagggaaaaugcugaggauaugggcaaugguuguuucaaaauauaccacaaaugugacaaugccugcaugggaucaaucagaaauggaacuuaugaccacgauguguacagggaugaagcauuaaacaaccgguuccagaucaagggaguugagcugaagucaggguacaaagauuggauccuauggauuuccuuugccauaucauguuuuuugcuuuguguugcuuuguugggguucaucaugugggccugccaaaagggcaacauuaggugcaacauuugcauuuga

SEQ ID NO: 42074 - RNA, 1701 nt, Artificial Sequence; identical to SEQ ID NO: 41879
  derived and/or modified CDS sequence (wt) from hemagglutinin__InfluenzaA__AGL09811

SEQ ID NO: 42075 - RNA, 1701 nt, Artificial Sequence
  derived and/or modified CDS sequence (wt) from hemagglutinin__InfluenzaA__AGL09812
augaagacuaucauugcuuugagcuacauucuaugucugguuuucgcucaaaaacuuccuggaaaugacaauagcacggcaacgcugugccuugggcaccaugcaguaccaaacggaacgauagugaaaacaaucacgaaugaccgaauugaaguuacuaaugcuacugagcugguucagaauuccucaauaggugaaauaugcgacaguccucaucagauccuugauggagaaaacugcacacuaauagaugcucuauugggagacccucagugugauggcuuucaagauaagaaaugggaccuuuuuguugaacgaagcaaagccuacagcaacuguuacccuuaugaugugccggauuaugccucccuuaggucacuaguugccucuuccggcacacuggaguuuaacaaugaaagcuucaauugggcuggagucacucaaaacggaacaaguucugcuugcauaaggggaucuaauaguaguuucuuuaguagauuaaauugguugacccacuuaaacuucaaauacccagcauugaacgugacuaugccaaacaaugaacaauuugacaaauuguacauuugggggguucaccacccggguacggacaaggaccaaaucuuccuguaugcucaaucaucaggaagaaucacaguaucuaccaaaagaagccaacaagcuguaaucccgaauaucggaucuagacccagaauaaggaauaucccuagcagaauaagcaucuauuggacaauaguaaaaccgggagacauacuuuugauuaacagcacagggaaucuaauugcuccuagggguuacuucaaaauacgaagugggaaaagcucaauaaugagaucagaugcacccauuggcaaaugcaagucugaaugcaucacuccaaauggaagcauucccaaugacaaaccauuccaaaauguaaacaggaucacauacggggccugucccagauauguuaagcaaagcacucugaaauuggcaacaggaaugcgaaauguaccagagaaacaaacuagaggcauauuuggcgcaauagcggguuucauagaaaaugguugggagggaaugguggaugguugguacgguuucaggcaucaaaauucugagggaagaggacaagcagcagaucucaaaagcacucaagcagcaaucgaucaaaucaaugggaagcugaaucgauugaucgggaaaaccaacgagaaauuccaucagauugaaaaagaauucucagaaguagaagggagaauucaggaccucgagaaauauguugaggacacaaaaauagaucucuggucauacaacgcggagcuucuuguugcccuggagaaccaacauacaauugaucuaacugacucagaaaugaacaaacuguuugaaaaaacaaagaagcaacugagggaaaaugcugaggauaugggcaaugguuguuucaaaauauaccacaaaugugacaaugccugcauaggaucaaucagaaauggaacuuaugaccacgauguauacagggaugaagcauuaaacaaccgguuccagaucaagggaguugagcugaagucaggguacaaagauuggauccuauggauuuccuuugccauaucauguuuuuugcuuuguguugcuuuguugggguucaucaugugggccugccaaaagggcaacauuaggugcaacauuugcauuuga

SEQ ID NO: 42076 - RNA, 1701 nt, Artificial Sequence
  derived and/or modified CDS sequence (wt) from hemagglutinin__InfluenzaA__AGL09813
augaagaccaucauugcuuugagcuacauucuaugucuaguuuuugcucaagaacuuccuggaaaugacgacagcacggcaacgcugugccuugggcaccaugcagugccaaacggaacgauagugaaaacaaucacgaaugaccaaauugaaguuacuaaugcuacugaacugguucagaguuccucaacaggugaaauaugcaacaguccucaucagauccuugauggagaaaacugcacacuaauagaugcucuauugggagacccucagugugauggcuuccaaaacaagaaaugggaccuuuuuguugaacgaagcaaagcccacagcaacuguuacccuuaugaugugccggauuaugccucccuuaggucacuaguugccucauccggcacacuggaguuuaacaaugaaagcuucaauuggacuggagucacucaaaacggaacaagcucugcuugcauaaggagaucuaauaauaguuucuuuaguagauugaauugguugacccacuuaaacuucaaauacccagcauugaacgugacuaugccaaacaaugaacaauuugacaaauuguacauuugggggguucaccacccggguacggacaaggaccaaaucuuccuguaugcucaagcaucaggaagaaucacaguaucuaccaaaagaagccaacaagcuguaauuccgaauaucggaucuagacccaggguaaggaauaucccuagcagaguaagcaucuauuggacaauaguaaaaccgggagacauacuuuugauuaacagcacagggaaucuaauugcuccuagggguuacuucaaaauacgaagugggaaaagcucaauaaugagaucagaugcacccauuggcaaaugcaauucugcaugcaucacuccaaauggaagcauucccaaugacaaaccauuccaaaauguaaacaggaucacauacggggccugucccagauaugucaagcaaaacacucugaaauuggcaacaggaaugagaaauguaccagagaaacaaacuagaggcauauuuggcgcaauagcggguuucauagaaaaugguugggagggaaugguggaugguugguacgguuucaggcaucaaaauucugagggaaggggacaagcagcagaucucaaaagcacucaagcagcaaucgaucaaaucaaugggaagcugaauagauugaucgggaaaaccaacgagaaauuccaucagauugaaaaagaauucucagaagucgaagggagaauucaggaccuugagaaauauguugaggacacuaaaauagaucucuggucauacaacgcggagcuucuuguugcccuggagaaccaacacacaauugaucuaacugacucagaaaugaacaaacuguuugaaaaaacaaagaagcaacugagggaaaaugcugaggauaugggcaaugguuguuucaaaauauaccacaaaugugacaaugccugcauaggaucaaucagaaauggaacuuaugaucacgauguguacagagaugaagcauuaaacaaccgauuccagaucaagggaguugagcugaagucaggauacaaagauuggauccuauggauuuccuuugccauaucauguuuuuugcuuuguguugcuuuguugggguucaucaugugggccugccaaaaaggcaacauuaggugcaacauuugcauuuga

SEQ ID NO: 42077 - RNA, 1701 nt, Artificial Sequence; identical to SEQ ID NO: 41901
  derived and/or modified CDS sequence (wt) from hemagglutinin__InfluenzaA__AGL09814

SEQ ID NO: 42078 - RNA, 1701 nt, Artificial Sequence
  derived and/or modified CDS sequence (wt) from hemagglutinin__InfluenzaA__AGL09815
augaagacuaucauugcuuugagcuacauucuaugucugguuuucgcucaaaaacuuccuggaaaugacaauagcacggcaacgcugugccuugggcaccaugcaguaccaaacggaacgauagugaaaacaaucacgaaugaccgaauugaaguuacuaaugcuacugagcugguucagaauuccucaauaggugaaauaugcgacaguccucaucagauccuugauggagaaaacuguacacuaauagaugcucuauugggagacccucagugugauggcuuucaaaauaagaaaugggaccuuuuuguugaacgaagcaaagccuacagcaacuguuacccuuaugaugugccggauuaugccucccuuaggucacuaguugccucauccggcacacuggaguuuaacaaugaaagcuucaauuggacuggagucacucaaaacggaacaaguucugcuugcauaaggagaucuaauaguaguuucuuuaguagauuaaauugguugacccacuuaaacuucaaauacccagcauugaacgugacuaugccaaacaaugaacaauuugacaaauuguacauuugggggguucaccacccggguacggacaaggaccaaaucuuccuguaugcucaaucaucaggaagaaucacaguaucuaccaaaagaagccaacaagcuguaaucccgaauaucggaucuagacccagaauaaggaguaucccuagcagaauaagcaucuauuggacaauaguaaaaccaggagacauacuuuugauuaacagcacagggaaucuaauugcuccuagggguuacuucaaaauacgaagugggaaaagcucaauaaugagaucagaugcacccauuggcaaaugcaagucugaaugcaucacuccaaauggaagcauuccaaaugacaaaccauuccaaaauguaaacaggaucacauacggggccugucccagauauguuaagcaaagcacucugaaauuggcaacaggaaugcgaaauguaccagagaaacaaacuagaggcauauuuggcgcaauagcggguuucauagaaaaugguugggagggaaugguggaugguugguacgguuucaggcaucaaaauucugagggaagaggacaagcagcagaucucaaaagcacucaagcagcaaucgaucaaaucaaugggaagcugaaucgauugaucgggaaaaccaacgagaaauuccaucagauugaaaaagaauucucagaaguagaagggagaauucaggaccuugagaaauauguugaggacacuaaaauagaucucuggucauacaacgcggagcuucuuguugcccuggagaaccaacauacaauugaucuaacugacucagaaaugaacaaacuguuugaaaaaacaaagaagcaacugagggaaaaugcugaggauaugggcaaugguuguuucaaaauauaccacaaaugugacaaugccugcauaggaucaaucagaaauggaacuuaugaccacgauguauacagggaugaagcauuaaacaaccgguuccagaucaagggaguugagcugaagucaggguacaaagauuggauccuauggauuuccuuugccauaucauguuuuuugcuuuguguugcuuuguugggguucaucaugugggccugccaaaagggcaacauuaggugcaacauuugcauuuga

SEQ ID NO: 42079 - RNA, 1701 nt, Artificial Sequence; identical to SEQ ID NO: 41899
  derived and/or modified CDS sequence (wt) from hemagglutinin__InfluenzaA__AGL09816

SEQ ID NO: 42080 - RNA, 1701 nt, Artificial Sequence
  derived and/or modified CDS sequence (wt) from hemagglutinin__InfluenzaA__AGL09817
augaaaaccaucauugcuuugagcuacauucuuugucuaguuuucgcucaagaacuuccuggaaaugacgacagcacggcaacgcugugccuugggcaccaugcagugccaaacggaacgauagugaaaacaaucacgaaugaccaaauugaaguuacuaaugcuacugaacugguucagaguuccucaacaggugaaauaugcaacaguccccaucagauccuugauggagaaaacugcacacuaauagaugcucuauugggagacccucagugugauggcuuccaaaacaagaaaugggaccuuuuuguugaacgaagcaaagcccacagcaacuguuacccuuaugaugugccggauuaugccucccuuaggucacuaguugccucauccggcacacuggaguuuaacagugaaagcuucaauuggacuggagucacucaaaacggaacaagcucugcuugcauaaggagaucuaauaauaguuucuuuaguagauugaauugguugacccacuuaaacuucaaauacccagcauugaacgugacuaugccaaacaaugaacaauuugacaaauuguacauuugggggguucaccacccggguacggacaaggaccaaaucuuccuguaugcucaagcaucaggaagaaucacaguaucuaccaaaagaagccaacaagcuguaauuccgaauaucggaucuagacccagaguaaggaauaucccuagcagaguaagcaucuauuggacaauaguaaaaccaggagacauacuuuugauuaacagcacagggaaucuaauugcuccuagggguuacuucaaaauacgaagugggaaaagcucaauaaugagaucagaugcacccauuggcaaaugcaauucugcaugcaucacuccaaauggaagcauucccaaugacaaaccauuccaaaauguaaacaggaucacauacggggccugucccagauaugucaagcaaaacacucugaaauuggcaacaggaaugagaaauguaccagagaaacaaacuagaggcauauuuggcgcaauagcggguuucauagaaaaugguugggagggaaugguggaugguugguacgguuucaggcaucaaaauucugagggaaggggacaagcagcagaucucaaaagcacucaagcagcaaucgaucaaaucaaugggaagcugaauagauugaucgggaaaaccaacgagaaauuccaucagauugaaaaagaauucucagaagucgaagggagaauucaggaccuugagaaauauguugaggacacuaaaauagaucucuggucauacaacgcggagcuucuuguugcccuggagaaccaacacacaauugaucuaacugacucagaaaugaacaaacuguuugaaaaaacaaagaagcaacugagggaaaaugcugaggauaugggcaaugguuguuucaaaauauaccacaaaugugacaaugccugcauaggaucaaucagaaauggaacuuaugaucacgauguguacagagaugaagcauuaaacaaccgauuccagaucaaaggaguugagcugaagucaggguacaaagauuggauccuauggauuuccuuugccauaucauguuuuuugcuuuguguugcuuuguugggguucaucaugugggccugccaaaaaggcaacauuaggugcaacauuugcauuuga

SEQ ID NO: 42081 - RNA, 1701 nt, Artificial Sequence; identical to SEQ ID NO: 41901
  derived and/or modified CDS sequence (wt) from hemagglutinin__InfluenzaA__AGL09818

SEQ ID NO: 42082 - RNA, 1701 nt, Artificial Sequence
  derived and/or modified CDS sequence (wt) from hemagglutinin__InfluenzaA__AGL09819
augaagacuaucauugcuuugagcuacauucuaugucugguuuucgcucaaaaacuuccuggaaaugacaauagcacggcaacgcugugccuugggcaccaugcaguaccaaacggaacgauagugaaaacaaucacgaaugaccgaauugaaguuacuaaugcuacugagcugguucagaauuccucaauaggugaaauaugcgacaguccucaucagauccuugauggagaaaacugcacacuaauagaugcucuauugggagacccucagugugauggcuuucaaaauaagaaaugggaccuuuuuguugaacgaagcaaagccuacagcaacuguuacccuuaugaugugccggauuaugccucccuuaggucacuaguugccucuuccggcacacuggaguuuaacaaugaaagcuucaauugggcuggagucacucaaaacggaacaaguucugcuugcauaaggggaucuaauaguaguuucuuuaguagauuaaauugguugacccacuuaaacuucaaauacccagcauugaacgugacuaugccaaacaaugaacaauuugacaaauuguacauuugggggguucaccacccggguacggacaaggaccaaaucuuccuguaugcucaaucaucaggaagaaucacaguaucuaccaaaagaagccaacaagcuguaaucccgaauaucggaucuagacccagaauaaggaauaucccuagcagaauaagcaucuauuggacaauaguaaaaccgggagacauacuuuugauuaacagcacagggaaucuaauugcuccuagggguuacuucaaaauacgaagugggaaaagcucaauaaugagaucagaugcacccauuggcaaaugcaagucugaaugcaucacuccaaauggaagcauucccaaugacaaaccauuccaaaauguaaacaggaucacauacggggccugucccagauauguuaagcaaagcacucugaaauuggcaacaggaaugcgaaauguaccagagaaacaaacuagaggcauauuuggcgcaauagcggguuucauagaaaaugguugggagggaaugguggaugguugguacgguuucaggcaucaaaauucugagggaagaggacaagcagcagaucucaaaagcacucaagcagcaaucgaucaaaucaaugggaagcugaaucgauugaucgggaaaaccaacgagaaauuccaucagauugaaaaagaauucucagaaguagaagggagaauucaggaccucgagaaauauguugaggacacaaaaauagaucucuggucauacaacgcggagcuucuuguugcccuggagaaccaacauacaauugaucuaacugacucagaaaugaacaaacuguuugaaaaaacaaagaagcaacugagggaaaaugcugaggauaugggcaaugguuguuucaaaauauaucacaaaugugacaaugccugcauaggaucaaucagaaauggaacuuaugaccacgauguauacagggaugaagcauuaaacaaccgguuccagaucaagggaguugagcugaagucaggguacaaagauuggauccuauggauuuccuuugccauaucauguuuuuugcuuuguguugcuuuguugggguucaucaugugggccugccaaaagggcaacauuaggugcaacauuugcauuuga

SEQ ID NO: 42083 - RNA, 1701 nt, Artificial Sequence
  derived and/or modified CDS sequence (wt) from hemagglutinin__InfluenzaA__AGL09820
augaagacuaucauugcuuugagcuacauucuaugucugguuuucgcucaaaaacuuccuggaaaugacaauagcacggcaacgcugugccuugggcaccaugcaguaccaaacggaacgauagugaaaacaaucacgaaugaccaaauugaaguuacuaaugcuacugagcugguucagaauuccucaauaggugaaauaugcgacaguccucaucagauccuugauggagaaaacugcacacuaauagaugcucuauugggagacccucagugugauggcuuucaaaauaagaaaugggaccuuuuuguugaacgaagcaaagccuacagcaacuguuacccuuaugaugugccggauuaugccucccuuaggucacuaguugccucauccggcacacuggaguuuaacaaugaaagcuucaauuggacuggagucacucaaaacggaacaaguucugcuugcauaaggggaucuaauaguaguuucuuuaguagauuaaauugguugacccacuuaaacuucaaguacccagcauugaacgugacuaugccaaacaaugaacaauuugacaaauuguacauuugggggguucaccacccggguacggacaaggaccaaaucuuccuguaugcucaaucaucaggaagaaucacagugucuaccaaaagaagccaacaagcuguaaucccgaauaucggaucuagacccagaauaaggaauaucccuagcagaauaagcaucuauuggacaauaguaaaaccgggagacauacuuuugauuaacagcacagggaaucuaauugcuccuagggguuacuucaaaauacgaagugggaaaagcucaauaaugagaucagaugcacccauuggcaaaugcaagucugaaugcaucacuccaaauggaagcauucccaaugacaaaccauuccaaaauguaaacaggaucacauacggggccugucccagauauguuaagcaaagcacucugaaauuggcaacaggaaugcgaaauguaccagagaaacaaacuagaggcauauuuggcgcaauagcggguuucauagaaaaugguugggagggaaugguggaugguugguacgguuucaggcaucaaaauucugagggaagaggacaagcagcagaucucaaaagcacucaagcagcaaucgaucaaaucaaugggaagcugaaucgauugaucgggaaaaccaacgagaaauuccaucagauugagaaagaauucucagaaauagaagggagaauucaggaccuugagaaauauguugaggacacaaaaauagaucucuggucauacaacgcagagcuucuuguugcccuggagaaccaacauacaauugaucuaacugacucagaaaugaacaaacuguuugaaaaaacaaagaagcaacugagggaaaaugcugaggauaugggcaaugguuguuucaaaauauaccacaaaugugacaaugccugcauaggaucaaucagaaauggaacuuaugaccacgauguauacagggaugaagcauuaaacaaccgguuccagaucaagggaguugagcugaagucaggguacaaagauuggauccuauggauuuccuuugccauaucauguuuuuugcuuuguguugcuuuguugggguucaucaugugggccugccaaaagggcaacauuaggugcaacauuugcauuuga

SEQ ID NO: 42084 - RNA, 1701 nt, Artificial Sequence
  derived and/or modified CDS sequence (wt) from hemagglutinin__InfluenzaA__AGL09821
augaagacuaucauugcuuugagcuacauucuaugucugguuuucgcucaaaaacuuccuggaaaugacaauagcacggcaacgcugugccuugggcaccaugcaguaccaaacggaacgauagugaaaacaaucacgaaugaccgaauugaaguuacuaaugcuacugagcugguucagaauuccucaauaggugaaauaugcgacaguccucaucagauccuugauggagaaaauugcacacuaauagaugcucuauugggagacccucagugugauggcuuucaaaauaagaaaugggaccuuuuuguugaacgaagcaaagccuacagcaacuguuacccuuaugaugugccggauuaugccucccuuaggucacuaguugccucauccggcacacuggaguuuaacaaugaaagcuucaauuggacuggagucacucaaaacggaacaaguucugcuugcauaaggagaucuaauaguaguuucuuuaguagauuaaauugguugacccacuuaaacuucaaauacccagcauugaacgugacuaugccaaacaaugaacaauuugacaaauuguacauuuggggaguucaccacccggguacggacaaggaccaaaucuuccuguaugcucaaucaucaggaagaaucacaguaucuaccaaaagaagccaacaagcuguaaucccaaauaucggaucuagacccagaauaaggaauaucccuagcagaauaagcaucuauuggacaauaguaaaaccgggagacauacuuuugauuaacagcacagggaaucuaauugcuccuagggguuacuucaaaauacgaagugggaaaagcucaauaaugagaucagaugcacccauuggcaaaugcaagucugaaugcaucacuccaaauggaagcauucccaaugacaaaccauuccaaaauguaaacaggaucacauacggggccugucccagauauguuaagcaaagcacucugaaauuggcaacaggaaugcgaaauguaccagagaaacaaacuagaggcauauuuggcgcaauagcggguuucauagaaaaugguugggagggaaugguggaugguugguacgguuucaggcaucaaaauucugagggaagaggacaagcagcagaucucaaaagcacucaagcagcaaucgaucaaaucaaugggaagcugaaucgauugaucgggaaaaccaacgagaaauuccaucagauugaaaaagaauucucagaaguagaagggagaauucaggaccuugagaaauauguugaggacacuaaaauagaucucuggucauacaacgcggagcuucuuguugcccuggagaaucaacauacaauugaucuaacugacucagaaaugaacaaacuguuugaaaaaacaaagaagcaacugagggaaaaugcugaggauaugggcaaugguuguuucaaaauauaccacaaaugugacaaugccugcauaggaucaaucagaaauggaacuuaugaccacaauguguacagggaugaagcauuaaacaaccgguuccagaucaagggaauugagcuuaagucaggguacaaagauuggauccuauggauuuccuuugccauaucauguuuuuugcuuuguguugcuuuguugggguucaucaugugggccugccaaaagggcaacauuaggugcaacauuugcauuuga

SEQ ID NO: 42085 - RNA, 1701 nt, Artificial Sequence
  derived and/or modified CDS sequence (wt) from hemagglutinin__InfluenzaA__AGL09822
augaagacuaucauugcuuugagcuacauucuaugccugguuuucgcucaaaaacuuccuggaaaugacaauagcacggcaacgcugugccuugggcaccaugcaguaccaaacggaacgauagugaaaacaaucacgaaugaccaaauugaaguuacuaaugcuacugagcugguucagaauuccucaauaggugaaauaugcgacaguccucaucagauccuugauggagaaaacugcacacuaauagaugcucuauugggagacccucagugugauggcuuucaaaauaagaaaugggaccuuuuuguugaacgaagcaaagccuacagcaacuguuacccuuaugaugugccggauuaugccucccuuaggucacuaguugccucauccggcacacuggaguuuaacaaugaaagcuucaauugggcuggagucacucaaaacggaacaaguucugcuugcauaaggggaucuaauaguaguuucuuuaguagauuaaauugguugacccacuuaaacuucaaguacccagcauugaacgugacuaugccaaacaaugaacaauuugacaaauuguacauuugggggguucaccacccggguacggacaaggaccaaaucuuccuguaugcucaaucaucaggaagaaucacaguaucuaccaaaagaagccaacaagcuguaaucccgaauaucggaucuagacccagaauaaggaauaucccuagcagaauaagcaucuauuggacaauaguaaaaccgggagacauacuuuugauuaacagcacagggaaucuaauugcuccuagggguuacuucaaaauacgaagugggaaaagcucaauaaugaggucagaugcacccauugguaaaugcaagucugaaugcaucacuccaaauggaagcauucccaaugacaaaccauuccaaaauguaaacaggaucacauacggggccugucccagauauguuaagcaaagcacucugaaauuggcaacaggaaugcgaaauguaccagagaaacaaacuagaggcauauuuggcgcaauagcggguuucauagaaaaugguugggagggaaugguggaugguugguacgguuucaggcaucaaaauucugagggaagaggacaagcagcagaucucaaaagcacucaagcagcaaucgaucaaaucaaugggaagcugaaucgauugaucgggaaaaccaacgagaaauuccaucagauugagaaagaauucucagaaguagaagggagaauucaggaccuugagaaauauguugaggacacaaaaauagaucucuggucauacaacgcagagcuucuuguugcccuggagaaccaacauacaauugaucuaacugacucagaaaugaacaaacuguuugaaaaaacaaagaagcaacugagggaaaaugcugaggauaugggcaaugguuguuucaaaauauaccacaaaugugacaaugccugcauaggaucaaucagaaauggaacuuaugaccacgauguauacagggaugaagcauuaaacaaccgguuccagaucaagggaguugagcugaagucaggguacaaagauuggauccuauggauuuccuuugccauaucauguuuuuugcuuuguguugcuuuguugggguucaucaugugggccugccaaaagggcaacauuaggugcaacauuugcauuuga

SEQ ID NO: 42086 - RNA, 1701 nt, Artificial Sequence
  derived and/or modified CDS sequence (wt) from hemagglutinin__InfluenzaA__AGL09823
augaaggcaauacuaguaguucugcuauauacauuugcaaccgcaaaugcagacacauuauguauagguuaucaugcgaacaauucaacagacacuguagacacaguacuagaaaagaauguaacaguaacacacucuguuaaccuucuagaagacaagcauaacgggaaacuaugcaaacuaagagggguagccccauugcauuuggguaaauguaacauugcuggcuggauccugggaaauccagagugugaaucacucuccacagcaaguucaugguccuacauuguggaaacaucuaguucagacaauggaacguguuacccaggagauuucaucaauuaugaggagcuaagagagcaauugagcucagugucaucauuugaaagguuugagauauuccccaagacaaguucauggcccaaucaugacucgaacaaagguguaacggcagcauguccucacgcuggagcaaaaagcuucuacaaaaauuuaauauggcuaguuaaaaaaggaaauucauacccaaagcucagccaauccuacauuaaugauaaagggaaagaaguccucgugcuguggggcauccaccauccaucuacuacugcugaccaacaaagucucuaucagaaugcagaugcauauguuuuuguggggacaucaagauacagcaaaaaguucaagccggaaauagcaauaagacccaaagugagggaucaagaagggagaaugaacuauuacuggacacuaguagagccgggagacaaaauaacauucgaagcaacuggaaaucuagugguaccgagauaugcauucacaauggaaagaaaugcuggaucugguauuaucauuucagauacaccaguccacgauugcaauacaacuugucagacacccgagggugcuauaaacaccagccucccauuucagaauauacauccgaucacaauuggaaaauguccaaaguauguaaaaagcacaaaauugagacuggccacaggauugaggaaugucccgucuauucaaucuagaggccuauucggggccauugccggcuucauugaagggggguggacagggaugguagauggaugguacgguuaucaccaucaaaaugagcaggggucaggauaugcagccgaccugaagagcacacaaaaugccauugacaagauuacuaacaaaguaaauucuguuauugaaaagaugaauacacaguucacagcaguggguaaagaguucaaccaccuggaaaaaagaauagagaauuuaaauaaaaaaguugaugaugguuuccuggacauuuggacuuacaaugccgaacuguugguucuauuggaaaaugaaagaacuuuggacuaccacgauucaaaugugaagaacuuguaugaaaagguaagaaaccaguuaaaaaacaaugccaaggaaauuggaaacggcugcuuugaauuuuaccacaaaugcgauaacacgugcauggaaagugucaaaaaugggacuuaugacuacccaaaauacucagaggaagcaaaauuaaacagagaaaaaauagaugggguaaagcuggaaucaacaaggauuuaccagauuuuggcgaucuauucaacugucgccaguucauugguacugguagucucccugggggcaaucagcuucuggaugugcucuaaugggucucuacaauguagaauauguauuuaa

SEQ ID NO: 42087 - RNA, 1701 nt, Artificial Sequence
  derived and/or modified CDS sequence (wt) from hemagglutinin__InfluenzaA__AGL09824
augaaggcaauacuaguaguucugcuauacacauuugcaaccgcaaaugcagacacauuauguauagguuaucaugcgaacaauucaacagacacuguagacacaguacuagaaaagaauguaacaguaacacacucuguuaaccuucuagaagacaagcauaacgggaaacuaugcaaacuaagagggguagccccauugcauuuggguaaaugcaacauugcuggcuggauccugggaaauccagagugugaaucacucuccacagcaaguucaugguccuacauuguggaaacaucuaguucagacaauggaacguguuacccaggagauuucaucaauuaugaggagcuaagagagcaauugagcucagugucaucauuugaaagguuugagauauuccccaagacaaguucauggcccaaucaugacucgaacaaagguguaacggcagcauguccucaugcuggaacaaaaagcuucuacaaaaauuuaauauggcuaguuaaaaaaggaaauucauacccaaagcucagcaaauccuacauuaaugauaaagggaaagaaguccucgugcuguggggcauucaccauccaucuacuacugcugaccaacaaagucucuaucagaaugcagaugcauauguuuuuguggggacaucaagauacagcaagaaguucaagccggaaauagcaauaagacccaaagugagggaucaagaagggagaaugaacuauuacuggacacuaauagagccgggagacaaaauaacauucgaagcaacuggaaaucuagugguaccgagauaugcauucgcaauggaaagaaaugcuggaucugguauuaucauuucagauacaccaguccacgauugcaauacaacuugucagacacccgagggugcuauaaacaccagccucccauuucagaauauacauccgaucacaauuggaaaauguccaaaguauguaaaaagcacaaaauugagacuggccacaggauugaggaaugucccgucuauucaaucuagaggccuauucggggccauugccggcuucauugaagggggguggacagggaugguagauggaugguacgguuaucaccaucaaaaugagcaagggucaggauaugcagccgaccugaagagcacacaaaaugccauugacaagauuacuaacaaaguaaauucuguuauugaaaagaugaauacacaguucacagcaguggguaaagaguucaaccaccuggaaaaaagaauagagaauuuaaauaaaaaaguugaugaugguuuccuggacauuuggacuuacaaugccgaacuguugguucuauuggaaaaugaaagaacuuuggacuaccacgauucaaaugugaagaacuuguaugaaaagguaagaaaccaguuaaaaaacaaugccaaggaaauuggaaacggcugcuuugaauuuuaccacaaaugcgauaacacgugcauggaaagugucaaaaaugggacuuaugacuacccaaaauacucagaggaagcaaaauuaaacagagaaaaaauagaugggguaaagcuggaaucaacaaggauuuaccagauuuuggcgaucuauucaacugucgccaguucauugguacugguagucucccugggggcaaucaguuucuggaugugcucuaaugggucucuacaguguagaauauguauuuaa

SEQ ID NO: 42088 - RNA, 1701 nt, Artificial Sequence; identical to SEQ ID NO: 42030
  derived and/or modified CDS sequence (wt) from hemagglutinin__InfluenzaA__AGL09825

SEQ ID NO: 42089 - RNA, 1701 nt, Artificial Sequence; identical to SEQ ID NO: 42087
  derived and/or modified CDS sequence (wt) from hemagglutinin__InfluenzaA__AGL09826

SEQ ID NO: 42090 - RNA, 1701 nt, Artificial Sequence
  derived and/or modified CDS sequence (wt) from hemagglutinin__InfluenzaA__AGL09827
augaagacuaucauugcuuugagcuacauucuaugucugguuuucgcucaaaaacuuccuggaaaugacaauagcacggcaacgcugugccuugggcaccaugcaguaccaaacggaacgauagugaaaacaaucacgaaugaccgaauugaaguuacuaaugcuacugagcugguucagaauuccucaauaggugaaauaugcgacaguccucaucagauccuugauggagaaaacugcacacuaauagaugcucuauugggagacccucagugugauggcuuucaaaauaagaaaugggaccuuuuuguugaacgaagcaaagccuacagcaacuguuacccuuaugaugugccggauuaugcuucccuuaggucacuaguugccucauccggcacacuggaguuuaacaaugaaagcuucaauugggcuggagucacucaaaacggaacaaguucugcuugcauaaggggaucuaauaguaguuucuuuaguagauuaaauugguugacccacuuaaacuucaaauacccagcauugaacgugacuaugccaaacaaugaacaauuugacaaauuguacauuugggggguucaccacccggguacggacaaggaccaaaucuuccuguaugcucaaucaucaggaagaaucacaguaucuaccaaaagaagccaacaagcuguaaucccgaauaucggaucuagacccagaauaaggaauaucccuagcagaauaagcaucuauuggacaauaguaaaaccgggagacauacuuuugauuaacagcacagggaaucuaauugcuccuagggguuacuucaaaauacgaagugggaaaagcucaauaaugagaucagaugcacccauuggcaaaugcaagucugaaugcaucacuccaaauggaagcauucccaaugacaaaccauuccaaaauguaaacaggaucacauacggggccugucccagauauguuaagcaaagcacucugaaauuggcaacaggaaugcgaaauguaccagagaaacaaacuagaggcauauuuggcgcaauagcggguuucauagaaaaugguugggagggaaugauggaugguugguacgguuucaggcaucaaaauucugagggaagaggacaagcagcagaucucaaaagcacucaagcagcaaucgaucaaaucaaugggaagcugaaucgauugaucgggaaaaccaacgagaaauuccaucagauugaaaaagaauucucagaaguagaagggagaauucaggaccuugagaaauauguugaggacacaaaaauagaucucuggucauacaacgcggagcuucuuguugcccuggagaaccaacauacaauugaucuaacugacucagaaaugaacaaacuguuugaaaaaacaaagaagcaacugagggaaaaugcugaggauaugggcaaugguuguuucaaaauauaccacaaaugugacaaugccugcauaggaucaaucagaaauggaacuuaugaccacgauguauacagggaugaagcauuaaacaaccgguuccagaucaagggaguugagcugaagucaggguacaaagauuggauccuauggauuuccuuugccauaucauguuuuuugcuuuguguugcuuuguugggguucaucaugugggccugccaaaagggcaacauuaggugcaacauuugcauuuga

SEQ ID NO: 42091 - RNA, 1701 nt, Artificial Sequence
  derived and/or modified CDS sequence (wt) from hemagglutinin__InfluenzaA__AGL09828
augaagacuaucauugcuuugagcuacauucuaugucugguuuucgcucaaaaacuuccuggaaaugacaauagcacggcaacgcugugccuugggcaccaugcaguaccaaacggaacgauagugaaaacaaucacgaaugaccaaauugaaguuacuaaugcuacugagcugguucagaauuccucaauaggugaaauaugcgacaguccucaucagauccuugauggagaaaacugcacacuaauagaugcucuauugggagacccucagugugauggcuuucaaaauaagaaaugggaccuuuuuguugaacgaagcaaagccuacagcaacuguuacccuuaugaugugccggauuaugccucccuuaggucacuaguugccucauccggcacacuggaguuuaacaaugaaagcuucaauugggcuggagucacucaaaacggaacaaguucugcuugcauaaggggaucuaauaguaguuucuuuaguagauuaaauugguugacccacuuaaacuucaaguacccagcauugaacgugacuaugccaaacaaugaacaauuugacaaauuguacauuugggggguucaccacccggguacggacaaggaccaaaucuuccuguaugcucaaucaucaggaagaaucacaguaucuaccaaaagaagccaacaagcuguaaucccgaauaucggaucuagacccagaauaaggaauaucccuagcagaauaagcaucuauuggacaauaguaaaaccgggagacauacuuuugauuaacagcacagggaaucuaauugcuccuagggguuacuucaaaauacgaagugggaaaagcucaauaaugagaucagaugcacccauuggcaaaugcaagucugaaugcaucacuccaaauggaagcauucccaaugacaaaccauuccaaaauguaaacaggaucacauacggggccugucccagauauguuaagcaaagcacucugaaauuggcaacaggaaugcgaaauguaccagagaaacaaacuagaggcauauuuggcgcaauagcggguuucauagaaaaugguugggagggaaugguggaugguugguacgguuacaggcaucaaaauucugagggaagaggacaagcagcagaucucaaaagcacucaagcagcaaucgaucaaaucaaugggaagcugaaucgauugaucgggaaaaccaacgagaaauuccaucagauugagaaagaauucucagaaguagaagggagaauucaggaccuugagaaauauguugaggacacaaaaauagaucucuggucauacaacgcagagcuucuuguugcccuggagaaccaacauacaauugaucuaacugacucagaaaugaacaaacuguuugaaaaaacaaagaagcaacugagggaaaaugcugaggauaugggcaaugguuguuucaaaauauaccacaaaugugacaaugccugcauaggaucaaucagaaauggaacuuaugaccacgauguauacagggaugaagcauuaaacaaccgguuccagaucaagggaguugagcugaagucaggguacaaagauuggauccuauggauuuccuuugccauaucauguuuuuugcuuuguguugcuuuguugggguucaucaugugggccugccaaaagggcaacauuaggugcaacauuugcauuuga

SEQ ID NO: 42092 - RNA, 1701 nt, Artificial Sequence
  derived and/or modified CDS sequence (wt) from hemagglutinin__InfluenzaA__AGL09829
augaagacuaucauugcuuugagcuacauucuaugucugguuuucgcucaaaaacuuccuggaaaugacaauagcacggcaacgcugugccuugggcaccaugcaguaccaaacggaacaauagugaaaacaaucacgaaugaccgaauugaaguuacuaaugcuacugagcugguucagaauuccucaauaggugaaauaugcgacaguccucaucagauccuugauggagaaaacugcacacuaauagaugcucuauugggagacccucagugugauggcuuucaaaauaagaaaugggaccuuuuuguugaacgaagcaaagccuacagcaacuguuacccuuaugaugugccggauuaugccucccuuaggucacuaguugccucauccggcacacuggaguuuaacaaugaaagcuucaauugggcuggagucacucaaaacggaacaaguucugcuugcauaaggggaucuaauaguaguuucuuuaguagauuaaauugguugacccacuuaaacuucaaauacccagcauugaacgugacuaugccaaacaaugaacaauuugacaaauuguacauuugggggguucaccacccggguacggacaaggaccaaaucuuccuguaugcucaaucaucaggaagaaucacaguaucuaccaaaagaagccaacaagcuguaaucccgaauaucggaucuagacccagaauaaggaauaucccuagcagaauaagcaucuauuggacaauaguaaaaccgggagacauacuuuugauuaacagcacagggaaucuaauugcuccuagggguuacuucaaaauacgaagugggaaaagcucaauaaugagaucagaugcacccauuggcaaaugcaagucugaaugcaucacuccaaauggaagcauucccaaugacaaaccauuccaaaauguaaacaggaucacauacggggccugucccagauauguuaagcaaagcacacugaaauuggcaacaggaaugcgaaauguaccagagaaacaaacuagaggaauauuuggcgcaauagcggguuucauagaaaaugguugggagggaaugguggaugguugguacgguuucaggcaucaaaauucugagggaagaggacaagcagcagaucucgaaagcacucaagcagcaaucgaucaaaucaaugggaagcugaaucgauugaucgggaaaaccaacgagaaauuccaucagauugaaaaagaauucucagaaguagaagggagaauucaggaccuugagaaauauguugaggacacaaaaauagaucucuggucauacaacgcggagcuucuuguugcccuggagaaccaacauacaauugaucuaacugacucagaaaugaacaaacuguuugaaaaaacaaagaagcaacugagggaaaaugcugaggauaugggcaaugguuguuucaaaauauaccacaaaugugacaaugccugcauaggaucaaucagaaauggaacuuaugaccacgauguauacagggaugaagcauuaaacaaccgguuccagaucaagggaguugagcugaagucaggguacaaagauuggauccuauggauuuccuuugccauaucauguuuuuugcuuuguguugcuuuguugggguucaucaugugggccugccaaaagggcaacauuaggugcaacauuugcauuuga

SEQ ID NO: 42093 - RNA, 1701 nt, Artificial Sequence
  derived and/or modified CDS sequence (wt) from hemagglutinin__InfluenzaA__AGL09830
augaagacuaucauugcuuugagcuacauucuaugucugguuuucgcucaaaaacuuccuggaaaugacaauagcacggcaacgcugugccuugggcaccaugcaguaccaaacggaacgauagugaaaacaaucacuaaugaccgaauugaaguuacuaaugcuacugagcugguucagaauuccucaauaggugaaauaugcgacaguccucaucagauccuugauggagaaaacuguacacuaauagaugcucuauugggagacccucagugugauggcuuucaaaauaagaaaugggaucuuuuuguugaacgaagcaaagccuacagcaacuguuacccuuaugaugugccggauuaugccucccuuaggucacuaguugccucauccggcacacuggaguuuaacaaugaaagcuucaauuggacuggagucacucaaaacggaacaaguucugcuugcauaaggagaucuaauaguaguuucuuuaguagauuaaauugguugacccacuuaaacuucaaauacccagcauugaacgugacuaugccaaacaaugaacaauuugacaaauuguacauuugggggguucaccacccggguacggacaaggaccaaaucuuccuguaugcucaaucaucaggaagaaucacaguaucuaccaaaagaagccaacaagcuguaaucccgaauaucggaucuagacccagaauaaggaauaucccuagcagaauaagcaucuauuggacaauaguaaaaccaggagacauacuuuugauuaacagcacagggaaucuaauugcuccuagggguuacuucaaaauacgaagugggaaaagcucaauaaugagaucagaugcacccauuggcaaaugcaagucugaaugcaucacuccaaauggaagcauuccaaaugacaaaccauuccaaaauguaaacaggaucacauacggggccugucccagauauguuaagcaaagcacucugaaauuggcaacaggaaugcgaaauguaccagagaaacaaacuagaggcauauuuggcgcaauagcggguuucauagaaaaugguugggagggaaugguggaugguugguacgguuucaggcaucaaaauucugagggaagaggacaagcagcagaucucaaaagcacucaagcagcaaucgaucaaaucaaugggaagcugaaucgauugaucgggaaaaccaacgagaaauuccaucagauugaaaaagaauucucagaaguagaagggagaauucaggaccuugagaaauauguugaggacacuaaaauagaucucuggucauacaacgcggagcuucuuguugcccuggagaaccaacauacaauugaucuaacugacucagaaaugaacaaacuguuugaaaaaacaaagaagcaacugagggaaaaugcugaggauaugggcaaugguuguuucaaaauauaccacaaaugugacaaugccugcauaggaucaaucagaaauggaacuuaugaccacgauguauacagggaugaagcauuaaacaaccgguuccagaucaagggaguugagcugaagucaggguacaaagauuggauccuauggauuuccuuugccauaucauguuuuuugcuuuguguugcuuuguugggguucaucaugugggccugccaaaagggcaacauuaggugcaacauuugcauuuga

SEQ ID NO: 42094 - RNA, 1701 nt, Artificial Sequence
  derived and/or modified CDS sequence (wt) from hemagglutinin__InfluenzaA__AGL09831
augaagacuaucauugcuuugagcuacauucuaugucugguuuucgcucaaaaaauuccuggaaaugacaauagcacggcaacgcugugccuugggcaccaugcaguaccaaacggaacgauagugaaaacaaucacgaaugaccgaauugaaguuacuaaugcuacugagcugguucagaauuccucaauaggugaaauaugcgacaguccucaucagauccuugauggagaaaacuguacacuaauagaugcucuauugggagacccucagugugauggcuuucaaaauaagaaaugggaccuuuuuguugaacgaagcaaagccuacagcaacuguuacccuuaugaugugccggauuaugccucccuuaggucacuaguugccucauccggcacacuggaguuuaacaaugaaagcuucaauuggacuggagucacucaaaacggaacaaguucugcuugcauaaggagaucuaauaguaguuucuuuaguagauuaaauugguugacccacuuaaacuucaaauacccagcauugaacgugacuaugccaaacaaugaacaauuugacaaauuguacauuugggggguucaccacccggguacggacaaggaccaaaucuuccuguaugcucaaucaucaggaagaaucacaguaucuaccaaaagaagccaacaagcuguaaucccgaauaucggaucuagacccagaauaaggaauaucccuagcagaauaagcaucuauuggacaauaguaaaaccaggagacauacuuuugauuaacagcacagggaaucuaauugcuccuagggguuacuucaaaauaagaagugggaaaagcucaauaaugagaucagaugcacccauuggcaaaugcaagucugaaugcaucacuccaaauggaagcauuccaaaugacaaaccauuccaaaauguaaacaggaucacauacggggccugucccagauauguuaagcaaagcacucugaaauuggcaacaggaaugcgaaauguaccagagaaacaaacuagaggcauauuuggcgcaauagcggguuucauagaaaaugguugggagggaaugguggaugguugguacgguuucaggcaucaaaauucugagggaagaggacaagcagcagaucucaaaagcacucaagcagcaaucgaucaaaucaaugggaaacugaaucgauugaucgggaaaaccaacgagaaauuccaucagauugaaaaagaauucucagaaguagaagggagaauucaggaccuugagaaauauguugaggacacuaaaauagaucucuggucauacaacgcggagcuucuuguugcccuggagaaccaacauacaauugaucuaacugacucagaaaugaacaaacuguuugaaaaaacaaagaagcaacugagggaaaaugcugaggauaugggcaaugguuguuucaaaauauaccacaaaugugacaaugccugcauaggaucaaucagaaauggaacuuaugaccacgauguauacagggaugaagcauuaaacaaccgguuccagaucaagggaguugagcugaagucaggguacaaagauuggauccuauggauuuccuuugccauaucauguuuuuugcuuuguguugcuuuguugggguucaucaugugggccugccaaaagggcaacauuaggugcaacauuugcauuuga

SEQ ID NO: 42095 - RNA, 1701 nt, Artificial Sequence
  derived and/or modified CDS sequence (wt) from hemagglutinin__InfluenzaA__AGL09832
augaagacuaucauugcuuugagcuacauucuaugucugguuuucgcucaaaaacuuccuggaaaugacaauagcacggcaacgcugugccuugggcaccaugcaguaccaaacggaacgauagugaaaacaaucacgaaugaccgaauugaaguuacuaaugcuacugagcugguucagaauuccucaauaggugaaauaugcgacaguccucaucagauccuugauggagaaaauugcacacuaauagaugcucuauugggagacccucagugugauggcuuucaaaauaagaaaugggaccuuuuuguugaacgaagcaaagccuacagcaacuguuacccuuaugaugugccggauuaugccucccuuaggucacuaguugccucauccggcacacuggaguuuaacaaugaaagcuucaauuggacuggagucacucaaaacggaacaaguucugcuugcauaaggagaucuaauaguaguuucuuuaguagauuaaauugguugacccacucaaacuucaaauacccagcauugaacgugacuaugccaaacaaugaacaauuugacaaauuguacauuuggggaguucaccacccggguacggacaaggaccaaaucuuccuguaugcucaaucaucaggaagaaucacaguaucuaccaaaagaagccaacaagcuguaaucccaaauaucggaucuagacccagaauaaggaauaucccuagcagaauaagcaucuauuggacaauaguaaaaccgggagacauacuuuugauuaacagcacagggaaucuaauugcuccuagggguuacuucaaaauacgaagugggaaaagcucaauaaugagaucagaugcacccauuggcaaaugcaagucugaaugcaucacuccaaauggaagcauucccaaugacaaaccauuccaaaauguaaacaggaucacauacggggccugucccagauauguuaagcaaagcacucugaaauuggcaacaggaaugcgaaauguaccagagaaacaaacuagaggcauauuuggcgcaauagcggguuucauagaaaaugguugggagggaaugguggaugguugguacgguuucaggcaucaaaauucugagggaagaggacaagcagcagaucucaaaagcacucaagcagcaaucgaucaaaucaaugggaagcugaaucgauugaucgggaaaaccaacgagaaauuccaucagauugaaaaagaauucucagaaguagaagggagaauucaggaccuugagaaauauguugaggacacuaaaauagaucucuggucauacaacgcggagcuucuuguugcccuggagaaucaacauacaauugaucuaacugacucagaaaugaacaaacuguuugaaaaaacaaagaagcaacugagggaaaaugcugaggauaugggcaaugguuguuucaaaauauaccacaaaugugacaaugccugcauaggaacaaucagaaauggaacuuaugaccacaauguguacagggaugaagcauuaaacaaccgguuccagaucaagggaguugagcuuaagucaggguacaaagauuggauccuauggauuuccuuugccauaucauguuuuuugcuuuguguugcuuuguugggguucaucaugugggccugccaaaagggcaacauuaggugcaacauuugcauuuga

SEQ ID NO: 42096 - RNA, 1701 nt, Artificial Sequence
  derived and/or modified CDS sequence (wt) from hemagglutinin__InfluenzaA__AGL09833
augaagacuaucauugcuuugagcuacauucuaugucugguuuucgcucaaaaacuuccuggaaaugacaauagcacggcaacgcugugccuuggacaccaugcaguaccaaacggaacgauagugaaaacaaucacgaaugaccgaauugaaguuacuaaugcuacugagcugguucagaauuccucaauaggugaaauaugcgacaguccucaucagauccuugauggagaaaauugcacacuaauagaugcucuauugggagacccucagugugauggcuuucaaaauaagaaaugggaccuuuuuguugaacgaagcaaagccuacagcaacuguuacccuuaugaugugccggauuaugccucccuuaggucacuaguugccucauccggcacacuggaguuuaacaaugaaagcuucaauugggcuggagucacucaaaacggaacaaguucugcuugcauaaggggaucuaauaguaguuucuuuaguagauuaaauugguugacccacuuaaacuucaaauacccagcauugaacgugacuaugccaaacaaugaacaauuugacaaauuguacauuugggggguucaccacccggguacggacaaggaccaaaucuuccuguaugcucaaucaucaggaagaaucacaguaucuaccaaaagaagccaacaagcuguaaucccgaauaucggaucuagacccagaauaaggaauaucccuagcagaauaagcaucuauuggacaauaguaaaaccgggagacauacuuuugauuaacagcacagggaaucuaauugcuccuagggguuacuucaaaauacgaagugggaaaagcucaauaaugagaucagaugcacccauuggcaaaugcaagucugaaugcaucacuccaaauggaagcauucccaaugacaaaccauuccaaaauguaaacaggaucacauacggggccugucccagauauguuaagcaaagcacucugaaauuggcaacaggaaugcgaaauguaccagagaaacaaacuagaggcauauuuggcgcaauagcggguuucauagaaaaugguugggagggaaugguggaugguugguacgguuucaggcaucaaaauucugagggaagaggacaagcagcagaucucaaaagcacucaagcagcaaucgaucaaaucaaugggaagcugaaucgauugaucgggaaaaccaacgagaaauuccaucagauugaaaaagaauucucagaaguagaagggagaauucaggaccuugagaaauauguugaggacacaaaaauagaucucuggucauacaacgcggagcuucuuguugcccuggagaaccaacauacaauugaucuaacugacucagaaaugaacaaacuguuugaaaaaacaaagaagcaacugagggaaaaugcugaggauaugggcaauggcuguuucaaaauauaccacaaaugugacaaugccugcauaggaucaaucagaaauggaacuuaugaccacgauguauacagggaugaagcauuaaacaaccgguuccagaucaagggaguugagcugaagucaggguacaaagauuggauccuauggauuuccuuugccauaucauguuuuuugcuuuguguugcuuuguugggguucaucaugugggccugccaaaagggcaacauuaggugcaacauuugcauuuga

SEQ ID NO: 42097 - RNA, 1701 nt, Artificial Sequence
  derived and/or modified CDS sequence (wt) from hemagglutinin__InfluenzaA__AGL09881
augaagacuaucauugcuuugagcuacauucuaugucugguuuucgcucaaaaacuuccuggaaaugacaauagcacggcaacgcugugccuugggcaccaugcaguaccaaacggaacgauagugaaaacaaucacgaaugaccgaauugaaguuacuaaugcuacugagcugguucagaauuccucaauaggugaaauaugcgacaguccucaucagauccuugauggagaaaacugcacacuaauagaugcucuauugggagacccucagugugauggcuuucaaaauaagaaaugggaccuuuuuguugaacgaagcaaagccuacagcaacuguuacccuuaugaugugccggauuaugccucccuuaggucacuaguugccucauccggcacacuggaguuuaacaaugaaagcuucaauugggcuggagucacucaaaacggagcaaguucugcuugcauaaggggaucuaauaguaguuucuuuaguagauuaaauugguugacccacuuaaacuucaaauacccagcauugaacgugacuaugccaaacaaugaacaauuugacaaauuguacauuugggggguucaccacccggguacggacaaggaccaaaucuuccuguaugcucaaucaucaggaagaaucacaguaucuaccaaaagaagccaacaagcuguaaucccgaauaucggaucuagacccagaauaaggaauaucccuagcagaauaagcaucuauuggacaauaguaaaaccgggagacauacuuuugauuaacagcacagggaaucuaauugcuccuagggguuacuucaaaauacgaagugggaaaagcucaauaaugagaucagaugcacccauuggcaaaugcaagucugaaugcaucacuccaaauggaagcauucccaaugacaaaccauuccaaaauguaaacaggaucacauacggggccugucccagauauguuaagcaaagcacucugaaauuggcaacaggaaugcgaaauguaccagagaaacaaacuagaggcauauuuggcgcaauagcggguuucauagaaaaugguugggagggaaugguggaugguugguacgguuucaggcaucaaaauucugagggaagaggacaagcagcagaucucaaaagcacucaagcagcaaucgaucaaaucaaugggaagcugaaucgauugaucgggaaaaccaacgagaaauuccaucagauugaaaaagaauucucagaaguagaagggagaauucaggaccuugagaaauauguugaggacacaaaaauagaucucuggucauacaacgcggagcuucuuguugcccuggagaaccaacauacaauugaucuaacugacucagaaaugaacaaacuguuugaaaaaacaaagaagcaacugagggaaaaugcugaggauaugggcaaugguuguuucaaaauauaccacaaaugugacaaugccugcauaggaucaaucagaaauggaacuuaugaccacgauguauacagggaugaagcauuaaacaaccgguuccagaucaagggaguugaguugaagucaggguacaaagauuggauccuauggauuuccuuugccauaucauguuuuuugcuuuguguugcuuuguugggguucaucaugugggccugccaaaagggcaacauuaggugcaacauuugcauuuga

SEQ ID NO: 42098 - RNA, 1701 nt, Artificial Sequence
  derived and/or modified CDS sequence (wt) from hemagglutinin__InfluenzaA__AGL09882
augaagaccaucauugcuuugagcuacauucuaugucugguuuucgcucaaaaacuuccuggaaaugacaauagcacggcaacgcugugccuugggcaccaugcaguaccaaacggaacgauagugaaaacaaucacgaaugaccgaauugaaguuacuaaugcuacugagcugguucagaauuccucaauaggugaaauaugcgacaguccucaucagauccuugauggagaaaauugcacacuaauagaugcucuauugggagacccucagugugauggcuuucaaaauaagaaaugggaccuuuuuguugaacgaagcaaagccuacagcaacuguuacccuuaugaugugccggauuaugccucccuuaggucacuaguugccucauccggcacacuggaguuuaacaaugaaagcuucaauuggacuggagucacucaaaacggaacaaguucugcuugcauaaggagaucuaauaguaguuucuuuaguagauuaaauugguugacccacuuaaacuucaaauacccagcauugaacgugacuaugccaaacaaugaacaauuugacaaauuguacauuuggggaguucaccacccggguacggacaaggaccaaaucuuccuguaugcucaaucaucaggaagaaucacaguaucuaccaaaagaagccaacaagcuguaaucccaaauaucggaucuagacccagaauaaggaauaucccuagcagaauaagcaucuauuggacaauaguaaaaccgggagacauacuuuugauuaacagcacagggaaucuaauugcuccuagggguuacuucaaaauacgaagugggaaaagcucaauaaugagaucagaugcacccauuggcaaaugcaagucugaaugcaucacuccaaauggaagcauucccaaugacaaaccauuccaaaauguaaacaggaucacauacggggccugucccagauauguuaagcaaagcacucugaaauuggcaacaggaaugcgaaauguaccagagaaacaaacuagaggcauauuuggcgcaauagcggguuucauagaaaaugguugggagggaaugguggaugguugguacgguuucaggcaucaaaauucugagggaagaggacaagcagcagaucucaaaagcacucaagcagcaaucgaucaaaucaauggaaagcugaaucgauugaucgggaaaaccaacgagaaauuccaucagauugaaaaagaauucucagaaguagaagggagaauucaggaccuugagaaauauguugaggacacuaaaauagaucucuggucauacaacgcggagcuucuuguugcccuggagaaucaacauacaauugaucuaacugacucagaaaugaacaaacuguuugaaaaaacaaagaagcaacugagggaaaaugcugaggauaugggaaaugguuguuucaaaauauaccacaaaugugacaaugccugcauaggaucaaucagaaauggaacuuaugaccacaauguguacagggaugaagcauuaaacaaccgguuccagaucaagggaguugagcuuaagucaggguacaaagauuggauccuauggauuuccuuugccauaucauguuuuuugcuuuguguugcuuuguugggguucaucaugugggccugccaaaagggcaacauuaggugcaacauuugcauuuga

SEQ ID NO: 42099 - RNA, 1701 nt, Artificial Sequence
  derived and/or modified CDS sequence (wt) from hemagglutinin__InfluenzaA__AGL09883
augaagaccaucauugcuuugagcuacauucuaugucuaguuuuugcucaagaacuuccuggaaaugacgacagcacggcaacgcugugccuugggcaccaugcagugccaaacggaacgauagugaaaacaaucacgaaugaccaaauugaaguuacuaaugcuacugaacugguucaaaguuccucaacaggugaaauaugcaacaguccucaucagauccuugauggagaaaacugcacacuaauagaugcucuauugggagacccucagugugauggcuuccaaaacaagaaaugggaccuuuuuguugaacgaagcaaagcccacagcaacuguuacccuuaugaugugccggauuaugccucccuuaggucacuaguugccucauccggcacacuggaguuuaacaaugaaagcuucaauuggacuggagucacucaaaacggaacaagcucugcuugcauaaggagaucuaauaauaguuucuuuaguagauugaauugguugacccacuuaaacuucaaauacccagcauugaacgugacuaugccaaacaaugaacaauuugacaaauuguacauuugggggguucaccacccggguacggacaaggaccaaaucuuccuguaugcucaagcaucaggaagaaucacaguaucuaccaaaagaagccaacaagcuguaauuccgaauaucggaucuagacccagaguaaggaauaucccuagcagaguaagcaucuauuggacaauaguaaaaccgggagacauacuuuugauuaacagcacagggaaucuaauugcuccuagggguuacuucaaaauacgaagugggaaaagcucaauaaugagaucagaugcacccauuggcaaaugcaauucugcaugcaucacuccaaauggaagcauucccaaugacaaaccauuccaaaauguaaacaggaucacauacggggccugucccagauaugucaagcaaaacacucugaaauuggcaacaggaaugaggaauguaccagagaaacaaacuagaggcauauuuggcgcaauagcggguuucauagaaaaugguugggagggaaugguggaugguugguacgguuucaggcaucaaaauucugagggaaggggacaagcagcagaucucaaaagcacucaagcagcaaucgaucaaaucaaugggaagcugaauagauugaucgggaaaaccaacgagaaauuccaucagauugaaaaagaauucucagaagucgaagggagaauucaggaccuugagaaauauguugaggacacuaaaauagaucucuggucauacaacgcggagcuucuuguugcccuggagaaccaacacacaauugaucuaacugacucagaaaugaacaaacuguuugaaaaaacaaagaagcaacugagggaaaaugcugaggauaugggcaaugguuguuucaaaauauaccacaaaugugacaaugccugcauaggaucaaucagaaauggaacuuaugaucacgauguguacagagaugaagcauuaaacaaccgauuccagaucaagggaguugagcugaagucaggguacaaagauuggauccuauggauuuccuuugccauaucauguuuuuugcuuuguguugcuuuguugggguucaucaugugggccugccaaaaaggcaacauuaggugcaacauuugcauuuga

SEQ ID NO: 42100 - RNA, 1701 nt, Artificial Sequence
  derived and/or modified CDS sequence (wt) from hemagglutinin__InfluenzaA__AGL09884
augaagaccaucauugcuuugagcuacauucuaugucuaguuuuugcucaagaacuuccuggaaaugacgacagcacggcaacgcugugccuugggcaccaugcagugccaaacggaacgauagugaaaacaaucacgaaugaccaaauugaaguuacuaaugcuacugaacugguucagaguuccucaacaggugaaauaugcaacaguccucaucagauccuugauggagaaaacugcacacuaauagaugcucuauugggagacccucagugugauggcuuccaaaacaagaaaugggaccuuuuuguugaacgaagcaaagcccacagcaacuguuacccuuaugaugugccggauuaugccucccuuaggucacuaguugccucauccggcacacuggaguuuaacaaugaaagcuucaauuggacuggagucacucaaaacggaacaagcucugcuugcauaaggagaucuaauaauaguuucuuuaguagauugaauugguugacccacuuaaacuucaaauacccagcauugaacgugacuaugccaaacaaugaacaauuugacaaauuguacauuugggggguucaccacccggguacggacaaggaccaaaucuuccuguaugcucaagcaucaggaagaaucacaguaucuaccaaaagaagccaacaagcuguaauuccgaauaucggaucuagacccagaguaaggaauaucccuagcagaguaagcaucuauuggacaauaguaaaaccgggagacauacuuuugauuaacagcacagggaaucuaauugcuccuagggguuacuucaaaauacgaagugggaaaagcucaauaaugagaucagaugcacccauuggcaaaugcaauucugcaugcaucacuccaaauggaagcauucccaaugacaaaccauuccaaaauguaaacaggaucacauacggggccugucccagauaugucaagcaaaacacucugaaauuggcaacaggaaugagaaauguaccagagaaacaaacuagaggcauauuuggcgcaauagcggguuucauagaaaaugguugggagggaaugguggaugguugguacgguuucaggcaucaaaauucugagggaaggggacaagcagcagaucucaaaagcacucaagcagcaaucgaucaaaucaaugggaagcugaauagauugaucgggaaaaccaacgagaaauuccaucagauugaaaaagaauucucagaagucgaagggagaauucaggaccuugagaaauauguugaggacacuaaaauagaucucuggucauacaacgcggagcuucuuguugcccuggagaaccaacacacaauugaucuaacugacucagaaaugaacaaacuguuugaaaaaacaaagaagcaacugagggaaaaugcugaggauaugggcaaugguuguuucaaaauauaccacaaaugugacaaugccugcauaggaucaaucagaaauggaacuuaugaucacgauguguacagagaugaagcauuaaacaaccgauuccagaucaagggaguugagcugaagucaggguacaaagauuggauccuauggauuuccuuugccauaucauguuuuuugcuuuguguugcuuuguugggguucaucaugugggccugccaaaaaggcaacauuaggugcaacauuugcauuuga

SEQ ID NO: 42101 - RNA, 1683 nt, Artificial Sequence
  derived and/or modified CDS sequence (wt) from hemagglutinin__InfluenzaA__AGL44438
augaacacucaaauccugguauucgcucugauugcgaucauuccaacaaaugcagacaaaaucugccucggacaucaugccgugucaaacggaaccaaaguaaacacauuaacugaaagaggaguggaagucgucaaugcaacugaaacaguggaacgaacaaacauccccaggaucugcucaaaagggaaaaggacaguugaccucggucaauguggacuccuggggacaaucacuggaccaccucaaugugaccaauuccuagaauuuucagccgauuuaauuauugagaggcgagaaggaagugaugucuguuauccugggaaauucgugaaugaagaagcucugaggcaaauucucagagaaucaggcggaauugacaaggaagcaaugggauucacauacaguggaauaagaacuaauggagcaaccagugcauguaggagaucaggaucuucauucuaugcagaaaugaaauggcuccugucaaacacagauaaugcugcauucccgcagaugacuaagucauauaaaaauacaagaaaaagcccagcucuaauaguaugggggauccaucauuccguaucaacugcagagcaaaccaagcuauaugggaguggaaacaaacuggugacaguugggaguucuaauuaucaacaaucuuuuguaccgaguccaggagcgagaccacaaguuaauggucuaucuggaagaauugacuuucauuggcuaaugcuaaaucccaaugauacagucacuuucaguuucaauggggcuuucauagcuccagaccgugcaagcuuccugagaggaaaaucuaugggaauccagaguggaguacagguugaugccaauugugaaggggacugcuaucauaguggagggacaauaauaaguaacuugccauuucagaacauagauagcagggcaguuggaaaauguccgagauauguuaagcaaaggagucugcugcuagcaacagggaugaagaauguuccugagauuccaaaaggaagaggccuauuuggugcuauagcggguuucauugaaaauggaugggaaggccuaauugaugguugguaugguuucagacaccagaaugcacagggagagggaacugcugcagauuacaaaagcacucaaucggcaauugaucaaauaacaggaaaauuaaaccggcuuauagaaaaaaccaaccaacaauuugaguugauagacaaugaauucaaugagguagagaagcaaaucgguaaugugauaaauuggaccagagauucuauaacagaaguguggucauacaaugcugaacucuugguagcaauggagaaccagcauacaauugaucuggcugauucagaaauggacaaacuguacgaacgagugaaaagacagcugagagagaaugcugaagaagauggcacugguugcuuugaaauauuucacaagugugaugaugacuguauggccaguauuagaaauaacaccuaugaucacagcaaauacagggaagaggcaaugcaaaauagaauacagauugacccagucaaacuaagcagcggcuacaaagaugugauacuuugguuuagcuucggggcaucauguuucauacuucuagccauuguaaugggccuugucuucauauguguaaagaauggaaacaugcggugcacuauuuguauauaa

SEQ ID NO: 42102 - RNA, 1701 nt, Artificial Sequence
  derived and/or modified CDS sequence (wt) from hemagglutinin__InfluenzaA__AGN69267
augaaggcaauacugguagucuugcuauauacauuuacaaccggaaaugcagacacauuauguauagguuaccaugcaaauaauucaacugacacuguugacacaguacuagaaaagaauguaacaguaacacacucuguuaaccuucuagaagacagacauaacgggaaacuauguaaacuaagagggguagccccauugcauuuggguaaauguaacauugcuggauggcuccugggaaacccagagugugaauuacuauucacagcaagcucauggucuuacauuguggaaacaucuaauucagacaaugggacauguuacccaggagauuucaucaauuaugaagagcuaagagagcaguugagcucagugucaucauuugaaagauuugagauauuccccaaggcaaguucauggcccaaucaugaaacgaacagaggugugacggcagcauguccuuaugcuggagcaaacagcuucuacagaaauuuaauauggcugguaaaaaaaggaaauucauacccaaagcucagcaaauccuauauuaacaauaaggagaaggaaguccucgugcuauggggcauucaccauccaccuaccaguacugaccaacaaagucucuaccagaaugcagaugccuauguuuuuguggggucaucaaaauacagcaagaaauucaagccagaaauagcaacaagacccaaggugagaggucaagcagggagaaugaacuauuacuggacacuaguagagccuggagacacaauaacauucgaagcaacuggaaaucuagugguaccaagauaugccuucgcaaugaaaagagguucuggaucugguauuaucauuucagauacaccaguccacgauuguaauacgacuugucaaacacccaaaggugcuauaaacaccagccuuccauuucagaauauacauccagucacaauuggagaauguccaaaauaugucaaaagcacaaaauugagaauggcuacaggauuaaggaauaucccgucuauucaaucuagaggccuguuuggagccauugcuggcuuuauugaggggggauggacaggaaugauagauggaugguacgguuaucaccaucaaaaugagcagggaucaggauaugcagccgaccgaaagagcacacagaaugccauugacgggaucacuaacaaaguaaauucuguuauugaaaagaugaacacacaauucacagcaguggguaaagaauucaaccaccuggaaaaaagaauagagaauuuaaacaaaaagguugaugauggucuucuggauguuuggacuuacaaugccgaacuguugguucuauuggaaaaugaaagaacuuuggauuaucacgauucaaaugugaagaaccuauaugagaaaguaagaagccagcuaaaaaacaaugccaaggaaauuggaaauggcugcuuugaauuuuaccacaaaugugaugacacgugcauggagagcgucaaaaaugggacuuaugauuacccaaaauacucagaagaagcaaaacuaaacagagaggagauagaugggguaaagcuggaaucaacaaggauuuaccagauuuuggcgaucuauucaacugucgccaguucauugguacuguuagucucccugggggcaaucaguuucuggaugugcuccaaugggucuuuacagugcagaauauguauuuaa

SEQ ID NO: 42103 - RNA, 1701 nt, Artificial Sequence
  derived and/or modified CDS sequence (wt) from hemagglutinin__InfluenzaA__AGN69278
augaaggcaauacuaguagucuugcuauauacauuuacaaccgcaaaugcagacacauuauguauagguuaccaugcaaauaauucaacugacacuguugacacaguacuagaaaagaauguaacaguaacacacucuguuaaccuucuagaagacagacauaacgggaaacuauguaaacuaagagggguagccccauugcauuuggguaaauguaacauugcuggauggcuccugggaaacccagagugugaauuacuauucacagcaagcucauggucuuacauuguggaaacaucuaauucagacaaugggacauguuacccaggagauuucaucaauuaugaagagcuaagagagcaguugagcucagugucaucauuugaaagauuugagauauuccccaaggcaaguucauggcccaaucaugaaccgaacagaggugugacggcagcauguccuuaugcuggagcaaacagcuucuacagaaauuuaauauggcugguaaaaaaaggaaauucauacccaaagcucagcaaauccuauauuaacaauaaggagaaggaaguccucgugcuauggggaauucaccauccaccuaccaguacugaccaacaaagucucuaccagaaugcagaugccuauguuuuuguggggucaucaaaauacaacaagaaauucaagccagaaauagcaacaagacccaaggugagaggucaagcagggagaaugaacuauuacuggacacuaguagagccuggagacacaauaacauucgaagcaacuggaaaucuagugguaccaagauaugccuucgcaaugaaaagagguucuggaucugguauuaucauuucagauacaccaguccacgauuguaauacgacuugucaaacacccaaaggugcuauaaacaccagccuuccauuucagaauauacauccagucacaauuggagaauguccaaaauaugucaaaagcacaaaauugagaauggcuacaggauuaaggaauaucccgucuauucaaucuagaggccuguuuggagccauugcuggcuuuauugaggggggauggacaggaaugauagauggaugguacgguuaucaccaucaaaaugagcagggaucaggauaugcagccgaccgaaagagcacacagaaugccauugacgggaucacuaacaaaguaaauucuguuauugaaaagaugaacacacaauucacagcaguggguaaagaauucaaccaccuggaaaaaagaauagagaauuuaaacaaaaagguugaugauggucuucuggauguuuggacuuacaaugccgaacuguugguucuauuggaaaaugaaagaacuuuggauuaucacgauucaaaugugaagaaccuauaugagaaaguaagaagccagcuaaaaaacaaugccaaggaaauuggaaauggcugcuuugaauuuuaccacaaaugugaugacacgugcauggagagcgucaaaaaugggacuuaugauuacccaaaauacucagaagaagcaaaacuaaacagagaggagauagaugggguaaagcuggaaucaacaaggauuuaccagauuuuggcgaucuauucaacugucgccaguucauugguacuguuagucucccugggggcaaucaguuucuggaugugcuccaaugggucuuuacagugcagaauauguauuuaa

SEQ ID NO: 42104 - RNA, 1701 nt, Artificial Sequence
  derived and/or modified CDS sequence (wt) from hemagglutinin__InfluenzaA__AGN69302
auggaagccaaacuauuuguauuauucugugcauucacugcacugaaagcugacaccauuuguguaggcuaccaugccaacaauuccacagacacugucgacacaauacuggagaaaaaugugacuguuacccauucaguuaauuuacuggaaaacagccauaaugggaaacucugcagccugaauggaaagauccccuuacaacuggggaacugcaacguagcaggauggauccuuggcaacccaaaaugugacuuacugcucacagcaaauucguggucuuacauaauagagacuucaaauucaaaagauggagcaugcuaccccggagaauucgcugauuaugaagaguuaaaggagcaguugaguacaguuucuucauuugaaagauuugaaauuuucccaaaggcaaccucauggccaaaccaugacacaaccagagguaccacaguugcaugcucccacucuggagccaacaguuuuuaucggaauuuacuauggauaguaaagaaaggaaacuccuauccuaagcucagcaagucauacacaaacaauaagggaaaggaagugcuuguaauuuggggagugcaccacccuccgaccgacagugaccaacaaacccucuaccagaauaaucauacauauguuucaguuggaucaucaaaauacuacaaaagguucacaccagaaauaguagcaagaccuaaagucagggaacaagcaggcagaaugaauuauuacuggacacuguuagaucaaggggacaccauaacuuuugaagccacugggaauuuaauagcaccauggcacgcauuugcauugaaaaaaggcucuaguucuggaauuaugaugucggaugcucagguucacaauugcacuacaaagugccaaacuccccauggggccuugaaaggcaaucuuccauuucagaauguacaucccgucacuauuggagaaugccccaaauauguuaaaagcacccaacugagaauggcaacaggacuaaggaauauacccucuauucaauccagaggacuuuucggggcaauugccggauucauugaaggaggauggacaggaaugguagauggaugguauggauaccaccaucaaaaugagcagggaucugguuacgcagcagaucagaagagcacacaaauugcaauugauggaauaagcaacaaagugaacucaguaauugaaaaaaugaacauucaauuuacuucagugggcaaggaguucaauagucuagagaaaaggauggaaaauuugaauaagaagguugaugauggguuuuuggauguauggacauauaacgcugaguugcucauucuacucgagaaugaaaggacucuagauuuccaugaccuuaacguaaaaaauuuauaugaaaaggucaaaucacaacuaaggaacaaugccaaggaaaucggaaauggcugcuuugaguucuaucacaaaugugauaaugagugcauggaaagcguaaagaauggcacauacaauuaucccaaauauucagaagaauccaaguugaauagggaggaaauagauggugugaaacuagaaucaaugggaauucaccagauuuuggcgaucuacuccacagucgccaguucccuggucuuauuagucucccugggggcaaucagcuucuggauguguucuaaugggucauugcaaugcagaguaugcauuuaa

SEQ ID NO: 42105 - RNA, 1701 nt, Artificial Sequence
  derived and/or modified CDS sequence (wt) from hemagglutinin__InfluenzaA__AGN69314
auggaagccaaacuauuuguauuauucugugcauucacugcacugaaagcugacaccauuuguguaggcuaccaugccaacaauuccacagacacugucgacacaauacuggagaaaaaugugacuguuacccauucaguuaauuuacuggaaaacagccauaauggaaaacucugcagccugaauggaaagauccccuuacaacuggggaacugcaacguagcaggauggauccuuggcaacccaaaaugugacuuacugcucacagcaaauucguggucuuacauaauagagacuucaaauucaaaagauggagcaugcuaccccggagaauucgcugauuaugaagaguuaaaggagcaguugaguacaguuucuucauuugaaagauuugaaauuuucccaaaggcaaccucauggccaaaccaugacacaaccagagguaccacaguugcaugcucccacucuggagccaacaguuuuuaucggaauuuacuauggauaguaaagaaaggaaacuccuauccuaagcucagcaagucauacacaaacaauaagggaaaggaagugcuuguaauuuggggagugcaccacccuccgaccgacagugaccaacaaacccucuaccagaauaaucauacauauguuucaguuggaucaucaaaauacuacaaaagguucacaccagaaauaguagcaagaccuaaagucagggaacaagcaggcagaaugaauuauuacuggacacuguuagaucaaggggacaccauaacuuuugaagccacugggaauuuaauagcaccauggcacgcauuugcauugaaaaaaggcucuaguucuggaauuaugaugucggaugcucagguucacaauugcacuacaaagugccaaacuccccauggggccuugaaaggcaaucuuccauuucagaauguacaucccgucacuauuggagaaugccccaaauauguuaaaagcacccaacugagaauggcaacaggacuaaggaauauacccucuauucaauccagaggacuuuucggggcaauugccggauucauugaaggaggauggacaggaaugguagauggaugguauggauaccaccaucaaaaugagcagggaucugguuacgcagcagaucagaagagcacacaaauugcaauugauggaauaagcaacaaagugaacucaguaauugaaaaaaugaacauucaauuuacuucagugggcaaggaguucaauagucuagagaaaaggauggaaaauuugaauaagaagguugaugauggguuuuuggauguauggacauauaacgcugaguugcucauucuacucgagaaugaaaggacucuagauuuccaugaccuuaacguaaaaaauuuauaugaaaaggucaaaucacaacuaaggaacaaugccaaggaaaucggaaauggcugcuuugaguucuaucacaaaugugauaaugagugcauggaaagcguaaagaauggcacauacaauuaucccaaauauucagaagaauccaaguugaauagggaggaaauagauggugugaaacuagaaucaaugggaauucaccagauuuuggcgaucuacuccacagucgccaguucccuggucuuauuagucucccugggggcaaucagcuucuggauguguucuaaugggucauugcaaugcagaguaugcauuuaa

SEQ ID NO: 42106 - RNA, 1701 nt, Artificial Sequence; identical to SEQ ID NO: 42104
  derived and/or modified CDS sequence (wt) from hemagglutinin__InfluenzaA__AGN69326

SEQ ID NO: 42107 - RNA, 1701 nt, Artificial Sequence
  derived and/or modified CDS sequence (wt) from hemagglutinin__InfluenzaA__AGN69338
auggaagcaaaauuauuuguauuguucugugcauucacugcacuaaaagcugacaccauuuguguaggcuaccaugccaacaauuccacagacacugucgacacaauacuggagaaaaaugugacuguuacccauucaguuaauuuacuggaaaacagccauaaugggaaacucugcagccugaauggaaagauccccuuacaacuggggaacugcaacguagcaggauggauccuuggcaacccaaaaugugacuugcugcucacagcgaauucguggucuuacauaauagagacuucaaauucaaaaaauggagcaugcuaccccggagaauucgcugauuaugaagaguuaaaggagcagcugaguacaguuucuucauuugaaagauuugaaauuuucccaaaggcaaccucauggccaaaccaugauaccaccagagguaccacaguugcaugcucccacucuggagccaacagcuuuuaucggaauuuacuauggauaguaaagaaaggaaacuccuauccuaagcucagcaagucauacacaaacaauaagggaaaggaagugcuuguaauuuggggagugcaccacccuccgaccgacagugaccaacaaacccucuaccagaauaaucauacauauguuucaguuggaucaucaaaauacuacaaaagguucacaccagaaauaguagcaagaccuaaagucagagaacaagcaggcagaaugaauuauuacuggacacuguuacaucaaggggacaccauaacuuuugaagccacugggaauuuaauagcaccauggcacgcauuugcauugaaugaaggcucuaguucuggaauuaugaggucggaugcucagguucacaauugcacuacaaagugccaaacuccccauggggccuugaaaggcaaucuuccuuuucagaauguacaucccgucacuauuggagaaugccccaaauauguuaaaagcacccaacugagaauggcaacaggacuaaggaauauccccucuauucaauccagaggacuuuucggggcaauugccggauucauugaaggaggauggacaggaaugguagauggaugguauggauaucaccaucgaaaugagcagggaucugguuacgcagcagaucagaaaagcacacaaauugcaauugaugggauaaguaacaaagugaacucagugauugaaaaaaugaacauucaauuuacuucagugggcaaggagugcaauagucuagagaaaaggauggaaaauuugaauaagaagguugaugauggguuuuuggauguauggacauauaacgcugaguugcucauuuuacucgagaaugaaaggacucuagauuuccaugaccuuaacguaaaaaauuuauaugaaaaggucaaaucacaacuaaggaacaaugccaaggaaaucggaaauggcugcuuugaguucuaucacaaaugugauaaugagugcauggaaagcguaaagaauggcacauacaauuaucccaaauauucagaagaauccaaauuaaauagggaggaaauagauggugugaaacuagaaucaaugggaauucaccagauuuuggcgaucuacuccacagucgccaguucccuggucuuauuagucucccugggggcaaucagcuucuggauguguucuaaugggucauugcaaugcagaguaugcauuuaa

SEQ ID NO: 42108 - RNA, 1701 nt, Artificial Sequence
  derived and/or modified CDS sequence (wt) from hemagglutinin__InfluenzaA__AGO00265
augaaggcaagacuacugguccuguuaugugcaauugcagcuacagaugcagacacaauauguauaggcuaccaugcgaacaacucaaccgacacuguugacacaauacucgaaaagaaugugacagugacacacucugucaaccugcucgaagacagccacaacgggaaauuauguagauuaaaagggauagccccacuacaauuggggaaauguaacauugccggauggaucuugggaaauccagaaugcgaaucacugcuuucagagagaucaugguccuacauuguagaaacaccaaacucugagaauggaacauguuacccaggagauuucaucgacuaugaggaacugagagagcaauugagcucaguaacaucauucgaaagauucgaaauauuccccaaggaaaccucauggcccaaacacaacacaaccaaaggaguaacggcagcaugcucccaugcgggaaaaugcaguuuuuacagaaauuugcuauggcugacggagaaggauggcucauacccgaaucugaauaauuccuaugugaacaagaaagggaaagaaguccuuguacuaugggguguucaucacccguccaacauaaaggaucaacagacccucuaucagaaagaaaaugcuuaugucucuguagugucuucaaauuauaacaggagauucaccccggaaauagcagaaagacccaaaguaagaggucaagcagggagaaugaacuauuacuggaccuugcuagaacccggagacacaauaauauuugaggcaaauggaaaucuaauagcgccaugguaugcuuuugcacugaguagaggcuuugggucaggcaucaucaccucaaaugcaucaaugcaugaguguaacacgaagugucaaacaccccagggagcuauaaacagcagucucccuuuccagaauauacacccagucacaauaggagagugcccaaaauaugucaggaguaccaaauugaggaugguuacaggacuaaggaacaucccauccauucaauccagaggucuauuuggagccauugccgguuucauugaagggggguggacuggaaugauagauggaugguaugguuaucaucaucagaaugaacagggaucaggcuaugcugcggaucaaaaaagcacacaaaaugccauuaacgggauuacaaacaaggugaacucuguuaucgagaaaaugaacacucaauucacagcuguggguaaagaauucaacaacuuagaaaaaaggauggaaaaccuaaauaaaaaaguugaugauggauuucuggacauuuggacauauaaugcagaauuguugguucuacuggaaaaugaaaggacucuggauuuccaugacucaaaugugaagaaucuguaugaaaaaguaaaaagccaauuaaggaauaaugccaaagaaauaggaaacggguguuuugaguucuaccacaaguguaacaaugaaugcauggaaaguguaaaaaauggaacuuaugauuauccaaaauauucagaagaaucaaaguugaacagggaaaaaauagauggagugaaauuggaaucaaugggggucuaucagauuuuggcgaucuacucaacugucgccaguucacuggugcuucuggucucccugggggcaaucagcuucuggauguguucuaaugggucuuugcagugcagaauaugcaucuga

SEQ ID NO: 42109 - RNA, 1701 nt, Artificial Sequence
  derived and/or modified CDS sequence (wt) from hemagglutinin__InfluenzaA__AGO00277
augaaagcaaaacuacugauccuguuaugugcacuuucagccacagaugcagacacaauauguauaggcuaccaugcgaacaacucaaccgacacuguugacacaguacucgaaaagaaugugacagugacacacucuguaaaccuacucgaagacagccacaacgggaaauuaugcagauuaaaaggaauagccccacuacaauuggggaaauguaacauugccggauggaucuuaggaaacccagaaugcgaaucacugcuuucuaagagaucaugguccuacauugcagaaacaccaaacucugagaauggaacauguuacccaggagauuucgccgacuaugaggaacugagggagcaauugagcucaguaucaucauucgagagauucgaaauauuccccaaggaaagaucauggcccaaccacaacauaaacauaggaguaacggcagcaugcucccaugcggggaaaagcaguuuuuacaaaaauuugcucuggcugacggagaaagauggcucauacccaaaucugaacaaguccuaugugaacaagaaagagaaagaaguccuuguacuaugggguguucaucacccgucuaacauagagaaucaaaagacccucuaucggaaagaaaaugcuuaugucucuguagugucuucaaauuauaacaggagauucaccccggaaauagcagaaagacccaaaguaagaggucaagcagggagaaugaacuauuacuggacuuugcuagaacccggagacacaauaauauuugaggcaaauggaaaucuaauagcgccaugguaugcuuucgcacuaaguagaggccuuggaucaggaaucaucaccucaaacgcaucaauggaugaaugugacacgaagugucaaacaccccagggagcuauaaacaguagucucccuuuccagaauauacacccauucacaauaggagagugcccaaaauacgucaggaguaccaaauugaggaugguuacaggacuaaggaacaucccauccauucaauccagaggucuguuuggagccauugccgguuucauugaagggggaugggcuggaaugauagauggaugguaugguuaccaucaucagaaugaacagggaucuggcuaugcugcggaucaaaaaagcacacaaaaugccauuaacgggauuacaaauaagguaaacucuguuaucgagaaaaugaacacucaauucacugcuguggguaaagaauucaacaaauuagaaaaaagaauggaaaacuuaaauaaaaaaguugaugauggauuucuggacauuuggacauauaaugcagaauuguugguucuacuggaaaacgaaaggacuuuggauuuccaugacucaaaugugaagaaucuguaugagaaaguaaaaaaccaauuaaggaauaaugccaaagaaauaggaaacggguguuuugaguucuaccacaaguguaacaaugaaugcauggaaaguguaaaaaauggaacuuaugauuacccaaaauauucagaggaaucaaaguuaaacagggaaaaaauugauggagugaaauuggaaucaaugggggucuaucagauucuggcgaucuacucaacugucgccaguucacuggugcuucuggucucccugggggcaaucagcuucuggauguguucuaaugggucuuugcagugcagaauaugcaucuga

SEQ ID NO: 42110 - RNA, 1701 nt, Artificial Sequence
  derived and/or modified CDS sequence (wt) from hemagglutinin__InfluenzaA__AGO00289
augaaagcaagacuacugauccuguuaugugcacuuucagcuacagaugcagacacaauauguauaggcuaccaugcgaacaauucaaccgacacuguugacacaguacucgaaaagaaugugacagugacacacucuguaaaccuacucgaagacagccacaacgggaaauuaugcagauuaaaaggaauagccccacuacaauuggggaaauguaacauugccggauggaucuugggaaacccagaaugcgaaucauugcucucuaauagaucaugguccuacauugcagaaacaccaaacucugagaauggaauauguuacccaggagauuucgccgacuaugaggaacugagggagcaauugagcucaguaucaucauucgagagauucgaaauauuccccaaggaaagcucauggcccaaacacaacauaaccagaggaguaacgguagcaugcucccacgcgaagaaaagcaguuuuuacaaaaauuugcucuggcuaacggaggcaaauggcuuauacccaagucugagcaaguccuaugugaacgacagagagaaagaaguccuugugcuaugggguguucaucacccgucuaacauagaggaucaaaggacccucuaucggaaagaaaaugcuuaugucucuguggugucuucaaauuauaacaggagauucaccccggaaauagcagaaagacccaaaguaagaggucaaccagggagaaugaacuauuacuggacuuugcuagaacccggagacaaaauaauauuugaggcaaauggaaaccuaauagcgccaugguaugcuuucgcacugaguagaggcccuggaucaggaaucaucaccuccaacgcaucaauggaugaaugugacacgaagugucaaacaccccagggagccauaaacaguagccucccuuuucagaacauacacccagucacaauaggagagugcccaaaauaugucaggaguaccaaauugaggaugguuacaggacuaaggaacaucccauccauucaauccagaggucuguuuggagccauugccgguuucauugaagggggauggacuggaaugguggauggaugguaugguuaccaucaucagaaugagcagggaucuggcuaugcugcggaccaaaaaagcacacaaaaugccauuaacgggauuacaaauaaggugaacucuguuaucgagaaaaugaacacucaauucacagcuguggguaaagaguucaacaaauuggaaaaaagaauggaaaacuuaaauaaaaaaguugaugauggauuucuggacauuuggacauauaaugcagaauuauugguucuacuggaaaaugaaaggacuuuggauuuccaugacucaaaugugaagaaucuguaugagaaaguaaaaaaccaauugagaaauaaugcaaaggaaauaggaaacggguguuuugaguucuaccacaagugugacaaugaaugcauggaaaguguaaaaaauggaacuuaugauuacccaaaguauucagaggaaucaaaguuaaacagggcaaaaauugauggaguaaaacuggaaucaaugggggucuaucagauucuggcgaucuacucaacugucgccaguucacuggugcuucuggucucccugggggcaaucagcuuuuggauguguuccaaugggucuuugcaaugcagaauaugcaucuga

SEQ ID NO: 42111 - RNA, 1698 nt, Artificial Sequence
  derived and/or modified CDS sequence (wt) from hemagglutinin__InfluenzaA__AGO00301
augaaagcaaaacuacugauccuguuaugugcacuuuccgcuacagaugcagacacaauauguauaggcuaccaugcaaacaauucaaccgacacuguugacacaguacucgagaagaaugugacagugacacacucuguaaaccuacucgaagacagccacaaugggaaauuaugcagauuaaaaggaaaagccccacuacaauuggggaacuguaacauugccggaugggucuuaggaaacccagaaugcgaaucauugcucuccaauagaucaugguccuacauugcagaaacaccaaacucugagaaugggacaugcuacccaggggauuucgccgacuaugaggaacugagggagcaauugagcucaguaucaucauucgagagauucgaaauauuccccaaggaaagaucauggcccaaccacacaaccagaggagugacggcagcaugcccccaugcgaggaaaagcaguuuuuacaaaaauuuggucuggcugacggaggcaaauggcucauacccaaaucugagcagguccuaugugaacaaucaagagaaagaaguccuugugcuauggggaguucaucacccgucuaacauagaggaacaaagggcacucuaucggaaagauaaugcuuaugucucuguagugucuucaaauuauaacaggagauucaccccagaaauagcaaaaaggcccaaaguaagagaucaaucagggagaaugaacuauuacuggacuuugcuagaacccggagacacaauaauauuugaggcaacuggaaaucuaauagcaccaugguaugcuuucgcacugaguagaggcccuggaucagggauaaucaccucaaacgcaccacuggaugaaugugacacaaagugucaaacaccccagggagcuauaaacaguagucucccuuuucagaauauacacccugucacaauaggagagugcccaaaauacgucaggaguacgaaauugaggaugguuacaggacuaaggaacaucccauccguucaauccaggggucuguuuggagccauugccgguuucauugaagggggauggacugggaugauggauggaugguaugguuaccaucaucagaacgaacagggaucuggcuaugcugcggaucaaaaaagcacacaaaaugccauuaacgggauuacaaauaaggugaacucuguuaucgagaaaaugaacacucaauucacagcuguggguaaagaauucaacaaauuagaaaaaagaauggaaaacuuaaauaaaaagguugaugauggauuuauggauauuuggacauauaaugcagaauuguugguucuacuggaaaaugaaaggacuuuggauuuucaugacucaaaugugaagaaucuguaugagaaaguaaaaaaccaauuaaggaauaaugcaaaggaacuaggaaauggguguuuugaguucuaccacaagugugacaaugaaugcauggaaaguguaaaaaauggaacuuaugacuacccaaaauauucagaggaaucaaaauuaaacagggaaaagauugauggagugaaauuggaaucaaugggggucuaucggauucuggcgaucuacucaacugucgccaguucacuagugcuucuggucucccugggggcaaucagcuucuggauguguucuaaugggucguuacagugcagaauaugcaucuga

SEQ ID NO: 42112 - RNA, 1701 nt, Artificial Sequence
  derived and/or modified CDS sequence (wt) from hemagglutinin__InfluenzaA__AGO00313
augaagacuaucauugcuuugagcuacauuuucugucagguucucgcccaaaaccuuccaggaaaugacaacagcacagcaacgcugugccugggacaucaugcagugccaaacggaacgcuagugaaaacaaucacgaaugaucagauugaagugacuaaugcuacugagcugguucagaguuccucaacagguagaauaugcgacaguccucaucgaauccuugaugggaaaaacugcacacugauagaugcucuauugggggacccucauugugauggcuuucaaaaugagaaaugggaccuuuuuguugaacgcagcaaagcuuucagcaacuguuacccuuaugaugugccagauuaugccucccuuaggucacuaguugccucgucaggcacccuggaguuuaucaaugaaggcuucaauuggacuggggucacucagaaugggggaagcuaugcuugcaaaaggggaccugauaacaguuucuucaguagacugaacugguuguacaaaucagaaagcacauauccagugcugaacgugacuaugccaaacaaugacaauuuugacaaacuguacauuuggggaguucaccacccgagcacggacaaagaacaaaccaaccuauauguucaagcaucagggagagucacagucuccaccaagagaagccagcaaacuauaaucccgaaugucgggucuagacccuggguaaggggucugucuaguggaauaagcaucuauuggacaauaguaaaaccgggagacauacuguuaauuaauaguaaugggaaccuaauugcuccucgggguuacuucaaaauacgcacugggaaaagcucaauaaugaggucagaugcacccauuggcaccugcaguucugaaugcaucacuccaaauggaagcauucccaaugacaagcccuuucaaaacguaaacaagaucacauauggggcaugucccaaguauguuaagcaaaacacucugaaguuggcaacagggaugcggaauguaccagagaaacaaacuagaggcauauucggcgcaauagcagguuucauagaaaaugguugggagggaaugauagacgguugguacgguuucaggcaucaaaauucugagggcacaggacaagcagcagaucuuaaaagcacucaagcagccaucgaccaaaucaaugggaaacugaauaggguaaucgagaaaacgaacgagaaauuccaucaaaucgaaaaggaauucucagaaguagaagggagaauucaggaccucgagaaauacguugaagacacuaaaauagaucucuggucuuacaaugcggagcuucuugucgcucuggagaaccaacauacaauugaucugacugacucggaaaugaacaaacuguuugaaaaaacaaggaggcaacugagggaaaaugcugaggacaugggcaaugguugcuucaaaauauaccacaaaugugacaaugcuugcauagggucaaucagaaauggaacuuaugaccaugauguauacagagacgaagcauuaaacaaccgguuucagaucaaagguguugagcugaagucaggauacaaagacuggauccuguggauuuccuuugccauaucaugcuuuuugcuuuguguuguuuugcugggguucaucaugugggccugccaaaaaggcaacauuaggugcaacauuugcauuuga

SEQ ID NO: 42113 - RNA, 1704 nt, Artificial Sequence; identical to SEQ ID NO: 41109
  derived and/or modified CDS sequence (wt) from hemagglutinin__InfluenzaA__AGO00325

SEQ ID NO: 42114 - RNA, 1698 nt, Artificial Sequence
  derived and/or modified CDS sequence (wt) from hemagglutinin__InfluenzaA__AGO00337
augaaggcaaaccuacugguccuguuaagugcacuugcagcugcagaugcagacacaauauguauaggcuaccaugcgaacaauucaaccgacacuguugacacaguacucgagaagaaugugacagugacacacucuguuaaccugcucgaagacagccacaacggaaaacuauguagauuaaaaggaauagccccacuacaauuggggaaauguaacaucgccggauggcucuugggaaacccagaaugcgacccacugcuuccagugagaucaugguccuacauuguagaaacaccaaacucugagaauggaauauguuauccaggagauuucaucgacuaugaggagcugagggagcaauugagcucagugucaucauucgaaagauucgaaauauuucccaaagaaagcucauggcccaaccacaacacaaacggaguaacggcagcaugcucccaugaggggaaaagcaguuuuuacagaaauuugcuauggcugacggagaaggagggcucauacccaaagcugaaaaauucuuaugugaacaaaaaagggaaagaaguccuuguacugugggguauucaucacccgccuaacaguaaggaacaacagaaucucuaucagaaugaaaaugcuuaugucucuguagugacuucaaauuauaacaggagauuuaccccggaaauagcagaaagacccaaaguaagagaucaagcugggaggaugaacuauuacuggaccuugcuaaaacccggagacacaauaauauuugaggcaaauggaaaucuaauagcaccaauguaugcuuucgcacugaguagaggcuuuggguccggcaucaucaccucaaacgcaucaaugcaugaguguaacacgaagugucaaacaccccugggagcuauaaacagcagucucccuuaccagaauguacacccagucacaauaggagagugcccaaaauacgucaggagugccaaauugaggaugguuacaggacuaaggaacacuccguccauucaauccagaggucuauuuggagccauugccgguuuuauugaagggggauggacuggaaugauagauggaugguaugguuaucaucaucagaaugaacagggaucaggcuaugcagcggaucaaaaaagcacacaaaaugccauuaacgggauuacaaacaaggugaacacuguuaucgagaaaaugaacauucaauucacagcuguggguaaagaauucaacaaauuagaaaaaaggauggaaaauuuaaauaaaaaaguugaugauggauuucuggacauuuggacauauaaugcagaauuguuaguucuacuggaaaaugaaaggacucuggauuuccaugacucaaaugugaagaaucuguaugagaaaguaaaaagccaauuaaagaauaaugccaaagaaaucggaaauggauguuuugaguucuaccacaagugugacaaugaaugcauggaaaguguaagaaaugggacuuaugauuaucccaaauauucagaagagucaaaguugaacagggaaaagguagauggagugaaauuggaaucaauggggaucuaucagauucuggcgaucuacucaacugucgccaguucacuggugcuuuuggucucccugggggcaaucaguuucuggauguguucuaauggaucuuugcagugcagaauaugcaucuga

SEQ ID NO: 42115 - RNA, 1698 nt, Artificial Sequence; identical to SEQ ID NO: 35290
  derived and/or modified CDS sequence (wt) from hemagglutinin__InfluenzaA__AGO00349

SEQ ID NO: 42116 - RNA, 1698 nt, Artificial Sequence
  derived and/or modified CDS sequence (wt) from hemagglutinin__InfluenzaA__AGO00373
augaaggcaaaccuacugguccuguuaugugcacuugcagcugcagaugcagacacaauauguauaggcuaccaugcgaacaacucaaccgacacuguugacacaguacucgagaagaaugugacagugacacacucuguuaaccugcucgaagacagccacaacggaaaacuauguagauuaaaaggaauagccccacuacaauuggggaaauguaacaucgccggauggcucuugggaaacccagaaugcgacccacugcuuccagugagaucaugguccuacauuguagaaacaccaaacucugagaauggaauauguuauccaggagauuucaucgacuaugaggagcugagggagcaauugagcucagugucaucauucgaaagauucgaaauauuucccaaagaaagcucauggcccgaccacaacacaaacggaguaacggcagcaugcucccaugaggggaaaagcaguuuuuacagaaauuugcuauggcugacggagaaggagagcucauacccaaagcugaaaaauucuuaugugaacaaaaaagggaaagaaguccuuguacugugggguauucaucacccgccuaacaguaaggaacaacagaaucucuaucagaaugaaaaugcuuaugucucuguagugacuucaaauuauaacaggagauuuaccccggaaauagcagaaagacccaaaguaagagaucaagcugggaggaugaacuauuacuggaccuugcuaaaacccggagacacaauaauauuugaggcaaauggaaaucuaauagcaccaauguaugcuuucgcacugaguagaggcuuuggguccggcaucaucaccucaaacgcaucaaugcaugaguguaacacgaagugucaaacaccccugggagcuauaaacagcagucucccuuaccagaauauacacccagucacaauaggagagugcccaaaauacgucaggagugccaaauugaggaugguuacaggacuaaggaacauuccguccauucaauccagaggucuauuuggagccauugccgguuuuauugaagggggauggacuggaaugauagauggaugguaugguuaucaucaucagaaugaacagggaucaggcuaugcagcggaucaaaaaagcacacaaaaugccauuaacgggauuacaaacaaggugaacacuguuaucgagaaaaugaacauucaauucacagcuguggguaaagaauucaacaaauuagaaaaaaggauggaaaauuuaaauaaaaaaguugaugauggauuucuggacauuuggacauauaaugcagaauuguuaguucuacuggaaaaugaaaggacucuggauuuccaugacucaaauaugaagaaucuguaugagaaaguaaaaagccaauuaaagaauaaugccaaagaaaucggaaauggauguuuugaguucuaccacaagugugacaaugaaugcauggaaaguguaagaaaugggacuuaugauuaucccaaauauucagaagagucaaaguugaacagggaaaagguagauggagugaaauuggaaucaauggggaucuaucagauucuggcgaucuacucaacugucgccaguucacuggugcuuuuggucucccugggggcaaucaguuucuggauguguucuaauggaucuuugcagugcagaauaugcaucuga

SEQ ID NO: 42117 - RNA, 1698 nt, Artificial Sequence
  derived and/or modified CDS sequence (wt) from hemagglutinin__InfluenzaA__AGO00385
augaaggcaaaccuacugguccuguuaugugcacuugcagcugcagaugcagacacaauauguauaggcuaccaugcgaacaacucaaccgacacuguugacacaguacucgagaagaaugugacagugacacacucuguuaaccugcucgaagacagccacaacggaaaacuauguagauuaaaaggaauagccccacuacaauuggggaaauguaacaucgccggauggcucuugggaaacccagaaugcgacccacugcuuccagugggaucaugguccuacauuguagaaacaccaaacucugagaauggaauauguuauccaggagauuucaucgacuaugaggagcugagggagcaauugagcucagugucaucauucgaaagauucgaaauauuucccaaagaaagcucauggcccgaccacaacacaaacggaguaacggcagcaugcucccaugaggggaaaagcaguuuuuacagaaauuugcuauggcugacggagaaggagagcucauacccaaagcugaaaaauucuuaugugaacaaaaaagggaaagaaguccuuguacugugggguauucaucacccgccuaacaguaaggaacaacagaaucucuaucagaaugaaaaugcuuaugucucuguagugacuucaaauuauaacaggagauuuaccccggaaauagcagaaagacccaaaguaagagaucaagcugggaggaugaacuauuacuggaccuugcuaaaacccggagacacaauaauauuugaggcaaauggaaaucuaauagcaccaauguaugcuuucgcacugaguagaggcuuuggguccggcaucaucaccucaaacgcaucaaugcaugaguguaacacgaagugucaaacaccccugggagcuauaaacagcagucucccuuaccagaauauacacccagucacaauaggagagugcccaaaauacgucaggagugccaaauugaggaugguuacaggacuaaggaacauuccguccauucaauccagaggucuauuuggagccauugccgguuuuauugaagggggauggacuggaaugauagauggaugguaugguuaucaucaucagaaugaacagggaucaggcuaugcagcggaucaaaaaagcacacaaaaugccauuaacgggauuacaaacaaggugaacacuguuaucgagaaaaugaacauucaauucacagcuguggguaaagaauucaacaaauuagaaaaaaggauggaaaauuuaaauaaaaaaguugaugauggauuucuggacauuuggacauauaaugcagaauuguuaguucuacuggaaaaugaaaggacucuggauuuccaugacucaaaugugaagaaucuguaugagaaaguaaaaagccaauuaaagaauaaugccaaagaaaucggaaauggauguuuugaguucuaccacaagugugacaaugaaugcauggaaaguguaagaaaugggacuuaugauuaucccaaauauucagaagagucaaaguugaacagggaaaagguagauggagugaaauuggaaucaauggggaucuaucagauucuggcgaucuacucaacugucgccaguucacuggugcuuuuggucucccugggggcaaucaguuucuggauguguucuaauggaucuuugcagugcagaauaugcaucuga

SEQ ID NO: 42118 - RNA, 1698 nt, Artificial Sequence
  derived and/or modified CDS sequence (wt) from hemagglutinin__InfluenzaA__AGO00397
augaaggcaaaccuacugguccuguuaugugcacuugcagcugcagaugcagacacaauauguauaggcuaccaugcgaacaacucaaccgacacuguugacacaguacucgagaagaaugugacagugacacacucuguuaaccugcucgaagacagccacaacggaaaacuauguagauuaaaaggaauagccccacuacaauuggggaaauguaacaucgccggauggcucuugggaaacccagaaugcgacccacugcuuccagugggaucaugguccuacauuguagaaacaccaaacucugagaauggaauauguuauccaggagauuucaucgacuaugaggagcugagggagcaauugagcucagugucaucauucgaaagauucgaaauauuucccaaagaaagcucauggcccgaccacaacacaaacggaguaacggcagcaugcucccaugaggggaaaagcaguuuuuacagaaauuugcuauggcugacggagaaggagagcucauacccaaagcugaaaaauucuuaugugaacaaaaaagggaaagaaguccuuguacugugggguauucaucacccgccuaacaguaaggaacaacagaaucucuaucagaaugaaaaugcuuaugucucuguagugacuucaaauuauaacaggagauuuaccccggaaauagcagaaagacccaaaguaaaagaucaagcugggaggaugaacuauuacuggaccuugcuaaaacccggagacacaauaauauuugaggcaaauggaaaucuaauagcaccaauguaugcuuucgcacugaguagaggcuuuggguccggcaucaucaccucaaacgcaucaaugcaugaguguaacacgaagugucaaacaccccugggagcuauaaacagcagucucccuuaccagaauauacacccagucacaauaggagagugcccaaaauacgucaggagugccaaauugaggaugguuacaggacuaaggaacauuccguccauucaauccagaggucuauuuggagccauugccgguuuuauugaagggggauggacuggaaugauagauggaugguaugguuaucaucaucagaaugaacagggaucaggcuaugcagcggaucaaaaaagcacacaaaaugccauuaacgggauuacaaacaaggugaacacuguuaucgagaaaaugaacauucaauucacagcuguggguaaagaauucaacaaauuagaaaaaaggauggaaaauuuaaauaaaaaaguugaugauggauuucuggacauuuggacauauaaugcagaauuguuaguucuacuggaaaaugaaaggacucuggauuuccaugacucaaaugugaagaaucuguaugagaaaguaaaaagccaauuaaagaauaaugccaaagaaaucggaaauggauguuuugaguucuaccacaagugugacaaugaaugcauggaaaguguaagaaaugggacuuaugauuaucccaaauauucagaagagucaaaguugaacagggaaaagguagauggagugaaauuggaaucaauggggaucuaucagauucuggcgaucuacucaacugucgccaguucacuggugcuuuuggucucccugggggcaaucaguuucuggauguguucuaauggaucuuugcagugcagaauaugcaucuga

SEQ ID NO: 42119 - RNA, 1698 nt, Artificial Sequence
  derived and/or modified CDS sequence (wt) from hemagglutinin__InfluenzaA__AGO00409
augaaggcaaaccuacugguccuguuaugugcacuugcagcugcagaugcagacacaauauguauaggcuaccaugcgaacaacucaaccgacacuguugacacaguacucgagaagaaugugacagugacacacucuguuaaccugcucgaagacagccacaacggaaaacuauguagauuaaaaggaauagccccacuacaauuggggaaauguaacaucgccggauggcucuugggaaacccagaaugcgacccacugcuuccagugggaucaugguccuacauuguagaaacaccaaacucugagaauggaauauguuauccaggagauuucaucgacuaugaggagcugagggagcaauugagcucagugucaucauucgaaagauucgaaauauuucccaaagaaagcucauggcccgaccacaacacaaacggaguaacggcagcaugcucccaugaggggaaaaacaguuuuuacagaaauuugcuauggcugacggagaagaagagcucauacccagagcugaaaaauucuuaugugaacaaaaaagggaaagaaguccuuguacugugggguauucaucacccgccuaacaguaaggaacaacagaaucucuaucagaaugaaaaugcuuaugucucuguagugacuucaaauuauaacaggagauuuaccccggaaauagcagaaagacccaaaguaaaagaucaagcugggaggaugaacuauuacuggaccuugcuaaaacccggagacacaauaauauuugaggcaaauggaaaucuaauagcaccaauguaugcuuucgcacugaguagaggcuuuggguccggcaucaucaccucaaacgcaucaaugcaugaguguaacacgaagugucaaacaccccugggagcuauaaacagcagucucccuuaccagaauauacacccagucacaauaggagagugcccaaaauacgucaggagugccaaauugaggaugguuacaggacuaaggaacauuccguccauucaauccagaggucuauuuggagccauugccgguuuuauugaagggggauggacuggaaugauagauggaugguaugguuaucaucaucagaaugaacagggaucaggcuaugcagcggaucaaaaaagcacacaaaaugccauuaacgggauuacaaacaaggugaacacuguuaucgagaaaaugaacauucaauucacagcuguggguaaagaauucaacaaauuagaaaaaaggauggaaaauuuaaauaaaaaaguugaugauggauuucuggacauuuggacauauaaugcagaauuguuaguucuacuggaaaaugaaaggacucuggauuuccaugacucaaaugugaagaaucuguaugagaaaguaaaaagccaauuaaagaauaaugccaaagaaaucggaaauggauguuuugaguucuaccacaagugugacaaugaaugcauggaaaguguaagaaaugggacuuaugauuaucccaaauauucagaagagucaaaguugaacagggaaaagguagauggagugaaauuggaaucaauggggaucuaucagauucuggcgaucuacucaacugucgccaguucacuggugcuuuuggucucccugggggcaaucaguuucuggauguguucuaauggaucuuugcagugcagaauaugcaucuga

SEQ ID NO: 42120 - RNA, 1698 nt, Artificial Sequence
  derived and/or modified CDS sequence (wt) from hemagglutinin__InfluenzaA__AGO00421
augaaggcaaaccuacugguccuguuaugugcacuugcagcugcagaugcagacacaauauguauaggcuaccaugcgaacaacucaaccgacacuguugacacaguacucgagaagaaugugacagugacacacucuguuaaccugcucgaagacagccacaacggaaaacuauguaaauuaaaaggaauagccccacuacaauuggggaaauguaacaucgccggauggcucuugggaaacccaggaugcgacccacugcuuccagugggaucaugguccuacauuguagaaacaccaaacucugagaauggaauauguuauccaggagauuucaucgacuaugaggagcugagggagcaauugagcucagugucaucauucgaaagauucaaaauauuucccaaagaaagcucauggcccgaccacaacacaaccggaguaacggcagcaugcucccaugaggggaaaaacaguuuuuacagaaauuugcuauggcugacgaagaaggagagcucauacccagagcugaaaaauucuuaugugaacaaaaaaaggaaagaaguccuuguacugugggguauucaucacccgccuaacaguaaggaacaacagaaucucuaucagaaugaaaaugcuuaugucucuguagugacuucaaauuauaacaggagauuuaccccggaaauagcagaaagacccaaaguaaaaggucaagcugggaggaugaacuauuacuggaccuugcuaaaacccggagacacaauaauauuugaggcaaauggaaaucuaauagcaccaauguaugcuuucgcacugaguagaggcuuuggguccggcaucaucaccucaaacgcaucaaugcaugaguguaacacgaagugucaaacaccccugggagcuauaaacagcagucucccuuaccagaauauacacccagucacaauaggagagugcccaaaauacgucaggagugccaaauugaggaugguuacaggacuaaggaacauuccguccauucaauccagaggucuauuuggagccauugccgguuuuauugaagggggauggacuggaaugauagauggaugguaugguuaucaucaucagaaugaacagggaucaggcuaugcagcggaucaaaaaagcacacaaaaugccauuaacgggauuacaaacaaggugaacacuguuaucgagaaaaugaacauucaauucacagcuguggguaaagaauucaacaaauuagaaaaaaggauggaaaauuuaaauaaaaaaguugaugauggauuucuggacauuuggacauauaaugcagaauuguuaguucuacuggaaaaugaaaggacucuggauuuccaugacucaaaugugaagaaucuguaugagaaaguaaaaagccaauuaaagaauaaugccaaagaaaucggaaauggauguuuugaguucuaccacaagugugacaaugaaugcauggaaaguguaagaaaugggacuuaugauuaucccaaauauucagaagagucaaaguugaacagggaaaagguagauggagugaaauuggaaucaauggggaucuaucagauucuggcgaucuacucaacugucgccaguucacuggugcuuuuggucucccugggggcaaucaguuucuggauguguucuaauggaucuuugcagugcagaauaugcaucuga

SEQ ID NO: 42121 - RNA, 1698 nt, Artificial Sequence
  derived and/or modified CDS sequence (wt) from hemagglutinin__InfluenzaA__AGO00433
augaaggcaaaccuacugguccuguuaugugcacuugcagcugcagaugcagacacaauauguauaggcuaccaugcgaacaauucaaccgacacuguugacacaguacucgagaagaaugugacagugacacacucuguuaaccugcucgaagacagccacaacggaaaacuauguagauuaaaaggaauagccccacuacaauuggggaaauguaacaucgccggauggcucuugggaaacccagaaugcgacccacugcuuccagugagaucaugguccuacauuguagaaacaccaaacucugagaauggaauauguuauccaggagauuucaucgacuaugaggagcugagggagcaauugagcucagugucaucauucgaaagauucgaaauauuucccaaagaaagcucauggcccaaccacaacacaaacggaguaacggcagcaugcucccaugaggggaaaagcaguuuuuacagaaauuugcuauggcugacggagaaggagggcucauacccaaagcuggaaaauucuuaugugaacaaaaaagggaaagaaguccuuguacugugggguauucaucacccgccuaacaguaaggaacaacagaaucucuaucagaaugaaaaugcuuaugucucuguagugacuucaaauuauaacaggagauuuaccccggaaauagcagaaagacccaaaguaagagaucaagcugggaggaugaacuauuacuggaccuugcuaaaacccggagacacaauaauauuugaggcaaauggaaaucuaauagcaccaauguaugcuuucgcacugaguagaggcuuuggguccggcaucaucaccucaaacgcaucaaugcaugaguguaacacgaagugucaaacaccccugggagcuauaaacagcagucucccuuaccagaauauacacccagucacaauaggagagugcccaaaauacgucaggagugccaaauugaggaugguuacaggacuaaggaacauuccguccauucaauccagaggucuauuuggagccauugccgguuuuauugaagggggauggacuggaaugauagauggaugguaugguuaucaucaucagaaugaacagggaucaggcuaugcagcggaucaaaaaagcacacaaaaugccauuaacgggauuacaaacaaggugaacacuguuaucgagaaaaugaacauucaauucacagcuguggguaaagaauucaacaaauuagaaaaaaggauggaaaauuuaaauaaaaaaguugaugauggauuucuggacauuuggacauauaaugcagaauuguuaguucuacuggaaaaugaaaggacucuggauuuccaugacucaaaugugaagaaucuguaugagaaaguaaaaagccaauuaaagaauaaugccaaagaaaucggaaauggauguuuugaguucuaccacaagugugacaaugaaugcauggaaaguguaagaaaugggacuuaugauuaucccaaauauucagaagagucaaaguugaacagggaaaagguagauggagugaaauuggaaucaauggggaucuaucagauucuggcgaucuacucaacugucgccaguucacuggugcuuuuggucucccugggggcaaucaguuucuggauguguucuaauggaucuuugcagugcagaauaugcaucuga

SEQ ID NO: 42122 - RNA, 1698 nt, Artificial Sequence
  derived and/or modified CDS sequence (wt) from hemagglutinin__InfluenzaA__AGO00445
augaaggcaaaccuacugguccuguuaugugcacuugcagcugcagaugcagacacaauauguauaggcuaccaugcgaacaauucaaccgacacuguugacacaguacucgagaagaaugugacagugacacacucuguuaaccugcucgaagacagccacaacggaaaacuauguagauuaaaaggaauagccccacuacaauuggggaaauguaacaucgccggauggcucuugggaaacccagaaugcgacccacugcuuccagugagaucaugguccuacauuguagaaacaccaaacucugagaauggaauauguuauccaggagauuucaucgacuaugaggagcugagggagcaauugagcucagugucaucauucgaaagauucgaaauauuucccaaagaaagcucauggcccaaccacaacacaaacggaguaacggcagcaugcucccaugaggggaaaagcaguuuuuacagaaauuugcuauggcugacggagaaggagggcucauacccaacgcugaaaaauucuuaugugaacaaaaaagggaaagaaguccuuguacugugggguauucaucacccgccuaacaguaaggaacaacagaaucucuaucagaaugaaaaugcuuaugucucuguagugacuucaaauuauaacaggagauuuaccccggaaauagcagaaagacccaaaguaagagaucaagcugggaggaugaacuauuacuggaccuugcuaaaacccggagacacaauaauauuugaggcaaauggaaaucuaauagcaccaauguaugcuuucgcacugaguagaggcuuuggguccggcaucaucaccucaaacgcaucaaugcaugaguguaacacgaagugucaaacaccccugggagcuauaaacagcagucucccuuaccagaauauacacccagucacaauaggagagugcccaaaauacgucaggagugccaaauugaggaugguuacaggacuaaggaacauuccguccauucaauccagaggucuauuuggagccauugccgguuuuauugaagggggauggacuggaaugauagauggaugguaugguuaucaucaucagaaugaacagggaucaggcuaugcagcggaucaaaaaagcacacaaaaugccauuaacgggauuacaaacaaggugaacacuguuaucgagaaaaugaacauucaauucacagcuguggguaaagaauucaacaaauuagaaaaaaggauggaaaauuuaaauaaaaaaguugaugauggauuucuggacauuuggacauauaaugcagaauuguuaguucuacuggaaaaugaaaggacucuggauuuccaugacucaaaugugaagaaucuguaugagaaaguaaaaagccaauuaaagaauaaugccaaagaaaucggaaauggauguuuugaguucuaccacaagugugacaaugaaugcauggaaaguguaagaaaugggacuuaugauuaucccaaauauucagaagagucaaaguugaacagggaaaagguagauggagugaaauuggaaucaauggggaucuaucagauucuggcgaucuacucaacugucgccaguucacuggugcuuuuggucucccugggggcaaucaguuucuggauguguucuaauggaucuuugcagugcagaauaugcaucuga

SEQ ID NO: 42123 - RNA, 1701 nt, Artificial Sequence
  derived and/or modified CDS sequence (wt) from hemagglutinin__InfluenzaA__AGO02696
augaaggcaauacuaguaguuaugcuauauacauuugcaaccgcaaaugcagacacauuauguauagguuaucaugcgaacaauucaacagacacuguagacacaguacuagaaaagaauguaacaguaacacacucuguuaaucuucuagaagacaagcauaacgggaaacuaugcaaacuaagagggguagccccauugcauuuggguaaauguaacauugcuggcuggauccugggaaauccagagugugaaucacucuccacagcaagcucaugguccuacauuguggaaacaucuaguucagacaauggaacguguuacccaggagauuucaucgauuaugaggagcuaagagagcaauugagcucagugucaucauuugaaagguuugagauauuccccaaaacaaguucauggccaaaucaugacucgaacaaagguguaacggcagcauguccucaugcuggagcaaaaggcuucuacaaaaauuuaauauggcuaguuaaaaaaggaaauucauacccaaagcucagcauauccuacauuaaugacaaagggaaagaaguccucgugcuauggggcauucaccauccaucuacuacugcugaccaacaaagucucuaucagaaugcagauacauauguuuuuguggggacaucaagauacagcaagaaguucaagccggaaauagcaauaagacccaaagugagggaucaagaagggagaaugaacuauuacuggacacuaguagagccgggagacaaaauaacauucgaagcaacuggaaaucuagugguaccgagauaugcauuugcaauggaaagaaaugcuggaucugguauuaucauuucagauacaccaguucacgauugcaauacaacuugucagacacccaagggugcuauaaacaccagccucccauuucagaauauacauccgaucacaauuggaaaauguccaaaauauguaaaaagcacaaaauugagacuggccacaggauugaggaaugucccgucuauucaaucuagaggccuauuuggggccauugcuggcuucauugaagggggguggacagggaugguagauggaugguacgguuaucaccaucaaaaugagcaggggucaggauaugcagccgaccugaagagcacacagaaugccauugacaagauuacuaacaaaguaaauucuguuauugaaaagaugaacacacaguucacagcaguagguaaagaguucaaccaccuggaaaaaagaauagagaauuuaaauaaaaaaguugaugaugguuuccuggacauuuggacuuacaaugccgaacuguugguucuauuggaaaaugaaagaacuuuggacuaccacgauucaaaugugaagaacuuauaugaaaagguaagaaaccaguuaaaaaacaaugccaaggaaauuggaaauggcugcuuugaauuuuaccacaaaugcgauaacacgugcauggaaagugucaaaaaugggacuuaugauuacccaaaauacucagaggaagcaaaauuaaacagagaagaaauagaugggguaaagcuggaaucaacaaggauuuaccagauuuuggcgaucuauucaacugccgcuaguucauugguacugguagucucccugggggcaaucaguuuuuggaugugcucuaaugggucucuacaguguagaauauguauuuaa

SEQ ID NO: 42124 - RNA, 1701 nt, Artificial Sequence
  derived and/or modified CDS sequence (wt) from hemagglutinin__InfluenzaA__AGO02697
augaaggcaauacuaguaguucugcuauauacauuugcaaccgcaaaugcagacacauuauguauagguuaucaugcgaacaauucaacagacacuguagacacaguacuagaaaagaauguaacaguaacacacucuguuaaccuucuagaagacaagcauaacgggaaacuaugcaaacuaagagggguagccccauugcauuuggguaaauguaacauugcuggcuggauccugggaaauccagagugugaaucacucuccacagcaaguucaugguccuacauuguggaaacaucuaguucagacaauggaacguguuacccaggagauuucaucaauuaugaggagcuaagagagcaauugagcucagugucaucauuugaaagguuugagauauuccccaagacaaguucauggcccaaucaugacucgaacaaagguguaacggcagcauguccucacgcuggagcaaaaagcuucuacaaaaauuuaauauggcuaguuaagaaaggaaauucauacccaaagcucagccaauccuacauuaaugauaaagggaaagaaguccucgugcuguggggcauucaccauccaucuacuacugcugaccaacaaagucucuaucagaaugcagaugcauauguuuuuguggggacaucaagauacagcaagaaguucaagccggaaauagcaauaagacccaaagugagggaucaagaagggagaaugaacuauuacuggacauuaguagagccgggagacaaaauaacauucgaagcaacuggaaaucuagugguaccgagauaugcauucacaauggaaagaaaugcuggaucugguauuaucauuucagauacaccaguccacgauugcaauacaacuugucagacacccgagggugcuauaaacaccagccucccauuucagaauauacauccgaucacaauuggaaaauguccaaaguauguaaaaagcacaaaauugagacuggccacaggauugaggaaugucccgucuauucaaucuagaggccuauucggggccauugccggcuucauugaagggggguggacagggaugguagauggaugguacgguuaucaccaucaaaaugagcaggggucaggauaugcagccgaccugaagagcacacaaaaugccauugacaagauuacuaacaaaguaaauucuguuauugaaaagaugaauacacaguucacagcaguggguaaagaguucaaccaccuggaaaaaagaauagagaauuuaaauaaaaaaguugaugaugguuuccuggacauuuggacuuacaaugccgaacuguugguucuauuggaaaaugaaagaacuuuggacuaccacgauucaaaugugaagaacuuguaugaaaagguaagaaaccaguuaaaaaacaaugccaaggaaauuggaaacggcugcuuugaauuuuaccacaaaugcgauaacacgugcauggaaagugucaaaaaugggacuuaugacuacccaaaauacucagaggaagcaaaauuaaacagagaaaaaauagaugggguaaagcuggaaucaacaaggauuuaccagauuuuggcgaucuauucaacugucgccaguucauugguacugguagucucccugggggcaaucagcuucuggaugugcucuaaugggucucuacaguguagaauauguauuuaa

SEQ ID NO: 42125 - RNA, 1701 nt, Artificial Sequence
  derived and/or modified CDS sequence (wt) from hemagglutinin__InfluenzaA__AGO02698
augaagacuaucauugcuuugagcuacauucuaugucugguuuucgcucaaaaacuuccuggaaaugacaauagcacggcaacgcugugccuugggcaccaugcaguaccaaacggaacgauagugaaaacaaucacgaaugaccgaauugaaguuacuaaugcuacugagcugguucagaauuccucaauaggugaaauaugcgacaguccucaucagauucuugauggagaaaacugcacacuaauagaugcucuacugggagacccucagugugauggcuuucaaaauaagaaaugggaccuuuuuguugaacgaagcaaagccuacagcaacuguuacccuuaugaugugccggauuaugccucccuuaggucacuaguugccucauccggcacacuggaguuuaacaaugaaagcuucaauuggacuggagucacucaaaacggaacaaguucugcuugcauaaggagaucuaauaguaguuucuuuaguagauuaaauugguugacccacuuaaacuucaaauacccagcauugaacgugacuaugccaaacaaugaacaauuugacaaauuguacauuugggggguucaccacccagguacggacaaggaccaaaucuuccuguaugcucaaucaucaggaagaaucacaguaucuaccaaaagaagccaacaagcuguaaucccaaauaucggaucuagacccagaauaaggaauaucccuagcagaauaagcaucuauuggacaauaguaaaaccgggagacauacuuuugauuaacagcacagggaaucuaauugcuccuagggguuacuucaaaauacgaagugggaaaagcucaauaaugagaucagaugcacccauuggcaaaugcaagucugaaugcaucacuccaaauggaagcauucccaaugacaaaccauuccaaaauguaaacaggaucacauacggggccugucccagauauguuaagcaaagcacucugaaauuggcaacaggaaugcgaaauguaccagagaaacaaacuagaggcauauuuggcgcaauagcagguuucauagaaaaugguugggagggaaugguggaugguugguacgguuucaggcaucaaaauucugagggaagaggacaagcagcagaucucaaaagcacccaagcagcaaucgaucaaaucaaugggaagcugaaucgauugaucgggaaaaccaacgagaaauuccaucagauugaaaaagaauucucagaaguagaagggagaauucaggaccuugagaaauauguugaggacacuaaaauagaucucuggucauacaacgcggagcuucuuguugcccuggagaaccaacauacaauugaucuaacugacucagaaaugaacaaacuguuugaaaaaacaaagaagcaacugagggaaaaugcugaggauaugggcaaugguuguuucaaaauauaccacaaaugugacaaugccugcauaggaucaauaagaaauggaacuuaugaccacaauguguacagggaugaagcauuaaacaaccgguuccagaucaagggaguugagcugaagucaggguacaaagauuggauccuauggauuuccuuugccauaucauguuuuuugcuuuguguugcuuuguugggguucaucaugugggccugccaaaagggcaacauuaggugcaacauuugcauuuga

SEQ ID NO: 42126 - RNA, 1701 nt, Artificial Sequence; identical to SEQ ID NO: 41870
  derived and/or modified CDS sequence (wt) from hemagglutinin__InfluenzaA__AGO02699

SEQ ID NO: 42127 - RNA, 1701 nt, Artificial Sequence
  derived and/or modified CDS sequence (wt) from hemagglutinin__InfluenzaA__AGO02700
augaaggcaauacuaguaguucugcuauauacauuugcaaccgcaaaugcagacacauuauguauagguuaucaugcgaacaauucaacagacacuguagacacaguacuagaaaagaauguaacaguaacacacucuguuaaccuucuggaagacaagcauaacgggaaacuaugcaaacugagagggguagccccauugcauuuggguaaauguaacauugcuggcuggauccugggaaauccagagugugaaucacucuccacagcaagcucaugguccuacaucguggaaacaucuaguucagacaauggaacgugcuacccaggagauuucaucaauuaugaggagcuaagagagcaauugagcucagugucaucauuugaaagguuugagauauuccccaagacaaguucauggcccaaucaugacucgaacaaagguguaacggcagcauguccucaagcuggagcaaaaagcuucuacaaaaauuuaauauggcuaguuaaaaaaggaaauucauacccaaagcucagcaaauccuacauuaacgauaaagggaaagaaguccucgugcuauggggcauucaccauccaucuacuagugcugaccaacaaagucucuaucagaaugcagaugcauauguuuuuguggggacaucaaaauacagcaagaaguucaagccggaaauagcaguaagacccaaagugagggaucaagaagggagaaugaacuauuacuggacacuaguagagccgggagacaaaauaacauucgaagcaacuggaaaucuauugguaccaagauaugcauucgcaauggaaagaaaugcuggaucugguauuaucauuucagauacaccaguccacgauugcaauacaacuugucagacacccaagggugcuauaaacaccagccucccauuucagaauauacauccgaucacaauuggaaaaugucccaaauauguaaaaagcacaaaauugagacuggccacaggauugaggaaugucccgucuauucaaucuagaggccuauuuggggccauugccgguuucauugaagggggguggacagggaugguagauggaugguacgguuaucaccaucaaaaugcgcaggggucaggauaugcagccgaccugaagagcacacagaaugccauugacaagauuacuaacaaaguaaauucuguuauugaaaagaugaauacacaguucacagcaguagguaaagaguucaaccaccuggaaaaaagaauagagaauuuaaauaaaaaaguugaugaugguuuccuggacauuuggacuuacaaugccgaacuguugguucuauuggaaaaugaaagaacuuuggacuaccacgauucaaaugugaaaaacuuauaugaaaagguaagaagccaguuaaaaaacaaugccaaggaaauuggaaacggcugcuuugaauuuuaccacaaaugcgauaacacgugcauggaaagugucaaaaaugggacuuaugacuacccaagauacucagaggaagcaaaauuaaacagagaagaaauagaugggauaaagcuagaaucaacaaggauuuaccagauuuuggcgaucuauucaacugucgccaguucauugguacugauagucucccugggggcaaucaguuucuggaugugcucuaaugggucucuacaguguagaauauguauuuaa

SEQ ID NO: 42128 - RNA, 1701 nt, Artificial Sequence
  derived and/or modified CDS sequence (wt) from hemagglutinin__InfluenzaA__AGO02701
augaaggcaauacuaguaguucugcuauauacauuugcaaccgcaaaugcagacacauuauguauagguuaucaugcgaacaauucaacagacacuguagacacaguacuagaaaagaauguaacaguaacacacucuguuaaccuuuuagaagacaagcauaacgggaaacuaugcaaacugagagggguagccccauugcauuuggguaaauguaacauugcuggcuggauccugggaaauccagagugugaaucacucuccacagcaagcucaugguccuacauuguggaaacaucuaguucagacaauggaacguguuacccaggagauuucaucaauuaugaagagcuaagagagcaauugagcucagugucacauuuugaaagguuugagauauuccccaagacaaguucauggcccaaucaugacucgaacaaagguguaacggcagcauguccucaugcuggagcaaaaagcuucuacaaaaauuuaauauggcuaguuaaaaaaggaaauucauacccaaagcucagcaaauccuacauuaacgauaaagggaaagaaguccucgugcuauggggcauucaccauccaucuacuagugcugaccaacaaagucucuaucagaaugcagaugcauauguuuuuguggggacaucaaaauacagcaagaaguucaagccggaaauagcaguaagacccaaagugagggaucaagaagggagaaugaacuauuacuggacacuaguagagccgggagacaaaauaacauucgaagcaacuggaaaucuauugguaccgagauaugcauucgcaauggaaagaaaugcuggaucugguauuaucauuucagauacaccaguccacgauugcaauacaacuugucagacacccaagggugcuauaaacaccagccucccauuucagaauauacauccgaucacaauuggaaaauguccaaaauauguaaaaagcacaaaauugagacuggccacaggauugaggaaugucccgucuauucaaucuagaggccuauuuggggccauugccgguuucauugaagggggguggacagggaugguagauggaugguacgguuaucaccaucaaaaugggcaggggucaggauaugcagccgaccugaagagcacacagaaugccauugacaagauuacuaacaaaguaaauucuguuauugaaaagaugaauacacaguucacagcaguagguaaagaguucaaccaccuggaaaaaagaauagagaauuuaaauaaaaaaguugaugaugguuuccuggacauuuggacuuacaaugccgaacuguugguucuauuggaaaaugaaagaacuuuggacuaccacgauucaaaugugaaaaacuuauaugaaaagguaagaagccaguuaaaaaacaaugccaaggaaauuggaaacggcugcuuugaauuuuaccacaaaugcgauaacacgugcauggaaagugucaaaaaugggacuuaugacuacccaaaauacucagaggaagcaaaauuaaacagagaagaaauagaugggguaaagcuggaaucaacaaggauuuaccagauuuuggcgaucuauucaacugucgccaguucauugguacugguagucucccugggggcaaucaguuucuggaugugcucuaaugggucucuacaguguagaauauguauuuaa

SEQ ID NO: 42129 - RNA, 1683 nt, Artificial Sequence
  derived and/or modified CDS sequence (wt) from hemagglutinin__InfluenzaA__AGO51374
augaacacucaaauccugguauucgcucugauugcgaucauuccaacaaaugcagacaaaaucugccucggacaucaugccgugucaaacggaaccaaaguaaacacauuaacugaaagaggaguggaagucgucaaugcaacugaaacaguggaacgaacaaacauccccaggauuugcucaaaagggaaaaggacaguugaccucggucaauguggacuccuggggacaaucacuggaccaccucaaugugaccaauuccuagaauuuucagccgauuuaauuauugagaggcgagaaggaagugaugucuguuauccugggaaauucgugaaugaagaagcucugaggcaaauucucagagaaucaggcggaauugacaaggaagcaaugggauucacauacaguggaauaagaacuaauggagcaaccagugcauguaggagaucaggaucuucauucuaugcagaaaugaaauggcuccugucaaacacagauaaugcugcauucccgcagaugacuaagucauauaaaaauacaagaaaaagcccagcucuaauaguaugggggauccaucauuccguaucaacugcagagcaaaccaagcuauaugggaguggaaacaaacuggugacaguugggaguucuaauuaucaacaaucuuuuguaccgaguccaggagcgagaccacaaguuaauggucuaucuggaagaauugacuuucauuggcuaaugcuaaaucccaaugauacagucacuuucaguuucaauggggcuuucauagcuccagaccgugcaagcuuccugagaggaaaaucuaugggaauccagaguggaguacagguugaugccaauugugaaggggacugcuaucauaguggagggacaauaauaaguaacuugccauuucagaacauagauagcagggcaguuggaaaauguccgagauauguuaagcaaaggagucugcugcuagcaacagggaugaagaauguuccugagauuccaaagggaagaggccuauuuggugcuauagcggguuucauugaaaauggaugggaaggccuaauugaugguugguaugguuucagacaccagaaugcacagggagagggaacugcugcagauuacaaaagcacucaaucggcaauugaucaaauaacaggaaaauuaaaccggcuuauagaaaaaaccaaccaacaauuugaguugauagacaaugaauucaaugagguagagaagcaaaucgguaaugugauaaauuggaccagagauucuauaacagaaguguggucauacaaugcugaacucuugguagcaauggagaaccagcauacaauugaucuggcugauucagaaauggacaaacuguacgaacgagugaaaagacagcugagagagaaugcugaagaagauggcacugguugcuuugaaauauuucacaagugugaugaugacuguauggccaguauuagaaauaacaccuaugaucacagcaaauacagggaagaggcaaugcaaaauagaauacagauugacccagucaaacuaagcagcggcuacaaagaugugauacuuugguuuagcuucggggcaucauguuucauacuucuagccauuguaaugggccuugucuucauauguguaaagaauggaaacaugcggugcacuauuuguauauaa

SEQ ID NO: 42130 - RNA, 1701 nt, Artificial Sequence
  derived and/or modified CDS sequence (wt) from hemagglutinin__InfluenzaA__AGO86686
augaagacuaucauugcuuugagcuacauuuuaugucuggcuuucgcucaaaaacuucccggaaaugacaacagcacggcaacgcugugccugggacaccaugcagugccaaacggaacgcuagugaaaacaaucacgaaugaccaaauugaagugacuaaugcuacugagcugguucagaguuccucaacagguagaauaugcgacaguccucaccaaauccuugauggagaaaacugcacacugauagaugcucuauugggagacccacauugugauggcuuccaaaauaaggaaugggaccuuuuuguugaacgcagcaaagccuacagcaacuguuacccuuaugaugugccggauuaugccucccuuaggucacuaguugccucauccggcacccuggaguuuaacaaugaaagcuucaauuggacuggagucgcucagaauggaacaagcucugcuugcaaaaggagaucuauuaaaaguuucuuuaguagauugaauugguugcaccaauuagaaaacagauauccagcacugaacgugacuaugccaaacaaugacaaauuugacaaauuguacauuugggggguucaccacccgaguacggacagugaccaaaucagcguauaugcccaagcaucagggagagucacagucucuaccaaaagaagccaacaaacuguaaucccgaauaucggauccagacccuggguaagggguaucuccagcagaauaagcaucuauuggacaauaguaaaaccgggagacauacuuuugauuaacagcacagggaaucuaauugcuccucgggguuacuucaaaauacgaagugggaaaagcucaauaaugaggucagaugcacccauuggcaaaugcaauucugaaugcaucacuccaaauggaagcauucccaaugacaaaccauuucaaaauguaaacaggaucacauauggggccugucccagauauguuaagcaaaacacucugaaauuggcaacagggaugcggaauguaccagagaaacaaacuagaggcauauucggcgcaaucgcggguuucauagaaaaugguugggagggaaugauggacgguugguacgguuucaggcaucaaaauucugagggcacaggacaagcagcagaucuuaaaagcacucaagcagcaaucaaccaaaucaacgggaaacugaauaaguuaaucgagaaaacgaacgagaaauuccaucaaauugaaaaagaauucucagaaguagaagggagaauucaggaccucgagaaauauguugaggacacuaaaauagaucucuggucguacaacgcggagcuucuuguugcccuggagaaccaacauacaauugaucuaacugacucagaaaugaacaaacuguuugaaagaacaaggaagcaacugagagaaaaugcugaggauaugggcaaugguuguuucaaaacauaccacaaaugugacaaugccugcauagggucaaucagaaauggaacuuaugaccaugauguauacagagacgaagcauuaaacaaccgguuccagaucaaagguguugagcugaagucaggauacaaagauuggauccuauggauuuccuuugccauaucauguuuuuugcuuuguguuguuuugcugggguucauuaugugggccugccaaaaaggcaacauuaggugcaacauuugcauuuga

SEQ ID NO: 42131 - RNA, 1701 nt, Artificial Sequence; identical to SEQ ID NO: 42086
  derived and/or modified CDS sequence (wt) from hemagglutinin__InfluenzaA__AGQ16240

SEQ ID NO: 42132 - RNA, 1701 nt, Artificial Sequence; identical to SEQ ID NO: 42052
  derived and/or modified CDS sequence (wt) from hemagglutinin__InfluenzaA__AGQ16241

SEQ ID NO: 42133 - RNA, 1701 nt, Artificial Sequence
  derived and/or modified CDS sequence (wt) from hemagglutinin__InfluenzaA__AGQ16242
augaaggcaauacuaguaguucugcuauauacauuugcaaccgcaaaugcagacacauuauguauagguuaucaugcgaacaauucaacagacacuguagacacaguacuagaaaagaauguaacaguaacacacucuguuaaccuucuagaagacaagcauaacgggaaacuaugcaaacuaagagggguagccccauugcauuuggguaaauguaacauugcuggcuggauccugggaaauccagagugugaaucacucuccacagcaaguucaugguccuacauuguggaaacaucuaguucagacaauggaacguguuacccaggagauuucaucaauuaugaggagcuaagagagcaauugagcucagugucaucauuugaaagguuugagauauuccccaagacaaguucauggcccaaucaugacucgaacaaagguguaacggcagcauguccucacgcuggagcaaaaagcuucuacaaaaauuuaauauggcuaguuaaaaaaggaaauucauacccaaagcucagcacauccuacauuaaugauaaagggaaagaaauccucgugcuguggggcauucaccauccaucuacuacugcugaccaacaaagucucuaucagaaugcagaugcauauguuuuuguggggacaucaagauacagcaagaaguucaagccggaaauagcaauaagacccaaagugagggaucaagaagggagaaugaacuauuacuggacacuaguagagccgggagacaaaauaacauucgaagcaacuggaaaucuagugguaccgagauaugcauucgcaauggaaagaaaugcuggaucugguauuaucauuucagauacaccaguccacgauugcaauacaacuugucagacacccgagggugcuauaaacaccagccucccauuucagaauauacauccgaucacaauuggaaaauguccaaaguauguaaaaagcacaaaauugagacuggccacaggauugaggaaugucccgucuauucaaucuagaggccuauucggggccauugccggcuucauugaagggggguggacagggaugguagauggaugguacgguuaucaccaucaaaaugagcaggggucaggauaugcagccgaccugaagagcacacaaaaugccauugacaagauuacuaacaaaguaaauucuguuauugaaaagaugaauacacaguucacagcaguggguaaagaguucaaccaccuggaaaaaagaauagagaauuuaaauaaaaaaguugaugaugguuuccuggacauuuggacuuacaaugccgaacuguugguucuauuggaaaaugaaagaacuuuggacuaccacgauucaaaugugaagaacuuguaugaaaagguaagaaaccaguuaaaaaacaaugccaaggaaauuggaaacggcugcuuugaauuuuaccacaaaugcgauaacacgugcauggaaagugucaaaaaugggacuuacgacuacccaaaauacucagaggaagcaaaauuaaacagagaaaaaauagaugggguaaagcuggaaucaacaaggauuuaccagauuuuggcgaucuauucaacugucgccaguucauugguacugguagucucccugggggcaaucaguuucuggaugugcucuaaugggucucuacaguguagaauauguauuuaa

SEQ ID NO: 42134 - RNA, 1701 nt, Artificial Sequence; identical to SEQ ID NO: 42072
  derived and/or modified CDS sequence (wt) from hemagglutinin__InfluenzaA__AGQ16243

SEQ ID NO: 42135 - RNA, 1701 nt, Artificial Sequence
  derived and/or modified CDS sequence (wt) from hemagglutinin__InfluenzaA__AGQ16245
augaaggcaauacuaguaguucugcuauacacauuugcaaccgcaaaugcagacacauuauguauagguuaucaugcgaacaauucaacagacacuguagacacaguacuagaaaagaauguaacaguaacacacucuguuaaccuucuagaagacaaacauaacgggaaacuaugcaaacuaagagggguagccccauugcauuuggguaaauguaacauugcuggcuggauccugggaaauccagagugugaaucacucuccacagcaaguucaugguccuacauuguggaaacaucuaguucagacaauggaacguguuacccaggagauuucaucaauuaugaggagcuaagagagcaauugagcucagugucaucauuugaaagguuugagauauuccccaagacaaguucauggcccaaucaugacucgaacaaagguguaacggcagcauguccucaugcuggagcaaaaagcuucuacaaaaauuuaauauggcuaguuaaaaaaggaaauucauacccaaagcucagcaaauccuacauuaaugauaaagggaaagaaguccucgugcuguggggcauucaccauccaucuacuacugcugaccaacaaagucucuaucagaaugcagaugcauauguuuuuguggggacaucaagauacagcaagaaguucaagccggaaauagcaauaagacccaaagugagggaucaagaagggagaaugaacuauuacuggacacuaauagagccaggagacaaaauaacauucgaagcaacuggaaaucuagugguaccgagauaugcauucgcaauggaaagaaaugcuggaucugguauuaucauuucagauacaccaguccacgauugcaauacaacuugucagacacccgagggugcuauaaacaccagccucccauuucagaauauacauccgaucacaauuggaaaauguccaaaguauguaaaaagcacaaaauugagacuggccacaggauugaggaaugucccgucuauucaaucuagaggccuauucggggccauugccggcuucauugaagggggguggacagggaugguagauggaugguacgguuaucaccaucaaaaugagcaggggucaggauaugcagccgaccugaagagcacacaaaaugccauugacaagauuacuaacaaaguaaauucuguuauugaaaagaugaauacacaguucacagcaguggguaaagaguucaaccaccuggaaaaaagaauagagaauuuaaauaaaaaaguugaugaugguuuccuggacauuuggacuuacaaugccgaacuguugguucuauuggaaaaugaaagaacuuuggacuaccaugauucaaaugugaagaacuuguaugaaaagguaagaaaccaguuaaaaaacaaugccaaggaaauuggaaacggcugcuuugaauuuuaccacaaaugcgauaacacgugcauggaaagugucaaaaaugggacuuaugacuacccaaaauacucagaggaagcaaaauuaaacagagaaaaaauagaugggguaaagcuggaaucaacaaggauuuaccagauuuuggcgaucuauucaacugucgccaguucauugguacugguagucucccugggggcaaucaguuucuggaugugcucuaaugggucucuacaguguagaauauguauuuaa

SEQ ID NO: 42136 - RNA, 1701 nt, Artificial Sequence
  derived and/or modified CDS sequence (wt) from hemagglutinin__InfluenzaA__AGQ16247
augaaggcaauacuaguaguuaugcuauauacauuugcaaccgcaaaugcagacacauuauguauagguuaucaugcgaacaauucaacagacacuguagacacaguacuagaaaagaauguaacaguaacacacucuguuaaucuucuagaagacaagcauaacgggaaacuaugcaaacuaagagggguagccccauugcauuuggguaaauguaacauugcuggcuggauccugggaaauccagagugugaaucacucuccacagcaagcucaugguccuacauuguggaaacaucugguucagacaauggaacguguuacccaggagauuucaucgauuaugaggagcuaagagagcaauugagcucagugucaucauuugaaagguuugagauauuccccaaaacaaguucauggccaaaucaugacucgaacaaagguguaacggcagcauguccucaugcuggagcaaaaggcuucuacaaaaauuuaauauggcuaguuaaaaaaggaaauucauacccaaagcucagcauauccuacauuaaugacaaagggaaagaaguccucgugcuauggggcauucaccauccaucuacuacugcugaccaacaaagucucuaucagaaugcagauacauauguuuuuguggggacaucaagauacagcaagaaguucaagccggaaauagcaauaagacccaaagugagggaucaagaagggagaaugaacuauuacuggacacuaguagagccgggagacaaaauaacauucgaagcaacuggaaaucuagugguaccgagauaugcauuugcaauggaaagaaaugcuggaucugguauuaucauuucagauacaccaguucacgauugcaauacaacuugucagacacccaagggugcuauaaacaccagccucccauuucagaauauacauccgaucacaauuggaaaauguccaaaauauguaaaaagcacaaaauugagacuggccacaggauugaggaaugucccgucuauucaaucuagaggccuauuuggggccauugcuggcuucauugaagggggguggacagggaugguagauggaugguacgguuaucaccaucaaaaugagcaggggucaggauaugcagccgaccugaagagcacacagaaugccauugacaagauuacuaacaaaguaaauucuguuauugaaaagaugaauacacaguucacagcaguagguaaagaguucaaccaccuggaaaaaagaauagagaauuuaaauaaaaagguugaugaugguuuccuggacauuuggacuuacaaugccgaacuguugguucuauuggaaaaugaaagaacuuuggacuaccacgauucaaaugugaagaacuuauaugaaaagguaagaaaccaguuaaaaaacaaugccaaggaaauuggaaauggcugcuuugaauuuuaccacaaaugcgauaacacgugcauggaaagugucaaaaaugggacuuaugauuacccaaaauacucagaggaagcaaaauuaaacagagaagaaauagaugggguaaagcuggaaucaacaaggauuuaccagauuuuggcgaucuauucaacugccgcuaguucauugguacugguagucucccugggggcaaucaguuuuuggaugugcucuaaugggucucuacaguguagaauauguauuuaa

SEQ ID NO: 42137 - RNA, 1701 nt, Artificial Sequence
  derived and/or modified CDS sequence (wt) from hemagglutinin__InfluenzaA__AGQ16248
augcaggcaauacuaguaguucugcuauauacauuugcaaccgcaacugcagacacauuauguauagguuaucaugcgaacaauucaacagacacuguagacacaguacuagaaaagaauguaacaguaacacacucuguuaaccuucuagaagacaagcauaacgggaaacuaugcaaacuaagagggguagccccauugcauuuggguaaauguaacauugcuggcuggauccugggaaauccagagugugaaucacucuccacagcaaguucaugguccuacauuguggaaacaucuaguucagacaauggaacguguuacccaggagauuucaucaauuaugaggagcuaagagagcaauugagcucagugucaucauuugaaagguuugagauauuccccaagacaaguucauggcccaaucaugacucgaacaaagguguaacggcagcauguccucacgcuggagcaaaaagcuucuacaaaaauuuaauauggcuaguuaaaaaaggaaauucauacccaaagcucagccaauccuacauuaaugauaaagggaaagaaguccucgugcuguggggcauucaccauccaucuacuacugcugaccaacaaagucucuaucagaaugcagaugcauauguuuuuguggggacaucaagauacagcaagaaguucaagccggaaauagcaauaagacccaaagugagggaucaagaagggagaaugaacuauuacuggacacuaguagagccgggagacaaaauaacauucgaagcaacuggaaaucuagugguaccgagauaugcauucacaauggaaagaaaugcuggaucugguauuaucauuucagauacaccaauccacgauugcaauacaacuugucagacacccgagggugcuauaaacaccagccucccauuucagaauauacauccgaucacaauuggaaaauguccaaaguauguaaaaagcacaaaauugagacuggccacaggauugaggaaugucccgucuauucaaucuagaggccuauucggggccauugccggcuucauugaagggggguggacagggaugguagauggaugguacgguuaucaccaucaaaaugagcaggggucaggauaugcagccgaccugaagagcacacaaaaugccauugacaagauuacuaacaaaguaaauucuguuauugaaaagaugaauacacaguucacagcaguggguaaagaguucaaccaccuggaaaaaagaauagagaauuuaaauaaaaaaguugaugaugguuuccuggacaucuggacuuacaaugccgaacuguugguucuauuggaaaaugaaagaacuuuggacuaccacgauucaaaugugaagaacuuguaugaaaagguaagaaaccaguuaaaaaacaaugccaaggaaauuggaaacggcugcuuugaauuuuaccacaaaugcgauaacacgugcauggaaagugucaaaaaugggacuuaugacuaccccaaauacucagaggaagcaaaauuaaacagagaaaaaauagaugggguaaagcuggaaucaacaaggauuuaccagauuuuggcgaucuauucaacugucgccaguucauugguacugguagucucccugggagcaaucagcuucuggaugugcucuaaugggucucuacaguguagaauauguauuuaa

SEQ ID NO: 42138 - RNA, 1701 nt, Artificial Sequence
  derived and/or modified CDS sequence (wt) from hemagglutinin__InfluenzaA__AGQ16329
augaagacuaucauugcuuugagcuacauucuaugucugguuuucgcucaaaaacuuccuggaaaugacaauagcacggcaacgcugugccuugggcaccaugcaguaccaaacggaacaauagugaaaacaaucacgaaugaccgaauugaaguuacuaaugcuacugagcugguucagaauuccucaauaggugaaauaugcgacaguccucaucagauucuugauggagaaaacugcacacuaauagaugcucuauugggagacccucagugugauggcuuucaaaauaagaaaugggaccuuuuuguugaacgaagcaaagccuacagcaacuguuacccuuaugaugugccggauuaugccucccuuaggucacuaguugccucauccggcacacuggaguuuaacaaugaaagcuucaauuggacuggagucacucaaaacggaacaaguucugcuugcauaaggagaucuaauaguaguuucuuuaguagauuaaauugguugacccacuuaaacuucaaauacccagcauugaacgugacuaugccaaacaaugaacaauuugacaaauuguacauuugggggguucaccacccggguacggacaaggaccaaaucuuccuguaugcucaaucaucaggaagaaucacaguaucuaccaaaagaagccaacaagcuguaaucccaaauaucggaucuagacccagaauaaggaauauuccuagcagaauaagcaucuauuggacaauaguaaaaccgggagacauacuuuugauuaacagcacagggaaucuaauugcuccuagggguuacuucaaaauacgaagugggaaaagcucaauaaugagaucagaugcacccauuggcaaaugcaagucugaaugcaucacuccaaauggaagcauucccaaugacaaaccauuccaaaauguaaacaggaucacauacggggccugucccagauauguuaagcaaagcacucugaaauuggcaacaggaaugcgaaauguaccagagaaacaaacuagaggcauauuuggcgcaauagcagguuucauagaaaaugguugggaggggaugguggaugguugguacgguuucaggcaucaaaauucugagggaagaggacaagcagcagaucucaaaagcacccaagcagcaaucgaucaaaucaaugggaagcugaaucgauugaucgggaaaaccaacgagaaauuccaucagauugaaaaagaauucucagaaguagaagggagaauucaggaccuugagaaauauguugaggacacuaaaauagaucucuggucauacaacgcggagcuucuuguugcccuggagaaccaacauacaauugaucuaacugacucagaaaugaacaaacuguuugaaaaaacaaagaagcaacugagggaaaaugcugaggauaugggcaaugguuguuucaaaauauaccacaaaugugacaaugccugcauaggaucaauaagaaauggaacuuaugaccacaauguguacagggaugaagcauuaaacaaccgguuccagaucaagggaguugagcugaagucaggguacaaagauuggauccuauggauuuccuuugccauaucauguuuuuugcuuuguguugcuuuguugggguucaucaugugggccugccaaaagggcaacauuaggugcaacauuugcauuuga

SEQ ID NO: 42139 - RNA, 1701 nt, Artificial Sequence
  derived and/or modified CDS sequence (wt) from hemagglutinin__InfluenzaA__AGQ16331
augaagacuaucauugcuuugagcuacauucuaugucugguuuucgcucaaaaacuuccuggaaaugacaauagcacggcaacgcugugccuugggcaccaugcaguaccaaacggaacgauagugaaaacaaucacgaaugaccgaauugaaguuacuaaugcuacugagcugguucagaauuccucaauaggugaaauaugcgacaguccucaucagauccuugauggagaaaacugcacacuaauagaugcucuauugggagacccucagugugauggcuuucaaaauaagaaaugggaccuuuuuguugaacgaagcaaagccuacagcaacuguuacccuuaugaugugccggauuaugccucccuuaggucacuaguugccucauccggcacacuggaguuuaacaaugaaagcuucaauuggacuggagucacucaaaacggaacaaguucugcuugcauaaggagaucuaauaguaguuucuuuaguagauuaaauugguugacccacuuaaacuucaaauacccagcauugaacgugacuaugccaaacaaugaacaauuugacaaauuguacauuugggggguucaccacccggguacggacaaggaccaaaucuuccuguaugcucaaucaucaggaagaaucacaguaucuaccaaaagaagccaacaagcuguaaucccgaauaucggaucuagacccagaauaaggaauaucccuagcagaauaagcaucuauuggacaauaguaaaaccgggagacauacuuuugauuaacagcacagggaaucuaauugcuccuagggguuacuucaaaauacgaagugggaaaagcucaauaaugagaucagaugcacccauuggcaaaugcaagucugaaugcaucacuccaaauggaagcauucccaaugacaaaccauuccaaaaugucaacaggaucacauacggggccugucccagauauguuaagcaaagcacucugaaauuggcaacaggaaugcgaaauguaccagagaaacaaacuagaggcauauuuggcgcaauagcggguuucauagaaaaugguugggagggaaugguggaugguugguacgguuucaggcaucaaaauucugagggaagaggacaagcagcagaucucaaaagcacucaagcagcaaucgaucaaaucaaugggaagcugaaucgauugaucgggaaaaccaacgagaaauuccaucagauugaaaaagaauucucagaaguagaagggagaauucaggaccuugagaaauauguugaggacacuaaaauagaucucuggucauacaacgcggagcuucuuguugcccuggagaaccaacauacaauugaucuaacugacucagaaaugaacaaacuguuugaaaaaacaaagaagcaacugagggaaaaugcugaggauaugggcaaugguuguuucaaaauauaccacaaaugugacaaugccugcauaggaucaaucagaaauggaacuuaugaccacgauguguacagggaugaagcauuaaacaaccgguuccagaucaagggaguugagcugaagucaggguacaaagauuggauccuauggauuuccuuugccauaucauguuuuuugcuuuguguugcuuuguugggguucaucaugugggccugccaaaagggcaacauuaggugcaacauuugcauuuga

SEQ ID NO: 42140 - RNA, 1701 nt, Artificial Sequence
  derived and/or modified CDS sequence (wt) from hemagglutinin__InfluenzaA__AGQ16332
augaagacuaucauugcuuugagcuacauucuaugucugguuuucgcucaaaaacuuccuggaaaugacaauagcacggcaacgcugugccuugggcaccaugcaguaccaaacggaacgauagugaaaacaaucacgaaugaccgaauugaaguuacuaaugcuacugagcugguucaaaauuccucaauaggugaaauaugcgacaguccucaucagauucuugauggagaaaacugcacacuaauagaugcucuauugggggacccucagugugauggcuuucaaaauaagaaaugggaccuuuuuguugaacgaagcaaagccuacagcaacuguuacccuuaugaugugccggauuaugccucccuuaggucacuaguugccucauccggcacacuggaguuuaacaaugaaagcuucaauuggacuggagucacucaaaacggaacaaguucugcuugcauaaggagaucuaauaguaguuucuuuaguagauuaaauugguugacccacuuaaacuucaaauacccagcauugaacgugacuaugccaaacaaugaacaauuugacaaauuguacauuugggggguucaccacccagguacggacaaggaccaaaucuuccuguaugcucaaucaucaggaagaaucacaguaucuaccaaaagaagccaacaagcuguaaucccaaauaucggaucuagacccagaauaaggaauaucccuagcagaauaagcaucuauuggacaauaguaaaaccgggagacauacuuuugauuaacagcacagggaaucuaauugcuccuagggguuacuucaaaauacgaagugggaaaagcucaauaaugagaucagaugcacccauuggcaaaugcaagucugaaugcaucacuccaaauggaagcauucccaaugacaaaccauuccaaaauguaaacaggaucacauacggggccugucccagauauguuaagcaaagcacucugaaauuggcaacaggaaugcgaaauguaccagagaaacaaacuagaggcauauuuggcgcaauagcagguuucauagaaaaugguugggagggaaugguggaugguugguacgguuucaggcaucaaaauucugagggaagaggacaagcagcagaucucaaaagcacccaagcagcaaucgaucaaaucaaugggaagcugaaucgauugaucgggaaaaccaacgagaaauuccaucagauugaaaaagaauucucagaaguagaagggagaauucaggaccuugagaaauauguugaggacacuaaaauagaucucuggucauacaacgcggagcuucuuguugcccuggagaaccaacauacaauugaucuaacugacucagaaaugaacaaacuguuugaaaaaacaaagaagcaacugagggaaaaugcugaggauaugggcaaugguuguuucaaaauauaccacaaaugugacaaugccugcauaggaucaauaagaaauggaacuuaugaccacaauguguacagggaugaagcauuaaacaaccgguuccagaucaagggaguugagcugaagucaggguacaaagauuggauccuauggauuuccuuugccauaucauguuuuuugcuuuguguugcuuuguugggguucaucaugugggccugccaaaagggcaacauuaggugcaacauuugcauuuga

SEQ ID NO: 42141 - RNA, 1701 nt, Artificial Sequence
  derived and/or modified CDS sequence (wt) from hemagglutinin__InfluenzaA__AGQ16333
augaagacuaucauugcuuugagcuacauucuaugucugguuuucgcucaaaaacuuccuggaaaugacaauagcacggcaacgcugugccuugggcaccaugcaguaccaaacggaacgauagugaaaacaaucacgaaugaccgaauugaaguuacuaaugcuacugagcugguucagaauuccucaauaggugaaauaugcgacaguccucaucagauccuugauggagaaaacugcacacuaauagaugcucuauugggagacccucagugugauggcuuucaaaauaagaaaugggaccuuuuuguugaacgaagcaaagccuacagcaacuguuacccuuaugaugugccggauuaugccucccuuaggucacuaguugccucauccggcacacuggaguuuaacaaugaaagcuucaauuggacuggagucacucaaaacggaacaaguucugcuugcauaaggagaucuaauaguaguuucuuuaguagauuaaauugguugacccacuuaaacuucaaauacccagcauugaacgugacuaugccaaacaaugaacaauuugacaaauuguacauuugggggguucaccacccggguacggacaaggaccaaaucuuccuguaugcucaaucaucaggaagaaucacaguaucuaccaaaagaagccaacaagcuguaaucccaaauaucggaucuagacccagaauaaggaauaucccuagcagaauaagcaucuauuggacaauaguaaaaccgggagacauacuuuugauuaacagcacagggaaucuaauugcuccuagggguuacuucaaaauacgaagugggaaaagcucaauaaugagaucagaugcacccauuggcaaaugcaagucugaaugcaucacuccaaauggaagcauucccaaugacaaaccauuccaaaauguaaacaggaucacauacggggccugucccagauauguuaagcaaagcacucugaaauuggcaacaggaaugcgaaauguaccagagaaacaaacuagaggcauauuuggcgcaauagcggguuucauagaaaaugguugggagggaaugguggaugguugguacgguuucaggcaucaaaauucugagggaagaggacaagcagcagaucucaaaagcacucaagcagcaaucgaucaaaucaaugggaagcugaaucgauugaucgggaaaaccaacgagaaauuccaucagauugaaaaagaauucucagaaguagaagggagaauucaggaccuugagaaauauguugaggacacuaaaauagaucucuggucauauaacgcggagcuucuuguugcccuggagaaccaacauacaauagaucuaacugacucagaaaugaacaaacuguuugaaaaaacaaagaagcaacugagggaaaaugcugaggauaugggcaaugguuguuucaaaauauaccacaaaugugacaaugccugcauaggaucaauaagaaauggaacuuaugaccacaauguguacagggaugaagcauuaaacaaccgguuccagaucaagggaguugagcugaagucaggguacaaagauuggauccuauggauuuccuuugccauaucauguuuuuugcuuuguguugcuuuguugggguucaucaugugggccugccaaaagggcaacauuaggugcaacauuugcauuuga

SEQ ID NO: 42142 - RNA, 1701 nt, Artificial Sequence
  derived and/or modified CDS sequence (wt) from hemagglutinin__InfluenzaA__AGQ16335
augaagacuaucauugcuuugagcuacauucuaugucugguuuucgcucaaaaacuuccuggaaaugacaauagcacggcaacgcugugccuugggcaccaugcaguaccaaacggaacgauagugaaaacaaucacaaaugaccgaauugaaguuacuaaugcuacugagcugguucagaauuccucaauaggugaaauaugcgacaguccucaucagguccuugauggagaaaacuguacacuaauagaugcucuauugggagacccucagugugauggcuuucaaaauaagaaaugggaccuuuuuguugaacgaagcaaagccuacagcaacuguuacccuuaugaugugccggauuaugccucccuuaggucacuaguugccucauccggcacacuggaguuuaacaaugaaagcuucaauuggacuggagucacucaaaacggaacaaguucugcuugcauaaggagaucuaauaguaguuucuuuaguagauuaaauugguugacccacuuaaacuucaaauacccagcauugaacgugacuaugccaaacaaugaacaauuugacaaauuguacauuugggggguucaccacccggguacggacaaggaccaaaucuuccuguaugcucaaucaucaggaagaaucacaguaucuaccaaaagaagccaacaagcuguaaucccgaauaucggaucuagacccagaauaaggaauaucccuagcagaauaagcaucuauuggacaauaguaaaaccaggagacauacuuuugauuaacagcacagggaaucuaauugcuccuagggguuacuucaaaauacgaagugggaaaagcucaauaaugagaucagaugcacccauuggcaaaugcaagucugaaugcaucacuccaaauggaagcauuccaaaugacaaaccauuccaaaauguaaacaggaucacauacggggccugucccagauauguuaagcaaaacacucugaaauuggcaacaggaaugcgaaacguaccagagaaacaaacuagaggcauauuuggcgcaauagcggguuucauagaaaaugguugggagggaaugguggaugguugguacgguuucaggcaucaaaauucugagggaagaggacaagcagcagaucucaaaagcacucaagcagcaaucgaucaaaucaaugggaagcugaaucgauugaucgggaaaaccaacgagaaauuccaucagauugaaaaagaauucucagaaguagaagggagaauucaggaccuugagaaauauguugaggacacuaaaauagaucucuggucauacaacgcggagcuucuuguugcccuggagaaccaacauacaauugaucuaacugacucagaaaugaacaaacuguuugaaaaaacaaagaagcaacugagggaaaaugcugaggauaugggcaaugguuguuucaaaauauaccacaaaugugacaaugccugcauaggaucaaucagaaauggaacuuaugaccacgauguauacagggaugaagcauuaaacaaccgguuccagaucaagggaguugagcugaagucaggguacaaagauuggauccuauggauuuccuuugccauaucauguuuuuugcuuuguguugcuuuguugggguucaucaugugggccugccaaaagggcaacauuaggugcaacauuugcauuuga

SEQ ID NO: 42143 - RNA, 1701 nt, Artificial Sequence
  derived and/or modified CDS sequence (wt) from hemagglutinin__InfluenzaA__AGQ16336
augaagacuaucauugcuuugagcuacauucuaugucugguuuucgcucaaaaacuuccuggaaaugacaauagcacggcaacgcugugccuugggcaccaugcaguaccaaacggaacgauagugaaaacaaucacgaaugaccgaauugaaguuacuaaugcuacugagcugguucagaauuccucaauaggugaaauaugcgacaguccucaucagauucuugauggagaaaacuguacacuaauagaugcucuauugggagacccucagugugauggcuuucaaaauaagaaaugggaccuuuuuguugaacgaagcaaagccuacagcaacuguuacccuuaugaugugccggauuaugccucccuuaggucacuaguugccucauccggcacacuggaguuuaacaaugaaagcuucaauuggacuggagucacucaaaacggaacaaguucugcuugcauaaggagaucuaaucguaguuucuuuaguagauuaaauugguugacccacuuaaacuucaaauacccagcauugaacgugacuaugccaaacaacgaacaauuugacaaauuguacauuugggggguucaccacccggguacggacaaggaccaaaucuuccuguaugcgcaaucaucaggaagaaucacaguaucuaccaaaagaagccaacaagcuguaaucccgaauaucggaucuagacccagaauaaggaauaucccuagcagaauaagcaucuauuggacaauaguaaaaccaggagacauacuuuugauuaacagcacagggaaucuaauugcuccuagggguuacuucaaaauacgaagugggaaaagcucaauaaugagaucagaugcacccauuggcaaaugcaagucugaaugcaucacuccaaauggaagcauuccaaaugacaaaccauuccaaaauguaaacaggaucacauacggggccugucccagauauguuaagcaaagcacucugaaauuggcaacaggaaugcgaaacguaccagagaaacaaacuagaggcauauuuggcgcaauagcggguuucauagaaaaugguugggagggaaugguggaugguugguacgguuucaggcaucaaaauucugagggaagaggacaagcagcagaucucaaaagcacucaagcagcaaucgaucaaaucaaugggaagcugaaucgauugaucgggaaaaccaacgagaaauuccaucagauugaaaaagaauucucagaaguagaagggagaauucaggaccuugagaaauauguugaggacacuaaaauagaucucuggucauacaacgcggagcuucuuguugcccuggagaaccaacauacaauugaucuaacugacucagaaaugaacaaacuguuugaaaaaacaaagaagcaacugagggaaaaugcugaggauaugggcaaugguuguuucaaaauauaccacaaaugugacaaugccugcauaggaucaaucagaaauggaacuuaugaccacgauguauacagggaugaagcauuaaacaaccgguuccagaucaagggaguugagcugaagucaggguacaaagauuggauccuauggauuuccuuugccauaucauguuuuuugcuuuguguugcuuuguugggguucaucaugugggccugccaaaagggcaacauuaggugcaacauuugcauuuga

SEQ ID NO: 42144 - RNA, 1701 nt, Artificial Sequence; identical to SEQ ID NO: 42142
  derived and/or modified CDS sequence (wt) from hemagglutinin__InfluenzaA__AGQ16337

SEQ ID NO: 42145 - RNA, 1701 nt, Artificial Sequence
  derived and/or modified CDS sequence (wt) from hemagglutinin__InfluenzaA__AGQ16338
augaagacuaucauugcuuugagcuacauucuaugucugguuuucgcucaaaaacuuccuggaaaugacaauagcacggcaacgcugugccuugggcaccaugcaguaccaaacggaacgauagucaaaacaaucacgaaugaccgaauugaaguuacuaaugcuacugagcugguucagaauuccucaauaggugaaauaugcgacaguccucaucagauccuugauggagaaaacugcacacuaauagaugcucuauugggagacccucagugugauggcuuucaaaauaagaaaugggaccuuuuuguugaacgaagcaaagccuacagcaacuguuacccuuaugaugugccggauuaugccucccuuaggucacuaguugccucauccggcacacuggaguuuaacaaugaaagcuucaauugggcuggagucacucaaaacggaacaaguucugcuugcauaaggggaucuaauaguaguuucuuuaguagauuaaauugguugacccacuuaaacuucaaauacccagcauugaacgugacuaugccaaacaaugaacaauuugacaaauuguacauuugggggguucaccacccggguacggacaaggaccaaaucuuccuguaugcucaaucaucaggaagaaucacaguaucuaccaaaagaagccaacaagcuguaaucccgaauaucggaucuagacccagaauaaggaauaucccuagcagaauaagcaucuauuggacaauaguaaaaccgggagacauacuuuugauuaacagcacagggaaucuaauugcuccuagggguuacuucaaaauacgaagugggaaaagcucaauaaugagaucagaugcacccauuggcaaaugcaagucugaaugcaucacuccaaauggaagcauucccaaugacaaaccauuccaaaauguaaacaggaucacauacggggccugucccagauauguuaagcaaagcacucugaaauuggcaacaggaaugcgaaauguaccagagaaacaaacuagaggcauauuuggcgcaauagcggguuucauagaaaaugguugggagggaaugauggaugguugguacgguuucaggcaucaaaauucugagggaagaggacaagcagcagaucucaaaagcacucaagcagcaaucgaucaaaucaaugggaagcugaaucgauugaucgggaaaaccaacgagaaauuccaucagauugaaaaagaauucucagaaguagaagggagaauucaggaccuugagaaauauguugaggacacaaaaauagaucucuggucauacaacgcggagcuucuuguugcccuggagaaccaacauacaauugaucuaacugacucagaaaugaacaaacuguuugaaaaaacaaagaagcaacugagggaaaaugcugaggauaugggcaaugguuguuucaaaauauaccacaaaugugacaaugccugcauaggaucaaucagaaauggaacuuaugaccacgauguauacagggaugaagcauuaaacaaucgguuccagaucaagggaguugagcugaagucaggguacaaagauuggauccuauggauuuccuuugccauaucauguuuuuugcuuuguguugcuuuguugggguucaucaugugggccugccaaaagggcaacauuaggugcaacauuugcauuuga

SEQ ID NO: 42146 - RNA, 1701 nt, Artificial Sequence
  derived and/or modified CDS sequence (wt) from hemagglutinin__InfluenzaA__AGQ16339
augaagacuaucauugcuuugagcuacauucuaugucugguuuucgcucaaaaacuuccuggaaaugacaauagcacggcaacgcugugccuugggcaccaugcaguaccaaacggaacgauagugaaaacaaucacgaaugaccgaauugaaguuacuaaugcuacugagcugguucagaauuccucaauaggugaaauaugcgacaguccucaucagauccuugauggagaaaacugcacacuaauagaugcucuauugggagacccucagugugauggcuuucaaaauaagaaaugggaccuuuuuguugaacgaagcaaagccuacagcaacuguuacccuuaugaugugccggauuaugccucccuuaggucacuaguugccucauccggcacacuggaguuuaacaaugaaagcuucaauugggcuggagucacucaaaacggaacaaguucugcuugcauaaggggaucuaauaguaguuucuuuaguagauuaaauugguugacccacuuaaacuucaaauacccagcauugaacgugacuaugccaaacaaugaacaauuugacaaauuguacauuugggggguucaccacccggguacggacaaggaccaaaucuuccuguaugcucaaucaucaggaagaaucacaguaucuaccaaaagaagccaacaagcuguaaucccgaauaucggaucuagacccagaauaaggaauaucccuagcagaauaagcaucuauuggacaauaguaaaaccgggagacauacuuuugauuaacagcacagggaaucuaauugcuccuagggguuacuucaaaauacgaagugggaaaagcucaauaaugagaucagaugcacccauuggcaaaugcaagucugaaugcaucacuccaaauggaagcauucccaaugacaaaccauuccaaaauguaaacaggaucacauacggggccugucccagauauguuaagcaaagcacucugaaauuggcaacaggaaugcgaaauguaccagagaaacaaacuagaggcauauuuggcgcaauagcggguuucauagaaaaugguugggagggaaugauggaugguugguacgguuucaggcaucaaaauucugagggaagaggacaagcagcagaucucaaaagcacucaagcagcaaucgaucaaaucaaugggaagcugaaucgauugaucgggaaaaccaacgagaaauuccaucagauugaaaaagaauucucagaaguagaagggagaauucaggaccuugagaaauauguugaggacacaaaaauagaucucuggucauacaacgcggagcuucuuguugcccuggagaaccaacauacaauugaucuaacugacucagaaaugaacaaacuguuugaaaaaacaaagaagcaacugagggaaaaugcugaggauaugggcaaugguuguuucaaaauauaccacaaaugugacaaugccugcauaggaucaaucagaaauggaacuuaugaccacgauguauacagggaugaagcauuaaacaaccgguuccagaucaagggaguugagcugaagucaggguacaaaaauuggauccuauggauuuccuuugccauaucauguuuuuugcuuuguguugcuuuguugggguucaucaugugggccugccaaaagggcaacauuaggugcaacauuugcauuuga

SEQ ID NO: 42147 - RNA, 1701 nt, Artificial Sequence
  derived and/or modified CDS sequence (wt) from hemagglutinin__InfluenzaA__AGQ16340
augaagacuaucauugcuuugagcuacauucuaugucugguuuucgcucaaaaacuuccuggaaaugacaauagcacggcaacgcugugccuugggcaccaugcaguaccaaacggaacgauagugaaaacaaucacgaaugaccgaauugaagucacuaaugcuacugagcugguucagaauuccucaauaggugaaauaugcgacaguccucaucagauccuugauggagaaaacugcacacuaauagaugcucuauugggagacccucagugugauggcuuucaaaauaagaaaugggaccuuuuuguugaacgaagcaaagccuacagcaacuguuacccuuaugaugugccggauuaugccucccuuaggucacuaguugccucauccggcacacuggaguuuaacaaugaaagcuucaauugggcuggggucacucaaaacggaacaaguucugcuugcauaaggggaucuaauaguaguuucuuuaguagauuaaauugguugacccacuuaaacuucaaauacccagcauugaacgugacuaugccaaacaaugaacaauuugacaaauuguacauuugggggguucaccacccggguacggacaaggaccagaucuuccuguaugcucaaucaucaggaagaaucacaguaucuaccaaaagaagccaacaagcuguaaucccgaauaucggaucuagacccagaauaaggaauaucccuagcagaauaagcaucuauuggacaauaguaaagccgggagacauacuuuugauuaacagcacagggaaucuaauugcuccuagggguuacuucaaaauacgaagugggaaaagcucaauaaugagaucagaugcacccauuggcaaaugcaagucugaaugcaucacuccaaauggaagcauucccaaugacaaaccauuccaaaauguaaacaggaucacauacggggccugucccagauauguuaagcaaagcacucugaaauuggcaacaggaaugcgaaauguaccagagaaacaaaccagaggcauauuuggcgcaauagcggguuucauagaaaaugguugggagggaaugguggaugguugguacgguuucaggcaucaaaauucugagggaagaggacaagcagcagaucucaaaagcacucaagcagcaaucgaucaaaucaaugggaagcugaaucgauugaucgggaaaaccaacgagaaauuccaucagauugaaaaagaauucucagaaguagaagggagaauucaggaccuugagaaauauguugaggacacaaaaauagaucucuggucauacaacgcggagcuucuuguugcccuggagaaccaacauacaauugaucuaacugacucagaaaugaacaaacuguuugaaaaaacaaagaagcaacugagggaaaaugcugaggauaugggcaaugguuguuucaaaauauaccacaaaugugacaaugccugcauaggaucaaucagaaauggaacuuaugaccacgauguauacagggaugaagcauuaaacaaccgguuccagaucaagggaguugagcugaagucaggguacaaagauuggauccuauggauuuccuuugccauaucauguuuuuugcuuuguguugcuuuguugggguucaucaugugggccugccaaaagggcaacauuaggugcaacauuugcauuuga

SEQ ID NO: 42148 - RNA, 1701 nt, Artificial Sequence
  derived and/or modified CDS sequence (wt) from hemagglutinin__InfluenzaA__AGQ16341
augaagacuaucauugcuuugagcuacauucuaugucugguuuucgcucaaaaacuuccuggaaaugacaauagcacggcaacgcugugccuugggcaccaugcaguaccaaacggaacgauagugaaaacaaucacgaaugaccgaauugaaguuacuaaugcuacugagcugguucagaauuccucaauaggugaaauaugcgacaguccucaucagauccuugauggagaaaacugcacacuaauagaugcucuauugggagacccucagugugauggcuuucaaaauaagaaaugggaccuuuuuguugaacgaagcaaagccuacagcaacuguuacccuuaugaugugccggauuaugccucccuuaggucacuaguugccucauccggcacacuggaguuuaacaaugaaagcuucaauuggacuggagucacucaaaacggaacaaguucugcuugcauaaggagaucuaauaguaguuucuuuaguagauuaaauugguugacccacuuaaacuucaaauacccagcauugaacgugacuaugccaaacaaugaacaauuugacaaauuguacauuugggggguucaccacccggguacggacaaggaccaaaucuuccuguaugcucaaucaucaggaagaaucacaguaucuaccaaaagaagccaacaagcuguaaucccaaauaucggaucuagacccagaauaaggaauaucccuagcagaauaagcaucuauuggacaauaguaaaaccgggagacauacuuuugauuaacagcacagggaaucuaauugcuccuagggguuacuucaaaauacgaagugggaaaagcucaauaaugagaucagaugcacccauuggcaaaugcaagucugaaugcaucacuccaaauggaagcauucccaaugacaaaccauuccaaaauguaaacaggaucacauacggggccugucccagauauguuaagcaaagcacucugaaauuggcaacaggaaugcgaaauguaccagagaaacaaacuagaggcauauuuggcgcaauagcggguuucauagaaaaugguugggagggaaugguggaugguugguacgguuucaggcaucaaaauucugagggaagaggacaagcagcagaucucaaaagcacucaagcagcaaucgaucaaaucaaugggaagcugaaucgauugaucgggaaaaccaacgagaaauuccaucagauugaaaaagaauucucagaaguagaagggagaauucaggaccuugagaaauauguugaggacacuaaaauagaucucuggucauacaacgcggagcuucuuguugcccuggagaaccaacauacaauugaucuaacugacucagaaaugaacaaacuguuugaaaaaacaaagaagcaacugagggaaaaugcugaggauaugggcaaugguuguuucaaaauauaccacaaaugugacaaugccugcauaggaucaauaagaaauggaacuuaugaccacaauguguacagggaugaagcauuaaacaaccgguuccagaucaagggaguugagcugaagucaggguacaaagauuggauccuauggauuuccuuugccauaucauguuuuuugcuuuguguugcuuuguugggguucaucaugugggccugccaaaagggcaacauuaggugcaacauuugcauuuga

SEQ ID NO: 42149 - RNA, 1701 nt, Artificial Sequence; identical to SEQ ID NO: 41880
  derived and/or modified CDS sequence (wt) from hemagglutinin__InfluenzaA__AGQ16342

SEQ ID NO: 42150 - RNA, 1701 nt, Artificial Sequence
  derived and/or modified CDS sequence (wt) from hemagglutinin__InfluenzaA__AGQ16343
augaagacuaucauugcuuugagcuacauucuaugucugguuuucgcucaaaaacuuccuggaaaugacaauagcacggcaacgcugugccuugggcaccaugcaguaccaaacggaacgauagugaaaacaaucacgaaugaccgaauugaaguuacuaaugcuacugagcugguucagaauuccucaauaggugaaauaugcgacaguccucaucagauccuugauggagaaaacugcacacuaauagaugcucuauugggagacccucagugugauggcuuucaaaauaagaaaugggaccuuuuuguugaacgaagcaaagccuacagcaacuguuacccuuaugaugugccggauuaugccucccuuaggucacuaguugccucuuccggcacacuggaguuuaacaaugaaagcuucaauugggcuggagucacucaaaacggaacaaguucugcuugcauaaggggaucuaauaguaguuucuuuaguagauuaaauugguugacccacuuaaacuucaaauacccagcauugaacgugacuaugccaaacaaugaacaauuugacaaauuguacauuugggggguucaccacccggguacggacaaggaccaaaucuuccuguaugcucaaucaucaggaagaaucacaguaucuaccaaaagaagccaacaagcuguaaucccgaauaucggaucuagacccagaauaagggauaucccuagcagaauaagcaucuauuggacaauaguaaaaccgggagacauacuuuugauuaacagcacagggaaucuaauugcuccuagggguuacuucaaaauacgaagugggaaaagcucaauaaugagaucagaugcacccauuggcaaaugcaagucugaaugcaucacuccaaauggaagcauucccaaugacaaaccauuccaaaauguaaacaggaucacauacggggccugucccagauauguuaagcaaagcacucugaaauuggcaacaggaaugcgaaauguaccagagaaacaaacuagaggcauauuuggcgcaauagcggguuucauagaaaaugguugggagggaaugguggaugguugguacgguuucaggcaucaaaauucugagggaagaggacaagcagcagaucucaaaagcacucaagcagcaaucgaucaaaucaaugggaagcugaaucgauugaucgggaaaaccaacgagaaauuccaucagauugaaaaagaauucucagaaguagaagggagaauucaggaccucgagaaauauguugaggacacaaaaauagaucucuggucauacaacgcggagcuucuuguugcccuggagaaccaacauacaauugaucuaacugacucagaaaugaacaaacuguuugaaaaaacaaagaagcaacugagggaaaaugcugaggauaugggcaaugguuguuucaaaauauaccacaaaugugacaaugccugcauaggaucaaucagaaauggaacuuaugaccacgauguauacagggaugaagcauuaaacaaccgguuccagaucaagggaguugagcugaagucaggguacaaagauuggauccuauggauuuccuuugccauaucauguuuuuugcuuuguguugcuuuguugggguucaucaugugggccugccaaaagggcaacauuaggugcaacauuugcauuuga

SEQ ID NO: 42151 - RNA, 1701 nt, Artificial Sequence
  derived and/or modified CDS sequence (wt) from hemagglutinin__InfluenzaA__AGQ16344
augaagacuaucauugcuuugagcuacauucuaugucugguuuucgcucaaaaacuuccuggaaaugacaauagcacggcaacgcugugccuugggcaccaugcaguaccaaacggaacgauagugaaaacaaucacgaaugaccgaauugaaguuacuaaugcuacugagcugguucagaauuccucaauaggugaaauaugcgacaguccucaucagauccuugauggagaaaacugcacacuaauagaugcucuauugggagacccucagugugauggcuuucaaaauaagaaaugggaccuuuuuguugaacgaagcaaagccuacagcaacuguuacccuuaugaugugccggauuaugccucccuuaggucacuaguugccucauccggcacacuggaguuuaacaaugaaagcuucaauugggcuggagucacucaaaacggaacaaguucugcuugcauaaggggaucuaauaguaguuucuuuaguagauuaaauugguugacccacuuaaacuucaaauacccagcauugaacgugacuaugccaaacaaugaacaauuugacaaauuguacauuugggggguucaccacccggguacggacaaggaccaaaucuuccuguaugcucaaucaucaggaagaaucacaguaucuaccaaaagaagccaacaagcuguaaucccgaauaucggaucuagacccagaauaaggaauaucccuagcagaauaagcaucuauuggacaauaguaaaaccgggagacauacuuuugauuaacagcacagggaaucuaauugcuccuagggguuacuucaaaauacgaagugggaaaagcucaauaaugagaucagaugcacccauuggcaaaugcaagucugaaugcaucacuccaaauggaagcauucccaaugacaaaccauuccaaaauguaaacaggaucacauacggggccugucccagauauguuaagcaaagcacucugaaauuggcaacaggaaugcgaaauguaccagagaaacaaacuagaggcauauuuggcgcaauagcggguuucauagaaaaugguugggagggaaugauggaugguugguacgguuucaggcaucaaaauucugagggaagaggacaagcagcagaucucaaaagcacucaagcagcaaucgaucaaaucaaugggaagcugaaucgauugaucgggaaaaccaacgagaaauuccaucagauugaaaaagaauucucagaaguagaagggagaauucaggaccuugagaaauauguugaggacacaaaaauagaucucuggucauacaacgcggagcuucuuguugcccuggagaaccaacauacaauugaucuaacugacucagaaaugaacaaacuguuugaaaaaacaaagaagcaacugagggaaaaugcugaggauaugggcaauggcuguuucaaaauauaccacaaaugugacaaugccugcauaggaucaaucagaaauggaacuuaugaccacgauguauacagggaugaagcauuaaacaaccgguuccagaucaagggaguugagcugaagucaggguacaaagauuggauccuauggauuuccuuugccauaucauguuuuuugcuuuguguugcuuuguugggguucaucaugugggccugccaaaagggcaacauuaggugcaacauuugcauuuga

SEQ ID NO: 42152 - RNA, 1701 nt, Artificial Sequence; identical to SEQ ID NO: 42148
  derived and/or modified CDS sequence (wt) from hemagglutinin__InfluenzaA__AGQ16345

SEQ ID NO: 42153 - RNA, 1701 nt, Artificial Sequence
  derived and/or modified CDS sequence (wt) from hemagglutinin__InfluenzaA__AGQ16346
augaagacuaucauugcuuugagcuacauucuaugucugguuuucgcucaaaaacuuccuggaaaugacaauagcacggcaacgcugugccuugggcaccaugcaguaccaaacggaacgauagugaaaacaaucacgaaugaccgaauugaaguuacuaaugcuacugagcugguucagaauuccucaauaggugaaauaugcgacaguccucaucagauccuugauggagaaaacugcacacuaauagaugcucuauugggagacccucagugugauggcuuucaaaauaagaaaugggaccuuuuuguugaacgaagcaaagccuacagcaacuguuacccuuaugaugugccggauuaugccucccuuaggucacuaguugccucauccggcacacuggaguuuaacaaugaaagcuucaauuggacuggagucacucaaaacggaacaaguucugcuugcauaaggagaucuaauaguaguuucuuuaguagauuaaauugguugacccacuuaaacuucaaauacccagcauugaacgugacuaugccaaacaaugaacaauuugacaaauuguacauuugggggguucaccacccggguacggacaaggaccaaaucuuccuguaugcucaaucaucaggaagaaucacaguaucuaccaaaagaagccaacaagcuguaaucccaaauaucggaucuagacccagaauaaggaauaucccuagcagaauaagcaucuauuggacaauaguaaaaccgggagacauacuuuugauuaacagcacagggaaucuaauugcuccuagggguuacuucaaaauacgaagugggaaaagcucaauaaugagaucagaugcacccauuggcaaaugcaggucugaaugcaucacuccaaauggaagcauucccaaugacaaaccauuccaaaauguaaacaggaucacauacggggccugucccagauauguuaagcaaagcacucugaaauuggcaacaggaaugcgaaauguaccagagaaacaaacuagaggcauauuuggcgcaauagcggguuucauagaaaaugguugggagggaaugguggaugguugguacgguuucaggcaucaaaauucugagggaagaggacaagcagcagaucucaaaagcacucaagcagcaaucgaucaaaucaaugggaagcugaaucgauugaucgggaaaaccaacgagaaauuccaucagauugaaaaagaauucucagaaguagaagggagaauucaggaccuugagaaauauguugaggacacuaaaauagaucucuggucauacaacgcggagcuucuuguugcccuggagaaccaacauacaauugaucuaacugacucagaaaugaacaaacuguuugaaaaaacaaagaagcaacugagggaaaaugcugaggauaugggcaaugguuguuucaaaauauaccacaaaugugacaaugccugcauaggaucaauaagaaauggaacuuaugaccacaauguguacagggaugaagcauuaaacaaccgguuccagaucaagggaguugagcugaagucaggguacaaagauuggauccuauggauuuccuuugccauaucauguuuuuugcuuuguguugcuuuguugggguucaucaugugggccugccaaaagggcaacauuaggugcaacauuugcauuuga

SEQ ID NO: 42154 - RNA, 1701 nt, Artificial Sequence
  derived and/or modified CDS sequence (wt) from hemagglutinin__InfluenzaA__AGQ16347
augaagacuaucauugcuuugagcuacauucuaugucugguuuucgcucaaaaacuuccuggaaaugacaauagcacggcaacgcugugccuugggcaccaugcaguaccaaacggaacgauagugaaaacaaucacgaaugaccgaauugaaguuacuaaugcuacugagcugguucagaauuccucaauaggugaaauaugcgacaguccucaucagauucuugauggagaaaacugcacacuaauagaugcucuauugggagacccucagugugauggcuuucaaaauaagaaaugggaccuuuuuguugaacgaagcaaagccuacagcaacuguuacccuuaugaugugccggauuaugccucccuuaggucacuaguugccucauccggcacauuggaguuuaacaaugaaagcuucaauuggacuggagucacucaaaacggaacaaguucugcuugcauaaggagaucuaauaguaguuucuuuaguagauuaaauugguugacccacuuaaacuucaaauacccagcauugaacgugacuaugccaaacaaugaacaauuugacaaauuguacauuugggggguucaccacccagguacggacaaggaccaaaucuuccuguaugcucaaucaucaggaagaaucacaguaucuaccaaaagaagccaacaagcuguaaucccaaauaucggaucuagacccagaauaaggaauaucccuagcagaauaagcaucuauuggacaauaguaaaaccgggagacauacuuuugauuaacagcacagggaaucuaauugcuccuagggguuacuucaaaauacgaagugggaaaagcucaauaaugagaucagaugcacccauuggcaaaugcaagucugaaugcaucacuccaaauggaagcauucccaaugacaaaccauuccaaaauguaaacaggaucacauacggggccugucccagauauguuaagcaaagcacucugaaauuggcaacaggaaugcgaaauguaccagagaaacaaacuagaggcauauuuggcgcaauagcagguuucauagaaaaugguugggagggaaugguggaugguugguacgguuucaggcaucaaaauucugagggaagaggacaagcagcagaucucaaaagcacccaagcagcaaucgaucaaaucaaugggaagcugaaucgauugaucgggaaaaccaacgagaaauuccaucagauugaaaaagaauucucagaaguagaagggagaauucaggaccuugagaaauauguugaggacacuaaaauagaucucuggucauacaacgcggagcuucuuguugcccuggagaaccaacauacaauugaucuaacugacucagaaaugaacaaacuguuugaaaaaacaaagaagcaacugagggaaaaugcugaggauaugggcaaugguuguuucaaaauauaccacaaaugugacaaugccugcauaggaucaauaagaaauggaacuuaugaccacaauguguacagggaugaagcauuaaacaaccgguuccagaucaagggaguugagcugaagucaggguacaaagauuggauccuauggauuuccuuugccauaucauguuuuuugcuuuguguugcuuuguugggguucaucaugugggccugccaaaagggcaacauuaggugcaacauuugcauuuga

SEQ ID NO: 42155 - RNA, 1701 nt, Artificial Sequence
  derived and/or modified CDS sequence (wt) from hemagglutinin__InfluenzaA__AGQ16348
augaagacuaucauugcuuugagcuacauucuaugucugguuuucgcucaaaaacuuccuggaaaugacaauagcacggcaacgcugugccuugggcaccaugcaguaccaaacggaacgauagugaaaacaaucacgaaugaccgaauugaaguuacuaaugcuacugagcugguucagaauuccucaauaggugaaauaugcgacaguccucaucagauccuugauggagaaaacugcacacuaauagaugcucuauugggagacccucagugugauggcuuucaaaauaagaaaugggaccuuuuuguugaacgaagcaaagccuacagcaacuguuacccuuaugaugugccggauuaugccucccuuaggucacuaguugccucauccggcacacuggaguuuaacaaugaaagcuucaauugggcuggagucacucaaaacggaacaaguucugcuugcauaaggggaucuaauaguaguuucuuuaguagauuaaauugguugacccacuuaaacuucaaauacccagcauugaacgugacuaugccaaacaaugaacaauuugacaaauuguacauuugggggguucaccacccggguacggacaaggaccaaaucuuccuguaugcucaaucaucaggaagaaucacaguaucuaccaaaagaagccaacaagcuguaaucccgaauaucggaucuagacccagaauaaggaauaucccuagcagaauaagcaucuauuggacaauaguaaaaccgggagacauacuuuugauuaacagcacagggaaucuaauugcuccuagggguuacuucaaaauacgaagugggaaaagcucaauaaugagaucagaugcacccauuggcaaaugcaagucugaaugcaucacuccaaauggaagcauucccaaugacaaaccauuccaaaauguaaacaggaucacauacggggccugucccagauauguuaagcaaagcacucugaaauuggcaacaggaaugcgaaauguaccagagaaacaaacuagaggcauauuuggcgcaauagcggguuucauagaaaaugguugggagggaaugguggaugguugguacgguuucaggcaucaaaauucugagggaagaggacaagcagcagaucucaaaagcacucaagcagcaaucgaucaaaucaaugggaagcugaaucgauugaucgggaaaaccaacgagaaauuccaucagauugaaaaagaauucucagaaguagaagggagaauucaggaccuugagaaauauguugaggacacaaaaauagaucucuggucauacaacgcggagcuucuuguugcccuggagaaccaacauacaauugaucuaacugacucagaaaugaacaaacuguuugaaaaaacaaagaagcaacugagggaaaaugcugaggauaugggcaaugguuguuucaaaauauaccacaaaugugacaaugccugcauaggaucaaucagaaauggaacuuaugaccacgauguauacagggaugaagcauuaaacaaccgguuccagaucaagggaguugaguugaagucaggguacaaagauuggauccuauggauuuccuuugccauaucauguuuuuugcuuuguguugcuuuguugggguucaucaugugggccugccaaaagggcaacauuaggugcaacauuugcauuuga

SEQ ID NO: 42156 - RNA, 1701 nt, Artificial Sequence; identical to SEQ ID NO: 42154
  derived and/or modified CDS sequence (wt) from hemagglutinin__InfluenzaA__AGQ16349

SEQ ID NO: 42157 - RNA, 1701 nt, Artificial Sequence
  derived and/or modified CDS sequence (wt) from hemagglutinin__InfluenzaA__AGQ16350
augaagacuaucauugcuuugagcuacauucuaugucugguuuucgcucaaaaacuuccuggaaaugacaauagcacggcaacgcugugccuugggcaccaugcaguaccaaacggaacgauagugaaaacaaucacgaaugaccgaauugaaguuacuaaugcuacugagcugguucagaauuccucaauaggugaaauaugcgacaguccucaucagauccuugauggagaaaacugcacacuaauagaugcucuauugggagacccucagugugauggcuuucaaaauaagaaaugggaccuuuuuguugaacgaagcaaagccuacagcaacuguuacccuuaugaugugccggauuaugccucccuuaggucacuaguugccucauccggcacacuggaguuuaacaaugaaagcuucaauuggacuggagucacucaaaacggaacaaguucugcuugcauaaggagaucuaauaguaguuucuuuaguagauuaaauugguugacccacuuaaacuucaaauacccagcauugaacgugacuaugccaaacaaugaacaauuugacaaauuguacauuugggggguucaccacccagguacggacaaggaccaaaucuuccuguaugcucaaucaucaggaagaaucacaguaucuaccaaaagaagccaacaagcuguaaucccaaauaucggaucuagacccagaauaaggaauaucccuagcagaauaagcaucuauuggacaauaguaaaaccgggagacauacuuuugauuaacagcacagggaaucuaauugcuccuagggguuacuucaaaauacgaagugggaaaagcucaauaaugagaucagaugcacccauuggcaaaugcaagucugaaugcaucacuccaaauggaagcauucccaaugacaaaccauuccaaaauguaaacaggaucacauacggggccugucccagauauguuaagcaaagcacucugaaauuggcaacaggaaugcgaaauguaccagagaagcaaacuagaggcauauuuggcgcaauagcggguuucauagaaaaugguugggagggaaugguggaugguugguacgguuucaggcaucaaaauucugagggaagaggacaagcagcagaucucaaaagcacucaagcagcaaucgaucaaaucaaugggaagcugaaucgauugaucgggaaaaccaacgagaaauuccaucagauugaaaaagaauucucagaaguagaagggagaauucaggaccuugagaaauauguugaggacacuaaaauagaucucuggucauacaacgcggagcuucuuguugcccuggagaaccaacauacaauugaucuaacugacucagaaaugaacaaacuguuugaaaaaacaaagaagcaacugagggaaaaugcugaggauaugggcaaugguuguuucaaaauauaccacaaaugugacaaugccugcauaggaucaauaagaaauggaacuuaugaccacaauguguacagggaugaagcauuaaacaaccgguuccagaucaagggaguugagcugaagucaggguacaaagauuggauccuauggauuuccuuugccauaucauguuuuuugcuuuguguugcuuuguugggguucaucauguggaccugccaaaagggcaacauuaggugcaacauuugcauuuga

SEQ ID NO: 42158 - RNA, 1701 nt, Artificial Sequence
  derived and/or modified CDS sequence (wt) from hemagglutinin__InfluenzaA__AGQ47719
augaaggcaauacuauuagucuuguuauguacauuuacagccacaaaugcagacacacuauguauagguuaucaugcaaauaauucaacugacacuguugauacagugcuagaaaagaauguaacaguaacacacucuguuaaucuucuugaagacagacauaacgggaaacuauguaaacuaggggggauagccccauugcaccuggguaaauguaacauugccggauggcuuuugggaaacccagaaugugaauuacuauucacaguaagcucauggucuuacauuguggaaacaucgaacucagacaaugggacauguuacccaggagauuucaucaauuaugaagagcugagagagcaguugaguucagugucaucauuugaaagauucgagauauuccccaagacaaguucguggcccgaucaugaaacaaacagaggugugacggcagcaugcccuuaugcuggagcaaacagcuucuacagaaauuuaauauggcuggugaaaaaaggaaauucauacccaaagcucagcaaauccuauguuaacaauaaagggaaggaaguccuugugcuauggggcauucaccauccaccuaccaguacugaucaacaaagucucuaccaaaaugcagaugccuauguuuuuguagggucaucaaaauauaacaggaaguucaagccagaaauagcagcaagacccaaggugagaggucaagcagggaggaugaacuauuacuggacacuaauagaaccuggagacacaauaacauucgaagcaacuggaaauuuagugguaccaagauaugcuuucgcaaugaauagagguucuggaucugguauuauaauuucggaugcaccaauucaugauuguaacacgaagugucaaacacccaagggugccauaaacaccagccucccauuucagaauauacauccagucacaauuggagaauguccaaaauaugucaaaagcacaaaauugagaauggcuacaggacuaaggaauaucccgucuauucaaucuagaggucuguuuggagccauugcugguuuuauugaggggggauggacaggaaugauagauggaugguaugguuaucaccaucagaauggacagggaucaggauaugcagcggaccaaaagagcacacaaaaugccauugacgggaucacuaacaaaguaaauucuguuauugaaaagaugaacacgcaauucacggcaguggguaaagaauucaaccacuuggaaaaaagaauagagaauuuaaacaaaaagguugaugaugguuuucuggauguuuggacauacaaugccgaacuguugguucuauuggaaaaugaaagaacucuggauuuccacgacucgaauguaaagaaccuguaugagaaagugagaagccagcuaaggaacaaugccaaagaaauugggaauggcugcuuugaauucuaucacaaaugugaugauacaugcauggagagcgucaaaaauggaacuuaugauuacccaaaguacucagaagaaucaaaacuaaacagagaggagauagauggaguaaaguuggagucaacaaggauuuaccagauuuuggcgauuuauucaacugccgccaguucauugguacuguuggucucccugggggcaaucaguuucuggaugugcucuaaugggucuuuacagugcagaauauguauuuaa

SEQ ID NO: 42159 - RNA, 1698 nt, Artificial Sequence; identical to SEQ ID NO: 34127
  derived and/or modified CDS sequence (wt) from hemagglutinin__InfluenzaA__AGQ47728

SEQ ID NO: 42160 - RNA, 1701 nt, Artificial Sequence
  derived and/or modified CDS sequence (wt) from hemagglutinin__InfluenzaA__AGQ47740
augaaggcaagacuacugguccuguuaugugcacuugcagcuacagaugcagacacaauauguauaggcuaccaugcgaacaacucaaccgacacuguugacacacuacucgagaagaaugugacagugacacauucuguuaaccugcucgaagacagccacaacgggaaacuauguaaauuaaaaggaauagccccacuacaauuggggaaauguaacaucgccggauggcucuugggaaacccagaaugcgacucacugcuuccagcgagaucaugguccuacauuguagaaacaccaaacucugagaauggagcauguuauccaggagauuucaucgacuaugaggaacugagggagcaauugagcucaguaucaucauuagaaagauucgaaauauuucccaaggaaaguucauggcccaaccacaacacaaucaaaggaguaacagcaucaugcucccauaggggacaaagcaguuuuuacagaaauuugcuauggcugacgaagaagggggacucauacccaaagcugaacaauuccuaugugaacaauaaagggaaagaaguccuuguacuaugggguguucaucacccgucuagcaguaaugagcaacagagucucuaucguaaugaaaaugcuuaugucucuguagugucuucaaauuauaacaggagauucaccccggaaauagcugcaagacccaaaguaagagaucaaacugggaggaugaacuauuacuggaccuugcuagaacccggagacacaauaauguuugaggcaacugguaaucuaauagcaccaugguaugcuuucgcacugaguagaggguuuggguccggcaucaucaccucaaacgcgucaaugcaugaguguaacacgaagugucaaacaccccagggagcuauaaacagcagucucccuuuccagaauauacacccagucacaauaggagagugcccaaaauaugucaggaguaccaaauugaggaugguuacaggacuaagaaacaucccauccauucaauccagaggucuauuuggagccauugcugguuuuauugaggggggauggacuggaaugauagauggaugguaugguuaucaucaucagaaugaacagggaucaggcuaugcagcggaucaaaaaagcacacaaaaugccauuaacgggauuacaaacaaggugaacucuguuaucgagaaaaugaacacucaauucacagcuguggguaaagaauucaacaacuuagaaaaaaggauggaaaauuuaaauaaaaaaguugaugauggauuucuggacauuuggacauauaaugcagaauuguuaguucuacuggaaaaugaaaggacuuuggauuuccaugacuuaaaugugaagaaucuguacgagaaaguaaaaagccaauuaaagaauaaugccaaagaaaucggaaauggguguuuugaguucuaccacaagugugacaaugaaugcauggaaaguguaagaaaugggacuuaugauuauccaaaauauucagaagaaucaaaguugaacagggaaaagauagauggagugaaauuggaaucaauggggguguaucagauucuggcgaucuacucaacugucgccaguucacuggugcuuuuggucucccugggggcaaucaguuucuggauguguucuaaugggucuuugcagugcagaauaugcaucuga

SEQ ID NO: 42161 - RNA, 1701 nt, Artificial Sequence
  derived and/or modified CDS sequence (wt) from hemagglutinin__InfluenzaA__AGQ47752
augaaagcaaaacuacugauccuguugugugcacuuucagcuacagaugcagacacaauauguauaggcuaccaugcgaacaacucaaccgacacuguugacacaguacucgaaaagaaugugacagugacacacucuguaaaccuacucgaagacagccacaaugggaaauuaugcagauuaaaaggaaaagccccacuacaauuggggaaauguaacauugccggaugggucuuaggaaacccagaaugcgaaucauugcuuuccaauagaucaugguccuacauugcagaaacaccaaacucugagaaugggauauguuacccaggagauuucgccgacuaugaggaacugagggagcaauugagcucaguaucaucauucgagagauucgaaauauuccccaaggaaagaucauggcccaaacacaacacaaucagaggagugacggcagcaugcucccaugcggggaaaagcaguuuuuacaaaaauuuggucuggcugacggaggcaaauggcucauacccagcucugagcacguccuaugugaacaaucaagagaaagaaguccuugugcuaugggguguucaucacccgucuaacauagaggaacaaaggacccucuaucggaaagauaaugcuuaugucucuguagugucuucaaauuauaacaggagauucaccccagaaauagcaaaaaggcccaaaguaagagaucaaccagggagaaugaacuauuacuggacuuugcuagaacccggagacacaauaauauuugaggcaacuggaaaucuaauagcaccaugguaugcuuucgcacugaguagaggcccuggaucaggaaucaucaccucaaacgcaccaauggaugaaugugacacgaagugucaaacaccccagggagcuauaaacaguagucucccuuuucagaauauacacccagucacaauaggagagugcccaaaauacgucaggaguacaaaauugaggaugguuacaggacuaaggaacaucccauccauucaauccaggggucuguuuggagccauugccgguuucauugaagggggauggacugggaugauggauggaugguaugguuaccaucaucagaaugaacagggaucuggcuaugcugcggaucaaaaaagcacacaaaaugccauuaacgggauuacaaauaaggugaacucuguuaucgagaaaaugaacacucaauucacagcuguggguaaagaauucaacaaauuagaaaaaagaauggaaaacuuaaauaaaaaaguugaugauggauuucuggauauuuggacauauaaugcagaauuguugguucuacuggaaaaugaaaggacuuuggauuuucaugacucaaaugugaagaaucuguaugagaaaguaaaaaaccaauuaaggaauaaugcaaaggaacuaggaaacggguguuuugaguucuaccacaagugugacaaugaaugcauggaaaguguaaaaaauggaacuuaugauuacccaaaauauucagaggaaucaaaguuaaacagggaaaagauugauggagugaaauuggaaucaaugggggucuaucggauucuggcgaucuacucaacugucgccaguucacuggugcuucuggucucccugggggcaaucagcuucuggauguguucuaaugggucuuuacagugcagaauaugcaucuga

SEQ ID NO: 42162 - RNA, 1701 nt, Artificial Sequence
  derived and/or modified CDS sequence (wt) from hemagglutinin__InfluenzaA__AGQ47764
augaaagcaaaacuacugauccuguuaugugcacuuacagcuacagaugcagacacaauauguauaggcuaccaugcgaacaacucaaccgacacuguugacacaguacucgaaaagaaugugacagugacacacucuguaaaccuacucgaagacagccacaacgggaaauuaugcagauuaaaaggaauagccccacuacaauuggggaaauguaacauugccggauggaucuuaggaaacccagaaugcgaaucacugcuuucuaagagaucaugguccuacauugcagaaacaccaaacucugagaauggagcauguuacccaggagauuucgccgacuaugaggaacugagggagcaauugagcucagugucaucauucgagagauucgaaauauuccccaaggaaagaucauggcccaaacacaacauaaccagaggaguaacggcagcaugcucccaugcggggaaaagcaguuuuuacaaaaauuugcucuggcugacggagacagauggcucauacccaaagcugagcaaguccuaugugaacaauaaagagaaagaaguccuugugcuaugggguguucaucacccgucuaacauagaggaucaaaagacccucuaucggaaagaaaaugcuuaugucucuguagugucuucaaauuauaacaggagauucaccccggaaauagcagaaagacccaaaguaagaggucaagcagggagaauuaacuauuacuggacuuugcuagaacccggagacacaauaauauuugaggcaaauggaaaucuaauagcgccaugguaugcuuucgcacugaguagagacuuuggaucaggaaucaucaccucaaacgcaucaauggaugaaugugacacgaagugucaaacaccccagggagcuauaaacaguagucucccuuuucagaauauacacccagucacaauaggagagugcccaaaauacgucaagaguaccaaauugaggaugguuacaggauuaaggaacaucccauccauucaauccagaggucuguuuggagccauugccgguuucauugaggggggauggacuggaaugauagauggaugguaugguuaccaucaucagaaugaacagggaucuggcuaugcugcggaucaaaaaagcacacaaaaugcaauuaacgggauuacaaauaaggugaacucuguuaucgagaaaaugaacacucaauucacagcuguggguaaagaauucaacaaauuagaaaaaagaauggaaaacuuaaauaaaaaaguugaugauggguuucuggacauuuggacauauaaugcagaauuguugguucuacuggaaaaugaaaggacuuuggauuuccaugacucaaaugugaagaaucuguaugagaaaguaaaaaaccaauuaaggaauaaugcaaaggaaauaggaaacggguguuuugaguucuaccacaaguguaacaaugaaugcauggaaaguguaaaaaauggaacuuaugauuacccaaaauauucagaggaaucaaaguuaaacagggaaaaaauugauggagugaaauuggaaucaaugggggucuaucagauucuggcgaucuacucaacugucgccaguucacuggugcuucuggucucccugggggcaaucagcuucuggauguguucuaaugggucuuugcaaugcagaauaugcaucuga

SEQ ID NO: 42163 - RNA, 1701 nt, Artificial Sequence
  derived and/or modified CDS sequence (wt) from hemagglutinin__InfluenzaA__AGQ47776
augaaagcaaaacuacugauccuguuaugugcacuuucagccacagaugcagacacaauauguauaggcuaccaugcgaacaacucaaccgacacuguugacacaguacucgaaaagaaugugacagugacacacucuguaaaccuacucgaagacagccacaacgggaaauuaugcagauuaaaaggaauagccccacuacaauuggggaaauguaacauugccggauggaucuuaggaaacccagaaugcgaaucacugcuuucuaagagaucaugguccuacauugcagaaacaccaaacucugagaauggaacauguuacccaggagauuucgccgacuaugaggaacugagggagcaauugagcucaguaucaucauucgagagauucgaaauauuccccaaggaaagaucauggcccaaacacaacauaaacauaggaguaacggcagcaugcucccaugcggggaaaagcaguuuuuacaaaaauuugcucuggcugacggagaaagauggcucauacccaaaucugaacaaguccuaugugaacaagaaagagaaagaaguccuuguacuaugggguguucaucacccgucuaacauagaggaucaaaagacccucuaucggaaagaaaaugcuuaugucucuguagugucuucaaauuauaacaggagauucaccccggaaauagcagaaagacccaaaguaagaggucaagcagggagaaugaacuauuacuggacuuugcuagaacccggagacacaauaauauuugaggcaaauggaaaucuaauagcgccaugguaugcuuucgcacuaaguagaggccuuggaucaggaaucaucaccucaaacgcaucaauggaugaaugugacacgaagugucaaacaccccagggagcuauaaacaguagucucccuuuccagaauauacacccauucacaauaggagagugcccaaaauacgucaggaguaccaaauugaggaugguuacaggacuaaggaacaucccauccauucaauccagaggucuguuuggagccauugccgguuucauugaagggggauggacuggaaugauagauggaugguaugguuaccaucaucagaaugaacagggaucuggcuaugcugcggaucaaaaaagcacacaaaaugccauuaacgggauuacaaauaagguaaacucuguuaucgagaaaaugaacacucaauucacugcuguggguaaagaauucaacaaauuagaaaaaagaauggaaaacuuaaauaaaaaaguugaugauggauuucuggacauuuggacauauaaugcagaauuguugguucuacuggaaaacgaaaggacuuuggauuuccaugacucaaaugugaagaaucuguaugagaaaguaaaaaaccaauuaaggaauaaugccaaagaaauaggaaacggguguuuugaguucuaccacaaguguaacaaugaaugcauggaaaguguaaaaaauggaacuuaugauuacccaaaauauucagaggaaucaaaguuaaacagggaaaaaauugauggagugaaauuggaaucaaugggggucuaucagauucuggcgaucuacucaacugucgccaguucacuggugcuucuggucucccugggggcaaucagcuucuggauguguucuaaugggucuuugcagugcagaauaugcaucuga

SEQ ID NO: 42164 - RNA, 1701 nt, Artificial Sequence
  derived and/or modified CDS sequence (wt) from hemagglutinin__InfluenzaA__AGQ47788
augaaagcaaaacuacugguccuguuaugugcacuuucagcuacagaugcagacacaauauguauaggcuaccaugcgaacaacucaaccgacacuguugacacaguacucgaaaagaacgugacagugacacacucugucaaccuacucgaggacagucacaacggaaaacuaugcagacuaaaaggaauagccccacuacaauuggggaaaugcaacauugccggauggaucuuaggaaacccagaaugcgaaucacuguuuucuaagaaaucaugguccuacauugcagaaacaccaaacucugagaauggaacauguuacccaggauauuucgccgacuaugaggaacugagggagcaauugagcucaguaucaucauucgagagauucgaaauauuccccaaggaaaggucauggcccaaacacaacguaaccagaggaguaacggcagcaugcucccauaaggggaaaagcaguuuuuacagaaauuugcuauggcugacggagaaagauggcucguacccaaaucugagcaaguccuaugugaacaauaaagagaaagaaguccuuguacuaugggguguucaucacccgucuaacauagaggaccaaaagacccucuaucggaaagaaaaugcuuaugucucuguagugucuucaaauuauaacaggagauucaccccagaaauagcagaaagacccaaaguaagaggucaagcagggagaauuaacuacuacuggacucugcuggaacccggggacacaauaauauuugaggcaaauggaaaucuaauagcgccauggcaugcuuucgcacugaguagaggcuuugggucaggaaucaucaccucaaacgcaucgauggaugaaugugacacgaagugucaaacaccccagggagcuauaaacaguagucucccuuuccagaauauacacccagucacaauaggagagugcccaaaauacgucaggaguacaaaauugaggaugguuacaggacuaaggaacaucccauccauucaauccagaggucuguuuggggccauugccgguuucauugaagggggauggacuggaaugauagauggaugguaugguuaucaucaucagaaugaacagggaucuggcuaugcugcggaucaaaaaagcacacaaaaugccauuaacgggauuacaaacaaggugaacucuguuaucgagaaaaugaacacucaauucacagcuguggguaaagaauucaacaaauuagaaaaaaggauggaaaacuuaaauaaaaaaguugaugauggauuucuggacauuuggacauauaaugcagaauuguugguucuacuggaaaaugaaaggacuuuggauuuucaugacucaaaugugaagaaucuguaugagaaaguaaaaagccaauuaaagaauaaugccaaagaaauaggaaacggguguuuugaauucuaccacaaguguaacaaugaaugcauggaaaguguaaaaaauggaacuuaugauuauccaaaauauucagaggaaucaaaguuaaacagggaaaaaauugauggagugaaauuggaaucaaugggagucuaucagauucuggcgaucuacucaacugucgccaguucacuggugcuuuuggucucccugggggcaaucagcuucuggauguguucuaaugggucuuugcagugcagaauaugcaucuga

SEQ ID NO: 42165 - RNA, 1701 nt, Artificial Sequence
  derived and/or modified CDS sequence (wt) from hemagglutinin__InfluenzaA__AGQ47800
augaaggcaagacuacugguccuguuaugugcacuugcagcuacagaugcagacacaauauguauaggcuaucaugcgaacaacucaaccgauacuguugacacaauacucgaaaagaaugugacagugacacacucugucaaccuacucgaagacagccacaacgggaaauuauguagauuaaaaggaauagccccacuacaauuggggaaauguaacauugcuggauggauccugggaaacccagaaugcgaaucacugcuuucagagagaucaugguccuacauuguugaaauaccaaacucugagaauggaacauguuacccaggagauuuuaccgacuaugaggaacugagggagcaauugagcucuguaucaucauucgaaagauucgaaauauuccccaaggaaagcucauggcccaaacacaacacagccagaggaguaacggcagcaugcucccaugcgggaaaaagcaguuuuuacagaaauuugcuauggcugacggagaaggauggcucauauccgaaucugaaaaauuccuaugugaacaagaaagggaaagaaguccuuguacuaugggguguucaucacccguccagcauaaaggaacaacagacccucuaucagaaagaaaaugcuuaugucucuguaguaucuucaaauuacaacaggagauucaccccggaaauagcagaaagacccaaaguaagagaucaagcagggaggaugaacuauuacuggaccuugcuagaacccggagacacaauaauauuugaggcaaauggaaaucuaauagcgccaugguaugcuuucgcacugaguagaggcuuugggucaggcaucaucaccucaaacgcaucgaugcaugagugugacacgaagugucaaacaccccagggagcuauaaacagcagucucccuuuccagaauauacacccagucacaauaggagagugcccaaaauacgucaggaguaccaaauugaggaugguuacaggacuacggaacaucccaucaauucaauccagaggucuauuuggagccauugccgguuucauugaagggggauggacuggaaugauagauggaugguaugguuaucaucaucagaaugaacagggaucaggcuaugcugcggaucaaaaaagcacacaaaaugccauuaacgggauuacaaacaaggugaacucuguuaucgagaagaugaacacucaauucacagcuguggguaaagaauucaacaacuuagaaaaaaggauggaaaacuuaaacaaaaaaguugaugauggauuucuggacauuuggacauauaaugcagaauuguugauucuacuggaaaaugaaaggacucuggauuuccaugacucaaaugugaagaaucuguaugaaaaaguuaaaagccaauuaaggaauaaugccaaagaaauaggaaacggguguuuugaguucuaccacaaguguaacaaugaaugcauggaaaguguaaaaaauggaacuuaugauuauccaaaauauucagaagaaucaaaguugaacagggaaaaaauagauggagugaaauuggaaucaaugggggucuaucagauucuggcgaucuacucaacugucgccaguucacuggugcuucuagucucccugggggcaaucagcuucuggauguguucuaaugggucuuugcagugcagaauaugcaucuga

SEQ ID NO: 42166 - RNA, 1701 nt, Artificial Sequence
  derived and/or modified CDS sequence (wt) from hemagglutinin__InfluenzaA__AGQ47811
augaaagcaaaacuacugguccuguuaugugcacuuucagcuacagaugcagacacaauauguauaggcuaccaugcgaacaacucaaccgacacuguugacacaguacucgaaaagaacgugacagugacacacucugucaaccuacucgaggacagucacaacggaaaacuaugcagacuaaaaggaauagccccacuacaauuggggaaaugcaacauugccggauggaucuuaggaaacccagaaugcgaaucacuguuuucuaagaaaucaugguccuacauugcagaaacaccaaacucugagaauggaacauguuacccaggauuuuucgccgauuaugaggaacugagggagcaauugagcucaguaucaucauucgagagauucgaaauauuccccaaggaaaggucauggcccaaacacaacguaaccagaggaguaacggcagcaugcucccauaaggggaaaagcaguuuuuacagaaauuugcuauggcugacggagaaaaauggcucguacccaaaucugagcaaguccuaugugaacaacaaagagaaagaaguccuuguacuaugggguguucaucacccgucuaacauagaggaccaaaagaccaucuaucggaaagaaaaugcuuaugucucuguagugucuucaaauuauaacaggagauucaccccagaaauagcagaaagacccaaaguaagaggucaagcagggagaauuaacuacuacuggacucugcuggaaccuggggacacaauaauauuugaggcaaauggaaaucuaauagcgccauggcaugcuuucgcacugaguagaggcuuugggucagggaucaucaccucaaacgcaucgauggaugaaugugacacgaagugucaaacaccccagggagcuauaaacaguagucucccuuuccagaauauacacccagucacaauaggagagugcccaaaauacgucaggaguacaaaauugaggaugguuacaggacuaaggaacaucccauccauucaauccagaggucuguuuggggccauugccgguuucauugaagggggauggacuggaaugauagauggaugguaugguuaucaucaucagaaugaacagggaucuggcuaugcugcggaucaaaaaagcacacaaaaugccauugacgggauuacaaacaaggugaacucugucaucgagaaaaugaacacucaauucacagcuguggguaaagaauucaacaaauuagaaaaaaggauggaaaacuuaaauaaaaaaguugaugauggauuucuggacauuuggacauauaaugcagaauuguugguucuacuggaaaaugaaaggacuuuggauuuucaugacucaaaugugaagaaucuguaugagaaaguaaaaagccaauuaaagaauaaugccaaagaaauaggaaacggguguuuugaauucuaccacaaguguaacaaugaaugcauggaaaguguaaaaaauggaacuuaugacuauccaaaauauucagaggaaucaaaguuaaacagggaaaaaauugauggaguaaaguuggaaucaaugggagucuaucagauucuggcgaucuacucaacugucgccaguucacuggugcuuuuggucucccugggggcaaucagcuucuggauguguucuaaugggucuuugcagugcagaauaugcaucuga

SEQ ID NO: 42167 - RNA, 1701 nt, Artificial Sequence
  derived and/or modified CDS sequence (wt) from hemagglutinin__InfluenzaA__AGQ47823
augaaagcaaaacuacuaguccuguuaugugcauuuacagcuacauaugcagacacaauauguauaggcuaccaugcgaacaacucaaccgacacuguugacacaguacuugagaagaacgugacagugacacacucugucaaccuacuugaggacagucacaacggaaaacuaugucgacuaaagggaauagccccacuacaauuggguaauugcagcguugccggauggaucuuaggaaacccaaaaugcgaaucacuguuuucuaaggaaucaugguccuacauugcagaaacaccaaacccugagaauggaacauguuacccaggguauuucgccgacuaugaggaacugagggagcaauugaguucaguaucaucauucgagagauucgaaauauuccccaaagaaagcucauggcccaaccacaccguaaccaaaggaguaacgacaucaugcucccauaaugggaaaagcaguuuuuacagaaauuugcuauggcugacggagaagaauggcuuguacccaaaucugagcaaguccuauguaaacaacaaagagaaagaaguccuuguacuaugggguguucaucacccgucuaacauaagggaccaaagggccaucuaucauacagaaaaugcuuaugucucuguagugucuucacauuauagcagaagauucaccccagaaauagcaaaaagacccaaaguaagaggucaagaaggaagaauuaacuacuacuggacucugcuggaacccggggacacaauaauauuugaggcaaauggaaaucuaauagcgccaugguaugcuuucgcacugaguagaggcuuugggucaggaaucaucaccucaaacgcaucaauggaugaaugugacgcgaagugucaaacaccccagggagcuauaaacaguagucuuccuuuccagaauguacacccagucacaauaggagaguguccaaaguaugucaggaguacaaaauuaaggaugguuacaggacuaaggaacaucccauccauucaauccagagguuuguuuggagccauugccgguuucauugaagggggguggacuggaaugauagauggaugguaugguuaucaucaucagaaugaacaaggaucuggcuaugcugcggaccaaaaaagcacacaaaaugccauuaacgggauuacaaacaaggugaauucuguaaucgagaaaaugaacacucaauucacagcugugggcaaagaauucaacaaauuagaaagaaggauggaaaacuuaaauaaaaaaguugaugauggauuucuggacauuuggacauauaaugcagaauuguugguucuacuggaaaauggaaggacuuuggauuuucaugacucaaaugugaagaaucuguaugagaaaguaaaaagccaauugaagaauaaugccaaagaaauagggaacggguguuuugaauucuaucacaaguguaacaaugaaugcauggaaagugugaaaaauggaacuuaugacuauccaaaauauuccgaagaaucaaaguuaaacaggggaaaaauugauggagugaaauuggaaucaaugggagucuaucagauucuggcgaucuacucaacugucgccaguucacuggugcuuuuggucucccugggggcaaucagcuucuggauguguucuaaugggucuuugcaguguagaauaugcaucuga

SEQ ID NO: 42168 - RNA, 1701 nt, Artificial Sequence
  derived and/or modified CDS sequence (wt) from hemagglutinin__InfluenzaA__AGQ47835
augaagacuaucauugcuuugagcuacauuuucugucugguucucggccaagacuuuccaggaaaugacaacagcacagcaacgcugugccugggacaucaugcggugccaaacggaacaauagugaaaacaaucacaaaugaucagauugaagugacuaaugcuacugagcugguucagaguuccucaacggggaaaauaugcaacaauccucaucgaauccuugauggaauaaacugcacacugauagaugcucuauugggggacccucauugugauggcuuucaaaaugagacaugggaccuuuucguugaacgcagcaaagcuuucagcaacuguuacccuuauuaugugccagauuaugccucccuuaggucacuaguugccucgucaggcacucuggaguuuaucaaugaaggcuucaauuggacuggggucacucagaaugggggaagcaaugcuugcaaaaggggaccuaauagcgguuuuuucaguagacugaacugguuguacaaaucaggaaccacauauccagugcugaacgugacuaugccaaacaaugacaauuuugacaaacuauacauuugggggguucaccacccgagcacggaccaagaacaaaccaaccuauauguucaagcaucagggagagucacagucuccaccaagagaagccagcaaacuauaaccccgaauaucgggucuagacccuggguaaggggucugucuaguagaauaagcaucuauuggacaauaguuaaaccgggagacauccugguaauuaauaguaaugggaaccuaauugcuccucgggguuauuucaaaaugcgcacugggaaaagcucaauaaugaggucagaugcaccuauuggcaccugcauuucugaaugcaucacuccaaauggaagcauucccaaugacaagcccuuucaaaacguaaacaagaucacauauggggcaugucccaaguauguuaagcaaaacacccugaaguuggcaacagggaugcggaauguaccagagaaacaaacuagaggcauauucggcgcaauagcagguuucauagaaaaugguugggagggaaugguagacgguugguacgguuucaggcaucaaaauucugagggcacaggacaagcagcagaucuuaaaagcacucaagcagccaucgaccaaaucaaugggaaacugaauaggguaaucgagaagacgaacgagaaauuccaucaaaucgaaaaggaauucucagaaguagaagggagaauucaggaccucgagaaauacguugaagacacuaaaauagaucucuggucuuacaaugcggagcuucuugucgcucuggagaaccaacauacaauugaucugacugacucggaaaugaacaaacuguuugaaaaaacaaggaggcaacugagggaaaaugcugaggacaugggcaaugguugcuucaaaauauaccacaaaugugacaaugcuugcauagggucaaucagaaaugggacuuaugaccaugauguauacagagacgaagcauugaacaaccgguuucagaucaaagguguugaacugaagucaggauacaaagacuggauccuguggauuuccuuugccauaucaugcuuuuugcuuuguguuguuuugcugggguucaucaugugggccugccagaaaggcaacauuaggugcaacauuugcauuuga

SEQ ID NO: 42169 - RNA, 1701 nt, Artificial Sequence
  derived and/or modified CDS sequence (wt) from hemagglutinin__InfluenzaA__AGQ47847
augaaggcaagacuacugauccuguugugugcacuugcagcuacagaugcagacacaauauguauaggcuaccaugcgaacaauucaaccgacacuguugacacaguacucgagaagaaugugacagugacacacucuguuaaccugcucgaagacagccacaacgggaaacuauguagauuaaaaggaauagccccacuacaauuggggaaauguaacaucgccggauggcucuugggaaacccagaaugcgacucauugcuuccagcgaguucaugguccuacauuguagaaacaccaaacucuaagaauggaauauguuauccaggagauuucaucgacuaugaggaacugagggagcaauugagcucaguaucaucauucgaaagauucgaaauauuucccaaggaaagcucauggcccaaacacaacacaaccaaaggagugacggcagcaugcucccaugcgggaaagagcaguuuuuacagaaauuugcuauggcugacgaagaaggaggacucauacccaaagcugagcaauuccuaugugaacaagaaagggaaagaaguccuuguacuaugggguguucaucacccgucuaacaguaaagagcaacagacucucuaucagaaugaaaaugcuuaugucucuguagugucuucaaauuauaacaggagauucaccccggaaauagcagaaagacccaaaguaagagaucaagcugggaggaugaacuauuacuggaccuugcuagaacccggagacacaauaauauuugaggcuaauggaaaucuaauagcaccaugguaugcuuucgcacugaguagaggcuuuggguccggcaucaucaccucaaacgcaucaaugcaugaguguaacacgaagugucaaacaccccagggagcuauaaacagcagucucccuuuccagaauauacacccagucacaauaggagagugcccaaaauacgucaagagugccaaauugaggaugguuacaggacuaagaaacaucccauccauucaauccagaggucuauuuggagccauugccgguuuuauugaagggggauggacuggaaugauagauggaugguaugguuaucaucaucagaaugaacagggaucaggcuaugcagcggaucaaaaaagcacacaaaaugccauuaacgggauuacaaacaaggugaacucuguuaucgagaaaaugaacacucaauucacugcuguggguaaagaauucaacaacuuagaaaaaaggauggaaaauuuaaauaaaaaaguugaugauggauuccuggacauuuggacguauaaugcagaauuguuaguucuacuggaaaaugaaagaacucuggauuuccaugacucaaaugugaaaaaucuguaugagaaaguaaaaauccaauuaaagaauaaugccaaagaaaucggaaauggguguuuugaguucuaccacaagugugacaaugaaugcauggaaagugugagaaaugggacuuaugauuauccaaaauauucaaaagaaucaaaguugaacagggaaaagauagauggagugaaauuggaaccaaugggggucuaucagauucuggcgauauacucaacugucgccaguucacuggugcuuuuggucucccugggggcaaucaguuucuggauguguucuaaugggucuuugcagugcagaauaugcaucuga

SEQ ID NO: 42170 - RNA, 1701 nt, Artificial Sequence
  derived and/or modified CDS sequence (wt) from hemagglutinin__InfluenzaA__AGQ47870
augaaggcaauacuauuagucuuguuauguacauuugcagccacaaaugcagacacacuauguauagguuaucaugcaaauaauucaacugacacuguugauacaguacuagaaaagaauguaacaguaacacacucuguuaaucuucuugaagacagacauaacgggaaacuauguaaacugggggggauagccccauugcacuuggguaaauguaacauugccggauggcuuuugggaaacccagaaugugaauuacuacucacaguaagcucauggucuuacauuguggaaacaucgaacucagacaaugggacauguuacccaggagauuucaucaauuaugaagagcugagagagcaguugagcucagugucaucauuugaaagauucgagauauuccccaagacaaguucguggcccaaucaugaaacaaacagaggugugacggcagcaugcccuuaugcuggagcaaacagcuucuacagaaauuuaauauggcuggugaaaaaaggaaauucauacccaaagcucagcaaauccuauguuaacaauaaagggaaggaaguccuugugcuauggggcauucaucauccaccuaccaguacugaucaacaaagucucuaccaaaaugcagaugccuauguuuuuguagggucaucaaaauauaacagaaaguucaagccagaaauagcagcaagacccaaggugagaggucaagcagggaggaugaacuauuacuggacacuaauagaaccuggagacacaauaacauuugaagcaacuggaaaucuagugguaccaagauaugcuuucgcaaugaauagagguucuggaucugguauuauaauuucggaugcaccaguucaugauuguaacacgaagugucaaacacccaagggugccauaaacaccagccucccauuucagaauauacauccagucacaauuggagaauguccaaaauaugucaaaagcacaaaauugagaauggcuacaggacuaaggaauaucccgucuauucaaucuagaggucuguuuggagccauugcugguuuuauugaggggggauggacaggaaugauagauggaugguaugguuaucaccaucagaaugaacagggaucaggauaugcagcggaccaaaggagcacacaaaaugccauugacgggaucacuaacaaaguaaauucuguuauugaaaagaugaacacgcaauucacggcaguggguaaagaauucaaccacuuggaaaaaagaauagagaauuuaaacaaaaagguugaugaugguuuucuggauauuuggacauacaaugcagaacuguugguucuauuggaaaaugaaagaacucuggauuuccacgacucgaauguaaagaaccuguaugagaaaguaagaagccagcuaaggaacaaugccaaagaaauugggaauggcugcuuugaauucuaucacaaaugugaugauacaugcauggagagcgucaaaaaugggacuuaugauuacccaaaguacucagaagaaucaaagcuaaacagagaggagauagauggaguaaaguuggagucaacaagaauuuaccagauuuuggcgaucuauucaacugucgccaguucauugguacuguuggucucccugggggcaaucaguuuuuggaugugcucuaaugggucuuuacagugcagaauauguauuuaa

SEQ ID NO: 42171 - RNA, 1701 nt, Artificial Sequence
  derived and/or modified CDS sequence (wt) from hemagglutinin__InfluenzaA__AGQ47882
augaaggcaauacuauuagucuuguuauguacauuugcagccacaaaugcagacacacuauguauagguuaucaugcaaauaauucaacugacacuguugauacaguacuagaaaagaauguaacaguaacacacucuguuaaucuucuugaagacagacauaacgggaaacuauguaaacugggggggauagccccauugcacuuggguaaauguaacauugccggauggcuuuugggaaacccagaaugugaauuacuacucacaguaagcucauggucuuacauuguggaaacaucgaacucagacaaugggacauguuacccaggagauuucaucaauuaugaagagcugagagagcaguugagcucagugucaucauuugaaagauucgagauauuccccaagacaaguucguggcccaaucaugaaacaaacagaggugugacggcagcaugcccuuaugcuggagcaaacagcuucuacagaaauuuaauauggcuggugaaaaaagaaaauucauacccaaagcucagcaaauccuauguuaacaauaaagggaaggaaguccuugugcuauggggcauucaucauccaccuaccaguacugaucaacaaagucucuaccaaaaugcagaugccuauguuuuuguagggucaucaaaauauaacagaaaguucaagccagaaauagcagcaagacccaaggugagaggucaagcagggaggaugaacuauuacuggacacuaauagaaccuggagacacaauaacauuugaagcaacuggaaaucuagugguaccaagauaugcuuucgcaaugaauagagguucuggaucugguauuauaauuucggaugcaccaguucaugauuguaacacgaagugucaaacacccaagggugccauaaacaccagccucccauuucagaauauacauccagucacaauuggagaauguccaaaauaugucaaaagcacaaaauugagaauggcuacaggacuaaggaauaucccgucuauucaaucuagaggucuguuuggagccauugcugguuuuauugaggggggauggacaggaaugauagauggaugguaugguuaucaccaucagaaugaacagggaucaggauaugcagcggaccaaaggagcacacaaaaugccauugacgggaucacuaacaaaguaaauucuguuauugaaaagaugaacacgcaauucacggcaguggguaaagaauucaaccacuuggaaaaaagaauagagaauuuaaacaaaaagguugaugaugguuuucuggauauuuggacauacaaugcagaacuguugguucuauuggaaaaugaaagaacucuggauuuccacgacucgaauguaaagaaccuguaugagaaaguaagaagccagcuaaggaacaaugccaaagaaauugggaauggcugcuuugaauucuaucacaaaugugaugauacaugcauggagagcgucaaaaaugggacuuaugauuacccaaaguacucagaagaaucaaagcuaaacagagaggagauagauggaguaaaguuggagucaacaagaauuuaccagauuuuggcgaucuauucaacugucgccaguucauugguacuguuggucucccugggggcaaucaguuuuuggaugugcucuaaugggucuuuacagugcagaauauguauuuaa

SEQ ID NO: 42172 - RNA, 1701 nt, Artificial Sequence; identical to SEQ ID NO: 41107
  derived and/or modified CDS sequence (wt) from hemagglutinin__InfluenzaA__AGQ47894

SEQ ID NO: 42173 - RNA, 1701 nt, Artificial Sequence
  derived and/or modified CDS sequence (wt) from hemagglutinin__InfluenzaA__AGQ47906
augaagaccaucauugcuuugagcuacauuuucugucuggcucucggccaagaccuuccaggaaaugacaacagcacagcaacgcugugccugggacaucaugcggugccaaacggaacacuagugaaaacaaucacagaugaucagauugaagugacuaaugcuacugagcuaguucagagcuccucaacggggaaaauaugcaacaauccucaucgaauccuugauggaauagacugcacacugauagaugcucuauugggggacccucauugugauguuuuucaaaaugagacaugggaccuuuucguugaacgcagcaaagcuuucagcaacuguuacccuuaugaugugccagauuaugccucccuuaggucacuaguugccucgucaggcacucuggaguuuaucacugaggguuucacuuggacuggggucacucagaaugggggaagcaaugcuugcaaaaggggaccugguagcgguuuuuucaguagacugaacugguugaccaaaucaggaagcacauauccagugcugaacgugacuaugccaaacaaugacaauuuugacaaacuauacauuugggggauucaccacccgagcacgaaccaagaacaaaccagccuguauguucaagcaucagggagagucacagucucuaccaggagaagccagcaaacuauaaucccgaauaucggguccagacccuggguaaggggucugucuaguagaauaagcaucuauuggacaauaguuaagccgggagacguacugguaauuaauaguaaugggaaccuaaucgcuccucgggguuauuucaaaaugcgcacugggaaaagcucaauaaugaggucagaugcaccuauugauaccuguauuucugaaugcaucacuccaaauggaagcauucccaaugacaagcccuuucaaaacguaaacaagaucacauauggagcaugccccaaguauguuaagcaaaacacccugaaguuggcaacagggaugcggaauguaccagagaaacaaacuagaggccuauucggcgcaauagcagguuucauagaaaaugguugggagggaaugauagacgguugguacgguuucaggcaucaaaauucugagggcacaggacaagcagcagaucuuaaaagcacucaagcagccaucgaccaaaucaaugggaaauugaacaggguaaucgagaagacgaacgagaaauuccaucaaaucgaaaaggaauucucagaaguagaagggagaauucaggaccucgagaaauacguugaagacacuaaaauagaucucuggucuuacaaugcggagcuucuugucgcucuggagaaucaacauacaauugaccugacugacucggaaaugaacaagcuguuugaaaaaacaaggaggcaacugagggaaaaugcugaagacaugggcaaugguugcuucaaaauauaccacaaaugugacaacgcuugcauagagucaaucagaaaugggacuuaugaccaugauguauacagagacgaagcauuaaacaaccgguuucagaucaaagguguugaacugaagucuggauacaaagacuggauccuguggauuuccuuugccauaucaugcuuuuugcuuuguguuguuuugcugggguucaucaugugggccugccagagaggcaacauuaggugcaacauuugcauuuga

SEQ ID NO: 42174 - RNA, 1701 nt, Artificial Sequence
  derived and/or modified CDS sequence (wt) from hemagglutinin__InfluenzaA__AGQ47918
augaagaccaucauugcuuugagcuacauuuucugucuggcucucggccaagaccuuccaggaaaugacaacaacacagcaacgcugugccugggacaucaugcggugccaaacggaacacuagugaaaacaaucacagaugaucagauugaagugacuaaugcuacugagcuaguucagagcuccucaacggggaaaauaugcaacaauccucaucgaauccuugauggaauagacugcacacugauagaugcucuauugggggacccucauugugauguuuuucaaaaugagacaugggaccuuuucguugaacgcagcaaagcuuucagcaacuguuacccuuaugaugugccagauuaugccucccuuaggucacuaguugccucgucaggcacucuggaguuuaucacugaggguuucacuuggacuggggucacucagaaugggggaagcaaugcuugcaaaaggggaccugguagcgguuuuuucaguagacugaacugguugaccaaaucaggaagcacauauccagugcugaacgugacuaugccaaacaaugacaauuuugacaaacuauacauuugggggguucaccacccgagcacgaaccaagaacaaaccagccuguauguucaagcaucagggagagucacagucucuaccaggagaagccagcaaacuauaaucccgaauaucggguccagacccuggguaaggggucugucuaguagaauaagcaucuauuggacaauaguuaagccgggagacguacugguaauuaauaguaaugggaaccuaaucgcuccucgggguuauuucaaaaugcgcacugggaaaagcucaauaaugaggucagaugcaccuauugauaccuguauuucugaaugcaucacuccaaauggaagcauucccaaugacaagcccuuucaaaacguaaacaagaucacauauggagcaugccccaaguauguuaagcaaaacacccugaaguuggcaacagggaugcggaauguaccagagaaacaaacuagaggccuauucggcgcaauagcagguuucauagaaaaugguugggagggaaugauagacgguugguacgguuucaggcaucaaaauucugagggcacaggacaagcagcagaucuuaaaagcacucaagcagccaucgaccaaaucaaugggaaauugaacaggguaaucgagaagacgaacgagaaauuccaucaaaucgaaaaggaauucucagaaguagaagggagaauucaggaccucgagaaauacguugaagacacuaaaauagaucucuggucuuacaaugcggagcuucuugucgcucuggagaaucaacauacaauugaccugacugacucggaaaugaacaagcuguuugaaaaaacaaggaggcaacugagggaaaaugcugaagacaugggcaaugguugcuucaaaauauaccacaaaugugacaacgcuugcauagagucaaucagaaaugggacuuaugaccaugauguauacagagacgaagcauuaaacaaccgguuucagaucaaagguguugaacugaagucuggauacaaagacuggauccuguggauuuccuuugccauaucaugcuuuuugcuuuguguuguuuugcugggguucaucaugugggccugccagagaggcaacauuaggugcaacauuugcauuuga

SEQ ID NO: 42175 - RNA, 1701 nt, Artificial Sequence
  derived and/or modified CDS sequence (wt) from hemagglutinin__InfluenzaA__AGQ47930
augaaggcaaaccuacugguccuguuaugugcacuugcagcugcagaugcagacacaauauguauaggcuaccaugcgaacaauucaaccgacacuguugacacagcacucgagaagaaugugacagugacacacucuguuaaccugcucgaagacagccacaacggaaaacuauguagauuaaaaggaauagccccacuacaauuggggaaauguaacaucgccggauggcucuugggaaacccagaaugcgacccacugcuuccagugagaucaugguccuacauuguagaaacaccaaacucugagaauggaauauguuauccaggagauuucaucgacuaugaggagcugagggagcaauugagcucagugucaucauucgaaagauucgaaauauuucccaaagaaagcucauggcccaaccacaacacaaacaaaggaguaacggcagcaugcucccaugcggggaaaagcaguuuuuacagaaauuugcuauggcugacggagaaggagggcucauacccaaagcugaaaaauucuuaugugaacaagaaagggaaagaaguccuuguacugugggguauucaucacccgucuaacaguaaggaucaacagaaucucuaucagaaugaaaaugcuuaugucucuguagugacuucaaauuauaacaggagauuuaccccggaaauagcagaaagacccaaaguaagagaucaagcugggaggaugaacuauuacuggaccuugcuaaaacccggagacacaauaauauuugaggcaaauggaaaucuaauagcaccaauguaugcuuucgcacugaguagaggcuuuggguccggcaucaucaccucaaacgcaucaaugcaugaguguaacacgaagugucaaacaccccugggagcuauaaacagcagucucccuuuccagaauauacacccagucacaauaggagagugcccaaaauacgucaggagugccaaauugaggaugguuacaggacuaaggaacauuccguccauucaauccagaggucuauuuggagccauugccgguuuuauugaagggggauggacuggaaugauagauggaugguaugguuaucaucaucagaaugaacagggaucaggcuaugcagcggaucaaaaaagcacacaaaaugccauuaacgggauuacaaacaaggugaacucuguuaucgagaaaaugaacauucaauucacagcuguggguaaagaauucaacaaauuagaaaaaaggauggaaaauuuaaauaaaaaaguugaugauggauuucuggacauuuggacauauaaugcugaauuguuaguucuacuggaaaaugaaaggacucuggauuuccaugacucaaaugugaagaaucuguaugagaaaguaaaaagccaauuaaagaauaaugccaaagaaaucggaaauggauguuuugaguucuaccacaagugugacaaugaaugcauggaaaguguaagaaaugggacuuaugauuaucccaaauauucagaagagucaaaguugaacagggaaaagguagauggagugaaauuggaaucaauggggaucuaucagauucuggcgaucuacucaacugucgccaguucacuggugcuuuuggucucccugggggcaaucaguuucuggauguguucuaauggaucuuugcagugcagaauaugcaucuga

SEQ ID NO: 42176 - RNA, 1698 nt, Artificial Sequence; identical to SEQ ID NO: 35290
  derived and/or modified CDS sequence (wt) from hemagglutinin__InfluenzaA__AGQ47942

SEQ ID NO: 42177 - RNA, 1698 nt, Artificial Sequence
  derived and/or modified CDS sequence (wt) from hemagglutinin__InfluenzaA__AGQ47954
augaaggcaaaccuacugguccuguuaugugcacuugcagcugcagaugcagacacaauauguauaggcuaccaugcgaacaauucaaccgacacuguugacacaguacucgagaagaaugugacagugacacacucuguuaaccugcucgaagacagccacaacggaaaacuauguagauuaaaaggaauagccccacuacaauuggggaaauguaacaucgccggauggcucuugggaaacccagaaugcgacccacugcuuccagugagaucaugguccuacauuguagaaacaccaaacucugagaauggaauauguuauccaggagauuucaucgacuaugaggagcugagggagcaauugagcucagugucaucauucgaaagauucgaaauauuucccaaagaaagcucauggcccaaccacaacacaaacggaguaacggcagcaugcucccaugaggggaaaagcaguuuuuacagaaauuugcuauggcugacggagaaggagggcucauacccaaagcugaaaaauucuuaugugaacaaaaaagggaaagaaguccuuguacugugggguauucaucacccgccuaacaguaaggaacaacagaaucucuaucggaaugaaaaugcuuaugucucuguagugacuucaaauuauaacaggagauuuaccccggaaauagcagaaagacccaaaguaagagaucaagcugggaggaugaacuauuacuggaccuugcuaaaacccggagacacaauaauauuugaggcaaauggaaaucuaauagcaccaauguaugcuuucgcacugaguagaggcuuuggguccggcaucaucaccucaaacgcaucaaugcaugaguguaacacgaagugucaaacaccccugggagcuauaaacagcagucucccuuaccagaauauacacccagucacaauaggagagugcccaaaauacgucaggagugccaaauugaggaugguuacaggacuaaggaacauuccguccauucaauccagaggucuauuuggagccauugccgguuuuauugaagggggauggacuggaaugauagauggaugguaugguuaucaucaucagaaugaacagggaucaggcuaugcagcggaucaaaaaagcacacaaaaugccauuaacgggauuacaaacaaggugaacacuguuaucgagaaaaugaacauucaauucacagcuguggguaaagaauucaacaaauuagaaaaaaggauggaaaauuuaaauaaaaaaguugaugauggauuucuggacauuuggacauauaaugcagaauuguuaguucuacuggaaaaugaaaggacucuggauuuccaugacucaaaugugaagaaucuguaugagaaaguaaaaagccaauuaaagaauaaugccaaagaaaucggaaauggauguuuugaguucuaccacaagugugacaaugaaugcauggaaaguguaagaaaugggacuuaugauuaucccaaauauucagaagagucaaaguugaacagggaaaagguagauggagugaaauuggaaucaauggggaucuaucagauucuggcgaucuacucaacugucgccaguucacuggugcuuuuggucucccugggggcaaucaguuucuggauguguucuaauggaucuuugcagugcagaauaugcaucuga

SEQ ID NO: 42178 - RNA, 1698 nt, Artificial Sequence
  derived and/or modified CDS sequence (wt) from hemagglutinin__InfluenzaA__AGQ47966
augaaggcaaaccuacugguccuguuaugugcacuugcagcugcagaugcagacacaauauguauaggcuaccaugcgaacaacucaaccgacacuguugacacaguacucgagaagaaugugacagugacacacucuguuaaccugcucgaagacagccacaacggaaaacuauguagauuaaaaggaauagccccacuacaauuggggaaauguaacaucgccggauggcucuugggaaacccagaaugcgacccacugcuuccagugggaucaugguccuacauuguagaaacaccaaacucugagaauggaauauguuauccaggagauuucaucgacuaugaggagcugagggagcaauugagcucagugucaucauucgaaagauucgaaauauuucccaaagaaagcucauggcccgaccacaacacaaacggaguaacggcagcaugcucccaugaggggaaaaacaguuuuuacagaaauuugcuauggcugacggagaaggagagcucauacccaaagcugaaaaauucuuaugugaacaaaaaagggaaagaaguccuuguacugugggguauucaucacccgccuaacaguaaggaacaacagaaucucuaucagaaugaaaaugcuuaugucucuguagugacuucaaauuauaacaggagauuuaccccggaaauagcagaaagacccaaaguaaaagaucaagcugggaggaugaacuauuacuggaccuugcuaaaacccggagacacaauaauauuugaggcaaauggaaaucuaauagcaccaauguaugcuuucgcacugaguagaggcuuuggguccggcaucaucaccucaaacgcaucaaugcaugaguguaacacgaagugucaaacaccccugggagcuauaaacagcagucucccuuaccagaauauacacccagucacaauaggagagugcccaaaauacgucaggagugccaaauugaggaugguuacaggacuaaggaacauuccguccauucaauccagaggucuauuuggagccauugccgguuuuauugaagggggauggacuggaaugauagauggaugguaugguuaucaucaucagaaugaacagggaucaggcuaugcagcggaucaaaaaagcacacaaaaugccauuaacgggauuacaaacaaggugaacacuguuaucgagaaaaugaacauucaauucacagcuguggguaaagaauucaacaaauuagaaaaaaggauggaaaauuuaaauaaaaaaguugaugauggauuucuggacauuuggacauauaaugcagaauuguuaguucuacuggaaaaugaaaggacucuggauuuccaugacucaaaugugaagaaucuguaugagaaaguaaaaagccaauuaaagaauaaugccaaagaaaucggaaauggauguuuugaguucuaccacaagugugacaaugaaugcauggaaaguguaagaaaugggacuuaugauuaucccaaauauucagaagagucaaaguugaacagggaaaagguagauggagugaaauuggaaucaauggggaucuaucagauucuggcgaucuacucaacugucgccaguucacuggugcuuuuggucucccugggggcaaucaguuucuggauguguucuaauggaucuuugcagugcagaauaugcaucuga

SEQ ID NO: 42179 - RNA, 1698 nt, Artificial Sequence
  derived and/or modified CDS sequence (wt) from hemagglutinin__InfluenzaA__AGQ47978
augaaggcaaaccuacugguccuguuaugugcacuugcagcugcagaugcagacacaauauguauaggcuaccaugcgaacaacucaaccgacacuguugacacaguacucgagaagaaugugacagugacacacucuguuaaccugcucgaagacagccacaacggaaaacuauguagauuaaaaggaauagccccacuacaauuggggaaauguaacaucgccggauggcucuugggaaacccagaaugcgacccacugcuuccagugggaucaugguccuacauuguagaaacaccaaacucugagaauggaauauguuauccaggagauuucaucgacuaugaggagcugagggagcaauugagcucagugucaucauucgaaagauucgaaauauuucccaaagaaagcucauggcccgaccacaacacaaacggaguaacggcagcaugcucccaugaggggaaaaacaguuuuuacagaaauuugcuauggcugacgaagaaggagagcucauacccagagcugaaaaauucuuaugugaacaaaaaagggaaagaaguccuuguacugugggguauucaucacccgccuaacaguaaggaacaacagaaucucuaucagaaugaaaaugcuuaugucucuguagugacuucaaauuauaacaggagauuuaccccggaaauagcagaaagacccaaaguaaaagaucaagcugggaggaugaacuauuacuggaccuugcuaaaacccggagacacaauaauauuugaggcaaauggaaaucuaauagcaccaauguaugcuuucgcacugaguagaggcuuuggguccggcaucaucaccucaaacgcaucaaugcaugaguguaacacgaagugucaaacaccccugggagcuauaaacagcagucucccuuaccagaauauacacccagucacaauaggagagugcccaaaauacgucaggagugccaaauugaggaugguuacaggacuaaggaacauuccguccauucaauccagaggucuauuuggagccauugccgguuuuauugaagggggauggacuggaaugauagauggaugguaugguuaucaucaucagaaugaacagggaucaggcuaugcagcggaucaaaaaagcacacaaaaugccauuaacgggauuacaaacaaggugaacacuguuaucgagaaaaugaacauucaauucacagcuguggguaaagaauucaacaaauuagaaaaaaggauggaaaauuuaaauaaaaaaguugaugauggauuucuggacauuuggacauauaaugcagaauuguuaguucuacuggaaaaugaaaggacucuggauuuccaugacucaaaugugaagaaucuguaugagaaaguaaaaagccaauuaaagaauaaugccaaagaaaucggaaauggauguuuugaguucuaccacaagugugacaaugaaugcauggaaaguguaagaaaugggacuuaugauuaucccaaauauucagaagagucaaaguugaacagggaaaagguagauggagugaaauuggaaucaauggggaucuaucagauucuggcgaucuacucaacugucgccaguucacuggugcuuuuggucucccugggggcaaucaguuucuggauguguucuaauggaucuuugcagugcagaauaugcaucuga

SEQ ID NO: 42180 - RNA, 1698 nt, Artificial Sequence
  derived and/or modified CDS sequence (wt) from hemagglutinin__InfluenzaA__AGQ47990
augaaggcaaaccuacugguccuguuaugugcacuugcagcugcagaugcagacacaauauguauaggcuaccaugcgaacaacucaaccgacacuguugacacaguacucgagaagaaugugacagugacacacucuguuaaccugcucgaagacagccacaacggaaaacuauguagauuaaaaggaauagccccacuacaauuggggaaauguaacaucgccggauggcucuugggaaacccagaaugcgacccacugcuuccagugggaucaugguccuacauuguagaaacaccaaacucugagaauggaauauguuauccaggagauuucaucgacuaugaggagcugagggagcaauugagcucagugucaucauucgaaagauucaaaauauuucccaaagaaagcucauggcccgaccacaacacaaacggaguaacggcagcaugcucccaugaggggaaaaacaguuuuuacagaaauuugcuauggcugacgaagaaggagagcucauacccagagcugaaaaauucuuaugugaacaaaaaagggaaagaaguccuuguacugugggguauucaucacccgccuaacaguaaggaacaacagaaucucuaucagaaugaaaaugcuuaugucucuguagugacuucaaauuauaacaggagauuuaccccggaaauagcagaaagacccaaaguaaaagaucaagcugggaggaugaacuauuacuggaccuugcuaaaacccggagacacaauaauauuugaggcaaauggaaaucuaauagcaccaauguaugcuuucgcacugaguagaggcuuuggguccggcaucaucaccucaaacgcaucaaugcaugaguguaacacgaagugucaaacaccccugggagcuauaaacagcagucucccuuaccagaauauacacccagucacaauaggagagugcccaaaauacgucaggagugccaaauugaggaugguuacaggacuaaggaacauuccguccauucaauccagaggucuauuuggagccauugccgguuuuauugaagggggauggacuggaaugauagauggaugguaugguuaucaucaucagaaugaacagggaucaggcuaugcagcggaucaaaaaagcacacaaaaugccauuaacgggauuacaaacaaggugaacacuguuaucgagaaaaugaacauucaauucacagcuguggguaaagaauucaacaaauuagaaaaaaggauggaaaauuuaaauaaaaaaguugaugauggauuucuggacauuuggacauauaaugcagaauuguuaguucuacuggaaaaugaaaggacucuggauuuccaugacucaaaugugaagaaucuguaugagaaaguaaaaagccaauuaaagaauaaugccaaagaaaucggaaauggauguuuugaguucuaccacaagugugacaaugaaugcauggaaaguguaagaaaugggacuuaugauuaucccaaauauucagaagagucaaaguugaacagggaaaagguagauggagugaaauuggaaucaauggggaucuaucagauucuggcgaucuacucaacugucgccaguucacuggugcuuuuggucucccugggggcaaucaguuucuggauguguucuaauggaucuuugcagugcagaauaugcaucuga

SEQ ID NO: 42181 - RNA, 1698 nt, Artificial Sequence
  derived and/or modified CDS sequence (wt) from hemagglutinin__InfluenzaA__AGQ48002
augaaggcaaaccuacugguccuguuaugugcacuugcagcugcagaugcagacacaauauguauaggcuaccaugcgaacaacucaaccgacacuguugacacaguacucgagaagaaugugacagugacacacucuguuaaccugcucgaagacagccacaacggaaaacuauguagauuaaaaggaauagccccacuacaauuggggaaauguaacaucgccggauggcucuugggaaacccagaaugcgacccacugcuuccagugggaucaugguccuacauuguagaaacaccaaacucugagaauggaauauguuauccaggagauuucaucgacuaugaggagcugagggagcaauugagcucagugucaucauucgaaagauucaaaauauuucccaaagaaagcucauggcccgaccacaacacaaacggaguaacggcagcaugcucccaugaggggaaaaacaguuuuuacagaaauuugcuauggcugacgaagaaggagagcucauacccagagcugaaaaauucuuaugugaacaaaaaaaggaaagaaguccuuguacugugggguauucaucacccgccuaacaguaaggaacaacagaaucucuaucagaaugaaaaugcuuaugucucuguagugacuucaaauuauaacaggagauuuaccccggaaauagcagaaagacccaaaguaaaagaucaagcugggaggaugaacuauuacuggaccuugcuaaaacccggagacacaauaauauuugaggcaaauggaaaucuaauagcaccaauguaugcuuucgcacugaguagaggcuuuggguccggcaucaucaccucaaacgcaucaaugcaugaguguaacacgaagugucaaacaccccugggagcuauaaacagcagucucccuuaccagaauauacacccagucacaauaggagagugcccaaaauacgucaggagugccaaauugaggaugguuacaggacuaaggaacauuccguccauucaauccagaggucuauuuggagccauugccgguuuuauugaagggggauggacuggaaugauagauggaugguaugguuaucaucaucagaaugaacagggaucaggcuaugcagcggaucaaaaaagcacacaaaaugccauuaacgggauuacaaacaaggugaacacuguuaucgagaaaaugaacauucaauucacagcuguggguaaagaauucaacaaauuagaaaaaaggauggaaaauuuaaauaaaaaaguugaugauggauuucuggacauuuggacauauaaugcagaauuguuaguucuacuggaaaaugaaaggacucuggauuuccaugacucaaaugugaagaaucuguaugagaaaguaaaaagccaauuaaagaauaaugccaaagaaaucggaaauggauguuuugaguucuaccacaagugugacaaugaaugcauggaaaguguaagaaaugggacuuaugauuaucccaaauauucagaagagucaaaguugaacagggaaaagguagauggagugaaauuggaaucaauggggaucuaucagauucuggcgaucuacucaacugucgccaguucacuggugcuuuuggucucccugggggcaaucaguuucuggauguguucuaauggaucuuugcagugcagaauaugcaucuga

SEQ ID NO: 42182 - RNA, 1698 nt, Artificial Sequence
  derived and/or modified CDS sequence (wt) from hemagglutinin__InfluenzaA__AGQ48014
augaaggcaaaccuacugguccuguuaugugcacuugcagcugcagaugcagacacaauauguauaggcuaccaugcgaacaacucaaccgacacuguugacacaguacucgagaagaaugugacagugacacacucuguuaaccugcucgaagacagccacaacggaaaacuauguagauuaaaaggaauagccccacuacaauuggggaaauguaacaucgccggauggcucuugggaaacccaggaugcgacccacugcuuccagugggaucaugguccuacauuguagaaacaccaaacucugagaauggaauauguuauccaggagauuucaucgacuaugaggagcugagggagcaauugagcucagugucaucauucgaaagauucaaaauauuucccaaagaaagcucauggcccgaccacaacacaaacggaguaacggcagcaugcucccaugaggggaaaaacaguuuuuacagaaauuugcuauggcugacgaagaaggagagcucauacccagagcugaaaaauucuuaugugaacaaaaaaaggaaagaaguccuuguacugugggguauucaucacccgccuaacaguaaggaacaacagaaucucuaucagaaugaaaaugcuuaugucucuguagugacuucaaauuauaacaggagauuuaccccggaaauagcagaaagacccaaaguaaaagaucaagcugggaggaugaacuauuacuggaccuugcuaaaacccggagacacaauaauauuugaggcaaauggaaaucuaauagcaccaauguaugcuuucgcacugaguagaggcuuuggguccggcaucaucaccucaaacgcaucaaugcaugaguguaacacgaagugucaaacaccccugggagcuauaaacagcagucucccuuaccagaauauacacccagucacaauaggagagugcccaaaauacgucaggagugccaaauugaggaugguuacaggacuaaggaacauuccguccauucaauccagaggucuauuuggagccauugccgguuuuauugaagggggauggacuggaaugauagauggaugguaugguuaucaucaucagaaugaacagggaucaggcuaugcagcggaucaaaaaagcacacaaaaugccauuaacgggauuacaaacaaggugaacacuguuaucgagaaaaugaacauucaauucacagcuguggguaaagaauucaacaaauuagaaaaaaggauggaaaauuuaaauaaaaaaguugaugauggauuucuggacauuuggacauauaaugcagaauuguuaguucuacuggaaaaugaaaggacucuggauuuccaugacucaaaugugaagaaucuguaugagaaaguaaaaagccaauuaaagaauaaugccaaagaaaucggaaauggauguuuugaguucuaccacaagugugacaaugaaugcauggaaaguguaagaaaugggacuuaugauuaucccaaauauucagaagagucaaaguugaacagggaaaagguagauggagugaaauuggaaucaauggggaucuaucagauucuggcgaucuacucaacugucgccaguucacuggugcuuuuggucucccugggggcaaucaguuucuggauguguucuaauggaucuuugcagugcagaauaugcaucuga

SEQ ID NO: 42183 - RNA, 1698 nt, Artificial Sequence
  derived and/or modified CDS sequence (wt) from hemagglutinin__InfluenzaA__AGQ48026
augaaggcaaaccuacugguccuguuaugugcacuugcagcugcagaugcagacacaauauguauaggcuaccaugcgaacaacucaaccgacacuguugacacaguacucgagaagaaugugacagugacacacucuguuaaccugcucgaagacagccacaacggaaaacuauguaaauuaaaaggaauagccccacuacaauuggggaaauguaacaucgccggauggcucuugggaaacccaggaugcgacccacugcuuccagugggaucaugguccuacauuguagaaacaccaaacucugagaauggaauauguuauccaggagauuucaucgacuaugaggagcugagggagcaauugagcucagugucaucauucgaaagauucaaaauauuucccaaagaaagcucauggcccgaccacaacacaaacggaguaacggcagcaugcucccaugaggggaaaaacaguuuuuacagaaauuugcuauggcugacgaagaaggagagcucauacccagagcugaaaaauucuuaugugaacaaaaaaaggaaagaaguccuuguacugugggguauucaucacccgccuaacaguaaggaacaacagaaucucuaucagaaugaaaaugcuuaugucucuguagugacuucaaauuauaacaggagauuuaccccggaaauagcagaaagacccaaaguaaaagaucaagcugggaggaugaacuauuacuggaccuugcuaaaacccggagacacaauaauauuugaggcaaauggaaaucuaauagcaccaauguaugcuuucgcacugaguagaggcuuuggguccggcaucaucaccucaaacgcaucaaugcaugaguguaacacgaagugucaaacaccccugggagcuauaaacagcagucucccuuaccagaauauacacccagucacaauaggagagugcccaaaauacgucaggagugccaaauugaggaugguuacaggacuaaggaacauuccguccauucaauccagaggucuauuuggagccauugccgguuuuauugaagggggauggacuggaaugauagauggaugguaugguuaucaucaucagaaugaacagggaucaggcuaugcagcggaucaaaaaagcacacaaaaugccauuaacgggauuacaaacaaggugaacacuguuaucgagaaaaugaacauucaauucacagcuguggguaaagaauucaacaaauuagaaaaaaggauggaaaauuuaaauaaaaaaguugaugauggauuucuggacauuuggacauauaaugcagaauuguuaguucuacuggaaaaugaaaggacucuggauuuccaugacucaaaugugaagaaucuguaugagaaaguaaaaagccaauuaaagaauaaugccaaagaaaucggaaauggauguuuugaguucuaccacaagugugacaaugaaugcauggaaaguguaagaaaugggacuuaugauuaucccaaauauucagaagagucaaaguugaacagggaaaagguagauggagugaaauuggaaucaauggggaucuaucagauucuggcgaucuacucaacugucgccaguucacuggugcuuuuggucucccugggggcaaucaguuucuggauguguucuaauggaucuuugcagugcagaauaugcaucuga

SEQ ID NO: 42184 - RNA, 1698 nt, Artificial Sequence
  derived and/or modified CDS sequence (wt) from hemagglutinin__InfluenzaA__AGQ48038
augaaggcaaaccuacugguccuguuaugugcacuugcagcugcagaugcagacacaauauguauaggcuaccaugcgaacaacucaaccgacacuguugacacaguacucgagaagaaugugacagugacacacucuguuaaccugcucgaagacagccacaacggaaaacuauguaaauuaaaaggaauagccccacuacaauuggggaaauguaacaucgccggauggcucuugggaaacccaggaugcgacccacugcuuccagugggaucaugguccuacauuguagaaacaccaaacucugagaauggaauauguuauccaggagauuucaucgacuaugaggagcugagggagcaauugagcucagugucaucauucgaaagauucaaaauauuucccaaagaaagcucauggcccgaccacaacacaaacggaguaacggcagcaugcucccaugaggggaaaaacaguuuuuacagaaauuugcuauggcugacgaagaaggagagcucauacccagagcugaaaaauucuuaugugaacaaaaaaagggaagaaguccuuguacugugggguauucaucacccgccuaacagugaggaacaacagaaucucuaucagaaugaaaaugcuuaugucucuguagugacuucaaauuauaacaggagauuuaccccggaaauagcagaaagacccaaaguaaaaggucaagcugggaggaugaacuauuacuggaccuugcuaaaacccggagacacaauaauauuugaggcaaauggaaaucuaauagcaccaauguaugcuuucgcacugaguagaggcuuuggguccggcaucaucaccucaaacgcaucaaugcaugaguguaacacgaagugucaaacaccccugggagcuauaaacagcagucucccuuaccagaauauacacccagucacaauaggagagugcccaaaauacgucaggagugccaaauugaggaugguuacaggacuaaggaacauuccguccauucaauccagaggucuauuuggagccauugccgguuuuauugaagggggauggacuggaaugauagauggaugguaugguuaucaucaucagaaugaacagggaucaggcuaugcagcggaucaaaaaagcacacaaaaugccauuaacgggauuacaaacaaggugaacacuguuaucgagaaaaugaacauucaauucacagcuguggguaaagaauucaacaaauuagaaaaaaggauggaaaauuuaaauaaaaaaguugaugauggauuucuggacauuuggacauauaaugcagaauuguuaguucuacuggaaaaugaaaggacucuggauuuccaugacucaaaugugaagaaucuguaugagaaaguaaaaagccaauuaaagaauaaugccaaagaaaucggaaauggauguuuugaguucuaccacaagugugacaaugaaugcauggaaaguguaagaaaugggacuuaugauuaucccaaauauucagaagagucaaaguugaacagggaaaagguagauggagugaaauuggaaucaauggggaucuaucagauucuggcgaucuacucaacugucgccaguucacuggugcuuuuggucucccugggggcaaucaguuucuggauguguucuaauggaucuuugcagugcagaauaugcaucuga

SEQ ID NO: 42185 - RNA, 1698 nt, Artificial Sequence
  derived and/or modified CDS sequence (wt) from hemagglutinin__InfluenzaA__AGQ48050
augaaggcaaaccuacugguccuguuaugugcacuugcagcugcagaugcagacacaauauguauaggcuaccaugcgaacaacucaaccgacacuguugacacaguacucgagaagaaugugacagugacacacucuguuaaccugcucgaagacagccacaacggaaaacuauguaaauuaaaaggaauagccccacuacaauuggggaaauguaacaucgccggauggcucuugggaaacccaggaugcgacccacugcuuccagugggaucaugguccuacauuguagaaacaccaaacucugagaauggaauauguuauccaggagauuucaucgacuaugaggagcugagggagcaauugagcucagugucaucauucgaaagauucaaaauauuucccaaagaaagcucauggcccgaccacaacacaaacggaguaacggcagcaugcucccaugaggggaaaaacaguuuuuacagaaauuugcuauggcugacgaagaaggagagcucauacccagagcugaaaaauucuuaugugaacaaaaaaagggaagaaguccuuguacugugggguauucaucacccgccugacagugaggaacaacagaaucucuaucagaaugaaaaugcuuaugucucuguagugacuucaaauuauaacaggagauuuaccccggaaauagcagaaagacccaaaguaaaaggucaagcugggaggaugaacuauuacuggaccuugcuaaaacccggagacacaauaauauuuaaggcaaauggaaaucuaauagcaccaauguaugcuuucgcacugaguagaggcuuuggguccggcaucaucaccucaaacgcaucaaugcaugaguguaacacgaagugucaaacaccccugggagcuauaaacagcagucucccuuaccagaauauacacccagucacaauaggagagugcccaaaauacgucaggagugccaaauugaggaugguuacaggacuaaggaacauuccguccauucaauccagaggucuauuuggagccauugccgguuuuauugaagggggauggacuggaaugauagauggaugguaugguuaucaucaucagaaugaacagggaucaggcuaugcagcggaucaaaaaagcacacaaaaugccauuaacgggauuacaaacaaggugaacacuguuaucgagaaaaugaacauucaauucacagcuguggguaaagaauucaacaaauuagaaaaaaggauggaaaauuuaaauaaaaaaguugaugauggauuucuggacauuuggacauauaaugcagaauuguuaguucuacuggaaaaugaaaggacucuggauuuccaugacucaaaugugaagaaucuguaugagaaaguaaaaagccaauuaaagaauaaugccaaagaaaucggaaauggauguuuugaguucuaccacaagugugacaaugaaugcauggaaaguguaagaaaugggacuuaugauuaucccaaauauucagaagagucaaaguugaacagggaaaagguagauggagugaaauuggaaucaauggggaucuaucagauucuggcgaucuacucaacugucgccaguucacuggugcuuuuggucucccugggggcaaucaguuucuggauguguucuaauggaucuuugcagugcagaauaugcaucuga

SEQ ID NO: 42186 - RNA, 1689 nt, Artificial Sequence
  derived and/or modified CDS sequence (wt) from hemagglutinin__InfluenzaA__AGQ80946
auggccaucauuuaucuaauucuucuguuuacagcagugagaggagaccagauaugcauuggauaccauuccaacaauuccacagaaaaggucgacacaauucuagagaggaaugucaccgugacucacgcucaagacauucuugagaagacucacaauggaaaauuaugcaaacugaauggaaucccuccacuugaauugggagauugcagcaucgccggauggcuccuugggaauccagaaugugauaggcuucuaacugugccagaauggucauauauaauggagaaagaaaauccaaggaacgguuugugcuacccaggcaguuucaaugauuaugaagaauugaaacaccuccuuaguaguguaacacacuucgagaaagugaagauuuugcccaaagauagauggacacagcauacaacaacuggagguucacgggccugcgcaguaucugguaauccgucauucuucaggaacauggucugguugacaaagaaagggccgaauuacccaguugccaaaggaucauacaauaauacaaguggggaccaaaugcugaucauuuggggggugcaucaccccaaugaugaagcugaacaaaggacauuguaucagaaugucgggacuuauguaucaguaggaacaucgacacugaacaaaagaucaguuccagaaauagccacaagaccuaaggugaauggacaaggaggcagaauggaauucucguggacuauauuggauguguuggacaccauaaauuucgagaguacugguaaucuaauugcaccggaauauggcuuuaaaauauccaaacgggguaguucaggaaucaugaaaacggaaggaacacuugaaaacugcgaaacuaaaugccaaacucccuugggagcaauaaauacaacauugcccuuucauaauauccacccacugaccauuggugagugccccaaauauguaaaaucggaaagguuagucuuggcaacaggauuaagaaaugucccucagauugaaucaagaggauuguuuggggcaauagcugguuuuauagaagggggauggcaaggaaugguugaugguugguauggauaucaucacagcaaugaucaaggauccggcuaugcagcagacaaagaguccacucaaaaggcaauugauggaaucaccaacaagguaaacucuguaauugagaaaaugaacacucaauucgaggcuguuggaaaagaauucaguaauuuggagaaaagacuggaaaaccugaauaaaaagauggaggacggauuccuagauguguggacauacaaugcugagcuucuaguucuaauggaaaaugagaggacacuugacuuucaugacuccaauguaaagaaucuauaugacaaagucagaaugcaacugagggacaaugcaaaagaacuagggaauggauguuuugaauuuuaucauaaaugugaugaugaaugcaugaauagcguaaagaaugggacauaugauuaucccaaguaugaagaggagucuaaacuaaacaggaaugagaucaaaggaguaaaauugagcaacauggggguuuaucaaauccuugcaauuuaugcuacaguagcaggcucccugucacuggcaaucaugauagcugggaucuccuuauggaugugcucuaacgggucucugcaaugcaggaucugcauauga

SEQ ID NO: 42187 - RNA, 1689 nt, Artificial Sequence
  derived and/or modified CDS sequence (wt) from hemagglutinin__InfluenzaA__AGQ80947
auggccaucauuuaucuaauucuuuuguuugcaacagugagaggagaccagauaugcauuggauaccacuccaacaauuccacagaaaagguagacacaauucuagagaggaauaucacugugacucacgcucaggacauucuugagaagacucacaauggaaaauuaugcaaacuaaauggaaucccuccacuugaauugggaaacugcagcaucgcuggauggcuccuuggaaauccagaaugugauaggcuucuaacugugccagaauggucauauauaauggagaaagaaaauccaagggaugguuugugcuacccaggcaguuucaaugacuaugaagaauugaaacaccuccuuaguaguguaacacacuucgagaaagugaagauuuugcccaaagauagguggacacagcauacaacaacuggagguucacgggcuugcgcaguaucugguaacccgucauucuucagaaacauggucugguugacaaagaaagggucgaauuacccaauugccaagggaucauacaauaauacaaguggggaacaaaugcugaucauuuggggaguacaucaucccaaugaugaugcugaacaaagaacauuguaucagaacgucgggaccuauguaucaguggggacaucgacauugaacaaaagaucaaucccagaaauagccacaagaccuaaagugaauggacagggaggcagaauggaauucucguggacuauauuggauauguuggacaccauaaacuuugagaguacugguaaucuaauugcaccagaauauggauuuaaaauauccaaacgggguagcucagggaucaugaaaacagaagggacacuugaaaacugcgaaacuaaaugccaaacucccuugggagcaauaaauacaacauugcccuuccauaauauccauccauugaccauuggugaaugucccaaauaugucaaaucagagagguuaguuuuggcaacaggauuaagaaaugucccucaaauugaaucaagagggcuguuuggggcaauagcugguuucauagaagggggauggcaaggaaugguugaugguugguauggauaucaucacagcaaugaucaaggauccggguaugcagcagacaaagaguccacucaaaaggcaauugauggaaucaccaauaagguaaacucuguaauugagaaaaugaacacccaauucgaggcuguugggaaagaauucaauaauuuggagaaaagacuggaaaaccugaauaaaaagauggaggacggauuccuagauguguggacauacaaugcugagcuucuaguucuaauggaaaaugaaagaacacuugacuuccaugacuccaaugucaagaaucuauaugacaaagucagaaugcaauugaaggacaaugcaaaagaacuagggaauggauguuucgaauuuuaccauaaaugugaugaugaaugcaugaauaguguaaagaaugggacauaugauuaucccaaauaugaagaggagucuaaauuaaacaggaaugagaucaaaggagucaaauugagcaacauggggguuuaucaaauccuugcaauuuaugcuacaguggcaggcuccuugucacuggcaaucaugauagcuggggucuccuuauggaugugcucuaacgggucucugcaaugcaggaucugcauauga

SEQ ID NO: 42188 - RNA, 1689 nt, Artificial Sequence
  derived and/or modified CDS sequence (wt) from hemagglutinin__InfluenzaA__AGQ80948
auggccaucauuuaucuaauucuuuuguuugcagcagugagaggagaccagauaugcauuggauaccacuccaacaauuccacagaaaagguagacacaauucuagagaggaaugucacugugacucacgcucaagacauucuugagaagacucacaauggaaaauuaugcaaacuaaauggaaucccuccacuugaauugggaaacugcagcaucgcuggauggcuccuuggaaauccagaaugugauaggcuccuaacugugccagaauggucauauauaauggagaaagaaaauccaaggaaugguuugugcuacccaggcaguuucaaugacuaugaagaauugaaacaccuccuuaguaguguaacacacuucgagaaagugaagauuuugcccaaagauagguggacacagcauacaacaacuggagguucacgggcuugcgcaguauuugguaacccgucauucuucagaaacauggucugguugacaaagaaagggucgaauuacccaauugccaagggaucauacaauaauacaaguggggaacaaaugcugaucauuuggggaguacaucaucccaaugaugaugcugaacaaagaacauuguaucagaacgucgggaccuauguaucaguggggacaucgacauugaacaaaagaucaaucccagaaauagccacaagaccuaaagugaauggacagggaggcagaauggaauucucguggacuauauuggauauguuggacaccauaaacuuugagaguacugguaaucuaauugcaccagaauauggauuuaaaauauccaaacgggguagcucagggaucaugaaaacagaagggacacuugaaaacugcgaaacuaaaugucaaacucccuugggagcaauaaauacaacauugcccuuccauaauauccauccauugaccauuggugaaugucccaaauauguaaaaucagagagguuagucuuggcaacaggauuaagaaaugucccucaaauugaaucaagagggcuguuuggggcaauagcugguuucauagaagggggauggcaaggaaugguugaugguugguauggauaucaucacagcaaugaucaaggauccggguaugcagcagacaaagaguccacucaaaaggcaauugauggaaucaccaauaaggucaacucuguaaucgagaaaaugaacacccaauucgaggcuguugggaaagaauucaauaauuuggagaaaagacuggaaaaccugaauaaaaagauggaggacggauuccuagauguguggacauacaaugcugagcuucuaguucuaauggaaaaugaaagaacacuugacuuccaugacuccaaugucaagaaucuauaugacaaaaucaggaugcaauugaaggacaaugcaaaagaacuagggaauggauguuucgaauuuuaccauaaaugugaugaugaaugcaugaauagcguaaagaaugggacauaugauuaucccaaauaugaagaggagucuaaauuaaacaggaaugagaucaaaggggucaaauugagcaacauggggguuuaucaaauccuugcaauuuaugcuacaguggcaggcuccuugucacuggcaaucaugauagcugggaucuccuuauggaugugcucuaacgggucucugcaaugcaggaucugcauauga

SEQ ID NO: 42189 - RNA, 1689 nt, Artificial Sequence
  derived and/or modified CDS sequence (wt) from hemagglutinin__InfluenzaA__AGQ80949
auggccaucauuuaucuaauucuuuuguuugcagcagugagaggagaccagauaugcauuggauaccacuccaacaauuccacagaaaagguagacacaauucuagagaggaaugucacugugacucacgcucaagacauucuugagaagacucacaauggaaaauuaugcaaacuaaauggaaucccuccacuugaauugggagacugcagcaucgcuggauggcuccuuggaaauccagaaugugauaggcuucuaacugugccagaauggucauauauaauggagaaagaaaauccaaggaaugguuugugcuacccaggcaguuucaaugacuaugaagaauugaaacaccuccuuaguaguguaacacacuucgagaaagugaagauuuugcccaaagauagguggacacagcauacaacaacuggagguucacgggcuugcgcaguaucugguaacccgucauucuucagaaacauggucugguugacaaagaaagggucgaauuacccaauugccaagggaucauacaauaauacaaguggggaacaaaugcugaucauuuggggaguacaucaucccaaugaugaugcugaacaaagaacauuguaucagaacgucgggaccuauguaucaguggggacaucgacauugaacaaaagaucaaucccagaaauagccacaagaccuaaagugaauggacagggaggcagaauggaauucucguggacuauauuggauauguuggacaccauaaacuuugagaguacugguaaucuaauugcaccagaauauggauuuaaaauauccaaacgggguagcucagggaucaugaaaacagaagggacacuugaaaacugcgaaacuaaaugucaaacucccuugggagcaauaaauacaacauugcccuuccauaauauccauccauugaccauuggugaaugucccaaauauguaaaaucagagagguuagucuuggcaacaggauuaagaaaugucccucaaauugaaucaagagggcuguuuggggcaauagcugguuucauagaagggggauggcaaggaaugguugaugguugguauggauaucaucacagcaaugaucaaggauccggguaugcagcagacaaagaguccacucaaaaggcaauugauggaaucaccaauaaggucaacucuguaauugagaaaaugaacacccaauucgaggcuguugggaaagaauucaauaauuuggagaaaagacuggaaaaccugaauaaaaagauggaggacggauuccuagauguguggacauacaaugcugagcuucuaguucuaauggaaaaugaaagaacacuugacuuccaugacuccaaugucaagaaucuauaugacaaaaucaggaugcaauugaaggacaaugcaaaagaacuagggaauggauguuucgaauuuuaccauaaaugugaugaugaaugcaugaauagcguaaaaaaugggacauaugauuaucccaaauaugaagaggagucuaaauuaaacaggaaugagaucaaaggggucaaauugagcaacauggggguuuaucaaauccuugcaauuuaugcuacaguggcaggcuccuugucacuggcaaucaugauagcugggaucuccuuauggaugugcucuaacgggucucugcaaugcaggaucugcauauga

SEQ ID NO: 42190 - RNA, 1701 nt, Artificial Sequence
  derived and/or modified CDS sequence (wt) from hemagglutinin__InfluenzaA__AGQ80950
augaagaccauuauugccuugagcuacauuuucugccuggccuuuggucagaaccuuccagggaaugacagcaguacagcaacacugugccugggacaucaugcggugcugaacgggacaauagugaagacaaucaccgaugaucagauugaggugacuaaugcuaccgagcugguucaaagcucuucaacagggaaaauaugcaacaauccucauaagauccuugauggaagggacugcacacuaauagaugcccugcugggggauccucauugcgaugucuuucaagaugaaacaugggaucuuuuuguggagcgaagcagcgcuuucagcaauuguuacccuuaugauguaccagauuaugccucccuucgaucccuaguugcuucaucaggcacacuagaguucaucacugaggguuucacuuggacaggaguaagccagaauggagggagcggugccugcaaaagaggaccugccaacggcuucuucaguagauugaacugguugacuaagucaggaaacgcauauccaguguugaacgugacuaugccaaacagugacaauuuugacaaacuauacaucugggguguucaccacccgagcacaaaucaagaacagaccaaccuguauguucaagccucagggagggucacagucucuaccagaagaagucaacagacuauaaucccaaauauuggaucuagacccugggugaggggccagucuggcagaauaagcaucuauuggacaauagucaaaccuggggacguacugguaaucaauaguaauggaaaucuaauugcuccucggggcuauuucaagaugcggacugggaaaagcucaauaaugagaucagaugcaccuauugaaacuugcauuucagaaugcauuacuccaaauggaagcaucccuaaugacaagcccuuucaaaauguaaacaagaucacauacggagcaugucccaaauaugugaagcagaauacucuaaaguuagcaacaggaaugcggaauguaccugagaaacaaaccagaggucuauucggugcaauagcaggguucauagaaaaugggugggaaggaaugauagaugguugguauggcuucaggcaccaaaacuccgaagguacagggcaagcagcagaccuuaaaagcacucaagcggccauugaccagaucaaugggaaauugaacagggugauugaaaagacgaaugagaaauuccaucaaaucgaaaaggaauucucugagguagaaggaaggauucaggaucuugagaaauacguugaagacacaaagauagaucucuggucuuacaaugcagaacuucuuguugcccuagagaaccagcauacaauugauuugacugauucagagaugaacaaauuguuugaaaagaccaggaggcaacugagagagaaugcugaagacaugggcaaugguugcuucaagauauaccacaagugugacaaugcuugcauagaaucaauuagaaacgggacuuaugaccaugacauauaccgagaugaggcacugaacaaccgguuccagaucaaagguguugagcuaaaaucuggguacaaagacuggauccuguggauuuccuuugccauaucaugcuuuuugcuuuguguugucuuguugggguucauuaugugggccugccagagaggcaacauuaggugcaacauuugcauuuga

SEQ ID NO: 42191 - RNA, 1695 nt, Artificial Sequence
  derived and/or modified CDS sequence (wt) from hemagglutinin__InfluenzaA__AGQ80951
augcuaucaauugugauuuuguuucugcuuguugcagagagcucuucucaaaacuacacaggaaacccugugauaugcaugggacaucaugcuguggccaaugggacuaugguaaagacccucacugaugaucaaguggaaguggucacugcacaagaacugguggaaucacagaaccucccggaacuaugcccgaguccucuaagacuagucgauggccagaccugugauaucaucaauggagccuuaggaagcccaggaugugaccauuugaauggugcugaaugggacauuuucauagaaaggcccaaugcaauggacacuugcuauccauuugaugugccagauuaucagagccuaaggagcauacucgccaacaaugggaaauucgaauucauugcugaagaauuccaauggagcaccgugaagcaaaauggcaaauccggggccugcaagagggcaaaugugaacgauuucuuuaauagacugaauuggcucgugaagucagacgggaaugcauacccucuccagaauuugacaaaaguaaacaacggugauuaugcgaggcuuuacaucuggggaguucaccacccuucgacggauaccgagcaaaccaaccuguauaagaacaauccugguagggucacuguaucuaccaaaaccagucaaacaaguguggugcccaacauuggcagcaggccuugggugagaggacaaaguggcagaaucagcuucuauuggacuauuguagagccuggagauuugauagucuucaacacaauaggaaauuuaauugccccaagaggacauuacaaauuaaacagucagaagaagagcacaauucugaacacugcaacucccauaggcucaugugucaguaaaugucauacagacaaagguucucucucuaccaccaagcccuuucaaaauaucucaaggguagcaauuggagauugucccaaauaugucaaacaaggcucccuaaaacuugcaacugggaugagaaauaucccugagaaggcaucaagagggcuuuuuggagcaauagcuggauucauagagaauggauggcaaggccugauugaugguugguauggcuucagacaucaaaaugcagaaggaacaggaacagcugcugaucuaaaauccacucaggcagccaucgaucagaucaaugggaaacucaaucgucuuauugagaaaacaaacgagaaauaccaucaaaucgaaaaagaguucgaacaaguugaaggaagaauccaagaccuggagaaauauguugaagacacaaagauugaucuauggucauauaaugcagagcuauuagucgcucuggaaaaccagcauacuauagaugugacugacucggagaugaacaagcucuuugaaagaguaaggcgacaacucagggagaaugcugaagacaaaggaaauggauguuuugaaauauuccacaaaugugacaacaacugcauugaaagcauucggaaugggaccuaugaucaugauguuuauagaaaugaagcgaucaacaaucgauuccaaauacagggugucaaauugacccagggauacaaggacaucauccuuuggauuucguucuccauaucaugcuuuuugcucguagcacugcuuuuggccuucauuuugugggcuugucagaacggaaacauccggugccagauuugcauuuga

SEQ ID NO: 42192 - RNA, 1683 nt, Artificial Sequence
  derived and/or modified CDS sequence (wt) from hemagglutinin__InfluenzaA__AGQ80953
augaacacucaaauccugguauucgcucugguugcgaucauuccgacaaaugcagacaaaaucugccucggacaucaugcugugucaaacggaacuaaaguaaacacauuaacugaaagaggaguggaagucguuaaugcaacugaaacaguggaacgaacaagcauccccaggaucugcucaaaagggaaaagggcaguugaccucggucaauguggacuccuggguacaaucacugggccaccccaaugugaccaauuccuagaauuuucagccgauuugauuauugagaggcgagaaggaagugaugucuguuauccugggaaguuuguaaaugaagaagcuuugaggcaaauucucagggaaucaggcggaauugacaaggaaacaaugggauucacauacagcggaauaagaacuaauggagcaaccagugcauguaggagaucaggaucuucauucuaugcagaaaugaaauggcuccugucaaacacagauaaugcugcuuucccgcagacgacuaaaucauacaaaaauacaaggaaagacccagcuuuaauaauaugggggauucaccauucuggaucaacuacagaacagaccaagcuauaugggaguggaaacaaacugauaacaguugggaguucuaauuaucaacagucuuuugugccgaguccaggagcgagaccacaaguuaauggccaaucuggaaggauugacuuucauuggcugaugcuaaaccccaaugauacagucacuuucaguuucaauggggccuucauagcuccagaccgugcaagcuuccugagaggaaaaucuaugggaauucagaguggaguacagguugaugccaauugugaaggggauugcuaucacaauggagggacaauaauaaguaauuugcccuuucagaacauaaauagcagggcaguagggaaauguccgagauauguuaagcaagagagucugcugcuagcaacagggaugaagaauguucccgagauuccaaagggaagaggucuauuuggugcuauagcagguuucauugaaaauggaugggaaggucuaauugaugggugguaugguuucaggcaucaaaaugcacagggagaggggacugcugcagauuacaaaagcacucagucggcaauugaucaaauaacagggaaauuaaaccggcuuauagaaaaaaccaaccaacaauuugaguuaauagacaaugaguucacugagguugaaaggcaaauugguaauguaauaaauuggaccagagacuccaugacagaggugugguccuacaaugcugaacucuuaguagcaauggagaaccagcacacaauugaucuggcugauucagaaaugaauaaacuauacgaacgagugaggagacagcugagagagaaugcugaagaagauggcaccgguugcuuugaaauauuucacaagugugaugaugacuguauggccaguauuagaaauaacaccuaugaucacagcaaguacagggaagaggcaaugcaaaauagaauacagauugauccagucaaacuaagcaguggcuacaaagaugugauacuuugguuuagcuucggggcaucauguuucauacuucuggccauugcaaugggccuugucuucauaugugugaagaauggaaacaugcggugcacuauuuguauauaa

SEQ ID NO: 42193 - RNA, 1683 nt, Artificial Sequence; identical to SEQ ID NO: 42192
  derived and/or modified CDS sequence (wt) from hemagglutinin__InfluenzaA__AGQ80954

SEQ ID NO: 42194 - RNA, 1683 nt, Artificial Sequence; identical to SEQ ID NO: 42192
  derived and/or modified CDS sequence (wt) from hemagglutinin__InfluenzaA__AGQ80955

SEQ ID NO: 42195 - RNA, 1683 nt, Artificial Sequence; identical to SEQ ID NO: 42192
  derived and/or modified CDS sequence (wt) from hemagglutinin__InfluenzaA__AGQ80956

SEQ ID NO: 42196 - RNA, 1683 nt, Artificial Sequence; identical to SEQ ID NO: 42192
  derived and/or modified CDS sequence (wt) from hemagglutinin__InfluenzaA__AGQ80957

SEQ ID NO: 42197 - RNA, 1683 nt, Artificial Sequence; identical to SEQ ID NO: 42192
  derived and/or modified CDS sequence (wt) from hemagglutinin__InfluenzaA__AGQ80958

SEQ ID NO: 42198 - RNA, 1683 nt, Artificial Sequence
  derived and/or modified CDS sequence (wt) from hemagglutinin__InfluenzaA__AGQ80959
augaacacucaaauccugguauucgcucugauugcgaucauuccaacaaaugcagacaaaaucugccucggacaucaugcugugucaaacggaaccaaaguaaacacauuaacugaaagaggaguggaagucgucaaugcaacugaaacaguggaacgaacaaacauccccaggaucugcucaaaagggaaaagaacaguugaccucggucaauguggacuccuggggacaaucacugggccaccucaaugugaccaauuccuagaauuuucagccgauuuaauuauugagaggcgagaaggaagugauguuuguuauccugggaaauucgugaaugaagaagcucugaggcaaauucucagggaaucaggcggaaucgacaaggaagcaaugggauucacauacagcggaauaagaacuaauggagcaaccagugcauguaggagaucaggaucuucauucuaugcagaaaugaaauggcuccuaucaaacacagauaaugcugcuuucccgcagaugacuaagucauauaaaaauacaagaaaggacccagcucuaauaauaugggggauccaucauuccggaucaacugcagagcaaaccaagcuauaugggaguggaaacaaacuagugacaguugggaguucuaauuaucaacaaucuuuugugccgaguccaggagcgagaccacaaguuaauggucagucuggaaggauugacuuucauuggcuaaugcuaaaucccaaugacacagucaccuucagcuucaauggggcuuucauagcuccagaccgugcaagcuuccugagagggaaaucuaugggaauccagaguggaguacagguugaugccaauugugaaggagacugcuaucaugguggagggacaauaauaaguaacuugccauuucaaaacauagacagcagagcaguaggaaaauguccgagauauguuaagcaaaagagucugcugcuagcaacagggaugaagaauguuccugagaguccaaagggaagaggccuauuuggugcuauagcggguuucauugaaaauggaugggaaggccuaauugaugggugguaugguuucagacaccagaaugcacagggagagggaacugcugcagauuacaaaagcacucaaucggcaauugaucaaauaacaggaaaauuaaaccggcuuauagaaaaaaccaaccaacaauuugaguugauagacaaugaauucacugagguagagaagcaaaucgguaaugugauaaauuggaccagagacucuauaacggaaguguggucauacaaugcugagcucuugguagcaauggagaaccagcauacaauugaucuggcugauucagaaaugaacaaacuguacgaacgagugaaaagacagcugagagagaaugcugaagaagauggcacugguugcuuugaaauauuucacaaaugugaugaugacuguauggccaguauuagaaauaacaccuaugaucacagcaaauacagggaagaagcaaugcaaaauagaauacagauugacccagucaaacuaagcagcggcuacaaagaugugauacuuugguuuagcuucggggcaucauguuucauacuucuagccauugcaaugggccuugucuucauaugugugaagaauggaaacaugcggugcacuauuuguauauaa

SEQ ID NO: 42199 - RNA, 1683 nt, Artificial Sequence
  derived and/or modified CDS sequence (wt) from hemagglutinin__InfluenzaA__AGQ80961
augaacacucaaauccugguauucgcucugguggcgaucauuccgacgaaugcagacaagaucugucuugggcaccaugccgugucaaacgggacuaaaguaaacacauuaacugaaagaggaguggaagucguuaaugcaacugaaacgguugaacgaacaaauguucccaagaucugcucaaaaggaaaaaggacaguugaccucggucaauguggacuucugggaacaauaacugggccaccccaaugugaccaauuccuagaauuuucagccgauuuaauuauugagaggcgagaaggaagugaugucuguuauccugggaaauucgugaaugaagaaacucugaggcaaauucucagggagucaggcggaauugacaaggagacgaugggguucacauacagcggaauaagaacuaauggagcaaccagugcauguagaagaucaggaucuucauucuaugcagaaaugaaauggcuccugucaaacacagacaaugcugcuuucccgcagaugacuaagucauacaaaaacgcaaggaaagacccagcucugauaauaugggggauccaccauuccggaucaaccacagaacagaccaagcuauacgggaguggaaacaaauugauaacaguugggaguucuaauuaccaacaguccuuuguaccgaguccgggagcgaggccacaagugaauggccaaucuggaaggauugauuuucauuggcugaugcugaaccccaaugauacaguuacuuucaguuucaauggggccuucauagcuccagaccgugcaugcuuucugagagggaaguccaugggaauucagaguggaguacagguugaugccaguugugaaggagauugcuaucauaguggagggacaauaauaaguaauuugcccuuucagaacauaaauagcagggcaguagggaaauguccgagauauguuaagcaggagagucugaugcuggcgacaggaaugaagaauguuccugaaaucccaaagggaagaggccuguuuggugcuauagcggguuucauugaaaauggaugggaaggucugauugacggaugguauggcuucaggcaucaaaaugcacaaggggagggaacugcugcagauuacaagagcacccaaucagcaauugaucaaauaacagggaaauuaaaccggcuuauagaaaaaacuaaccaacaauuugaguuaauagacaaugaauucacugagguugaaaagcaaauugguaaugugauaaauuggaccagagauuccaugacagaaguguggucauauaacgcugaacucuugguagcaauggagaaucagcacacaaucgaucuggccgacucagaaaugaacaaacuauacgaacgggugaagaggcaacugagagagaaugcugaagaagauggcacugguuguuuugaaauauuucacaagugugaugacgacuguauggccaguauuagaaacaacacuuaugaucacagcaaguacagggaagaggcaaugcaaaauagaauaaagauugacccggucaaacuaagcagcggcuacaaagaugugauacuuugguuuagcuucggggcaucauguuucauacuucuggccauugcaaugggccuugucuucauaugugugaagaacggaaacaugcggugcacuauuuguauauaa

SEQ ID NO: 42200 - RNA, 1683 nt, Artificial Sequence; identical to SEQ ID NO: 42199
  derived and/or modified CDS sequence (wt) from hemagglutinin__InfluenzaA__AGQ80962

SEQ ID NO: 42201 - RNA, 1683 nt, Artificial Sequence
  derived and/or modified CDS sequence (wt) from hemagglutinin__InfluenzaA__AGQ80964
augaacacucaaauccugguauucgcucugauugcgaucauuccaacaaaugcagacaaaaucugccuuggacaucaugcugugucaaacggaacuaaaguaaacacauuaacugaaagaggaguggaagucguuaaugcaacugaaacaguggaacggacaaacauccccaggaucugcucaaaggggaaaaggacaguugaccucggucaauguggacuccuggggacaaucacuggaccaccucaaugugaccaauuccuagaauuuucagccgauuuaauuauugagaggcgagaaggaagugaugucuguuauccugggaaauucgugaaugaagaagcucugaggcaaauucucagggaaucaggcggaauugacaaggaagcaaugggauucacauacagcggaauaagaacuaauggagcaaccagugcauguaggagaucagggucuucauucuaugcagaaaugaaauggcuccugucaaacacagauaaugcugcuuucccgcagaugacuaagucauauaaaaauacaaggaaagacccagcucuaauaauaugggggauccaucauuccggaucaacugcagagcaaaccaagcuauaugggaguggaaacaaacuggugacaguugggaguucuaauuaucaacaaucuuuugugccgaguccaggagcgagaccacaaguuaauggucaaucuggaaggauugacuuucauuggcuaaugcugaaucccaaugauacugucaccuucaguuucaauggggcuuucauagcuccagaccgugcaagcuuccugagagggaaaucuaugggaauucagaguggaguacagguugaugccgauugugaaggggauugcuaucauaguggagggacaauaauaaguaauuugccauuucagaacauagauagcagggcaguaggaaaauguccgagauauguuaagcaaaggagucugcugcuagcaacagggaugaagaauguuccugagauuccaaagggaagaggccuauuuggugcuauagcggguuucauugaaaauggaugggaaggccuaauugaugggugguaugguuucaggcaccagaaugcacagggagagggaacugcugcagauuacaaaagcacucaaucggcaauugaucaaauaacaggaaaauuaaaccggcuuauagaaaaaaccaaccaacaauuugaguugauagacaaugaguucacugagguagagaagcaaaucgguaaugugauaaauuggaccagagacucuauaacagaaguguggucauacaaugcugaacucuugguagcaauggagaaccagcauacgauugaucuggcugauucagaaaugaauaaacuguacgaacgagugaaaagacagcugagagagaaugcugaagaagauggcacugguugcuuugaaauauuucacaagugugaugaugacuguauggccaguauuagaaauaacaccuaugaucacagcaaauacagggaagaggcaaugcaaaauagaauacagauugacccagucaaacuaagcaguggauacaaagaugugauacuuugguuuagcuucggggcaucauguuucauacuucuagccauugcaaugggccuugucuucauaugugugaagaauggaaacaugcggugcacuauuuguauauaa

SEQ ID NO: 42202 - RNA, 1683 nt, Artificial Sequence; identical to SEQ ID NO: 42192
  derived and/or modified CDS sequence (wt) from hemagglutinin__InfluenzaA__AGQ80965

SEQ ID NO: 42203 - RNA, 1683 nt, Artificial Sequence; identical to SEQ ID NO: 42192
  derived and/or modified CDS sequence (wt) from hemagglutinin__InfluenzaA__AGQ80966

SEQ ID NO: 42204 - RNA, 1683 nt, Artificial Sequence
  derived and/or modified CDS sequence (wt) from hemagglutinin__InfluenzaA__AGQ80968
augaacacucaaauccugguauucgcucugguugcgaucauuccgacaaaugcagacaaaaucugccucggacaucaugcugugucaaacggaacuaaaguaaacacauuaacugaaagaggaguggaagucguuaaugcaacugaaacaguggaacgaacaagcauccccaggaucugcucaaaagggaaaagggcaguugaccucggucaauguggacuccuggguacaaucacugggccaccccaaugugaccaauuccuagaauuuucagccgauuugauuauugagaggcgagaaggaagugaugucuguuauccugggaaguuuguaaaugaagaagcuuugaggcaaauucucagggaaucaggcggaauugacaaggaaacaaugggauucacauacagcggaauaagaacuaauggagcaaccagugcauguaggagaucaggaucuucauucuaugcagaaaugaaauggcuccugucaaacacagauaaugcugcuuucccgcagacgacuaaaucauacaaaaauacaaggaaagacccagcuuuaauaauaugggggauucaccauucuggaucaacuacagaacagaccaagcuauaugggaguggaaacaaacugauaacaguugggaguucuaauuaucaacagucuuuugugccgaguccaggagcgagaccacaaguuaauggccaaucuggaaggauugacuuucauuggcugaugcuaaaccccaaugauacagucacuuucaguuucaauggggccuucauagcuccagaccgugcaagcuuccugagaggaaaaucuaugggaauucagaguggaguacagguugaugccaauugugaaggggauugcuaucacaauggagggacaauaauaaguaauuugcccuuucagaacauaaauagcagggcaguagggaaauguccgagauauguuaagcaagagagucugcugcuagcaacaggaaugaagaauguucccgagauuccaaagggaagaggucuauuuggugcuauagcagguuucauugaaaauggaugggaaggucuaauugaugggugguaugguuucaggcaucaaaaugcacagggagaggggacugcugcagauuacaaaagcacucagucggcaauugaucaaauaacagggaaauuaaaccggcuuauagaaaaaaccaaccaacaauuugaguuaauagacaaugaguucacugagguugaaaggcaaauugguaauguaauaaauuggaccagagacuccaugacagaggugugguccuacaaugcugaacucuugguagcaauggagaaccagcacacaauugaucuggcugauucagaaaugaauaaacuauacgaacgagugaggagacagcugagagagaaugcugaagaagauggcaccgguugcuuugaaauauuucacaagugugaugaugacuguauggccaguauuagaaauaacaccuaugaucacagcaaguacagggaagaggcaaugcaaaauagaauacagauugauccagucaaacuaagcaguggcuacaaagaugugauacuuugguuuagcuucggggcaucauguuucauacuucuggccauugcaaugggccuugucuucauaugugugaagaauggaaacaugcggugcacuauuuguauauaa

SEQ ID NO: 42205 - RNA, 1683 nt, Artificial Sequence
  derived and/or modified CDS sequence (wt) from hemagglutinin__InfluenzaA__AGQ80970
augaacacucaaauccugguauucgcucugguugcgaucauuccgacaaaugcagacaaaaucugccucggacaucaugcugugucaaacggaacuaaaguaaacacauuaacugaaagaggaguggaagucguuaaugcaacugaaacaguggaacgaacaagcauccccaggaucugcucaaaagggaaaaaggcaguugaccucggucaauguggacuccuggguacaaucacugggccaccccaaugugaccaauuccuagaauuuucagccgauuugauuauugagaggcgagaaggaagugaugucuguuauccugggaaguuuguaaaugaagaagcuuugaggcaaauucucagggaaucaggcggaauugacaaggaaacaaugggauucacauacagcggaauaagaacuaauggagcaaccagugcauguaggagaucaggaucuucauucuaugcagaaaugaaauggcuccugucaaacacagauaaugcugcuuucccgcagacgacuaaaucauacaaaaauacaaggaaagacccagcuuuaauaauaugggggauucaccauucuggaucaacuacagaacagaccaagcuauaugggaguggaaacaaacugauaacaguugggaguucuaauuaucaacagucuuuugugccgaguccaggagcgagaccacaaguuaauggccaaucuggaaggauugacuuucauuggcugaugcuaaaccccaaugauacagucacuuucaguuucaauggggccuucauagcuccagaccgugcaagcuuccugagaggaaaaucuaugggaauucagaguggaguacagguugaugccaauugugaaggggauugcuaucacaauggagggacaauaauaaguaauuugcccuuucagaacauaaauagcagggcaguagggaaauguccgagauauguuaagcaagagagucugcugcuagcaacagggaugaagaauguucccgagauuccaaagggaagaggucuauuuggugcuauagcagguuucauugaaaauggaugggaaggucuaauugaugggugguaugguuucaggcaucaaaaugcacagggagaggggacugcugcagauuacaaaagcacucagucggcaauugaucaaauaacagggaaauuaaaccggcuuauagaaaaaaccaaccaacaauuugaguuaauagacaaugaguucacugagguugaaaggcaaauugguaauguaauaaauuggaccagagacuccaugacagaggugugguccuacaaugcugaacucuuaguagcaauggagaaccagcacacaauugaucuggcugauucagaaaugaauaaacuauacgaacgagugaggagacagcugagagagaaugcugaagaagauggcaccgguugcuuugaaauauuucacaagugugaugaugacuguauggccaguauuagaaauaacaccuaugaucacagcaaguacagggaagaggcaaugcaaaauagaauacagauugauccagucaaacuaagcaguggcuacaaagaugugauacuuugguuuagcuucggggcaucauguuucauacuucuggccauugcaaugggccuugucuucauaugugugaagaauggaaacaugcggugcacuauuuguauauaa

SEQ ID NO: 42206 - RNA, 1683 nt, Artificial Sequence
  derived and/or modified CDS sequence (wt) from hemagglutinin__InfluenzaA__AGQ80971
augaacacucaaauccugguauucgcucugguugcgaucauuccgacaaaugcagacaaaaucugccucggacaucaugcugugucaaacggaacuaaaguaaacacauuaacugaaagaggaguggaagucguuaaugcaacugaaacaguggaacgaacaagcauccccaggaucugcucaaaagggaaaaagacaguugaccucggucaauguggacuccuggguacaaucacugggccaccccaaugugaccaauuccuagaauuuucagccgauuugauuauugagaggcgagaaggaagugaugucuguuauccugggaaguuuguaaaugaagaagcuuugaggcaaauucucagggaaucaggcggaauugacaaggaaacaaugggauucacauacagcggaauaagaacuaauggagcaaccagugcauguaggagaucaggaucuucauucuaugcagaaaugaaauggcuccugucaaacacagauaaugcugcuuucccgcagacgacuaaaucauacaaaaauacaaggaaagacccagcuuuaauaauaugggggauucaccauucuggaucaacuacagaacagaccaagcuauaugggaguggaaacaaacugauaacaguugggaguucuaauuaucaacagucuuuugugccgaguccaggagcgagaccacaaguuaauggccaaucuggaaggauugacuuucauuggcugaugcuaaaccccaaugauacagucacuuucaguuucaauggggccuucauagcuccagaccgugcaagcuuccugagaggaaaaucuaugggaauucagaguggaguacagguugaugccaauugugaaggggauugcuaucacaauggagggacaauaauaaguaauuugcccuuucagaacauaaauagcagggcaguagggaaauguccgagauauguuaagcaagagagucugcugcuagcaacagggaugaagaauguucccgagauuccaaagggaagaggucuauuuggugcuauagcagguuucauugaaaauggaugggaaggucuaauugaugggugguaugguuucaggcaucaaaaugcacagggagaggggacugcugcagauuacaaaagcacucagucggcaauugaucaaauaacagggaaauuaaaccggcuuauagaaaaaaccaaccaacaauuugaguuaauagacaaugaguucacugagguugaaaggcaaauugguaauguaauaaauuggaccagagacuccaugacagaggugugguccuacaaugcugaacucuuaguagcaauggagaaccagcacacaauugaucuggcugauucagaaaugaauaaacuauacgaacgagugaggagacagcugagagagaaugcugaagaagauggcaccgguugcuuugaaauauuucacaagugugaugaugacuguauggccaguaucagaaauaacaccuaugaucacagcaaguacagggaagaggcaaugcaaaauagaauacagauugauccagucaaacuaagcaguggcuacaaagaugugauacuuugguuuagcuucggggcaucauguuucauacuucuggccauugcaaugggccuugucuucauaugugugaagaauggaaacaugcggugcacuauuuguauauaa

SEQ ID NO: 42207 - RNA, 1683 nt, Artificial Sequence
  derived and/or modified CDS sequence (wt) from hemagglutinin__InfluenzaA__AGQ80974
augaacacucaaauccugguauucgcucugguugcgaucauuccgacaaaugcagacaaaaucugccucggacaucaugcugugucaaacggaacuaaaguaaacacauuaacugaaagaggaguggaagucguuaaugcaacugaaacaguggaacgaacaagcauccccaggaucugcucaaaagggaaaagggcaguugaccucggucaaugugggcuccuggggacaaucacugggccaccccaaugugaccaauuccuagaauuuucagcugauuuaauuauugagaggcgagaagggagugaugucuguuauccugggaaguucguaaaugaagaagcucugaggcagauucucagagaaucaggcggaauugacaaggaaacaaugggauucacauacagcggaauaagaacuaauggagcaaccagugcauguaggagaucaggaucuucauucuaugcagaaaugaaauggcuccugucaaacacagacaaugcugcuuucccgcagacgacuaaaucauacaaaaauacaaggaaagacccagcuuuaauaauaugggggauucaccauucuggaucaacuacagaacagaccaagcuauaugggaguggaaacaaacugauaacaguugggaguucuaauuaucaacagucuuuugugccgaguccaggagcgagaccacaaguuaauggccaaucuggaaggauugacuuucauuggcuaaugcuaaaccccaaugauacagucacuuucaguuucaauggggccuucauagcuccagaccgugcaagcuuccugagaggaaaaucuaugggaauucagaguggaguacagguugaugccaauugugaaggggauugcuaucacaauggagggacaauaauaaguaauuugcccuuucagaacauaaauagcagagcaguagggaaauguccgagauauguuaagcaagagagucugcugcuagcaacagggaugaagaauguuccugagauuccaaagggaagaggucuauuuggugcuauagcagguuuuauugaaaauggaugggaaggucuaguugaugggugguaugguuucaggcaucaaaaugcacagggagaggggacugcugcagauuacaaaagcacucagucggcaauugaucaaauaacagggaaauuaaaucggcuuauagaaaaaaccaaccaacaauuugaguuaauagacaaugaguucacugagguugaaaggcaaauuggcaauguaauaaauuggaccagagacuccaugacagaggugugguccuacaaugcugaacucuuaguagcaauggagaaccagcacacaauugaucuggcugauucagaaaugaauaaacuauacgaacgagugaggagacagcugagagagaaugcugaagaagauggcaccgguugcuuugaaauauuucacaagugugaugacgacuguauggccaguauuagaaauaacaccuaugaucacagcaaguacagggaagaggcaaugcaaaauagaauacaaauugauccagucaaacuaagcaguggcuacaaagaugugauacuuugguuuagcuucggggcaucauguuucauacuucuggccauugcaaugggccuugucuucauaugugugaaaaauggaaacaugcggugcacuauuuguauauaa

SEQ ID NO: 42208 - RNA, 1683 nt, Artificial Sequence
  derived and/or modified CDS sequence (wt) from hemagglutinin__InfluenzaA__AGQ80977
augaacacucaaauccuggcacucgcucuggcugcgaucauuccgacaaaugcagacaaaaucugccucggacaucaugcugugucaaacggaacuaaaguaaacacauuaacugaaagaggaguggaagucgucaaugcaacugaaacaguggaacgaacaagcauccccaggaucugcucaaaagggaaaagggcaguugaccucggucaauguggacuccuggggacaaucacugggccaccccaaugugaccaauuccuagaauuuucagcugauuuaauuauugagaggcgagaagggagugaugucuguuauccugggaaguucguaaaugaagaagcucugaggcagauucucagagaaucaggcggaauugacaaggaaacaaugggauucacauacagcggaauaagaacuaauggagcaaccagugcauguaggagaucaggaucuucauucuaugcagaaaugaaauggcuccugucaaacacagacaaugcugcuuucccgcagacgacuaaaucauacaaaaauacaaggaaagacccagcuuuaauaauaugggggguucaccauucuggaucaacuacagaacagaccaagcuauaugggaguggaaacaaacugauaacaguugggaguucuaauuaucaacagucuuuugugccgaguccaggagcgagaccacaaguuaauggccaaucuggaaggauugacuuucauuggcuaaugcuaaaccccaaugauacagucacuuucaguuucaauggggccuucauagcuccagaccgugcaagcuuccugagaggaaaaucuaugggaauucagaguggaguacagguugaugccaauugugaaggggauugcuaucacaauggagggacaauaauaaguaauuugcccuuucagaacauaaauagcagagcaguagggaaauguccgagauauguuaagcaagagagucugcugcuagcaacagggaugaagaauguuccugagauuccaaagggaagaggucuauuuggugcuauagcagguuuuauugaaaauggaugggaaggucuaguugaugggugguaugguuucaggcaucaaaaugcacagggagaggggacugcugcagauuacaaaagcacucagucggcaauugaucaaauaacagggaaauuaaaucggcuuauagaaaaaaccaaccaacaauuugaguuaauagacaaugaguucacugagguugaaaggcaaauuggcaauguaauaaauuggaccagagacuccaugacagaggugugguccuacaaugcugaacucuuaguagcaauggagaaccagcacacaauugaucuggcugauucagaaaugaauaaacuauacgaacgagugaggagacagcugagagagaaugcugaagaagauggcaccgguugcuuugaaauauuucacaagugugaugacgacuguauggccaguauuagaaauaacaccuaugaucacagcaaguacagggaagaggcaaugcaaaauagaauacaaauugauccagucaaacuaagcaguggcuacaaagaugugauacuuugguuuagcuucggggcaucauguuucauacuucuggccauugcaaugggccuugucuucauaugugugaaaaguggaaacaugcggugcacuauuuguauauaa

SEQ ID NO: 42209 - RNA, 1683 nt, Artificial Sequence
  derived and/or modified CDS sequence (wt) from hemagglutinin__InfluenzaA__AGQ80978
augaacacucaaauccugguauucgcucugguugcgaucauuccaacaaaugcagacaaaaucugccucggacaucaugcugugucaaacggaacuaaaguaaacacauuaacugaaagaggaguggaagucguuaaugcaacugaaacaguggaacgaacaagcauccccaggaucugcucaaaagggaaaagggcaguugaccucggucaauguggacuccuggggacaaucacugggccaccccaaugugaccaauuccuagaauuuucagcugauuuaauuauugagaggcgagaagggagugaugucuguuauccugggaaguucguaaaugaagaagcucugaggcagauucucagggaaucaggcggaauugacaaggaaacaaugggauucacauacagcggaauaagaacuaauggagcaaccagugcauguaggagaucaggaucuucauucuaugcagaaaugaaauggcuccugucaaacacagacaaugcugcuuucccgcagacgacuaaaucauacaaaaauacaaggaaagacccagcuuuaauaauaugggggauucaccauucuggaucaauuacagaacagaccaagcuauaugggaguggaaacaaacugauaacaguugggaguucuaauuaucaacagucuuuugugccgaguccaggagcgagaccacaaguuaauggccaaucuggaaggauugacuuucauuggcuaaugcuaaaccccaaugauacagucacuuucaguuucaauggggcauucauagcuccagaccgugcaagcuuccugagaggaaaaucuaugggaauucagaguggaguacagguugaugccaauugugaaggggauugcuaucacaauggagggacaauaauaaguaauuugcccuuucagaacauaaauagcagagcaguagggaaauguccgagauauguuaagcaagagagucugcugcuagcaacagggaugaagaauguuccugagauuccaaagggaagaggucuauuuggugcuauagcagguuuuauugaaaauggaugggaaggucuaguugaugggugguaugguuucaggcaucaaaaugcacagggagaggggacugcugcagauuacaaaagcacucagucggcaauugaucaaauaacagggaaauuaaaucggcuuauagaaaaaaccaaccaacaauuugaguuaauagacaaugaguucacugagguugaaaggcaaauuggcaauguaauaaauuggaccagagacuccaugacagaggugugguccuacaaugcugaacucuuaguagcaauggagaaccagcacacaauugaucuggcugauucagaaaugaauaaacuauacgaacgagugaggagacagcugagagagaaugcugaagaagauggcaccgguugcuuugaaauauuucacaagugugaugacgacuguauggccaguauuagaaauaacaccuaugaucacagcaaguacagggaagaggcaaugcaaaauagaauacaaauugauccagucaaacuaagcaguggcuacaaagaugugauacuuugguuuagcuucggggcaucauguuucauacuucuggccauugcaaugggccuugucuucauaugugugaaaaauggaaacaugcggugcacuauuuguauauaa

SEQ ID NO: 42210 - RNA, 1683 nt, Artificial Sequence
  derived and/or modified CDS sequence (wt) from hemagglutinin__InfluenzaA__AGQ80979
augaacacucaaauccugguauucgcucugguugcgaucauuccgacaaaugcagacaaaaucugccucggacaucaugcugugucaaacggaacuaaaguaaacacauuaacugaaagaggaguggaagucguuaaugcaacugaaacaguggaacgaacaagcauccccaggaucugcucaaaagggaaaagggcaguugaccucggucaauguggacuccuggguacaaucacugggccaccccaaugugaccaauuccuagaauuuucggccgauuugauuauugagaggcgagaaggaagugaugucuguuauccugggaaauuuguaaaugaagaagcuuugaggcaaauucucagggaaucaggcggaauugacaaggaaacaaugggauucacauacagcggaauaagaacuaauggagcaaccagugcauguaggagaucaggaucuucauucuaugcagaaaugaaauggcuccugucaaacacagauaaugcugcuuucccgcagacgacuaaaucauacaaaaauacaaggaaagacccagcuuuaauaauaugggggauucaccauucuggaucaacuacagaacagaccaagcuauaugggaguggaaacaaacugauuacaguugggaguucuaauuaucaacagucuuuugugccgaguccaggagcgagaccacaaguuaauggccaaucuggaaggauugacuuucauuggcugaugcuaaaccccaaugauacagucacuuucaguuucaauggggccuucauagcuccagaccgugcaagcuuccugagaggaaaaucuauaggaauucagaguggaguacagguugaugccaauugugaaggggauugcuaucacaauggagggacaauaauaaguaauuugcccuuucagaacauaaauagcagggcaguagggaaauguccgagauauguuaagcaagagagucugcugcuagcaacagggaugaagaauguucccgagauuccaaagggaagaggucuauuuggugcuauagcagguuucauugaaaauggaugggaagguuuaauugaugggugguaugguuucaggcaucaaaaugcacagggagaggggacugcugcagauuacaaaagcacucagucggcaauugaucaaauaacagggaaauuaaaccggcuuauagaaaaaaccaaccaacaauuugaguuaauagacaaugaguucacugagguugaaaggcaaauugguaauguaauaaauuggaccagagacuccaugacagaggugugguccuacaaugcugaacucuuaguagcaauggagaaccagcacacaauugaucuggcugauucagaaaugaauaaacuauacgaacgagugaggagacagcugagagagaaugcugaagaagauggcacugguugcuuugaaauauuucacaagugugaugaugacuguauggccaguauuagaaauaacaccuaugaucacagcaaguacagggaagaggcaaugcaaaauagaauacagauugauccagucaaacuaagcaguggcuacaaagaugugauacuuugguuuagcuucggggcaucauguuucauacuucuggccauugcaaugggccuugucuucauaugugugaagaauggaaacaugcggugcacuauuuguauauaa

SEQ ID NO: 42211 - RNA, 1683 nt, Artificial Sequence
  derived and/or modified CDS sequence (wt) from hemagglutinin__InfluenzaA__AGQ80980
augaacacucaaauccugguauucgcucugguugcgaucauuccgacaaaugcagacaaaaucugccucggacaucaugcugugucaaacggaacuaaaguaaacacauuaacugaaagaggaguggaagucguuaaugcaacugaaacaguggaacgaacaagcauccccaggaucugcucaaaagggaaaagggcaguugaccucggucaauguggacuccuggggacaaucacugggccaccccaaugugaccaauuccuagaauuuucagcugauuuaauuauugagaggcgagaagggagugaugucuguuauccugggaaguucguaaaugaagaagcucugaggcagauucucagggaaucagguggaauugacaaggaaacaaugggauucacauacagcggaauaagaacuaauggagcaaccagugcauguaggagaucaggaucuucauucuaugcagaaaugaaauggcuccugucaaacacagacaaugcugcuuucccgcagacgacuaaaucauacaaaaauacaaggaaagacccagcuuuaauaauaugggggauucaccauucuggaucaacuacagaacagaccaaacuauaugggaguggaaacaaacugauaacaguugggaguucuaauuaucaacagucuuuugugccgaguccaggagcgagaccacaaguuaauggucaaucuggaaggauugacuuucauuggcuaaugcuaaaccccaaugauacagucacuuucaguuucaauggggccuucauagcuccagaccgugcaagcuuccugagaggaaaaucuaugggaauucagaguggaguacagguugaugccaauugugaaggggacugcuaucacaauggagggacaauaauaaguaauuugcccuuucagaacauaaauagcagagcaguagggaaauguccgagauauguuaaacaggagagucugcugcuagcaacagggaugaagaauguuccugagauuccaaagggaagaggucuauuuggugcuauagcagguuuuauugaaaauggaugggaaggucuaguugauggaugguaugguuucaggcaucaaaaugcacagggagaggggacugcugcagauuacaaaagcacucagucggcaauugaucaaauaacagggaaauuaaaucggcuuauagaaaaaaccaaccaacaauuugaguuaauagacaaugaguucacugagguugaaaggcaaauuggcaauguaauaaauuggaccagagacuccaugacagaagugugguccuacaaugcugaacucuuaguagcaauggagaaccagcacacaauugaucuggcugauucagaaaugaauaaacuauacgaacgagugaggagacagcugagagagaaugcugaagaagauggcaccgguugcuuugaaauauuucacaagugugaugacgacuguauggccaguauuagaaauaacaccuaugaucacagcaaguacagggaagaggcaaugcaaaauagaauacaaauugauccagucaaacuaagcaguggcuacaaagaugugauacuuugguuuagcuucggggcaucauguuucauacuucuggccauugcaaugggccuugucuucauaugugugaaaaauggaaacaugcggugcacuauuuguauauaa

SEQ ID NO: 42212 - RNA, 1683 nt, Artificial Sequence
  derived and/or modified CDS sequence (wt) from hemagglutinin__InfluenzaA__AGQ80981
augaacacucaaauccugguauucgcucugguugcgaucauuccgacaaaugcagacaaaaucugccucggacaucaugcugugucaaacggaacuaaaguaaacacauuaacugaaagaggaguggaaguugucaaugcaacugaaacaguggaacgaacaagcauccccaggaucugcucaaaagggaaaagggcaguugaccuuggucaauguggacuccuggguacaaucacugggccaccccaaugugaucaauuccuagaauuuucggccgauuugauuauugagaggcgagaaggaagugaugucuguuauccugggaaguuuguaaaugaagaagcuuuaagacaaauucucagggaaucaggcggaauugacaaggaaacaaugggauucacauacagcggaauaagaacuaauggagcaaccagugcguguaggagaucaggaucuucauucuaugcagaaaugaaauggcuccugucaaacacagauaaugcugcuuucccgcagacgaccaaaucauacaaaaauacaaggaaagacccagcuuuaauaauaugggggauucaccauucuggaucaacuacagaacaaaccaagcuauaugggaguggaaacaaacugauaacaguugggaguucuaauuaucaacagucuuuugugccgaguccaggagcgagaccacaaguuaauggccaaucuggaaggauugacuuucauuggcugaugcuaaaccccaaugauacagucacuuucaguuucaauggggccuucauagcuccagaccgugcaagcuuccugagaggaaaaucuaugggaauucagaguggaguacagguugaugccaauugugaaggggauugcuaucacaauggagggacaauaauaaguaauuugcccuuucagaacauaaauagcagggcaguagggaaauguccgagauauguuaagcaagagagccugcugcuagcaacagggaugaagaauguucccgagauuccaaagggaagaggucuauuuggugcuauagcagguuucauugaaaauggaugggaaggucuaauugaugggugguaugguuucaggcaucaaaaugcacagggagaggggacugcugcagauuacaaaagcacucagucagcaauugaucaaauaacagggaaauuaaaccggcuuauagaaaaaaccaaccaacaauuugaguuaauagacaaugaguucacugagguugaaaggcaaauugguaauguaauaaauuggaccagagacuccaugacagaggugugguccuacaaugcugaacucuuaguagcaauggagaaccagcauacaauugaucuggcugauucagaaaugaauaaacuauacgaacgagugaggagacagcugagagagaaugcugaagaagauggcaccgguugcuuugaaauauuucacaagugugaugaugacuguauggccaguauuagaaauaacaccuaugaucacagcaaguacagggaagaggcaaugcaaaauagaauacagauugauccagucaaacuaagcaguggcuacaaagaugugauacuuugguuuagcuucggggcaucauguuucauacuucuggccauugcaaugggccuugucuucauaugugugaagaauggaaacaugcggugcacuauuuguauauaa

SEQ ID NO: 42213 - RNA, 1683 nt, Artificial Sequence; identical to SEQ ID NO: 42212
  derived and/or modified CDS sequence (wt) from hemagglutinin__InfluenzaA__AGQ80982

SEQ ID NO: 42214 - RNA, 1683 nt, Artificial Sequence; identical to SEQ ID NO: 42212
  derived and/or modified CDS sequence (wt) from hemagglutinin__InfluenzaA__AGQ80983

SEQ ID NO: 42215 - RNA, 1683 nt, Artificial Sequence; identical to SEQ ID NO: 42212
  derived and/or modified CDS sequence (wt) from hemagglutinin__InfluenzaA__AGQ80984

SEQ ID NO: 42216 - RNA, 1683 nt, Artificial Sequence
  derived and/or modified CDS sequence (wt) from hemagglutinin__InfluenzaA__AGQ80985
augaacacucaaauccugguauucgcucugguugcgaucauuccgacaaaugcagacaaaaucugccucggacaucaugcugugucaaacggaacuaaaguaaacacauuaacugaaagaggaguggaaguugucaaugcaacugaaacaguggaacgaacaagcauccccaggaucugcucaaaagggaaaagggcaguugaccuuggucaauguggacuccuggguacaaucacugggccaccccaaugugaucaauuccuagaauuuucggccgauuugauuauugagaggcgagaaggaagugaugucuguuauccugggaaguuuguaaaugaagaagcuuuaagacaaauucucagggaaucaggcggaauugacaaggaaacaaugggauucacauacagcggaauaagaacuaauggagcaaccagugcguguaggagaucaggaucuucauucuaugcagaaaugaaauggcuccugucaaacacagauaaugcugcuuucccgcagacgaccaaaucauacaaaaauacaaggaaagacccagcuuuaauaauaugggggauucaccauucuggaucaacuacagaacaaaccaagcuauaugggaguggaaacaaacugauaacaguugggaguucuaauuaucaacagucuuuugugccgaguccaggagcgagaccacaaguuaauggccaaucuggaaggauugacuuucauuggcugaugcuaaaccccaaugauacagucacuuucaguuucaauggggccuucauagcuccagaccgugcaagcuuccugagaggaaaaucuaugggaauucagaguggaguacagguugaugccaauugugaaggggauugcuaucacaauggagggacaauaauaaguaauuugcccuuucagaacauaaauagcagggcaguagggaaauguccgagauauguuaagcaagagagccugcugcuagcaacagggaugaagaauguucccgagauuccaaagggaagaggucuauuuggugcuauagcagguuucauugaaaauggaugggaaggucuaauugaugggugguaugguuucaggcaucaaaaugcacagggagaggggacugcugcagauuacaaaagcacucagucagcaauugaucaaauaacagggaaauuaaaccggcuuauagaaaaaaccaaccaacaauuugaguuaauagacaaugaguucacugagguugaaaggcaaauugguaauguaauaaauuggaccagagacuccaugacagaggugugguccuacaaugcugaacucuuaguagcaauggagaaccagcauacaauugaucuggcugauucagaaaugaauaaacuauacgaacgagugaggagacagcugagagagaaugcugaagaagauggcaccgguugcuuugaaauauuucacaagugugaugaugacuguauggccaguauuagaaauaacaccuaugaucacagcaaguacagggaagaagcaaugcaaaauagaauacagauugauccagucaaacuaagcaguggcuacaaagaugugauacuuugguuuagcuucggggcaucauguuucauacuucuggccauugcaaugggccuugucuucauaugugugaagaauggaaacaugcggugcacuauuuguauauaa

SEQ ID NO: 42217 - RNA, 1683 nt, Artificial Sequence; identical to SEQ ID NO: 42192
  derived and/or modified CDS sequence (wt) from hemagglutinin__InfluenzaA__AGQ80986

SEQ ID NO: 42218 - RNA, 1683 nt, Artificial Sequence
  derived and/or modified CDS sequence (wt) from hemagglutinin__InfluenzaA__AGQ80987
augaacacucaaauccugguauucgcucugguugcgaucauuccgacaaaugcagacaaaaucugccucggacaucaugcugugucaaacggaacuaaaguaaacacauuaacugaaagaggaguggaagucguuaaugcaacugaaacaguggaacgaacaagcauccccaggaucugcucaaaagggaaaagggcaguugaccucggucaauguggacuccuggguacaaucacugggccaccccaaugugaccaauuccuagaauuuucggccgacuugauuauugagaggcgagaaggaagugaugucuguuauccugggaaauuuguaaaugaagaagcuuugaggcaaauucucagggaaucaggcggaauugacaaggaaacaaugggauucacauacagcggaauaagaacuaauggagcaaccagugcauguaggagaucaggaucuucauucuaugcagaaaugaaauggcuccugucaaacacagauaaugcugcuuucccgcagacgacuaaaucauacaaaaauacaaggaaagacccagcuuuaauaauaugggggauucaccauucuggaucaacuacagaacagaccaagcuauaugggaguggaaacaaacugauaacaguugggaguucuaauuaucaacagucuuuugugccgaguccaggagcgagaccacaaguuaauggccaaucuggaaggauugacuuucauuggcugaugcuaaaccccaaugauacagucacuuucaguuucaauggggccuucauagcuccagaccgugcaagcuuccugagaggaaaaucuaugggaauucagaguggaguacagguugaugccaauugugaaggggauugcuaucacaauggagggacaauaauaaguaauuugccauuucagaacauaaauagcagggcaguagggaaauguccgagauauguuaagcaagagagucugcugcuagcaacagggaugaagaauguucccgagauuccaaagggaagaggucuauuuggugcuauagcagguuucauugaaaauggaugggaagguuuaauugaugggugguaugguuucaggcaucaaaaugcacagggagaggggacugcugcagauuacaaaagcacucagucggcaauugaucaaauaacagggaaauuaaaccggcuuauagaaaaaaccaaccaacaauuugaguuaauagacaaugaguucacugagguugaaaggcaaauugguaauguaauaaauuggaccagagacuccaugacagaggugugguccuacaaugcugaacucuuaguagcaauggagaaccagcacacaauugaucuggcugauucagaaaugaauaaacuauacgaacgagugaggagacagcugagagagaaugcugaagaagauggcaccgguugcuuugaaauauuucacaagugugaugaugacuguauggccaguauuagaaauaacaccuaugaucacagcaaguacagggaagaggcaaugcaaaauagaauacagauugauccagucaaacuaagcaguggcuacaaagaugugauacuuugguuuagcuucggggcaucauguuucauacuucuggccauugcaaugggccuugucuucauaugugugaagaauggaaacaugcggugcacuauuuguauauaa

SEQ ID NO: 42219 - RNA, 1683 nt, Artificial Sequence; identical to SEQ ID NO: 42192
  derived and/or modified CDS sequence (wt) from hemagglutinin__InfluenzaA__AGQ80988

SEQ ID NO: 42220 - RNA, 1683 nt, Artificial Sequence
  derived and/or modified CDS sequence (wt) from hemagglutinin__InfluenzaA__AGQ80990
augaacacucaaauccugguauucgcucugguugcgaucauuccgacaaaugcagacaaaaucugccucggacaucaugcugugucaaacggaacuaaaguaaacacauuaacugaaagaggaguggaaguugucaaugcaacugaaacaguggaacgaacaagcauccccaagaucugcucaaaagggaaaagggcaguugaccuuggucaauguggacuccuggguacaaucacugggccaccccaaugugaucaauuccuagaauuuucggccgauuugauuauugagaggcgagaaggaagugaugucuguuauccugggaaguuuguaaaugaagaagcuuuaagacaaauucucagggaaucaggcggaauugacaaggaaacaaugggauucacauacagcggaauaagaacuaauggagcaaccagugcguguaggagaucaggaucuucauucuaugcagaaaugaaauggcuccugucaaacacagauaaugcugcuuucccgcagacgaccaaaucauacaaaaauacaaggaaagacccagcuuuaauaauaugggggauucaccauucuggaucaacuacagaacaaaccaagcuauaugggaguggaaacaaacugauaacaguugggaguucuaauuaucaacagucuuuugugccgaguccaggagcgagaccacaaguuaauggccaaucuggaaggauugacuuucauuggcugaugcuaaaccccaaugauacagucacuuucaguuucaauggggccuucauagcuccagaccgugcaagcuuccugagaggaaaaucuaugggaauucagaguggaguacagguugaugccaauugugaaggggauugcuaucacaauggagggacaauaauaaguaauuugcccuuucagaacauaaauagcagggcaguagggaaauguccgagauauguuaagcaagagagccugcugcuagcaacagggaugaagaauguucccgagauuccaaagggaagaggucuauuuggugcuauagcagguuucauugaaaauggaugggaaggucuaauugaugggugguaugguuucaggcaucaaaaugcacagggagaggggacugcugcagauuacaaaagcacucagucagcaauugaucaaauaacagggaaauuaaaccggcuuauagaaaaaaccaaccaacaauuugaguuaauagacaaugaguucacugagguugaaaggcaaauugguaauguaauaaauuggaccagagacuccaugacagaggugugguccuacaaugcugaacucuuaguagcaauggagaaccagcauacaauugaucuggcugauucagaaaugaauaaacuauacgaacgagugaggagacagcugagagagaaugcugaagaagauggcaccgguugcuuugaaauauuucacaagugugaugaugacuguauggccaguauuagaaauaacaccuaugaucacagcaaguacagggaagaggcaaugcaaaauagaauacagauugauccagucaaacuaagcaguggcuacaaagaugugauacuuugguuuagcuucggggcaucauguuucauacuucuggccauugcaaugggccuugucuucauaugugugaagaauggaaacaugcggugcacuauuuguauauaa

SEQ ID NO: 42221 - RNA, 1683 nt, Artificial Sequence
  derived and/or modified CDS sequence (wt) from hemagglutinin__InfluenzaA__AGQ80991
augaacacucaaauccugguauucgcucugguugcgaucauuccgacaaaugcagacaaaaucugccucggacaucaugcugugucaaacggaacuaaaguaaacacauuaacugaaagaggaguggaagucguuaaugcaacugaaacaguggaacgaacaagcauccccaggaucugcucaaaagggaaaaagacaguugaccucggucaauguggacuccuggguacaaucacugggccaccccaaugugaccaauuccuagaauuuucagccgauuugauuauugagaggcgagaaggaagugaugucuguuauccugggaaguuuguaaaugaagaagcuuugaggcaaauucucagggaaucaggcggaauugacaaggaaacaaugggauucacauacagcggaauaagaacuaauggagcaaccagugcauguaggagaucaggaucuucauucuaugcagaaaugaaauggcuccugucaaacacagauaaugcugcuuucccgcagacgacuaaaucauacaaaaauacaaggaaagacccagcuuuaauaauaugggggauucaccauucuggaucaacuacagaacagaccaagcuauaugggaguggaaacaaacugauaacaguugggaguucuaauuaucaacagucuuuugugccgaguccaggagcgagaccacaaguuaauggccaaucuggaaggauugacuuucauuggcugaugcuaaaccccaaugauacagucacuuucaguuucaauggggccuucauagcuccagaccgugcaagcuuccugagaggaaaaucuaugggaauucagaguggaguacagguugaugccaauugugaaggggauugcuaucacaauggagggacaauaauaaguaauuugcccuuucagaacauaaauagcagggcaguagggaaauguccgagauauguuaagcaagagagucugcugcuagcaacagggaugaagaauguucccgagauuccaaagggaagaggucuauuuggugcuauagcagguuucauugaaaauggaugggaaggucuaauugaugggugguaugguuucaggcaucaaaaugcacagggagaggggacugcugcagauuacaaaagcacucagucggcaauugaucaaauaacagggaaauuaaaccggcuuauagaaaaaaccaaccaacaauuugaguuaauagacaaugaguucacugagguugaaaggcaaauugguaauguaauaaauuggaccagagacuccaugacagaggugugguccuacaaugcugaacucuuaguagcaauggagaaccagcacacaauugaucuggcugauucagaaaugaauaaacuauacgaacgagugaggagacagcugagagagaaugcugaagaagauggcaccgguugcuuugaaauauuucacaagugugaugaugacuguauggccaguauuagaaauaacaccuaugaucacagcaaguacagggaagaggcaaugcaaaauagaauacagauugauccagucaaacuaagcaguggcuacaaagaugugauacuuugguuuagcuucggggcaucauguuucauacuucuggccauugcaaugggccuugucuucauaugugugaagaauggaaacaugcggugcacuauuuguauauaa

SEQ ID NO: 42222 - RNA, 1683 nt, Artificial Sequence
  derived and/or modified CDS sequence (wt) from hemagglutinin__InfluenzaA__AGQ80992
augaacacucaaauccugguauucgcucugguggcgaucauuccgacgaaugcagacaagaucugccuugggcaccaugccgugucaaacgggacuaaaguaaacacauuaacugaaagaggaguggaagucguuaaugcaacugaaacaguugaacgaacaaauguccccaggaucugcucaaaagggaaaaggacaguugaccucggucaauguggacuucugggaacaauaacugggccaccccaaugugaccaauuccuagaauuuucagccgauuuaauuauugagaggcgagaaggaagugaugucuguuauccugggaaauucaugaaugaagaagcucugaggcaaauucucagggagucagguggaauugacaaggagacgaugggguucacauacagcggaauaagaacuaauggagcaaccagugcauguagaagaucaggaucuucauucuaugcagaaaugaaauggcuccugucaaacacagacaaugcugcuuucccgcagaugacuaagucauacaaaaacacaaggaaagacccagcucugauaauaugggggauccaccauuccggaucaaccacagaacagaccaagcuauacgggaguggaaacaaauugauaacaguugggaguucuaauuaccaacaguccuuuguaccgaguccgggagcgaggccacaagugaauggccaaucuggaaggauugacuuucauuggcugaugcugaaccccaaugacacaguuacuuucaguuucaauggggccuucauagcuccagaccgugcaugcuuucuaagagggaagucuaugggaauucagaguggaguacagguugaugccaguugugaaggagauugcuaucauaguggagggacaauaauaaguaauuugcccuuucagaacauaaauagcagggcaguggggaaguguccgagguauguuaagcaggagagucugaugcuggcaacaggaaugaagaauguuccugaaaucccaaagggaagaggccuguuuggugcuauagcgggcuucauugaaaauggaugggaaggucugauugacggaugguauggcuucaggcaucaaaaugcacaaggggagggaacugcugcagauuacaagagcacccaaucagcaauugaucaaauaacagggaaauuaaaccggcuuauagaaaaaacuaaccaacaauuugaguuaauagacaaugaauucacugagguugaaaagcaaauuggcaaugugauaaauuggaccagagauuccaugacagaaguguggucauauaacgcugaacucuugguagcaauggagaaucagcacacaaucgaucuggccgacucagaaaugaacaaacuauacgaacgggugaagaggcaacugagagagaaugcugaagaagauggcacugguuguuuugaaauauuucacaagugugaugacgacuguauggccaguauuagaaacaacaccuaugaucacagcaaguacagggaagaggcaaugcaaaauagaauacagauugacccggucaaacuaagcagcggcuacaaagaugugauacuuugguuuagcuucggggcaucauguuucauacuucuggccauugcaaugggccuugucuucauaugugugaagaauggaaacaugcggugcacuauuuguauauaa

SEQ ID NO: 42223 - RNA, 1683 nt, Artificial Sequence; identical to SEQ ID NO: 42192
  derived and/or modified CDS sequence (wt) from hemagglutinin__InfluenzaA__AGQ80993

SEQ ID NO: 42224 - RNA, 1683 nt, Artificial Sequence; identical to SEQ ID NO: 42199
  derived and/or modified CDS sequence (wt) from hemagglutinin__InfluenzaA__AGQ80994

SEQ ID NO: 42225 - RNA, 1683 nt, Artificial Sequence
  derived and/or modified CDS sequence (wt) from hemagglutinin__InfluenzaA__AGQ80995
augaacacucaaauccugguauucgcucugauugcgaucauuccaacaaaugcagacaaaaucugccuuggacaucaugcugugucaaacggaacuaaaguaaacacauuaacugaaagaggaguggaagucguuaaugcaacugaaacaguggaacggacaaacauccccaggaucugcucaaaggggaaaaggacaguugaccucggucaauguggacuccuggggacaaucacuggaccaccucaaugugaccaauuccuagaauuuucagccgauuuaauuauugagaggcgagaaggaagugaugucuguuauccugggaaauucgugaaugaagaagcucugaggcaaauucucagggaaucaggcggaauugacaaggaagcaaugggauucacauacagcggaauaagaacuaauggagcaaccagugcauguaggagaucagggucuucauucuaugcagaaaugaaauggcuccugucaaacacagauaaugcugcuuucccgcagaugacuaagucauauaaaaauacaaggaaagacccagcucuaauaauaugggggauccaucauuccggaucaacugcagagcaaaccaagcuauaugggaguggaaacaaacuggugacaguugggaguucuaauuaucaacaaucuuuugugccgaguccaggagcgagaccacaaguuaauggucaaucuggaaggauugacuuucauuggcuaaugcugaaucccaaugauacugucaccuucaguuucaauggggcuuucauagcuccagaccgugcaagcuuccugagagggaaaucuaugggaauucagaguggaguacagguugaugccgauugugaaggggauugcuaucauaguggagggacaauaauaagcaauuugccauuucagaacauagauagcagggcaguaggaaaauguccgagauauguuaagcaaaggagucugcugcuagcaacagggaugaagaauguuccugagauuccaaagggaagaggccuauuuggugcuauagcggguuucauugaaaauggaugggaaggccuaauugaugggugguaugguuucaggcaccagaaugcacagggagagggaacugcugcagauuacaaaagcacucaaucggcaauugaucaaauaacaggaaaauuaaaccggcuuauagaaaaaaccaaccaacaauuugaguugauagacaaugaguucacugagguagagaagcaaaucgguaaugugauaaauuggaccagagacucuauaacagaaguguggucauacaaugcugaacucuugguagcaauggagaaccagcauacgauugaucuggcugauucagaaaugaauaaacuguacgaacgagugaaaagacagcugagagagaaugcugaagaagauggcacugguugcuuugaaauauuucacaagugugaugaugacuguauggccaguauuagaaauaacaccuaugaucacagcaaauacagggaagaggcaaugcaaaauagaauacagauugacccagucaaacuaagcaguggauacaaagaugugauacuuugguuuagcuucggggcaucauguuucauacuucuagccauugcaaugggccuugucuucauaugugugaagaauggaaacaugcggugcacuauuuguauauaa

SEQ ID NO: 42226 - RNA, 1683 nt, Artificial Sequence; identical to SEQ ID NO: 42201
  derived and/or modified CDS sequence (wt) from hemagglutinin__InfluenzaA__AGQ80996

SEQ ID NO: 42227 - RNA, 1683 nt, Artificial Sequence
  derived and/or modified CDS sequence (wt) from hemagglutinin__InfluenzaA__AGQ80997
augaacacucaaauccugguauucgcucugguggcgaucauuccgacaaaugcagacaaaaucugccucggacaucaugcugugucaaacggaacuaaaguaaacacauuaacugaaagaggaguggaagucguuaaugcaacugaaacgguggaacgaacaaacauccccaggaucugcucaaaagggaaaaggacaguugaccucggucaauguggacuccugggaacaaucacugggccaccccaaugugaccaauuccuagaauuuucagccgauuuaauuauugagaggcgagaaggaagugaugucuguuauccugggaaauucgugaaugaagaagcucugaggcaaauucucagggagucaggcggaauugacaaggaaacaaugggauucacauacagcggaauaagaacugauggagcaaccagugcauguaggagaucaggaucuucauucuaugcagagaugaaauggcuccugucaaacacagauaaugcugcuuucccgcagaugacuaagucauacaaaaacacaaggaaagacccagcucugauaauaugggggauccaccauuccggaucaacuacagaacagaccaagcuauaugggaguggaaacaaacugauaacaguuggaaguucuaauuaccaacagucuuuuguaccgagcccaggagcgagaccacaaguuaauggccaaucuggaagaauugacuuucauuggcugaugcuaaaccccaaugauacagucacuuucaguuucaauggggccuucauagcuccagaccgugcaagcuuccugagagggaaaucuaugggaauucagaguggaguacagguugaugccaauugugaaggggauugcuaucauaguggagggacaauaauaaguaauuugcccuuucagaacauaaauagcagggcaguagggaaauguccgagauauguuaagcaagagagucuacugcuagcaacagggaugaagaauguuccugagauuccaaagggaagaggccuauuuggugcuauagcggguuucauugaaaauggaugggaaggucuaauugaugggugguaugguuucaggcaucaaaauucacagggagagggaaccgcugcagauuacaaaagcacucaaucggcaauugaucaaauaacagggaaauugaaccggcuuauagaaaaaaccaaccaacaauuugaguuaauagacaaugaauucacugagguugaaaagcaaauugguaaugugauaaauuggaccagagacuccaugacagaagugugguccuacaacgcugaacucuugguagcaauggagaaccagcacacaauugaucuggcugacucagaaaugaauaaacuauacgaacgagugaagagacaacugagagagaaugcugaagaagauggcacugguugcuuugaaauauuucacaagugugaugacgacuguauggccaguauuagaaauaacaccuaugaucacagcaaguacagggaagaggcaaugcaaaauagaauacagauugacccagucaaacuaagcagcggcuacaaagaugugauacuuugguuuagcuucggggcaucauguuucauacuucuggccauugcaaugggccuugucuucauaugugugaagaauggaaacaugcggugcacuauuuguauauaa

SEQ ID NO: 42228 - RNA, 1683 nt, Artificial Sequence
  derived and/or modified CDS sequence (wt) from hemagglutinin__InfluenzaA__AGQ81000
augaacacucaaauccugguauucgcucugguugcgaucauuccgacaaaugcagacaagaucugccucggacaucaugcugugucaaacggaacuaaaguaaacacauuaacugaaagaggaguggaagucguuaaugcaacugaaacgguggaacgaacaaacauccccaggaucugcucaaaagggaaaaggacaguugaccucggucaauguggacuccuggggacaaucacugggccaccccaaugugaccaauuccuagaauuuucagccgauuuaauuauugagaggcgagaaggaagugaugucuguuauccugggaaguucgugaaugaagaagcucugaggcaaauucucagggaaucaggaggaauuggcaaagaaacaaugggauucacauacagcggaauaagaacuaauggagcaaccagugcauguaggagaucaggaucuucauucuaugcagagaugaaauggcuccugucaaacacagauaaugcugcuuucccgcagaugacuaagucauacaaaaauacaaggaaagacccagcucuaauaauaugggggauccaccauucuggaucaacuacagaacagaccaagcuauaugggaguggaaacaaacugauaacaguugggaguucuaauuaucaaaagucuuuugugccgagcccaggagcgagaccacaaguuaauggacaaucuggaaggauugacuuucauuggcugaugcuaaaccccaaugauacagucacuuucagcuucaauggggccuucauagcuccagaccgugcaagcuuccugagaggaaaaucuaugggaauucagaguggaguacagguugaugcuaauugugaaggggauugcuaucacaauggaggaacaauaauaaguaauuugcccuuucagaacauaaauagcagggcaguagggaaauguccgagauauguuaaacaagagagucugcugcuagcaacagggaugaagaauguuccugagauuccaaagggaagaggucuauuuggugcuauagcggguuucauugaaaauggaugggaaggucuaauugaugggugguaugguuucaggcaucaaaaugcacagggagaggggacugcugcagauuacaaaagcacucaaucggcaauugaucaaauaacagggaaauuaaaccggcuuauagaaaaaaccaaccaacaauuugaguuaauagacaaugaguucacugagguugaaaagcaaauugguaaugugauaaauuggaccagagacuccaugacagaagugugguccuacaaugcugaacucuugguagcaauggagaaccagcacacaauugaucuggcugacucagaaaugaauaaacuauacgaacgagugaagagacagcugagagagaaugcugaagaagauggcacugguugcuuugaaauauuucacaagugugaugaugacuguauggccaguauuagaaauaacaccuaugaucacagcaaguacagggaagaggcaaugcaaaauagaauacagauugacccagucaaacuaagcaguggcuacaaagaugugauacuuugguuuagcuucggggcaucauguuucauacuucuggccauugcaaugggccuugucuucauaugugugaagaauggaaacaugcggugcacuauuuguauauaa

SEQ ID NO: 42229 - RNA, 1683 nt, Artificial Sequence
  derived and/or modified CDS sequence (wt) from hemagglutinin__InfluenzaA__AGQ81001
augaacacucaaauccugguauucgcucugguugcgaucauuccgacaaaugcagacaagaucugccucggacaucaugcugugucaaacggaaccaaaguaaacacauuaacugaaagaggaguggaagucguuaaugcaacugaaacgguggaacgaacaaacauccccaggaucugcucaaaagggaaaaggacaguugaccucggucaauguggacuccuggggacaaucacugggccaccccaaugugaccaauuccuagaauuuucagccgauuuaauuauugagaggcgagaaggaagugaugucuguuauccugggaaguucgugaaugaagaagcucugaggcaaauucucagagaaucaggcggaauugacaaggaaacaaugggauucacauacagcggaauaagaacuaauggagcaaccagugcauguaggagaucaggaucuucauucuaugcagaaaugaaauggcuccugucaaacacagauaaugcugcuuucccgcagaugacuaagucauacaaaaauacaaggaaagacccagcucuaauaauaugggggauccaccauucuggaucaacuacagaacagaccaagcuauaugggaguggaaacaaacugauaacaguugggacuucuaauuaucaacagucuuuugugccgagcccaggagcgagaccacaaguuaauggccaaucuggaaggauugacuuucauuggcugaugcuaaaucccaaugauacagucacuuucaguuucaauggggccuucauagcuccagaccgugcaagcuuccugagaggaaaaucuaugggaauucagaguggaguacagguugaugccaauugugaaggggauugcuaucacaauggagggacaauaauaaguaauuugcccuuucagaacauaaauagcagggcaguagggaaauguccgagauauguuaagcaagagagucugcugcuagcaacagggaugaagaauguuccugagauuccaaagggaagaggucuauuuggugcuauagcggguuucauugaaaauggaugggaaggucuaauugaugggugguaugguuucaggcaucaaaaugcacagggagaggggacugcugcagauuacaaaagcacucaaucggcaauugaucaaauaacagggaaauuaaaccggcuuauagaaaaaaccaaccaacaauuugaguuaauagacaaugaauucacugagauugaaaagcaaauugguaaugugauaaauuggaccagagacuccaugacagaagugugguccuacaaugcugaacucuugguagcaauggagaaccagcacacaauugaucuggcugacucagaaaugaauaaacuauacgaacgagugaagagacagcugagagagaaugcugaagaagauggcacugguuguuuugaaauauuucacaagugugaugaugacuguauggccaguauuagaaacaacaccuaugaucacagcaaguacagggaagaggcaaugcaaaauagaauacagauugauccagucaaacuuagcaguggcuacaaagaugugauacuuugguuuagcuucggggcaucauguuucauacuucuggccauugcaaugggccuugucuucauaugugugaagaauggaaacaugcggugcacuauuuguauauaa

SEQ ID NO: 42230 - RNA, 1683 nt, Artificial Sequence
  derived and/or modified CDS sequence (wt) from hemagglutinin__InfluenzaA__AGQ81002
augaacacucaaauccugguauucgcucugguugcgaucauuccgacaaaugcagacaaaaucugccucggacaucaugcugugucaaacggaacuaaaguaaacacauuaacugaaagaggaguggaagucguuaaugcaacugaaacaguggaacgaacaagcauccccaggaucugcucaaaagggaaaagggcaguugaccucggucaauguggacuccuggggacaaucacugggccaccccaaugugaccaauuccuagaauuuucagcugauuuaauuauugagaggcgagaagggagugaugucuguuauccugggaaguucgugaaugaagaagcucugaggcagauccucagggaaucaggcggaauugacaaggaaacaaugggauucacauacagcgggauaagaacuaauggagcaaccagugcauguaggagaucaggauccucauucuaugcagaaaugaaauggcuccugucaaacacagacaaugcugcuuuuccgcagacgacuaaaucauacaaaaauacaaggaaagacccagcuuuaauaauaugggggauucaccauucuggaucaacuacagaacagaccaagcuauaugggaguggaaacaaacugauaacaguugggaguucuaauuaucaacagucuuuugugccgaguccaggagcgagaccacaaguuaacggccaaucuggaaggauugacuuucauuggcugaugcuaaaucccaaugauacagucacuuucaguuucaauggggccuucauagcuccagaccgugcaagcuuccugagaggaaaaucuaugggaauucagaguggaguacaaguugaugccaauugugaaggggauugcuaucacaauggagggacaauaauaaguaauuugcccuuucagaacauaaauagcagagcaguagggaaauguccgagauauguuaagcaagagagucugcugcuagcaacaggaaugaagaauguuccugagauuccaaagggaagaggucuauuuggugcuauagcagguuucauugaaaauggaugggaaggucuaguugaugggugguaugguuucaggcaucaaaaugcacagggagaggggacugcugcagauuacaaaagcacucagucggcaauugaucaaauaacagggaaauuaaaccggcuuauagaaaaaaccaaccaacaauuugaguuaauagacaaugaguucacugagguugaaaggcaaauuggcaauguaauaaauuggaccagagacuccaugacagaggugugguccuacaaugcugaacucuuaguagcaauggagaaccagcauacaauugaucuggcugauucagaaaugaauaaacuauacgaacgagugaggagacagcugagagagaaugcugaagaagauggcaccgguugcuuugaaauauuucacaagugugaugacgacuguauggccaguauuagaaauaacaccuaugaucacagcaaauacagggaagaggcaaugcaaaauagaauacaaauugauccagucaaacuaagcaguggcuacaaagaugugauacuuugguuuagcuucggggcaucauguuucauacuucuggccauugcaaugggccuugucuucauaugugugaagaauggaaacaugcggugcacuauuuguauauaa

SEQ ID NO: 42231 - RNA, 1683 nt, Artificial Sequence
  derived and/or modified CDS sequence (wt) from hemagglutinin__InfluenzaA__AGQ81003
augaacacucaaauccugguauucgcucugguugcgaucauuccgacaaaugcagacaaaaucugccucggacaucaugcugugucaaacggaacuaaaguaaacacauuaacugaaagaggaguggaagucguuaaugcaacugaaacaguggaacgaacaagcauccccaggaucugcucaaaagggaaaagggcaguugaccucggucaauguggacuccuggggacaaucacugggccaccccaaugugaccaauuccuagaauuuucagcugauuuaauuauugagaggcgagaagggagugaugucuguuauccugggaaguucgugaaugaagaagcucugaggcagauccucagggaaucaggcggaauugacaaggaaacaaugggauucacauacagcgggauaagaacuaauggagcaaccagugcauguaggagaucaggauccucauucuaugcagaaaugaaauggcuccugucaaacacagacaaugcugcuuuuccgcagacgacuaaaucauacaaaaauacaaggaaagacccagcuuuaauaauaugggggauucaccauucuggaucaacuacagaacagaccaagcuauaugggaguggaaacaaacugauaacaguugggaguucuaauuaucaacagucuuuugugccgaguccaggagcgagaccacaaguuaacggccaaucuggaaggauugacuuucauuggcugaugcuaaaucccaaugauacagucacuuucaguuucaauggggccuucauagcuccagaccgugcaagcuuccugagaggaaaaucuaugggaauucagaguggaguacaaguugaugccaauugugaaggggauugcuaucacaauggagggacaauaauaaguaauuugcccuuucagaacauaaauagcagagcaguagggaaauguccgagauauguuaagcaagagagucugcugcuagcaacaggaaugaagaauguuccugagauuccaaagggaagaggucuauuuggugcuauagcagguuucauugaaaauggaugggaaggucuaguugaugggugguaugguuucaggcaucaaaaugcacagggagaggggacugcugcagauuacaaaagcacucagucggcaauugaucaaauaacagggaaauuaaaccggcuuauagaaaaaaccaaccaacaauuugaguuaauagacaaugaguucacugagguugaaaggcaaauuggcaauguaauaaauuggaccagagacuccaugacagaggugugguccuacaaugcugaacucuuagucgcaauggagaaccagcauacaauugaucuggcugauucagaaaugaauaaacuauacgaacgagugaggagacagcugagagagaaugcugaagaagauggcaccgguugcuuugaaauauuucacaagugugaugacgacuguauggccaguauuagaaauaacaccuaugaucacagcaaguacagggaagaggcaaugcaaaauagaauacaaauugauccagucaaacuaagcaguggcuacaaagaugugauacuuugguuuagcuucggggcaucauguuucauacuucuggccauugcaaugggccuugucuucauaugugugaagaauggaaacaugcggugcacuauuuguauauaa

SEQ ID NO: 42232 - RNA, 1683 nt, Artificial Sequence; identical to SEQ ID NO: 42230
  derived and/or modified CDS sequence (wt) from hemagglutinin__InfluenzaA__AGQ81004

SEQ ID NO: 42233 - RNA, 1683 nt, Artificial Sequence
  derived and/or modified CDS sequence (wt) from hemagglutinin__InfluenzaA__AGQ81005
augaacacucaaauccugguauucgcucugguugcgaucauuccgacaaaugcagacaaaaucugccucggacaucaugcugugucaaacggaacuaaaguaaacacauuaacugaaagaggaguggaagucguuaaugcaacugaaacaguggaacgaacaagcauccccaggaucugcucaaaagggaaaagggcaguugaccucggucaauguggacuccuggggacaaucacugggccaccccaaugugaccaauuccuagaauuuucagcugauuuaauuauugagaggcgagaagggagugaugucuguuauccugggaaguucgugaaugaagaagcucugaggcagauccucagggaaucaggcggaauugacaaggaaacaaugggauucacauacagcgggauaagaacuaauggagcaaccagugcauguaggagaucaggauccucauucuaugcagaaaugaaauggcuccugucaaacacagacaaugcugcuuuuccgcagacgacuaaaucauacaaaaauacaaggaaagacccagcuuuaauaauaugggggauucaccauucuggaucaacuacagaacagaccaagcuauaugggaguggaaacaaacugauaacaguugggaguucuaauuaucaacagucuuuugugccgaguccaggagcgagaccacaaguuaacggccaaucuggaaggauugacuuucauuggcugaugcuaaaucccaaugauacagucacuuucaguuucaauggggccuucauagcuccagaccgugcaagcuuccugagaggaaaaucuaugggaauucagaguggaguacaaguugaugccaauugugaaggggauugcuaucacaauggagggacaauaauaaguaauuugcccuuucagaacauaaauagcagagcaguagggaaauguccgagauauguuaagcaagagagucugcugcuagcaacaggaaugaagaauguuccugagauuccaaagggaagaggucuauuuggugcuauagcagguuucauugaaaauggaugggaaggucuaguugaugggugguaugguuucaggcaucaaaaugcacagggagaggggacugcugcagauuacaaaagcacucagucggcaauugaucaaauaacagggaaauuaaaccggcuuauagaaaaaaccaaccaacaauuugaguuaauagacaaugaguucacugagguugaaaggcaaauuggcaauguaauaaauuggaccagagacuccaugacagaggugugguccuacaaugcugaacucuuaguagcaauggagaaccagcauacaauugaucuggcugauucagaaaugaacaaacuauacgaacgagugaggagacagcugagagagaaugcugaagaagauggcaccgguugcuuugaaauauuucacaagugugaugacgacuguauggccaguauuagaaauaacaccuaugaucacagcaaauacagggaagaggcaaugcaaaauagaauacaaauugauccagucaaacuaagcaguggcuacaaagaugugauacuuugguuuagcuucggggcaucauguuucauacuucuggccauugcaaugggccuugucuucauaugugugaagaauggaaacaugcggugcacuauuuguauauaa

SEQ ID NO: 42234 - RNA, 1683 nt, Artificial Sequence
  derived and/or modified CDS sequence (wt) from hemagglutinin__InfluenzaA__AGQ81006
augaacacucaaauccugguauucgcucugguugcgaucauuccgacaaaugcagacaaaaucugccucggacaucaugcugugucaaacggaacuaaaguaaacacauuaacugaaagaggaguggaagucguuaaugcaacugaaacaguggaacgaacaagcauccccaggaucugcucaaaagggaaaagggcaguugaccucggucaauguggacuccuggggacaaucacugggccaccccaaugugaccaauuccuagaauuuucagcugauuuaauuauugagaggcgagaagggagugaugucuguuauccugggaaguucgugaaugaagaagcucugaggcagauccucagggaaucaggcggaauugacaaggaaacaaugggauucacauacagcgggauaagaacuaauggagcaaccagugcauguaggagaucaggauccucauucuaugcagaaaugaaauggcuccugucaaacacagacaaugcugcuuuuccgcagacgacuaaaucauacaaaaauacaaggaaagacccagcuuuaauaauaugggggauucaccauucuggaucaacuacagaacagaccaagcuauaugggaguggaaacaaacugauaacaguugggaguucuaacuaucaacagucuuuugugccgaguccaggagcgagaccacaaguuaacggccaaucuggaaggauugacuuucauuggcugaugcuaaaucccaaugauacagucacuuucaguuucaauggggccuucauagcuccagaccgugcaagcuuccugagaggaaaaucuaugggaauucagaguggaguacaaguugaugccaauugugaaggggauugcuaucacaauggagggacaauaauaaguaauuugcccuuucagaacauaaauagcagagcaguagggaaauguccgagauauguuaagcaagagagucugcugcuagcaacaggaaugaagaauguuccugagauuccaaagggaagaggucuauuuggugcuauagcagguuucauugaaaauggaugggaaggucuaguugaugggugguaugguuucaggcaucaaaaugcacagggagaggggacugcugcagauuacaaaagcacucagucggcaauugaucaaauaacagggaaauuaaaccggcuuauagaaaaaaccaaccaacaauuugaguuaauagacaaugaguucacugagguugaaaggcaaauuggcaauguaauaaauuggaccagagacuccaugacagaggugugguccuacaaugcugaacucuuaguagcaauggagaaccagcauacaauugaucuggcugauucagaaaugaauaaacuauacgaacgagugaggagacagcugagagagaaugcugaagaagauggcaccgguugcuuugaaauauuucacaagugugaugacgacuguauggccaguauuagaaauaacaccuaugaucacagcaaauacagggaagaggcaaugcaaaauagaauacaaauugauccagucaaacuaagcaguggcuacaaagaugugauacuuugguuuagcuucggggcaucauguuucauacuucuggccauugcaaugggccuugucuucauaugugugaagaauggaaacaugcggugcacuauuuguauauaa

SEQ ID NO: 42235 - RNA, 1683 nt, Artificial Sequence
  derived and/or modified CDS sequence (wt) from hemagglutinin__InfluenzaA__AGQ81007
augaacacucaaauccugguauucgcucugguugcgaucauuccgacaaaugcagacaaaaucugccucggacaucaugcugugucaaacggaacuaaaguaaacacauuaacugaaagaggaguggaagucguuaaugcaacugaaacaguggaacgaacaagcauccccaggaucugcucaaaagggaaaagggcaguugaccucggucaauguggacuccuggggacaaucacugggccaccccaaugugaccaauuccuagaauuuucagcugauuuaauuauugagaggcgagaagggagugaugucuguuauccugggaaguucgugaaugaagaagcucugaggcagauccucagggaaucaggcggaauugacaaggaaacaaugggauucacauacagcgggauaagaacuaauggagcaaccagugcauguaggagaucaggauccucauucuaugcagaaaugaaauggcuccugucaaacacagacaaugcugcuuucccgcagacgacuaaaucauacaaaaauacaaggaaagacccagcuuuaauaauaugggggauucaccauucuggaucaacuacagaacagaccaagcuauaugggaguggaaacaaacugauaacaguugggaguucuaauuaucaacagucuuuugugccgaguccaggagcgagaccacaaguuaacggccaaucuggaaggauugacuuucauuggcugaugcuaaaucccaaugauacagucacuuucaguuucaauggggccuucauagcuccagaccgugcaagcuuccugagaggaaaaucuaugggaauucagaguggaguacaaguugaugccaauugugaaggggauugcuaucacaauggagggacaauaauaaguaauuugcccuuucagaacauaaauagcagagcaguagggaaauguccgagauauguuaagcaagagagucugcugcuagcaacaggaaugaagaauguuccugagauuccaaagggaagaggucuauuuggugcuauagcagguuucauugaaaauggaugggaaggucuaguugaugggugguaugguuucaggcaucaaaaugcacagggagaggggacugcugcagauuacaaaagcacucagucggcaauugaucaaauaacagggaaauuaaaccggcuuauagaaaaaaccaaccaacaauuugaguuaauagacaaugaguucacugagguugaaaggcaaauuggcaauguaauaaauuggaccagagacuccaugacagaggugugguccuacaaugcugaacucuuaguagcaauggagaaccagcauacaauugaucuggcugauucagaaaugaauaaacuauacgaacgagugaggagacagcugagagagaaugcugaagaagauggcaccgguugcuuugaaauauuucacaagugugaugacgacuguauggccaguauuagaaauaacaccuaugaucacagcaaguacagggaagaggcaaugcaaaauagaauacaaauugauccagucaaacuaagcaguggcuacaaagaugugauacuuugguuuagcuucggggcaucauguuucauacuucuggccauugcaaugggccuugucuucauaugugugaagaauggaaacaugcggugcacuauuuguauauaa

SEQ ID NO: 42236 - RNA, 1683 nt, Artificial Sequence
  derived and/or modified CDS sequence (wt) from hemagglutinin__InfluenzaA__AGQ81008
augaacacucaaauccugguauucgcucugguugcgaucauuccgacaaaugcagacaaaaucugccucggacaucaugcugugucaaacggaacuaaaguaaacacauuaacugaaagaggaguggaagucguuaaugcaacugaaacaguggaacgaacaagcauccccaggaucugcucaaaagggaaaagggcaguugaccucggucaauguggacuccuggggacaaucacugggccaccccaaugugaccaauuccuagaauuuucagcugauuuaauuauugagaggcgagaagggagugaugucuguuauccugggaaguucgugaaugaagaagcucugaggcagauccucagggaaucaggcggaauugacaaggaaacaaugggauucacauacagcgggauaagaacuaauggagcaaccagugcauguaggagaucaggauccucauucuaugcagaaaugaaauggcuccugucaaacacagacaaugcugcuuuuccgcagacgacuaaaucauacaaaaauacaaggaaagacccagcuuuaauaauaugggggauucaccauucuggaucaacuacagaacagaccaagcuauaugggaguggaaacaaacugauaacaguugggaguucuaauuaucaacagucuuuugugccgaguccaggagcgagaccacaaguuaacggccaaucuggaaggauugacuuucauuggcugaugcuaaaucccaaugauacagucacuuucaguuucaauggggccuucauagcuccagaccgugcaagcuuccugagaggaaaaucuaugggaauucagaguggaguacaaguugaugccaauugugaaggggauugcuaucauaauggagggacaauaauaaguaauuugcccuuucagaacauaaauagcagagcaguagggaaauguccgagauauguuaagcaagagagucugcugcuagcaacaggaaugaagaauguuccugagauuccaaagggaagaggucuauuuggugcuauagcagguuucauugaaaauggaugggaaggucuaguugaugggugguaugguuucaggcaucaaaaugcacagggagaggggacugcugcagauuacaaaagcacucagucggcaauugaucaaauaacagggaaauuaaaccggcuuauagaaaaaaccaaccaacaauuugaguuaauagacaaugaguucacugagguugaaaggcaaauuggcaauguaauaaauuggaccagagacuccaugacagaggugugguccuacaaugcugaacucuuagucgcaauggagaaccagcauacaauugaucuggcugauucagaaaugaauaaacuauacgaacgagugaggagacagcugagagagaaugcugaagaagauggcaccgguugcuuugaaauauuucacaagugugaugacgacuguauggccaguauuagaaauaacaccuaugaucacagcaaguacagggaagaggcaaugcaaaauagaauacaaauugauccagucaaacuaagcaguggcuacaaagaugugauacuuugguuuagcuucggggcaucauguuucauacuucuggccauugcaaugggccuugucuucauaugugugaagaauggaaacaugcggugcacuauuuguauauaa

SEQ ID NO: 42237 - RNA, 1683 nt, Artificial Sequence
  derived and/or modified CDS sequence (wt) from hemagglutinin__InfluenzaA__AGQ81009
augaacacucaaauccugguauucgcucugguugcgaucauuccgacaaaugcagacaaaaucugccucgggcaucaugcugugucaaacggaacuaaaguaaacacauuaacugaaagaggaguggaagucguuaaugcaacugaaacaguggaacgaacaagcauccccaggaucugcucaaaagggaaaagggcaguugaccucggucaauguggacuccuggggacaaucacugggccaccccaaugugaccaauuccuagaauuuucagcugauuuaauuauugagaggcaagaagggagugaugucuguuauccugggaaguucgugaaugaagaagcucugaggcagauccucagggaaucaggcggaauuaacaaggaaacaaugggauucacauacagcgggauaagaacuaauggagcaaccagugcauguaggagaucaggguccucauucuaugcagaaaugaaauggcuccugucaaauacagacaaugcugcuuuuccgcagacgacuaaaucauacaaaaauacaaggaaagacccagcuuuaauaauaugggggauucaccauucuggaucaacuacagaacagaccaagcuauaugggaguggaaacaaacugauaacaguugggaguucuaauuaucaacagucuuuugugccgaguccaggagcgagaccacaaguuaacggccaaucuggaaggauugacuuucauuggcugaugcuaaaucccaaugauacagucacuuucaguuucaauggggccuucauagcuccagaccgugcaagcuuccugagaggaaaaucuaugggaauucaaaguggaguacaaguugaugccaauugugaaggggauugcuaucacaauggagggacaauaauaaguaauuugcccuuucagaacauaaauagcagagcaguagggaaauguccgagauauguuaagcaagagagucugcugcuagcaacaggaaugaagaauguuccugagauuccaaagggaagaggucuauuuggugcuauagcagguuucauugaaaauggaugggaaggucuaguugaugggugguaugguuucaggcaucaaaaugcacagggagaggggacugcugcagauuacaaaagcacucagucggcaauugaucaaauaacagggaaauuaaaccggcuuauagaaaaaaccaaccaacaauuugaguuaauagacaaugaguucacugagguugaaaggcaaauuggcaauguaauaaauuggaccagagacuccaugacagaggugugguccuacaaugcugaacucuuaguagcaauggagaaccagcauacaauugaucuggcugauucagaaaugaauaaacuauacgaacgagugaggagacagcugagagagaaugcugaagaagauggcaccgguugcuuugaaauauuucacaagugugaugacgacuguauggccaguauuagaaauaacaccuaugaucacagcaaguacagggaagaggcaaugcaaaauagaauacaaauugauccagucaaacuaagcaguggcuacaaagaugugauacuuugguuuagcuucggggcaucauguuucauacuucuggccauugcaaugggccuugucuucauaugugugaagaauggaaacaugcggugcacuauuuguauauaa

SEQ ID NO: 42238 - RNA, 1683 nt, Artificial Sequence
  derived and/or modified CDS sequence (wt) from hemagglutinin__InfluenzaA__AGQ81011
augaacacucaaauccuaguauucgcucugauugcgaucacuccaacaaauucagacaaaaucugccucggacaucaugcugugucaaacggaaccaaaguaaacacauuaacugaaagaggaguggaagucgucaaugcaacugaaacaguggaacgaacaagcauccccaggaucugcucaaaagggaaaagaacaguugaccucggucaauguggacuccuagggacaaucacugggccaccucaaugugaccaauuccuagaauuuucagccgauuuaauuauugagaggcgagaaggaagugaugucuguuauccugggaaauucgugaaugaagaagcucugaggcaaauucucagggaaucaggcggaaucgacaaggaagcaaugggauucacauacagcggaauaagaacuaauggagcaaccagugccuguaggagaucagaaucuucauucuaugcagaaaugaaauggcuccuaucaaacacagauaaugcugcuuucccgccgaugacuaagucauauaaaaauacaagaaaggccccagcucuaauaauaugggggauccaucauuccggaucaacugcagagcaaaccaagcuauaugggaguggaaacaaacuggugacaguuaggaguucuaauuaucaacaaucuuuugugccgaguccaggagcgggaccaaaaguuaauggucaaucuggaaggauugacuuucauuggcuaaugcuaaaucccaaugacacagucaccuucagcuucaauggggcuuucauagcuccagaccgugcaagcuuccugagagggaaaucuaugggaauccagaguggaguacagguugaugccaauugugaaggggacugcuaucauaguggagggacaauaauaaguaauuugccauuucagaacauagacagcagaguaguaggaaaauguccgagauauguuaagcaaaagagucugcugcuagcaacagggaugaagaauguuccugagauuccaaagggaagaggccuauuuggugcuauagcggguuucauugaaaauggaugggaaggccuaauugaugggugguaugguuucagacaccagaaugcacagggagagggaacugcugcagauuacaaaagcacucaaucggcaauuaaucaaaugacagggaaauuaaaccggcuuauagaaaaaaccaaccaacaauuugaguugauagacaaugaauucacugagguagagaagcaaauugguaaugugauaaauuggaccagagacucuauaacagaaguguggucauacaaugcugaacucuugguagcaauggagaaccagcauacaauugaucuggcugauucagaaaugaacaaacuguacgaacgagugaaaagacagcugagagagaaugcugaagaagauggcacugguugcuuugaaauauuucacaaaugugaugaugacuguauggccaguauuagaaauaacaccuaugaucacagcaaauacagggaggaagcaaugcaaaauagaauacagauugacccagucaaacuaagcagcggcuacaaagaugugauacuuugguuuagcuucggggcaucauguuuaauacuucuagccauugcaaugggccuugucuucauaugugugaaaaauggaaacaugcggugcacuauuuguauauaa

SEQ ID NO: 42239 - RNA, 1683 nt, Artificial Sequence
  derived and/or modified CDS sequence (wt) from hemagglutinin__InfluenzaA__AGQ81012
augaacacucaaauccuaguauucgcucugauugcgaucauuccaacaaauucagacaaaaucugccucggacaucaugcugugucaaacggaaccaaaguaaacacauuaacugaaagaggaguggaagucgucaaugcaacugaaacaguggaacgaacaagcauccccaggaucugcucaaaagggaaaagaacaguugaccucggucaauguggacuccuagggacaaucacugggccaccucaaugugaccaauuccuagaauuuucagccgauuuaauuauugagaggcgagaaggaagugaugucuguuauccugggaaauucgugaaugaagaagcucugaggcaaauucucagggaaucaggcggaaucaacaaggaagcaaugggauucacauacagcggaauaagaacuaauggagcaaccagugcauguaggagaucaggaucuucauucuaugcagaaaugaaauggcuccuaucaaacacagauaaugcugcuuucccgccgaugacuaagucauauaaaaauacaagaaaggccccagcucuaauaauaugggggauccaucauuccggaucaacugcagagcaaaccaagcuauaugggaguggaaacaaacuggugacaguuaggaguucuaauuaucaacaaucuuuugugccgaguccaggagcaggaccacaaguuaauggucaaucuggaaggauugacuuucauuggcuaaugcuaaaucccaaugacacagucaccuucagcuucaauggggcuuucauagcuccagaccgugcaagcuuccugagagggaaaucuaugggaauccagaguggaguacagguugaugccaauugugaaggggacugcuaucauaguggagggacaauaauaaguaauuugccauuucagaacauagacagcagaguaguaggaaaauguccgagauauguuaagcaaaagagucugcugcuagcaacagggaugaagaauguuccugagauuccaaagggaagaggccuauuuggugcuauagcggguuucauugaaaauggaugggaaggccuaauugaugggugguaugguuucagacaccagaaugcacagggagagggaacugcugcagauuacaaaagcacucaaucggcaauuaaucaaaugacaggaaaauuaaaccggcuuauagaaaaaaccaaccaacaauuugaguugauagacaaugaauucacugagguagagaagcaaauugguaaugugauaaauuggaccagagacucuauaacagaaguguggucauacaaugcugaacucuugguagcaauggagaaccagcauacaauugaucuggcugauucagaaaugaacaaacuguacgaacgagugaaaagacagcugagagagaaugcugaagaagauggcacugguugcuuugaaauauuucacaaaugugaugaugacuguauggccaguauuagaaauaacaccuaugaucacagcaaauacagggaggaagcaaugcaaaauagaauacagauugacccagucaaacuaagcagcggcuacaaagaugugauacuuugguuuagcuucggggcaucauguuucauacuucuagccauugcaaugggccuugucuucauaugugugaaaaauggaaacaugcggugcacuauuuguauauaa

SEQ ID NO: 42240 - RNA, 1683 nt, Artificial Sequence
  derived and/or modified CDS sequence (wt) from hemagglutinin__InfluenzaA__AGQ81017
augaacacucaaauccuaguauucgcucugauugcgaucacuccaacaaauucagacaaaaucugccucggacaucaugcugugucaaacggaaccaaaguaaacacauuaacugaaagaggaguggaagucgucaaugcaacugaaacaguggaacgaacaagcauccccaggaucugcucaaaagggaaaagaacaguugaccucggucaauguggacuccuagggacaaucacugggccaccucaaugugaccaauuccuagaauuuucagccgauuuaauuauugagaggcgagaaggaagugaugucuguuauccugggaaauucgugaaugaagaagcucugaggcaaauucucagggaaucaggcggaaucgacaaggaagcaaugggauucacauacagcggaauaagaacuaauggagcaaccagugcauguaggagaucaggaucuucauucuaugcagaaaugaaauggcuccuaucaaacacagauaaugcugcuuucccgccgaugacuaagucauauaaaaauacaagaaaggccccagcucuaauaauaugggggauccaucauuccggaucaacugcagagcaaacaaagcuauaugggaguggaaacaaacuggugacaguuaggaguucuaauuaucaacaaucuuuugugccgaguccaggagcgggaccacaaguuaauggucaaucuggaaggauugacuuucauuggcuaaugcuaaaucccaaugacacagucaccuucagcuucaauggggcuuucauagcuccagaccgugcaagcuuccugagagggaaaucuaugggaauccagaguggaguacagguugaugccaauugugaaggggacugcuaucauaguggagggacaauaauaaguaauuugccauuucagaacauagacagcagaguaguaggaaaauguccgagauauguuaagcaaaagagucugcugcuagcaacagggaugaagaauguuccugagauuccaaagggaagaggccuauuuggugcuauagcggguuucauugaaaauggaugggaaggccuaauugaugggugguaugguuucagacaccagaaugcacagggagagggaacugcugcagauuacaaaagcacucaaucggcaauuaaucaaaugacaggaaaauuaaaccggcuuauagaaaaaaccaaccaacaauuugaguugauagacaaugaauucacugagguagagaagcaaauugguaaugugauaaauuggaccagagacucuauaacagaaguguggucauacaaugcugaacucuugguagcaauggagaaccagcauacaauugaucuggcugauucagaaaugaacaaacuguacgaacgagugaaaagacagcugagagagaaugcugaagaagauggcacugguugcuuugaaauauuucacaaaugugaugaugacuguauggccaguauuagaaauaacaccuaugaucacagcaaauacagggaggaagcaaugcaaaauagaauacagauugacccagucaaacuaagcagcggcuacaaagaugugauacuuugguuuagcuucggggcaucauguuucauacuucuagccauugcaaugggccuugucuucauaugugugaaaaauggaaacaugcggugcacuauuuguauauaa

SEQ ID NO: 42241 - RNA, 1683 nt, Artificial Sequence
  derived and/or modified CDS sequence (wt) from hemagglutinin__InfluenzaA__AGQ81018
augaacacucaaauccuaguauucgcucugauugcgaucauuccaacaaauucagacaaaaucugccucggacaucaugcugugucaaacggaaccaaaguaaacacauuaacugaaagaggaguggaagucgucaaugcaacugaaacaguggaacgaacaagcauccccaggaucugcucaaaaggaaaaagaacaguugaccucggucaauguggacuccuagggacaaucacugggccaccucaaugugaccaauuccuagaauuuucagccgauuuaauuauugagaggcgagaaggaagugaugucuguuauccugggaaauucgugaaugaagaagcucugaggcaaauucucagggaaucaggcggaaucgucaaggaagcaaugggauucacauacagcggaauaagaacuaauggagcaaccagugcauguaggagaucaggaucuucauucuaugcagaaaugaaauggcuccuaucaaacacagauaaugcugcuuucccgccgaugacuaagucauauaaaaauacaagaaaggccccagcuauaauaauaugggggauccaucauuccggaucaacugcagagcaaaccaagcuauaugggaguggaaacaaacuggugacaguuaggaguucuaauuaucaacaaucuuuugugccgaguccaggagcgggaccacaaguuaauggucaaucuggaaggauugacuuucauuggcuaaugcuaaaucccaaugacacagucaccuucagcuucaauggggcuuucauagcuccagaccgugcaagcuuccugagagggaaaucuaugggaauccagaguggaguacagguugaugccaauugugaaggggacugcuaucauaguagagggacaauaauaaguaauuugccauuucagaacauagacagcagaguaguaggaaaauguccgagauauguuaagcaaaagagucugcugcuagcaacagggaugaagaauguuccugagauuccaaagggaagaggccuauuuggugcuauagcggguuucauugaaaauggaugggaaggccuaauugaugggugguaugguuucagacaccagaaugcacagggagagggaacugcugcagauuacaaaagcacucaaucggcaauuaaucaaaugacaggaaaauuaaaccggcuuauagaaaaaaccaaccaacaauuugaguugauagacaaugaauucacugagguagagaagcaaauugguaaugugauaaauuggaccagagacucuauaacagaaguguggucauacaaugcugaacucuugguagcaauggagaaccagcauacaauugaucuggcugauucagaaaugaacaaacuguacgaacgagugaaaagacagcugagagagaaugcugaagaagauggcacugguugcuuugaaauauuucacaaaugugaugaugacuguauggccaguauuagaaauaacaccuaugaucacagcaaauacagggaggaagcaaugcaaaauagaauacagauugacccagucaaacuaagcagcggcuacaaagaugugauacuuugguuuagcuucggggcaucauguuucauacuucuagccauugcaaugggccuugucuucauaugugugaaaaauggaaacaugcggugcacuauuuguauauaa

SEQ ID NO: 42242 - RNA, 1683 nt, Artificial Sequence
  derived and/or modified CDS sequence (wt) from hemagglutinin__InfluenzaA__AGQ81019
augaacacucaaauccuaguauucgcucugauugcgaucauuccaacaaauucagacaaaaucugccucggacaucaugcugugucaaacggaaccaaaguaaacacauuaacugaaagaggaguggaagucgucaaugcaacugaaacaguggaacgaacaagcauccccaggaucugcucaaaagggaaaagaacaguugaccucggucaauguggacuccuagggacaaucacugggccaccucaaugugaccaauuccuagaauuuucagccgauuuaauuauugagaggcgagaaggaagugaugucuguuauccugggaaauucgugaaugaagaagcucugaggcaaauucucagggaaucaggcggaaucgucaaggaagcaaugggauucacauacagcggaauaagaacuaauggagcaaccagugcauguaggagaucaggaucuucauucuaugcagaaaugaaauggcuccuaucaaacacagauaaugcugcuuucccgccgaugacuaagucauauaaaaauacaagaaaggccccagcuauaauaauaugggggauccaucauuccggaucaacugcagagcaaaccaagcuauaugggaguggaaacaaacuggugacaguuaggaguucuaauuaucaacaaucuuuugugccgaguccaggagcgggaccacaaguuaauggucaaucuggaaggauugacuuucauuggcuaaugcuaaaucccaaugacacagucaccuucagcuucaauggggcuuucauagcuccagaccgugcaagcuuccugagagggaaaucuaugggaauccagaguggaguacagguugaugccaauugugaaggggacugcuaucauaguagagggacaauaauaaguaaucugccauuucagaacauagacagcagaguaguaggaaaauguccgagauauguuaagcaaaagagucugcugcuagcaacagggaugaagaauguuccugagauuccaaagggaagaggccuauuuggugcuauagcggguuucauugaaaauggaugggaaggccuaauugaugggugguaugguuucagacaccagaaugcacagggagagggaacugcugcagauuacaaaagcacucaaucggcaauuaaucaaaugacaggaaaauuaaaccggcuuauagaaaaaaccaaccaacaauuugaguugauagacaaugaauucacugagguagagaagcaaauugguaaugugauaaauuggaccagagacucuauaacagaaguguggucauacaaugcugaacucuugguagcaauggagaaccagcauacaauugaucuggcugauucagaaaugaacaaacuguacgaacgagugaaaagacagcugagagagaaugcugaagaagauggcacugguugcuuugaaauauuucacaaaugugaugaugacuguauggccaguauuagaaauaacaccuaugaucacagcaaauacagggaggaagcaaugcaaaauagaauacagauugacccagucaaacuaagcagcggcuacaaagaugugauacuuugguuuagcuucggggcaucauguuucauacuucuagccauugcaaugggccuugucuucauaugugugaaaaauggaaacaugcggugcacuauuuguauauaa

SEQ ID NO: 42243 - RNA, 1683 nt, Artificial Sequence
  derived and/or modified CDS sequence (wt) from hemagglutinin__InfluenzaA__AGQ81020
augaacacucaaauccuaguauucgcucugauugcgaucacuccaacaaauucagacaaaaucugccucggacaucaugcugugucaaacggaaccaaaguaaacacauuaacugaaagaggaguggaagucgucaaugcaacugaaacaguggaacgaacaagcauccccaggaucugcucaaaagggaaaagaacaguugaccucggucaauguggacuccuagggacaaucacugggccaccucaaugugaccaauuccuagaauuuucagccgauuuaauuauugagaggcgagaaggaagugaugucuguuauccugggaaauucgugaaugaagaagcucugaggcaaauucucagggaaucaggcggaaucgacaaggaagcaaugggauucacauacagcggaauaagaacuaauggagcaaccagugcauguaggagaucaggaucuucauucuaugcagaaaugaaauggcuccuaucaaacacagauaaugcugcuuucccgccgaugacuaagucauauaaaaauacaagaaaggccccagcucuaauaauaugggggauccaucauuccggaucaacugcagagcaaaccaagcuauaugggaguggaaacaaacuggugacaguuaggaguucuaauuaucaacaaucuuuugugccgaguccaggagcgggaccacaaguuaauggucaaucuggaaggauugacuuucauuggcuaaugcuaaaucccaaugacacagucaccuucagcuucaauggggcuuucauagcuccagaccgugcaagcuuccugagagggaaaucuaugggaauccagaguggaguacagguugaugccaauugugaaggggacugcuaucauaguggagggacaauaauaaguaauuugccauuucagaacauagacagcagaguaguaggaaaauguccgagauauguuaagcaaaagagucugcugcuagcaacagggaugaagaauguuccugagauuccaaagggaagaggccuauuuggugcuauagcggguuucauugaaaauggaugggaaggccuaauugaugggugguaugguuucagacaccagaaugcacagggagagggaacugcugcagauuacaaaagcacucaaucggcaauuaaucaaaugacaggaaaauuaaaccggcuuauagaaaaaaccaaccaacaauuugaguugauagacaaugaauucacugagguagagaagcaaauugguaaugugauaaauuggaccagagacucuauaacagaaguguggucauacaaugcugaacucuugguagcaauggagaaccagcauacaauugaucuggcugauucagaaaugaacaaacuguacgaacgagugaaaagacagcugagagagaaugcugaagaagauggcacugguugcuuugaaauauuucacaaaugugaugaugacuguauggccaguauuagaaauaacaccuaugaucacagcaaauacagggaggaagcaaugcaaaauagaauacagauugacccagucaaacuaagcagcggcuacaaagaugugauacuuugguuuagcuucggggcaucauguuucauacuucuagccauugcaaugggccuugucuucauaugugugaaaaauggaaacaugcggugcacuauuuguauauaa

SEQ ID NO: 42244 - RNA, 1683 nt, Artificial Sequence
  derived and/or modified CDS sequence (wt) from hemagglutinin__InfluenzaA__AGQ81021
augaacacucaaauccuaguauucgcucugauugcgaucauuccaacaaauucagacaaaaucugccucggacaucaugcugugucaaacggaaccaaaguaaacacauuaacugaaagaggaguggaagucgucaaugcaacugaaacaguggaacgaacaagcauccccaggaucugcucaaaagggaaaagaacaguugaccucggucaauguggacuccuagggacaaucacugggccaccucaaugugaccaauuccuagaauuuucagccgauuuaauuauugagaggcgagaaggaagugaugucuguuauccugggaaauucgugaaugaagaagcucugaggcaaauucucagggaaucaggcggaaucgucaaggaagcaaugggauucacauacagcggaauaagaacuaauggagcaaccagugcauguaggagaucaggaucuucauucuaugcagaaaugaaauggcuccuaucaaacacagauaaugcugcuuucccgccgaugacuaagucauauaaaaauacaagaaaggccccagcuauaauaauaugggggauccaucauuccggaucaacugcagagcaaaccaagcuauaugggaguggaaacaaacuggugacaguuaggaguucuaauuaucaacaaucuuuugugccgaguccaggagcgggaccacaaguuaauggucaaucuggaaggauugacuuucauuggcuaaugcuaaaucccaaugacacagucaccuucagcuucaauggggcuuucauagcuccagaccgugcaagcuuccugagagggaaaucuaugggaauccagaguggaguacagguugaugccaauugugaaggggacugcuaucauaguagagggacaauaauaaguaauuugccauuucagaacauagacagcagaguaguaggaaaauguccgagauauguuaagcaaaagagucugcugcuagcaacagggaugaagaauguuccugagauuccaaagggaagaggccuauuuggugcuauagcggguuucauugaaaauggaugggaaggccuaauugaugggugguaugguuucagacaccagaaugcacagggagagggaacugcugcagauuacaaaagcacucaaucggcaauuaaucaaaugacaggaaaauuaaaccggcuuauagaaaaaaccaaccaacaauuugaguugauagacaaugaauucacugagguagagaagcaaauugguaaugugauaaauuggaccagagacucuauaacagaaguguggucauacaaugcugaacucuugguagcaauggagaaccagcauacaauugaucuggcugauucagaaaugaacaaacuguacgaacgagugaaaagacagcugagagagaaugcugaagaagauggcacugguugcuuugaaauauuucacaaaugugaugaugacuguauggccaguauuagaaauaacaccuaugaucacagcaaauacagggaggaagcaaugcaaaauagaauacagauugacccagucaaacuaagcagcggcuacaaagaugugauacuuugguuuagcuucggggcaucauguuucauacuucuagccauugcaaugggccuugucuucauaugugugaaaaauggaaacaugcggugcacuauuuguauauaa

SEQ ID NO: 42245 - RNA, 1683 nt, Artificial Sequence; identical to SEQ ID NO: 42243
  derived and/or modified CDS sequence (wt) from hemagglutinin__InfluenzaA__AGQ81022

SEQ ID NO: 42246 - RNA, 1683 nt, Artificial Sequence; identical to SEQ ID NO: 42244
  derived and/or modified CDS sequence (wt) from hemagglutinin__InfluenzaA__AGQ81023

SEQ ID NO: 42247 - RNA, 1683 nt, Artificial Sequence
  derived and/or modified CDS sequence (wt) from hemagglutinin__InfluenzaA__AGQ81025
augaacacucaaauccuaguauucgcucugauugcgaucauuccaacaaaugcagacaaaaucugccucggacaucaugcugugucaaacggaaccaaaguaaacacauuaacugaaagaggaguggaagucgucaaugcaacugaaacaguggaacgaacaagcauccccaggaucugcucaaaagggaaaagaacaguugaccucggucaauguggacuccuagggacaaucacugggccaccucaaugugaccaauuccuagaauuuucagccgauuuaauuauugagaggcgagaaggaagugaugucuguuauccugggaaauucgugaaugaagaagcucugaggcaaauucucagggagucaggcggaaucgacaaggaagcaaugggauucacauacaguggaauaagaacuaauggaguaaccagugcauguaggagaucaggaucuucauucuaugcagaaaugaaauggcuccuaucaaacacagauaaugcugcuuucccgccgaugacuaagucauauaaaaauacaagaaaggccccagcucuaauaauaugggggauccaucauuccggaucaacugcagagcaaaccaagcuauaugggaguggaaacaaacuggugacaguuaggaguucuaauuaucaacaaucuuuugugccgaguccaggagcgggaccacaaguuaauggucaaucuggaaggauugacuuucauuggcuaaugcuaaaucccaaugacacagucaccuucagcuucaauggggcuuucauagcuccagaccgugcaagcuuccugagagggaaaucuaugggaauccagaguggaguacagguugaugccaauugugaaggggacugcuaucauaguggagggacaauaauaaguaauuugccauuucagaacauagacagcagaguaguaggaaaauguccgagauauguuaagcaaaagagucugcugcuagcaacagggaugaagaauguuccugagauuccaaagggaagaggccuauuuggugcuauagcggguuucauugaaaauggaugggaaggccuaauugaugggugguaugguuucagacaccagaaugcacagggagagggaacugcugcagauuacaaaagcacucaaucggcaauuaaucaaaugacaggaaaauuaaaccggcuuauagaaaaaaccaaccaacaauuuggguugauagacaaugaauucacugagguagagaagcaaauugguaaugugauaaauuggaccagagacucuauaacagaaguguggucauacaaugcugaacucuugguagcaauggagaaccagcauacaauugaucuggcugauucagaaaugaacaaacuguacgaacgagugaaaagacagcugagagagaaugcugaagaagauggcacugguugcuuugaaauauuucacaaaugugaugaugacuguauggccaguauuagaaauaacaccuaugaucacagcaaauacagggaggaagcaaugcaaaauagaauacagauugacccagucaaacuaagcagcggcuacaaggaugugauacuuugguuuagcuucggggcaucauguuucauacuucuagccauugcaaugggccuugucgucauaugugugaaaaauggaaacaugcggugcacuauuuguauauaa

SEQ ID NO: 42248 - RNA, 1683 nt, Artificial Sequence
  derived and/or modified CDS sequence (wt) from hemagglutinin__InfluenzaA__AGQ81026
augaacacucaaauccuaguauucgcucugauugcgaucauuccaacaaaugcagacaaaaucugccucggacaucaugcugugucaaacggaaccaaaguaaacacauuaacugaaagaggaguggaagucgucaaugcaacugaaacaguggaacgaacaagcauccccaggaucugcucaaaagggaaaagaacaguugaccucggucaauguggacuccuagggacaaucacugggccaccucaaugugaccaauuccuagaauuuucagccgauuuaauuauugagaggcgagaaggaagugaugucuguuauccugggaaauucgugaaugaagaagcucugaggcaaauucucagggaaucaggcggaaucgacaaggaagcaaugggauucacauacagcggaauaagaacuaauggagcaaccagugcauguaggagaucaggaucuucauucuaugcagaaaugaaauggcuccuaucaaacacagauaaugcugcuuucccgccgacgacuaagucauauaaaaauacaagaaaggccccagcucuaauaauaugggggauccaucauuccggaucaacugcagagcaaaccaagcuauaugggaguggaaacaaacuggugacaguuaggaguucuaauuaucaacaaucuuuugugccgaguccaggagcgggaccacaaguuaauggucaaucuggaaggauugacuuucauuggcuaaugcuaaaucccaaugacacagucaccuuuagcuucaauggggcuuucauagcuccagaccgugcaagcuuccugagagggaaaucuaugggaauccagaguggaguacagguugaugccaauugugaaggggacugcuaucauaguggagggacaauaauaaguaauuugccauuucagaacauagacagcagaguaguaggaaaauguccgagauauguuaagcaaaagagucugcugcuagcaacagggaugaagaauguuccugagauuccaaagggaagaggccuauuuggugcuauagcggguuucauugaaaauggaugggaaggccuaauugaugggugguaugguuucagacaccagaaugcacagggagagggaacugcugcagauuacaaaagcacucaaucggcaauuaaucaaaugacaggaaaauuaaaccgacuuauagaaaaaaccaaccaacaauuugaguugauagacaaugaauucacugagguagagaagcagauugguaaugugauaaauuggaccagagacucuauaacagaaguguggucauacaaugcugaacucuugguagcaauggagaaccagcauacaauugaucuggcugauucagaaaugaacaaacuguacgaacgagugaaaagacagcugagagagaaugcugaagaagauggcacugguugcuuugaaauauuucacaaaugugaugaugacuguauggccaguauuagaaauaacaccuaugaucacagcaaauacagggaggaagcaaugcaaaauagaauacagauugacccagucaaacuaagcagcggcuacaaagaugugauacuuugguuuagcuucggggcaucauguuucauacuucuagccauugcaaugggccuugucuucauaugugugaaaaauggaaacaugcggugcacuauuuguauauaa

SEQ ID NO: 42249 - RNA, 1683 nt, Artificial Sequence
  derived and/or modified CDS sequence (wt) from hemagglutinin__InfluenzaA__AGQ81027
augaacacucaaauccuaguauucgcucugauugcgaucauuccaacaaaugcagacaaaaucugccucggacaucaugcugugucaaacggaaccaaaguaaacacauuaacugaaagaggaguggaagucgucaaugcaacugaaacaguggaacgaacaagcauccccaggaucugcucaaaagggaaaagaacaguugaccucggucaauguggacuccuagggacaaucacugggccaccucaaugugaccaauuccuagaauuuucagccgauuuaauuauugagaggcgagaaggaagugaugucuguuauccugggaaauucgugaaugaagaagcucugaggcaaauucucagggagucaggcggaaucgacaaggaagcaaugggauucacauacagcggaauaagaacuaauggaguaaccagugcauguaggagaucaggaucuucauucuaugcagaaaugaaauggcuccuaucaaacacagauaaugcugcuuucccgccgaugacuaagucauauaaaaauacaagaaaggccccagcucuaauaauaugggggauccaucauuccggaucaacugcagagcaaaccaagcuauaugggaguggaaacaaacuggugacaguuaggaguucuaauuaucaacaaucuuuugugccgaguccaggagcgggaccacaaguuaauggucaaucuggaaggauugacuuucauuggcuaaugcuaaaucccaaugacacagucaccuucagcuucaauggggcuuucauagcuccagaccgugcaagcuuccugagagggaaaucuaugggaauccagaguggaguacagguugaugccaauugugaaggggacugcuaucauaguggagggacaauaauaaguaauuugccauuucagaacauagacagcagaguaguaggaaaauguccgagauauguuaagcaaaagagucugcugcuagcaacagggaugaagaauguuccugagauuccaaagggaagaggccuauuuggugcuauagcggguuucauugaaaauggaugggaaggccuaauugaugggugguaugguuucagacaccagaaugcacagggagagggaacugcugcagauuacaaaagcacucaaucggcaauuaaucaaaugacaggaaaauuaaaccggcuuauagaaaaaaccaaccaacaauuugaguugauagacaaugaauucacugagguagagaagcaaauugguaaugugauaaauuggaccagagacucuauaacagaaguguggucauacaaugcugaacucuugguagcaauggagaaccagcauacaauugaucuggcugauucagaaaugaacaaacuguacgaacgagugaaaagacagcugagagagaaugcugaagaagauggcacugguugcuuugaaauauuucacaaaugugaugaugacuguauggccaguauuagaaauaacaccuaugaucacagcaaauacagggaggaagcaaugcaaaauagaauacagauugacccagucaaacuaagcagcggcuacaaggaugugauacuuugguuuagcuucggggcaucauguuucauacuucuagccauugcaaugggccuugucuucauaugugugaaaaauggaaacaugcggugcacuauuuguauauaa

SEQ ID NO: 42250 - RNA, 1683 nt, Artificial Sequence
  derived and/or modified CDS sequence (wt) from hemagglutinin__InfluenzaA__AGQ81028
augaacacucaaauccuaguauucgcucugauugcgaucauuccaacaaaugcagacaaaaucugccucggacaucaugcugugucaaacggaaccaaaguaaacacauuaacugaaagaggaguggaagucgucaaugcaacugaaacaguggaacgaacaagcauccccaggaucugcucaaaagggaaaagaacaguugaccucggucaauguggacuccuagggacaaucacugggccaccucaaugugaccaauuccuagaauuuucagccgauuuaauuauugagaggcgagaaggaagugaugucuguuauccugggaaauucgugaaugaagaagcucugaggcaaauucucagggaaucaggcggaaucgacaaggaagcaaugggauucacauacagcggaauaagaacuaauggagcaaccagugcauguaggagaucaggaucuucauucuaugcagaaaugaaauggcuccuaucaaacacagauaaugcugcuuucccgccgacgacuaagucauauaaaaauacaagaaaggccccagcucuaauaauaugggggauccaucauuccggaucaacugcagagcaaaccaagcuauaugggaguggaaacaaacuggugacaguuaggaguucuaauuaucaacaaucuuuugugccgaguccaggagcgggaccacaaguuaauggucaaucuggaaggauugacuuucauuggcuaaugcuaaaucccaaugacacagucaccuuuagcuucaauggggcuuucauagcuccagaccgugcaagcuuccugagagggaaaucuaugggaauccagaguggaguacagguugaugccaauugugaaggggacugcuaucauaguggagggacaauaauaaguaauuugccauuucagaacauagacagcagaguaguaggaaaauguccgagauauguuaagcaaaagagucugcugcuagcaacagggaugaagaauguuccugagauuccaaagggaagaggccuauuuggugcuauagcggguuucauugaaaauggaugggaaggccuaauugaugggugguaugguuucagacaccagaaugcacagggagagggaacugcugcagauuacaaaagcacucaaucggcaauuaaucaaaugacaggaaaauuaaaccgacuuauagaaaaaaccaaccaacaauuugaguugauagacaaugaauucacugagguagagaagcagauugguaaugugauaaauuggaccagagacucuauaacagaaauguggucauacaaugcugaacucuugguagcaauggagaaccagcauacaauugaucuggcugauucagaaaugaacaaacuguacgaacgagugaaaagacagcugagagagaaugcugaagaagauggcacugguugcuuugaaauauuucacaaaugugaugaugacuguauggccaguauuagaaauaacaccuaugaucacagcaaauacagggaggaagcaaugcaaaauagaauacagauugacccagucaaacuaagcagcggcuacaaagaugugauacuuugguuuagcuucggggcaucauguuucauacuucuagccauugcaaugggccuugucuucauaugugugaaaaauggaaacaugcggugcacuauuuguauauaa

SEQ ID NO: 42251 - RNA, 1683 nt, Artificial Sequence
  derived and/or modified CDS sequence (wt) from hemagglutinin__InfluenzaA__AGQ81029
augaacacucaaauccuaguauucgcucugauugcgaucauuccaacaaaugcagacaaaaucugccucggacaucaugcugugucaaacggaaccaaaguaaacacauuaacugaaagaggaguggaagucgucaaugcaacugaaacaguggaacgaacaagcauccccaggaucugcucaaaagggaaaagaacaguugaccucggucaauguggacuccuagggacaaucacugggccaccucaaugugaccaauuccuagaauuuucagccgauuuaauuauugagaggcgagaaggaagugaugucuguuauccugggaaauucgugaaugaagaagcucugaggcaaauucucagggagucaggcggaaucgacaaggaagcaaugggauucacauacagcggaauaagaacuaauggaguaaccagugcauguaggagaucaggaucuucauucuaugcagaaaugaaauggcuccuaucaaacacagauaaugcugcuuucccgccgaugacuaagucauauaaaaauacaagaaaggccccagcucuaauaauaugggggauccaucauuccggaucaacugcagagcaaaccaagcuauaugggaguggaaacaaacuggugacaguuaggaguucuaauuaucaacaaucuuuuaugccgaguccaggagcgggaccacaaguuaauggucaaucuggaaggauugacuuucauuggcuaaugcuaaaucccaaugacacagucaccuucagcuucaauggggcuuucauagcuccagaccgugcaagcuuccugagagggaaaucuaugggaauccagaguggaguacagguugaugccaauugugaaggggacugcuaucauaguggagggacaauaauaaguaauuugccauuucagaacauagacagcagaguaguaggaaaauguccgagauauguuaagcaaaagagucugcugcuagcaacagggaugaagaauguuccugagauuccaaagggaagaggccuauuuggugcuauagcggguuucauugaaaauggaugggaaggccuaauugaugggugguaugguuucagacaccagaaugcacagggagagggaacugcugcagauuacaaaagcacucaaucggcaauuaaucaaaugacaggaaaauuaaaccggcuuauagaaaaaaccaaccaacaauuugaguugauagacaaugaauucacugagguagagaagcaaauugguaaugugauaaauuggaccagagacucuauaacagaaguguggucauacaaugcugaacucuugguagcaauggagaaccagcauacaauugaucuggcugauucagaaaugaacaaacuguacgaacgagugaaaagacagcugagagagaaugcugaagaagauggcacugguugcuuugaaauauuucacaaaugugaugaugacuguauggccaguauuagaaauaacaccuaugaucacagcaaauacagggaggaagcaaugcaaaauagaauacagauugacccagucaaacuaagcagcggcuacaaggaugugauacuuugguuuagcuucggggcaucauguuucauacuucuagccauugcaaugggccuugucuucauaugugugaaaaauggaaacaugcggugcacuauuuguauauaa

SEQ ID NO: 42252 - RNA, 1683 nt, Artificial Sequence
  derived and/or modified CDS sequence (wt) from hemagglutinin__InfluenzaA__AGQ81031
augaacacucaaauccuaguauucgcucugauugcgaucauuccaacaaaugcagacaaaaucugccucggacaucaugcugugucaaacggaaccaaaguaaacacauuaacugaaagaggaguggaagucgucaaugcaacugaaacaguggaacgaacaagcauccccaggaucugcucaaaagggaaaagaacaguugaccucggucaauguggacuccuagggacaaucacugggccaccucaaugugaccaauuccuagaauuuucagccgauuuaauuauugagaggcgagaaggaagugaugucuguuauccugggaaauucgugaaugaagaagcucugaggcaaauucucagggaaucaggcggaaucaacaaggaagcaaugggauucacauacagcggaauaagaacuaauggagcaaccagugcauguaggagaucaggaucuucauucuaugcagaaaugaaauggcuccuaucaaacacagauaaugcugcuuucccgccgaugacuaagucauauaaaaauacaagaaaggccccagcucuaauaauaugggggauccaucauuccggaucaacugcagagcaaaccaagcuauaugggaguggaaacaaaauggugacaguuaggaguucuaauuaucaacaaucuuuugugccgaguccaggagcgggaccacaaguuaauggucaaucuggaaggauugacuuucauuggcuaaugcuaaaucccaaugacacagucaccuuuagcuucaauggggcuuucauagcuccagaccgugcaagcuuccugagagggaaaucuaugggaauccagaguggaguacagguugaugccaauugugaaggggacugcuaucauaguggagggacaauaauaaguaauuugccauuucagaacauagacagcagaguaguaggaaaauguccuagauauguuaagcaaaagagucugcugcuagcaacagggaugaagaauguuccugagauuccaaagggaagaggccuauuuggugcuauagcggguuucauugaaaauggaugggaaggccuaauugaugggugguaugguuucagacaccagaaugcacagggagagggaacugcugcagauuacaaaagcacucaaucggcaauuaaucagaugacaggaaaauuaaaccggcuuauagaaaaaaccaaccaacaauuugaguugauagacaaugaauucacugagguagagaggcaaauugguaaugugauaaauuggaccagagacucuauaacagaaguguggucauacaaugcugaacucuugguagcaauggagaaccagcauacaauugaucuggcugauucagaaaugaacaaacuguacgaacgagugaaaagacagcugagagagaaugcugaagaagauggcacugguugcuuugaaauauuucacaaaugugaugaugacuguauggccaguauuagaaauaacaccuaugaucacagcaaauacagggaggaagcaaugcaaaauagaauacagauugacccagucaaacuaagcagcggcuacaaagaugugauacuuugguuuagcuucggggcaucauguuucauacuucuagccauugcaaugggccuugucuucauaugugugaaaaauggaaacaugcggugcacuauuuguauauaa

SEQ ID NO: 42253 - RNA, 1683 nt, Artificial Sequence
  derived and/or modified CDS sequence (wt) from hemagglutinin__InfluenzaA__AGQ81032
augaacacucaaauccuaguauucgcucugauugcgaucauuccaacaaaugcagacaaaaucugccucggacaucaugcugugucaaacggaaccaaaguaaacacauuaacugaaagaggaguggaagucgucaaugcaacugaaacaguggaacgaacaagcauccccaggaucugcucaaaagggaaaagaacaguugaccucggucaauguggacuccuagggacaaucacugggccaccucaaugugaucaauuccuagaauuuucagccgauuuaauuauugagaggcgagaaggaagugaugucuguuauccugggaaauucgugaaugaagaagcucugaggcaaauucucagggaaucaggcggaaucgacaaggaagcaaugggauucacauacagcggaauaagaacuaauggagcaaccagugcauguaggagaucaggaucuucauucuaugcagaaaugaaauggcuccuaucaaacacagauaaugcugcuuucccgccgacgacuaagucauauaaaaauacaagaaaggccccagcucuaauaauaugggggauccaucauuccggaucaacugcagagcaaaccaagcuauaugggaguggaaacaaacuggugacaguuaggaguucuaauuaucaacaaucuuuugugccgaguccaggagcgggaccacaaguuaauggucaaucuggaaggauugacuuucauuggcuaaugcuaaaucccaaugacacagucaccuuuagcuucaauggggcuuucauagcuccagaccgugcaagcuuccugagagggaaaucuaugggaauccagaguggaguacagguugaugccaauugugaaggggacugcuaucauaguggagggacaauaauaaguaauuugccauuucagaacauagacagcagaguaguaggaaaauguccgagauauguuaagcaaaagagucugcugcuagcaacagggaugaagaauguuccugagauuccaaagggaagaggccuauuuggugcuauagcggguuucauugaaaauggaugggaaggccuaauugaugggugguaugguuucagacaccagaaugcacagggagagggaacugcugcagauuacaaaagcacucaaucggcaauuaaucaaaugacaggaaaauuaaaccgacuuauagaaaaaaccaaccaacaauuugaguugauagacaaugaauucacugagguagagaagcaaauugguaaugugauaaauuggaccagagacucuauaacagaaguguggucauacaaugcugaacucuugguagcaauggagaaccagcauacaauugaucuggcugauucagaaaugaacaaacuguacgaacgagugaaaagacagcugagagagaaugcugaagaagauggcacugguugcuuugaaauauuucacaaaugugaugaugacuguauggccaguauuagaaauaacaccuaugaucacagcaaauacagggaggaagcaaugcaaaauagaauacagauugacccagucaaacuaagcagcggcuacaaagaugugauacuuugguuuagcuucggggcaucauguuucauacuucuagccauugcaaugggccuugucuucauaugugugaaaaauggaaacaugcggugcacuauuuguauauaa

SEQ ID NO: 42254 - RNA, 1683 nt, Artificial Sequence
  derived and/or modified CDS sequence (wt) from hemagglutinin__InfluenzaA__AGQ81033
augaacacucaaauccuaguauucgcucugauugcgaucauuccaacaaaugcagacaaaaucugccucggacaucaugcugugucaaacggaaccaaaguaaacacauuaaccgaaagaggaguggaagucgucaaugcaacugaaacaguggaacgaacaagcauccccaggaucugcucaaaagggaaaagaacaguugaccucggucaauguggacuccuagggacaaucacugggccaccucaaugugaccaauuccuagaauuuucagccgauuuaauuauugagaggcgagaaggaagugaugucuguuauccugggaaauucgugaaugaagaagcucugaggcaaauucucagggagucaggcggaaucgacaaggaagcaaugggauucacauacagcggaauaagaacuaauggaguaaccagugcauguaggagaucaggaucuucauucuaugcagaaaugaaauggcuccuaucaaacacagauaaugcugcuuucccgccgaugacuaagucauauaaaaauacaagaaaggccccagcucuaauaauaugggggauccaucauuccggaucaacugcagagcaaaccaagcuauaugggaguggaaacaaacuggugacaguuaggaguucuaauuaucaacaaucuuuugugccgaguccaggagcgggaccacaaguuaauggucaaucuggaaggauugacuuucauuggcuaaugcuaaaucccaaugacacagucaccuucagcuucaauggggcuuucauagcuccagaccgugcaagcuuccugagagggaaaucuaugggaauccagaguggaguacagguugaugccaauugugaaggggacugcuaucauaguggagggacaauaauaaguaauuugccauuucagaacauagacagcagaguaguaggaaaauguccgagauauguuaagcaaaagagucugcugcuagcaacagggaugaagaauguuccugagauuccaaagggaagaggccuauuuggugcuauagcggguuucauugaaaauggaugggaaggccuaauugaugggugguaugguuucagacaccagaaugcacagggagagggaacugcugcagauuacaaaagcacucaaucggcaauuaaucaaaugacaggaaaauuaaaccggcuuauagaaaaaaccaaccaacaauuugaguugauagacaaugaauucacugagguagagaagcaaauugguaaugugauaaauuggaccagagacucuauaacagaaguguggucauacaaugcugaacucuugguagcaauggagaaccagcauacaauugaucuggcugauucagaaaugaacaaacuguacgaacgagugaaaagacagcugagagagaaugcugaagaagauggcacugguugcuuugaaauauuucacaaaugugaugaugacuguauggccaguauuagaaauaacaccuaugaucacagcaaauacagggaggaagcaaugcaaaauagaauacagauugacccagucaaacuaagcagcggcuacaaggaugugauacuuugguuuagcuucggggcaucauguuucauacuucuggccauugcaaugggccuugucuucauaugugugaaaaauggaaacaugcggugcacuauuuguauauaa

SEQ ID NO: 42255 - RNA, 1683 nt, Artificial Sequence
  derived and/or modified CDS sequence (wt) from hemagglutinin__InfluenzaA__AGQ81034
augaacacucaaauccuaguauucgcucugauugcgaucauuccaacaaaugcagacaaaaucugccucggacaucaugcugugucaaacggaaccaaaguaaacacauuaacugaaagaggaguggaagucgucaaugcaacugaaacaguggaacgaacaagcauccccaggaucugcucaaaagggaaaagaacaguugaccucggucaauguggacuccuagggacaaucacugggccaccucaaugugaccaauuccuagaauuuucagccgauuuaauuauugagaggcgagaaggaagugaugucuguuauccugggaaauucgugaaugaagaagcucugaggcaaauucucagggaaucaggcggaaucgacaaggaagcaaugggauucacauacagcggaauaagaacuaauggagcgaccagugcauguaggagaucaggaucuucauucuaugcagaaaugaaauggcuccuaucaaacacagauaaugcugcuuucccgccgacgacuaagucauauaaaaauacaagaaaggccccagcucuaauaauaugggggauccaucauuccggaucaacugcagagcaaaccaagcuauaugggaguggaaacaaacuggugacaguuaggaguucuaauuaucaacaaucuuuugugccgaguccaggagcgggaccacaaguuaauggucaaucuggaaggauugacuuucauuggcuaaugcuaaaucccaaugacacagucaccuuuagcuucaauggggcuuucauagcuccagaccgugcaagcuuccugagggggaaaucuaugggaauccagaguggaguacagguugaugccaauugugaaggggacugcuaucauaguggagggacaauaauaaguaauuugccauuucagaacauagacagcagaguaguaggaaaaugcccgagauauguuaagcaaaagagucugcugcuagcaacagggaugaagaauguuccugagauuccaaagggaagaggccuauuuggugcuauagcggguuucauugaaaauggaugggaaggccuaauugaugggugguaugguuucagacaccagaaugcacagggagagggaacugcugcagauuacaaaagcacucaaucggcaauuaaucaaaugacaggaaaauuaaaccggcuuauagaaaaaaccaaccaacaauuugaguugauagacaaugaauucacugaaguagagaagcaaauugguaaugugauaaauuggaccagagacucuauaacagaaguguggucauacaaugcugaacucuugguagcaauggagaaccagcauacaauugaucuggcugauucagaaaugaacaaacuguacgaacgagugaaaagacagcugagagagaaugcugaagaagauggcacugguugcuuugaaauauuucacaaaugugaugaugacuguauggccaguauuagaaauaacaccuaugaucacagcaaauacagggaggaagcaaugcaaaauagaauacagauugacccagucaaacuaagcagcggcuacaaagaugugauacuuugguuuagcuucggggcaucauguuucauacuucuagccauugcaaugggccuugucuucauaugugugaaaaauggaaacaugcggugcacuauuuguauauaa

SEQ ID NO: 42256 - RNA, 1683 nt, Artificial Sequence; identical to SEQ ID NO: 42254
  derived and/or modified CDS sequence (wt) from hemagglutinin__InfluenzaA__AGQ81035

SEQ ID NO: 42257 - RNA, 1683 nt, Artificial Sequence; identical to SEQ ID NO: 42254
  derived and/or modified CDS sequence (wt) from hemagglutinin__InfluenzaA__AGQ81036

SEQ ID NO: 42258 - RNA, 1683 nt, Artificial Sequence; identical to SEQ ID NO: 42254
  derived and/or modified CDS sequence (wt) from hemagglutinin__InfluenzaA__AGQ81037

SEQ ID NO: 42259 - RNA, 1683 nt, Artificial Sequence; identical to SEQ ID NO: 42244
  derived and/or modified CDS sequence (wt) from hemagglutinin__InfluenzaA__AGQ81038

SEQ ID NO: 42260 - RNA, 1683 nt, Artificial Sequence; identical to SEQ ID NO: 42241
  derived and/or modified CDS sequence (wt) from hemagglutinin__InfluenzaA__AGQ81039

SEQ ID NO: 42261 - RNA, 1683 nt, Artificial Sequence
  derived and/or modified CDS sequence (wt) from hemagglutinin__InfluenzaA__AGQ81040
augaacacucaaauccugguauucgcucugauugcgaucauuccaacaaaugcagacaaaaucugccucggacaucaugcugugucaaacggaaccaaaguaaacacauuaacugaaagaggaguggaagucgucaaugcaacugaaacaguggaacgaacaaacauccccaggaucugcucaaaagggaaaagaacaguugaccucggucaauguggacuccuggggacaaucacugggccaccucaaugugaccaauuccuagaauuuucagccgauuuaauuauugagagacgagaaggaagugaugucuguuauccugggaaauucgugaaugaagaagcucugaggcaaauucucagggaaucaggcggaaucgacaaggaagcaaugggauucacauacagcggaauaagaacuaauggagcaaccagugcauguaggagaucaggaucuucauucuaugcagaaaugaaauggcuccuaucaaacacagauaaugcugcuuucccgcagaugacuaagucauauaaaaauacaagaaaggacccagcucuaauaauaugggggauccaucauuccggaucaacugcagagcaaaccaagcuauaugggaguggaaacaaacuggugacaguugggaguucuaauuaucaacaaucuuuugugccgaguccaggagcgagaccacaaguuaauggucaaucuggaaggauugacuuucauuggcuaaugcuaaaucccaaugacacagucaccuucagcuucaauggggcuuucauagcuccagaccgugcaagcuuccugagagggaaaucuaugggaauccagaguggaguacagauugaugccaauugugaaggggacugcuaucauaguggagggacaauaauaaguaacuugccauuucagaacauagacagcagagcaguaggaaaauguccgagauauguuaagcaaaagagccugcugcuagcaacagggaugaagaauguuccugagauuccaaagggaagaggccuauuuggugcuauagcggguuucauugaaaauggaugggaaggccuaauugaugggugguaugguuucagacaccagaaugcacagggagagggaacugcugcagacuacaaaagcacucaaucggcaauugaucaaauaacaggaaaauuaaaccggcuuauagaaaaaaccaaccaacaauuugaguugauagacaaugaauucacugagguagagaagcagaucgguaaugugauaaauuggaccagagacucuauaacggaaguguggucauacaaugcugagcucuugguagcaauggagaaccagcauacaauugaucuggcugauucagaaaugaacaaacuguacgaacgagugaaaagacagcugagagaaaaugcugaagaagauggcacugguugcuuugaaauauuucacaaaugugaugaugacuguauggccaguauuagaaauaacaccuaugaucacagcaaauacagggaagaagcaaugcaaaauagaauacagauugacccagucaaacuaagcagcggcuacaaagaugugauacuuugguuuagcuucggggcaucauguuucauacuucuagccauugcaaugggccuugucuucauaugugugaagaauggaaacaugcggugcacuauuuguauauaa

SEQ ID NO: 42262 - RNA, 1683 nt, Artificial Sequence
  derived and/or modified CDS sequence (wt) from hemagglutinin__InfluenzaA__AGQ81041
augaacacucaaauccugguauucgcucugauugcgaucauuccaacaaaugcagacaaaaucugccucggacaucaugcugugucaaacggaaccaaaguaaacacauuaacugaaagaggaguggaagucgucaaugcaacugaaacaguggaacgaacaaacauccccaggaucugcucaaaagggaaaagaacaguugaccucggucaauguggacuccuggggacaaucacugggccaccucaaugugaccaauuccuagaauuuucagccgauuuaauuauugagagacgagaaggaagugaugucuguuauccugggaaauucgugaaugaagaagcucugaggcaaauucucagggaaucaggcggaauugacaaggaagcaaugggauucacauacagcggaauaagaacuaauggagcaaccagugcauguaggagaucaggaucuucauucuaugcagaaaugaaauggcuccuaucaaacacagauaaugcugcuuucccgcagacgacuaagucauauaaaaauacaagaaaggacccagcucuaauaauaugggggauccaucauuccggaucaacugcagagcaaaccaagcuauaugggaguggaaacaaacuggugacaguugggaguucuaauuaucaacaaucuuuugugccgaguccaggagcgagaccacaaguuaauggucaaucuggaaggauugacuuucauuggcuaaugcuaaaucccaaugacacagucaccuucagcuucaauggggcuuucauagcuccagaccgugcaagcuuccugagagggaaaucuaugggaauccagaguggaguacagguugaugccaauugugaaggggacugcuaucauaguggagggacaauaauaaguaacuugccauuucagaacauagacagcagagcaguaggaaaauguccgagauauguuaagcaaaagagucugcugcuagcaacagggaugaagaauguuccugagauuccaaagggaagaggccuauuuggugcuauagcggguuucauugaaaauggaugggaaggccuaauugaugggugguauggcuucagacaccagaaugcacagggagagggaacugcugcagacuacaaaagcacccaaucggcaauugaucaaauaacaggaaaauuaaaccggcuuauagaaaaaaccaaccaacaauuugaguugauagacaaugaauucacugagguagagaagcaaaucgguaaugugauaaauuggaccagagacucuauaacggaaguguggucauacaaugcugagcucuugguagcaauggagaaccagcauacaauugaucuggcugauucagaaaugaacaaacuguacgaacgagugaaaagacagcugagagagaaugcugaagaagauggcacugguugcuuugaaauauuucacaaaugugaugaugacuguauggccaguauuagaaauaacaccuaugaucacagcaaauacagggaagaagcaaugcaaaauagaauacagauugacccagucaaauuaagcagcggcuacaaagaugugauacuuugguuuagcuucggggcaucauguuucauacuucuagccauugcaaugggccuugucuucauaugugugaagaauggaaacaugcggugcacuauuuguauauaa

SEQ ID NO: 42263 - RNA, 1683 nt, Artificial Sequence
  derived and/or modified CDS sequence (wt) from hemagglutinin__InfluenzaA__AGQ81042
augaacacucaaauccugguauucgcucugauugcgaucauuccaacaaaugcagacaaaaucugccucggacaucaugcugugucaaacggaaccaaaguaaacacauuaacugaaagaggaguggaagucgucaaugcaacugaaacaguggaacgaacaaacauccccaggaucugcucaaaagggaaaagaacaguugaccucggucaauguggacuccuggggacaaucacugggccaccucaaugugaccaauuccuagaauuuucagccgauuuaauuauugagagacgagaaggaagugaugucuguuauccugggaaauucgugaaugaagaagcucugaggcaaauucucagggaaucaggcggaauugacaaggaagcaaugggauucacauacagcggaauaagaacuaauggagcaaccagugcauguaggagaucaggaucuucauucuaugcagaaaugaaauggcuccuaucaaacacagauaaugcugcuuucccgcagaugacuaagucauauaaaaauacaagaaaggacccagcucuaauaauaugggggauccaucauuccggaucaacugcagagcaaaccaagcuauaugggaguggaaacaaacuggugacaguugggaguucuaauuaucaacaaucuuuugugccgaguccaggagcgagaccacaaguuaauggucaaucuggaaggauugacuuucauuggcuaaugcuaaaucccaaugacacagucaccuucagcuucaauggggcuuucauagcuccagaccgugcaagcuuccugagagggaaaucuaugggaauccagaguggaguacagguugaugccaauugugaaggggacugcuaucauaguggagggacaauaauaaguaacuugccauuucagaacauagacagcagagcaguaggaaaauguccgagauauguuaagcaaaagagucugcugcuagcaacagggaugaagaauguuccugagauuccaaagggaagaggccuauuuggugcuauagcggguuucauugaaaauggaugggaaggccuaauugaugggugguauggcuucagacaccagaaugcacagggagagggaacugcugcagacuacaaaagcacucaaucggcaauugaucaaauaacaggaaaauuaaaccggcuuauagaaaaaaccaaccaacaauuugaguugauagacaaugaauucacugagguagagaagcaaaucgguaaugugauaaauuggaccagagacucuauaacggaaguguggucauacaaugcugagcucuugguagcaauggagaaccagcauacaauugaucuggcugauucagaaaugaacaaacuguacgaacgagugaaaagacagcugagagagaaugcugaagaagauggcacugguugcuuugaaauauuucacaaaugugaugaugacuguauggccaguauuagaaauaacaccuaugaucacagcaaauacagggaagaagcaaugcaaaauagaauacagauugacccagucaaauuaagcagcggcuacaaagaugugauacuuugguuuagcuucggggcaucauguuucauacuucuagccauugcaaugggccuugucuucauaugugugaagaauggaaacaugcggugcacuauuuguauauaa

SEQ ID NO: 42264 - RNA, 1683 nt, Artificial Sequence
  derived and/or modified CDS sequence (wt) from hemagglutinin__InfluenzaA__AGQ81043
augaacacucaaauccugguauucgcucugauugcgaucauuccaacaaaugcagacaaaaucugccucggacaucaugccgugucaaacggaaccaaaguaaacacauuaacugaaagaggaguggaagucgucaaugcaacugaaacaguggaacgaacaaacauccccaggaucugcucaaaagggaaaaggacaguugaccucggucaauguggacuccuggggacaaucacuggaccaccucaaugugaccaauuccuagaauuuucagccgauuuaauuauugagaggcgagaaggaagugaugucuguuauccugggaaauucgugaaugaagaagcucugaggcaaauucucagagaaucaggcggaauugacaaggaagaaaugggauucacauacaguggaauaagaacuaauggagcaaccagugcauguaggagaucaggaucuucauucuaugcagaaaugaaauggcuccugucaaacacagauaaugcugcauucccgcagaugacuaagucauauaaaaauacaagaaaaagcccagcucuaauaguaugggggauccaucauuccguaucaacugcagagcaaaccaagcuauaugggaguggaaacaaacuggugacaguugggaguucuaauuaucaacaaucuuuuguaccgaguccaggagcgagaccacaaguuaauggucuaucuggaagaauugacuuucauuggcuaaugcuaaaucccaaugauacagucacuuucaguuucaauggggcuuucauagcuccagaccgugcaagcuuccugagaggaaaaucuaugggaauccagaguggaguacagguugaugccaauugugaaggggacugcuaucauaguggagggacaauaauaaguaacuugccauuucagaacauagauagcagggcaguuggaaaauguccgagauauguuaagcaaaggagucugcugcuagcaacagggaugaagaauguuccugagauuccaaagggaagaggccuauuuggugcuauagcggguuucauugaaaaugggugggaaggccuaauugaugguugguaugguuucagacaccagaaugcacagggagagggaacugcugcagauuacaaaagcacucaaucggcaauugaucaaauaacaggaaaauuaaaccggcuuauagaaaaaaccaaccaacaauuugaguugauagacaaugaauucaaugagguagagaagcaaaucgguaaugugauaaauuggaccagagauucuauaacagaaguguggucauacaaugcugaacucuugguagcaauggagaaccagcauacaauugaucuggcugauucagaaauggacaaacuguacgaacgagugaaaagacagcugagagagaaugcugaagaagauggcacugguugcuuugaaauauuucacaagugugaugaugacuguauggccaguauuagaaauaacaccuaugaucacagcaaauacagggaagaggcaaugcaaaauagaauacagauugacccagucaaacuaagcagcggcuacaaagaugugauacuuugguuuagcuucggggcaucauguuucauacuucuagccauuguaaugggccuugucuucauauguguaaagaauggaaacaugcggugcacuauuuguauauaa

SEQ ID NO: 42265 - RNA, 1683 nt, Artificial Sequence
  derived and/or modified CDS sequence (wt) from hemagglutinin__InfluenzaA__AGQ81044
augaacacucaaauccugguauucgcucugauugcgaucauuccaacaaaugcagacaaaaucugccucggacaucaugccgugucaaacggaaccaaaguaaacacauuaacugaaagaggaguggaagucgucaaugcaacugaaacaguggaacgaacaaacauccccaggaucugcucaaaagggaaaaggacaguugaccucggucaauguggacuccuggggacaaucacuggaccaccucaaugugaccaauuccuagaauuuucagccgauuuaauuauugagaggcgagaaggaagugaugucuguuauccugggaaauucgugaaugaagaagcucugaggcaaauucucagagaaucaggcggaauugacaaggaagcaaugggauucacauacaguggaauaagaacuaauggagcaaccagugcauguaggagaucaggaucuucauucuaugcagaaaugaaauggcuccugucaaacacagauaaugcugcauucccgcagaugacuaagucauauaaaaauacaagaaaaagcccagcucuaauaguaugggggauccaucauuccguaucaacugcagagcaaaccaagcuauaugggaguggaaacaaacuggugacaguugggaguucuaauuaucaacaaucuuuuguaccgaguccaggagcgagaccacaaguuaauggucuaucuggaagaauugacuuucauuggcuaaugcuaaaucccaaugauacagucacuuucaguuucaauggggcuuucauagcuccagaccgugcaagcuuccugagaggaaaaucuaugggaauccagaguggaguacagguugaugccaauugugaaggggacugcuaucauaguggagggacaauaauaaguaacuugccauuucagaacauagauagcagggcaguuggaaaauguccgagauauguuaagcaaaggagucugcugcuagcaacagggaugaagaauguuccugagauuccaaagggaagaggccuauuuggugcuauagcggguuucauugaaaaugggugggaaggccuaauugaugguugguaugguuucagacaccagaaugcacagggagagggaacugcugcagauuacaaaagcacucaaucggcaauugaucaaauaacaggaaaauuaaaccggcuuauagaaaaaaccaaccaacaauuugaguugauagacaaugaauucaaugagguagagaagcaaaucgguaaugugauaaauuggaccagagauucuauaacagaaguguggucauacaaugcugaacucuugguagcaauggagaaccagcauacaauugaucuggcugauucagaaauggacaaacuguacgaacgagugaaaagacagcugagagagaaugcugaagaagauggcacugguugcuuugaaauauuucacaagugugaugaugacuguauggccaguauuagaaauaacaccuaugaucacagcaaauacagggaagaggcaaugcaaaauagaauacagauugacccagucaaacuaagcagcggcuacaaagaugugauacuuugguuuagcuucggggcaucauguuucauacuucuagccauuguaaugggccuugucuucauauguguaaagaauggaaacaugcggugcacuauuuguauauaa

SEQ ID NO: 42266 - RNA, 1683 nt, Artificial Sequence; identical to SEQ ID NO: 42265
  derived and/or modified CDS sequence (wt) from hemagglutinin__InfluenzaA__AGQ81045

SEQ ID NO: 42267 - RNA, 1683 nt, Artificial Sequence; identical to SEQ ID NO: 42265
  derived and/or modified CDS sequence (wt) from hemagglutinin__InfluenzaA__AGQ81046

SEQ ID NO: 42268 - RNA, 1683 nt, Artificial Sequence; identical to SEQ ID NO: 42254
  derived and/or modified CDS sequence (wt) from hemagglutinin__InfluenzaA__AGQ81047

SEQ ID NO: 42269 - RNA, 1683 nt, Artificial Sequence
  derived and/or modified CDS sequence (wt) from hemagglutinin__InfluenzaA__AGQ81049
augaacacucaaauccuaguauucgcucugauugcgaucauuccaacaaaugcagacaaaaucugccucggacaucaugcugugucaaacggaaccaaaguaaacacauuaacugaaagaggaguggaagucgucaaugcaacugaaacaguggaacgaacaagcauccccaggaucugcucaaaagggaaaagaacaguugaccucggucaauguggacuccuagggacaaucacugggccaccucaaugugaccaauuccuagaauuuucagccgauuuaauuauugagaggcgagaaggaagugaugucuguuauccugggaaauucgugaaugaagaagcucugaggcaaauucucagggaaucaggcggaaucgacaaggaagcaaugggauucacauacagcggaauaagaacuaauggagcaaccagugcauguaggagaucaggaucuucauucuaugcagaaaugaaauggcuccuaucaaacacagauaaugcugcuuucccgccgacgacuaagucauauaaaaauacaagaaaggccccagcucuaauaauaugggggauccaucauuccggaucaacugcagagcaaaccaagcuauaugggaguggaaacaaacuggugacaguuaggaguucuaauuaucaacaaucuuuugugccgaguccaggagcgggaccacaaguuaauggucaaucuggaaggauugacuuucauuggcuaaugcuaaaucccaaugacacagucaccuuuagcuucaauggggcuuucauagcuccagaccgugcaagcuuccugagagggaaaucuaugggaauccagaguggaguacagguugaugccaauugugaaggggacugcuaucauaguggagggacaauaauaaguaauuugccauuucagaacauagacagcagaguaguaggaaaaugcccgagauauguuaagcaaaagagucugcugcuagcaacagggaugaagaauguuccugagauuccaaagggaagaggccuauuuggugcuauagcggguuucauugaaaauggaugggaaggccuaauugaugggugguaugguuucagacaccagaaugcacagggagagggaacugcugcagauuacaaaagcacucaaucggcaauuaaucaaaugacaggaaaauuaaaccggcuuauagaaaaaaccaaccaacaauuugaguugauagacaaugaauucacugagguagagaagcaaauugguaaugugauaaauuggaccagagacucuauaacagaaguguggucauacaaugcugaacucuugguagcaauggagaaccagcauacaauugaucuggcugauucagaaaugaacaaacuguacgaacgagugaaaagacaacugagagagaaugcugaagaagauggcacugguugcuuugaaauauuucacaaaugugaugaugacuguauggccaguauuagaaauaacaccuaugaucacagcaaauacagggaggaagcaaugcaaaauagaauacagauugacccagucaaacuaagcagcggcuacaaagaugugauacuuugguuuagcuucggggcaucauguuucauacuucuagccauugcaaugggccuugucuucauaugugugaaaaauggaaacaugcggugcacuauuuguauauaa

SEQ ID NO: 42270 - RNA, 1683 nt, Artificial Sequence; identical to SEQ ID NO: 42254
  derived and/or modified CDS sequence (wt) from hemagglutinin__InfluenzaA__AGQ81050

SEQ ID NO: 42271 - RNA, 1683 nt, Artificial Sequence
  derived and/or modified CDS sequence (wt) from hemagglutinin__InfluenzaA__AGQ81051
augaacacucaaauccuaguauucgcucugauugcgaucauuccaacaaaugcagacaaaaucugccucggacaucaugcugugucaaacggaaccaaaguaaacacauuaacugaaagaggaguggaagucgucaaugcaacugaaacaguggaacgaacaagcauccccaggaucugcucaaaagggaaaagaacaguugaccucggucaauguggacuccuagggacaaucacugggccaccucaaugugaccaauuccuagaauuuucagccgauuuaauuauugagaggcgagaaggaagugaugucuguuauccugggaaauucgugaaugaagaagcucugaggcaaauucucagggaaucaggcggaaucaacaaggaagcaaugggauucacauacagcggaauaagaacuaauggagcaaccagugcauguaggagaucaggaucuucauucuaugcagaaaugaaauggcuccuaucaaacacagauaaugcugcuuucccgccgaugacuaagucauauaaaaauacaagaaaggccccagcucuaauaauaugggggauccaucauuccggaucaacugcagagcaaaccaagcuauaugggaguggaaacaaacuggugacaguuaggaguucuaauuaucaacaaucuuuugugccgaguccaggagcgggaccacaaguuaauggucaaucuggaaggauugacuuucauuggcuaaugcuaaaucccaaugacacagucaccuucagcuucaauggggcuuucauagcuccagaccgugcaagcuuccugagagggaaaucuaugggaauccagaguggaguacagguugaugccaauugugaaggggacugcuaucauaguggagggacaauaauaaguaauuugccauuucagaacauagacagcagaguaguaggaaaauguccgagauauguuaagcaaaagagucugcugcuagcaacagggaugaagaauguuccugagauuccaaagggaagaggccuauuuggugcuauagcggguuucauugaaaauggaugggaaggccuaauugaugggugguaugguuucagacaccagaaugcacagggagagggaacugcugcagauuacaaaagcacucaaucggcaauuaaucagaugacaggaaaauuaaaccggcuuauagaaaaaaccaaccaacaauuugaguugauagacaaugaauucacugagguagagaagcaaauugguaaugugauaaauuggaccagagacucuauaacagaaguguggucauacaaugcugaacucuugguagcaauggagaaccagcauacaauugaucuggcugauucagaaaugaacaaacuguacgaacgagugaaaagacagcugagagagaaugcugaagaagauggcacugguugcuuugaaauauuucacaaaugugaugaugacuguauggccaguauuagaaauaacaccuaugaucacagcaaauacagggaggaagcaaugcaaaauagaauacagauugacccagucaaacuaagcagcggcuacaaggaugugauacuuugguuuagcuucggggcaucauguuucauacuucuggccauugcaaugggccuugucuucauaugugugaaaaauggaaacaugcggugcacuauuuguauauaa

SEQ ID NO: 42272 - RNA, 1683 nt, Artificial Sequence; identical to SEQ ID NO: 42254
  derived and/or modified CDS sequence (wt) from hemagglutinin__InfluenzaA__AGQ81052

SEQ ID NO: 42273 - RNA, 1683 nt, Artificial Sequence
  derived and/or modified CDS sequence (wt) from hemagglutinin__InfluenzaA__AGQ81053
augaacacucaaauccuaguauucgcucugauugcgaucauuccaacaaaugcagacaaaaucugccucggacaucaugcugugucaaacggaaccaaaguaaacacauuaacugaaagaggaguggaagucgucaaugcaacugaaacaguggaacgaacaagcauccccaggaucugcucaaaagggaaaagaacaguugaccucggucaauguggacuccuagggacaaucacugggccaccucaaugugaccaauuccuagaauuuucagccgauuuaauuauugagaggcgagaaggaagugaugucuguuauccugggaaauucgugaaugaagaagcucugaggcaaauucucagggaaucaggcggaaucaacaaggaagcaaugggauucacauacagcggaauaagaacuaauggagcaaccagugcauguaggagaucaggaucuucauucuaugcagaaaugaaauggcuccuaucaaacacagauaaugcugcuuucccgccgaugacuaagucauauaaaaauacaagaaaggccccagcucuaauaauaugggggauccaucauuccggaucaacugcagagcaaaccaagcuauaugggaguggaaacaaaauggugacaguuaggaguucuaauuaucaacaaucuuuugugccgaguccaggagcgggaccacaaguuaauggucaaucuggaaggauugacuuucauuggcuaaugcuaaaucccaaugacacagucaccuuuagcuucaauggggcuuucauagcuccagaccgugcaagcuuccugagagggaaaucuaugggaauccagaguggaguacagguugaugccaauugugaaggggacugcuaucauaguggagggacaauaauaaguaauuugccauuucagaacauagacagcagaguaguaggaaaauguccgagauauguuaagcaaaagagucugcugcuagcaacagggaugaagaauguuccugagauuccaaagggaagaggccuauuuggugcuauagcggguuucauugaaaauggaugggaaggccuaauugaugggugguaugguuucagacaccagaaugcacagggagagggaacugcugcagauuacaaaagcacucaaucggcaauuaaucagaugacaggaaaauuaaaccggcuuauagaaaaaaccaaccaacaauuugaguugauagacaaugaauucacugagguagagaagcaaauugguaaugugauaaauuggaccagagacucuauaacagaaguguggucauacaaugcugaacucuugguagcaauggagaaccagcauacaauugaucuggcugauucagaaaugaacaaacuguacgaacgagugaaaagacagcugagagagaaugcugaagaagauggcacugguugcuuugaaauauuucacaaaugugaugaugacuguauggccaguauuagaaauaacaccuaugaucacagcaaauacaggaaggaagcaaugcaaaauagaauacagauugacccagucaaacuaagcagcggcuacaaagaugugauacuuugguuuagcuucggggcaucauguuucauacuucuagccauugcaaugggccuugucuucauaugugugaaaaauggaaacaugcggugcacuauuuguauauaa

SEQ ID NO: 42274 - RNA, 1683 nt, Artificial Sequence; identical to SEQ ID NO: 42249
  derived and/or modified CDS sequence (wt) from hemagglutinin__InfluenzaA__AGQ81055

SEQ ID NO: 42275 - RNA, 1683 nt, Artificial Sequence; identical to SEQ ID NO: 42249
  derived and/or modified CDS sequence (wt) from hemagglutinin__InfluenzaA__AGQ81056

SEQ ID NO: 42276 - RNA, 1683 nt, Artificial Sequence; identical to SEQ ID NO: 42249
  derived and/or modified CDS sequence (wt) from hemagglutinin__InfluenzaA__AGQ81057

SEQ ID NO: 42277 - RNA, 1683 nt, Artificial Sequence; identical to SEQ ID NO: 42249
  derived and/or modified CDS sequence (wt) from hemagglutinin__InfluenzaA__AGQ81058

SEQ ID NO: 42278 - RNA, 1683 nt, Artificial Sequence; identical to SEQ ID NO: 42265
  derived and/or modified CDS sequence (wt) from hemagglutinin__InfluenzaA__AGQ81059

SEQ ID NO: 42279 - RNA, 1683 nt, Artificial Sequence; identical to SEQ ID NO: 42265
  derived and/or modified CDS sequence (wt) from hemagglutinin__InfluenzaA__AGQ81060

SEQ ID NO: 42280 - RNA, 1683 nt, Artificial Sequence; identical to SEQ ID NO: 42265
  derived and/or modified CDS sequence (wt) from hemagglutinin__InfluenzaA__AGQ81061

SEQ ID NO: 42281 - RNA, 1683 nt, Artificial Sequence
  derived and/or modified CDS sequence (wt) from hemagglutinin__InfluenzaA__AGQ81081
auggaaguaguaucacuaauaacuauacuacuaguaauaacaggaagcaaugcggauaaaaucugcauuggcuaccaaucaacaaacuccaccgaaacuguagacacgcuaaccgaaaacaauguuccugugacacaugccaaagaauugcuucacacagaacacaaugggaugcuaugugcaacaaaucugggacguccucuuauucuagacaccuguaccauugaaggacuaaucuauggcaacccuucuugugauauacugcugggaggaagagaaugguccuauauugucgaaagaccaucggcuguuaauggacuguguuaccccggaaacguagaaaaccuagaagaauuaaggucacuuuuuagcucugcuaguucuuaccaaagaauccagaucuuuccagacacaaucuggaaugugucuuacaguggaacaagcaaagcauguucagauucauucuacagaagcaugaggugguugacucaaaagaacaaugcuuacccuguucaagacgcccaauacacaaauaauagaggaaggaacauucuuuucauguggggcauaaaucacccacccacugauacugcgcagacaaaucuguacacaaggacugacacaacaacaaguguggcgacagaagauauaaauaggaccuucaaaccauugauagggccaaggccucuugucaauggucugcaaggaaggauugacuauuauugggcgguguugagaccaggucagacauugcgaauaagauccaacgggaaucuaaucgcuccaugguauggacacauucuuucaggggagagucacggaagaauccugaaaacggauuuaaacagugguaacuguguagugcaaugucaaacagaaagagguggcuugaauacuacauugccauuccacaacguaagcaaguacgcauuuggaaauugcccaaaauauguuggaguaaagagucucaaauuggcagucggucugaggaaugugccugcuagaucaaguagagggcuauuuggagccauagcugguuucauagaaggagguuggucaggauugguugcugguugguauggguuccagcauucaaaugaucaaggaacugguauggcugcagauagagacucgacucaaaaggcaauugacaaaauaacguccaaaguaaauaauauagucgauaaaaugaacaaacaguaugaaauuauugaucaugaauucagcgagauugaaacuagacucaauaugaucaauaauaagauugaugaucaaauucaagacauaugggcauauaacgcugaauugcuaguacugcuugaaaaucagaaaacgcucgaugagcaugaugcaaauguaaacaaucuguauaacaaagugaagagggcacuggguuccaaugcaguggaagaugggaaaggaugcuucgagcuauaccauaaaugcgauaaccagugcauggagacaauucgaaacgggaccuauaacagaagaaaguauaaagaggaaucaagacuagagagacagaaaauagagggggucaaacuggaaucugaaggaaccuacaaaauccucaccauuuauucgacugucgccucaucucuuguuauugcaaugggguucgcugccuucuuguucugggccauguccaauggaucuugcagaugcaacauuuguauauga

SEQ ID NO: 42282 - RNA, 1683 nt, Artificial Sequence
  derived and/or modified CDS sequence (wt) from hemagglutinin__InfluenzaA__AGQ81086
auggaaguaguaucacuaauaacuauacuacuaguaauaacaggaagcaaugcggauaaaaucugcauuggcuaccaaucaacaaacuccaccgaaacuguagacacgcuaaccgaaaacaauguuccugugacacaugccaaagaauugcuucacacagaacacaaugggaugcuaugugcaacaaaucugggacguccucuuauucuagacaccuguaccauugaaggacuaaucuauggcaacccuucuugugaucuacugcugggaggaagagaaugguccuauauugucgaaagaccaucggcuguuaauggacuguguuaccccggaaacguagaaaaccuagaagaauuaaggucacuuuuuagcucugcuaguucuuaccaaagaauccagaucuuuccagacacaaucuggaaugugucuuacaguggaacaagcaaagcauguucagauucauucuacagaagcaugaggugguugacucaaaagaacaaugcuuacccuguucaagacgcccaauacacaaauaauagaggaaggaacauucuuuucauguggggcauaaaucacccacccacugauacugcgcagacaaaucuguacacaaggacugacacaacaacaaguguggcgacagaagauauaaauaggaccuucaaaccauugauagggccaaggccucuugucaauggucugcaaggaaggauugacuauuauugggcgguguugagaccaggucagacauugcgaauaagauccaacgggaaucuaaucgcuccaugguauggacacauucuuucaggggagagucacggaagaauccugaaaacggauuuaaacagugguaacuguguagugcaaugucaaacagaaagagguggcuugaauacuacauugccauuccacaacguaagcaaguacgcauuuggaaauugcccaaaauauguuggaguaaagagucucaaauuggcagucggucugaggaaugugccugcuagaucaaguagagggcuauuuggagccauagcugguuucauagaaggagguuggucaggauugguugcugguugguauggguuccagcauucaaaugaucaaggaacugguauggcugcagauagagacucgacucaaaaggcaauugacaaaauaacguccaaaguaaauaauauagucgauaaaaugaacaaacaguaugaaauuauugaucaugaauucagcgagauugaaacuagacucaauaugaucaauaauaagauugaugaucaaauucaagacauaugggcauauaacgcugaauugcuaguacugcuugaaaaucagaaaacgcuugaugagcaugaugcaaauguaaacaaucuguauaacaaagugaagagggcacuggguuccaaugcaguggaagaugggaaaggaugcuucgagcuauaccauaaaugcgauaaccagugcauggagacaauucgaaacgggaccuauaacagaagaaaguauaaagaggaaucaagacuagagagacagaaaauagagggggucaaacuggaaucugaaggaaccuacaaaauccucaccauuuauucgacugucgccucaucucuuguuauugcaaugggguucgcugccuucuuguucugggccauguccaauggaucuugcagaugcaacauuuguauauga

SEQ ID NO: 42283 - RNA, 1683 nt, Artificial Sequence
  derived and/or modified CDS sequence (wt) from hemagglutinin__InfluenzaA__AGQ81087
auggaaacaguaucacuaauaacuaugcuacuaguagcaacaguaaucaaugcagauaaaaucugcaucggcuaccaaucaacaaacuccacagaaacuguagacacauuaacagaaaacaaugucccugugacacaugccaaagaauugcuccacacagagcacaaugggaugcugugugcaacaaacuugggacauccucuuauucuagacaccuguaccauugaaggacuaaucuauggcaauccuucuugugaucuacuguuggggggaagagaaugguccuacaucguugagagaccaucggcuguuaauggauuguguuaccccgggaauguagaaaaucuagaagagcuaaggucacuuuuuaguucugcuaguuccuaucaaaggauccagauuuuuccagacacaaucuggaaugugucuuacagugggacaagcaaagcauguucagauucauucuacagaagcaugagaugguugacccaaaagaacaacgcuuacccuauucaagacgcccaauacacaaauaaucgagaaaagaacauucuuuucauguggggcauaaaucacccacccaccgauacugcgcagacaaaucuguacacaagaaccgacacaacaacaaguguggcaacagaagaaauaaauaggaccuucaaaccauugauaggaccaaggccucuugucaaugguuuacagggaagaauugauuauuauuggucgguauugaaaccaggucaaacacugcgaaucagauccaaugggaaucuaauagcuccaugguauggacacauucuuucaggagagagccacggaagaguccugaagacugaucuaaaaagggguagcuguacagugcaaugucagacagaaaaagguggcuuaaacacaacauugccauuccaaaauguaaguaaguaugcauuuggaaacuguucgaaauauguuggagugaagagucucaaacuugcaguaggucugaggaaugugccuucuagaucuaguagaggacuauucggggccauagcuggauucauagagggagguuggucaggacuaguugcugguugguauggauuccagcauucaaaugaccaagggguugguauggcagcagauagagacucaacccaaaaggcaauugauaaaaugacauccaaagugaauaacauagucgauaaaaugaacaaacaauaugaaauuauuaaucaugaauucagugagauugaaacuagacuuaacaugaucaauaauaagaucgaugaucaaauucaagacauaugggcauauaacgcagaguugcuagugcugcuugaaaaccagaaaacacucgaugagcaugaugcaaauguaaacaaucuauauaauaaagugaagagggcauuagguuccaaugcaguggaagaugggaaaggauguuucgagcuauaccacaaaugugaugaccagugcauggagacaauucggaacgggaccuacaacaggaggagguaucaagaggaaucaaaauuggaaagacagaaaauagagggggucaagcuggaaucugaaggaacuuacaaaauccucaccauuuauucgacugucgccucaucucuugugauugcaaugggguuugcugccuucuuguucugggccauguccaaugggucuugcagaugcaacauuuguauauaa

SEQ ID NO: 42284 - RNA, 1683 nt, Artificial Sequence
  derived and/or modified CDS sequence (wt) from hemagglutinin__InfluenzaA__AGQ81092
auggaaguaguaucacuaauaacuauacuacuaguaauaacaggaagcaaugcggauaaaaucugcauuggcuaccaaucaacaaacuccaccgaaacuguagacacgcuaaccgaaaacaauguuccugugacacaugccaaagaauugcuucacacagaacacaaugggaugcuaugugcaacaaaucugggacguccucuuauucuagacaccuguaccauugaaggacuaaucuauggcaacccuucuugugaucuacugcugggaggaagagaaugguccuauauugucgaaagaccaucggcuguuaauggacuguguuaccccggaaacguagaaaaccuagaagaauuaaggucacuuuuuagcucugcuaguucuuaccaaagaauccagaucuuuccagacacaaucuggaaugugucuuacacuggaacaagcaaagcauguucagauucauucuacagaagcaugaggugguugacucaaaagaacaaugcuuacccuguucaagacgcccaauacacaaauaauagaggaaggaacauucuuuucauguggggcauaaaucacccacccacugauacuacgcagacaaaucuguacacaaggacugacacaacaacaaguguggcgacagaagauauaaauaggaccuucaaaccauugauagggccaaggccucuugucaauggucugcaaggaaggauugacuauuauugggcgguguugagaccaggucagacauugcgaauaagauccaacgggaaucuaaucgcuccaugguauggacacauucuuucaggggagagucacggaagaauccugaaaacggauuuaaaaagugguaacuguguagugcaaugucaaacagaaagagguggcuugaauacuacauugccauuccacaacguaagcaaauacgcauuuggaaauugcccaaaauauguuggaguaaagagucucaaauuggcagucggucugaggaaugugccugcuagaucaaguagagggcuauuuggagccauagcugguuucauagaaggagguuggucaggauugguugcugguugguauggguuccagcauucaaaugaucaaggaacugguauggcugcagauagagacucgacucaaaaggcaauugacaaaauaacguccaaaguaaauaauauagucgauaaaaugaacaaacaguaugaaauuauugaucaugaauucagcgagauugaaacuagacucaauaugaucaauaauaagauugaugaucaaauucaagacauaugggcauauaacgcugaguugcuaguacugcuugaaaaucagaaaacacucgaugagcaugaugcaaauguaaacaaucuguauaacaaagugaagagggcacuggguuccaaugcaguggaagaugggaaaggaugcuucgagcuauaccauaaaugcgauaaccagugcauggagacaauucgaaacgggaccuauaacagaagaaaguauaaagaggaaucaagacuagagagacagaaaauagagggggucaaacuggaaucugaaggaaccuacaaaauccucaccauuuauucgacugucgccucaucucuuguuauugcaaugggguucgcugccuucuuguucugggccauguccaauggaucuugcagaugcaacauuuguauauga

SEQ ID NO: 42285 - RNA, 1683 nt, Artificial Sequence
  derived and/or modified CDS sequence (wt) from hemagglutinin__InfluenzaA__AGQ81095
auggaaguaguaucacuaauaacuauacuacuaguaauaacaguaagcaaugcggauaaaaucugcauuggcuaccaaucaacaaacuccaccgaaacuguaaacacgcuaaccgaagacaauguuccugugacacaugccaaagaauugcuucacacagaacacaaugggaugcuaugugcaacaaaucugggacgcccucuuauucuagacaccuguaccauugaaggacuaaucuauggcaacccuucuugugaucuacugcugggaggaagagaaugguccuauauugucgaaagaccaucugcuguuaauggacuguguuaccccggaaacguagaaaaccuagaagaauuaaggucacuuuuuagcucugcuaguucuuaccaaagaauccagaucuuuccagacacaaucuggaaugugucuuacaguggaacaagcaaagcauguucagauucauucuacagaagcaugagaugguugacucaaaagaacaaugcuuacccuguucaagacgcccaauacacaaauaauagaggaaggaacauucuuuucauguggggcauaaaucacccacccacugauacugcgcagacaaaucuguacacaaggacugacacaacaacaaguguggcgacagaagauauaaauaggaccuucaaaccauugauagggccaaggccucuugucaauggucugcaaggaaggauugacuauuauugggcgguguugaaaccaggucagacauugcgaauaagauccaacgggaaucuaaucgcuccaugguauggacacauucuuucaggggagagucacggaagaauccugaaaacggauuuaaacagcgguaacuguguagugcaaugucaaucagaaagagguggcuugaauacuacauugccauuccacaacguaagcaaguacgcauuuggaaauugcccaaaauauguuggaguaaagagucucaaauuggcagucggucugaggaaugugccugcuagaucaaguagagggcuauuuggagccauagcugguuucauagaaggagguuggucaggauugguugcuggcugguauggguuccagcauucaaaugaucaggggacugguauggcugcagauagagacucgacgcaaaaggcaauugacaaaauaacauccaaaguaaauaauauagucgauaaaaugaacaaacaguaugaaauuauugaucaugaauucagcgagauugaaacuagacuuaauaugaucaauaauaagauugaugaccaaauucaggacauaugggcauauaaugcugaauugcuaguacugcuugaaaaucagaaaacgcucgaugagcaugaugcaaauguaaacaaccuguauaacaaagugaagagggcacuggguuccaaugcaguggaagaugggaaaggaugcuucgagcuauaccauaaaugcgauaaccagugcauggagacaauucgaaacggaaccuaugacagaagaaaguauaaagaggaaucaagacuagagagacagaaaauagagggggucaaacuggaaucugaaggaaccuacaaaauccucaccauuuauucgacugucgccucaucucuuguuauugcaaugggguucgcugccuucuuguucugggccauguccaauggaucuugcaggcgcaacauuuguauauaa

SEQ ID NO: 42286 - RNA, 1683 nt, Artificial Sequence
  derived and/or modified CDS sequence (wt) from hemagglutinin__InfluenzaA__AGQ81099
auggaaacaguaucacuaauaacuauacuacuaauaguaacaguaagcaaugcagauaaaauuugcaucggcuaccaaucaacaaacuccacagaaacuguagacacacuaacagaaaacaauguccccguuacacaugccaaagaauugcuccacacagagcacaaugggaugcugugugcuacaaauuugggacauccucuuauucuagacaccuguaccauugaaggacuaaucuacggcaauccuucuugugaucuacuguugggaggaagagaaugguccuacaucgucgagagaccaucggcuguaaauggauuguguuaccccgggaauguagaaaaucuagaagagcuaaggucacuuuuuaguucugcuaauucuuaucaaaggauccagaucuuuccagacacaaucuggaaugugucuuacagugggacaagcaaagcauguucagauuccuucuauagaagcaugagaugguugacccaaaagaacaacgcuuaccccacucaagaugcccaauacacaaauaaucgagagaagaacauucuuuucauguggggcauaaaucacccacccaccgauacugcgcagacaaaucuguacacaagaaccgacacaacaacaaguguggcaacagaagaaauaaauaggaccuucaaaccauugauaggaccgaggccucuugucaaugguuugcagggaagaauugauuauuauuggucgguauugaaaccaggucaaacauugcgaauaagauccaaugggaaccuaauagcuccaugguauggacacauucuuucaggagagagucacggaagaauccugaagaccgaucuaaaaagggguagcuguacgguacaaugucagacagaaaaagguggauuaaacacaacauugccauuccaaaauguaaguaaguaugcauuuggaaacugcucgaaauauguuggaguaaagagucucaaacuugcaguuggucugaggaaugugccuucuagaucaaguagaggacuauucggagccauagcuggauucauagaaggagguuggucaggacuaguugcugguugguauggauuccagcauucaaaugaccaagggguugguauggcagcagauagagacucaacccaaaaggcaauugauaaaguaacauccaaagugaauaacauagucgacaaaaugaacaaacaguaugaaauuauugaucaugaauucagcgagguugaaacuagacuuaacaugaucaacaauaagauugaugaucaaauucaagacauaugggcauauaacgcagaauugcuugugcugcuugaaaaccagaagacacucgaugagcaugaugcaaauguaaauaaucuauauaauaaaguaaagagggcauuggguuccaaugcaguggaagaugggaaaggauguuucgagcuauaccacaaaugugaugaccagugcauggagacaauucggaacgggaccuacaacaggaggaaguaucaagaggaaucaaaauuagaaagacagaaaauagagggggucaagcuggaaucugaaggaacuuacaaaauccucaccauuuauucgacugucgccucaucucuugugauugcaaugggguuugcugccuucuuguucugggcuauguccaauggaucuugcaggcgcaacauuuguauauaa

SEQ ID NO: 42287 - RNA, 1683 nt, Artificial Sequence
  derived and/or modified CDS sequence (wt) from hemagglutinin__InfluenzaA__AGQ81100
auggaaacaguaucacuaauaacuaugcuacuaguagcaacaguaaucaaugcagauaaaaucugcaucggcuaccaaucaacaaacuccacagaaacuguagacacauuaacagaaaacaaugucccugugacacaugccaaagaauugcuccacacagagcacaaugggaugcugugugcaacaaacuugggacauccucuuauucuagacaccuguaccauugaaggacuaaucuauggcaauccuucuugugaucuacuguugggaggaagagaaugguccuacaucguugagagaccaucggcuguuaauggauuguguuaccccgggaauguagaaaaucuagaagagcuaaggucacuuuuuaguucugccaguuccuaucaaaggauccagauuuuuccagacacaaucuggaaugugucuuacagugggacaagcaaagcauguucagauucauucuacagaagcaugagauggcugacccaaaagaacaacgcuuacccuauucaagacgcccaauacacaaauaaucgagaaaagaacauucuuuucauguggggcauaaaucacccacccaccgauacugcgcagacaaaucuguacacaagaaccgacacaacaacaaguguggcaacagaagaaauaaauaggaccuucaaaccauugauaggaccaaggccucuugucaaugguuuacagggaagaauugauuauuauuggucgguauugaaaccaggucaaacacugcgaaucagauccaaugggaaucuaauagcuccaugguauggacacauucuuucaggagagagccacggaagaauccugaagacugaucuaaaaagggguagcuguacagugcaaugucagacagagaaagguggauuaaacacaacauugccauuccaaaauguaaguaaguaugcauuuggaaacuguucgaaauauguuggagugaagagucucaaacuugcaguaggucugaggaaugugccuucuagaucuaguagaggacuauucggggccauagcuggauucauagagggagguuggucaggacuaguugcugguugguauggauuccagcauucaaaugaccaagggguugguauggcagcagauagagacucaacccaaaaggcaauugauaaaauaacauccaaagugaauaacauagucgauaaaaugaacaaacaauaugaaauuauugaucaugaauucagugagguugaaacuagacuuaacaugaucaauaauaagaucgaugaucaaauucaagacauaugggcauauaacgcagaguugcuagugcugcuugaaaaccagaaaacacucgaugagcaugaugcaaauguaaacaaucuauauaauaaagugaagagggcauuagguuccaaugcaguggaagaugggaaaggauguuucgagcuauaccacaaaugugaugaccaguguauggagacaauucggaacgggaccuacaacaggaggagguaucaagaggaaucaaaauuggaaagacagaaaauagagggggucaagcuggaaucugaaggaacuuacaaaauccuuaccauuuauucgacugucgccucaucucuugugauugcaaugggguuugcugccuucuuguucugggccauguccaaugggucuugcaggcgcaacauuuguauauaa

SEQ ID NO: 42288 - RNA, 1683 nt, Artificial Sequence
  derived and/or modified CDS sequence (wt) from hemagglutinin__InfluenzaA__AGQ81123
auggaaguaguaucacuaauaacuauacuacuaguaauaacaguaagcaaugcggauaagaucugcauuggcuaccaaucaacaaacuccaccgaaacuguaaacacgcuaaccgaagacaauguuccugugacacaugcuaaagaauugcuucacacagaacacaaugggaugcucugugcaacaaaucugggacgcccucuuauucuagacaccuguaccauugaaggacuaaucuauggcaacccuucuugugaucuacugcugggaggaagagaaugguccuauauugucgaaagaccaucggcuguuaauggacuguguuaccccggaaacguagaaaaccuagaagaauuaaggucacuuuuuagcucugcuagcucuuaccaaagaauccagaucuuuccagacacaaucuggaaugugucuuacaguggaacaagcaaagcauguucagauucauucuacagaagcaugagaugguugacgcaaaagaacaaugcuuacccuguucaagacgcccaauacacaaauaauaaaggaaggaacauucuuuucauguggggcauaaaucacccacccacugauacugcgcagacaaaucuguacacaaggacugacacaacaacaaguguggcgacagaagauauaaauaggaccuucaaaccauugauagggccaaggccucuugucaacggucuacaaggaaggauugacuauuauugggcaguguugaaaccaggucagacauugcgaauaagauccaacggaaaccuaaucgcuccaugguaugggcacauucuuuuaggggagagucauggaagaauccugaaaacggauuuaaacaguggugacuguguagugcaaugucaaucagaaagagguggcuugaauacuacauugccauuucacaacguaagcaaguacgcauuuggaaauugcccaaaauauguuggaguaaagagucucaaauuggcagucggucugaggaauguaccugcuagaucaacuagagggcuauuuggagccauagcugguuucauagaaggagguuggucaggauugguugcuggcugguauggguuccagcauucaaaugaucagggaacugguauggcugcagauagagacucgacgcaaaaggcaauugacaaaauaacauccaaaguaaauaauauagucgauaaaaugaacaaacaguaugaaauuauugaucaugaauucagcgagauugaaacuagacuuaauaugaucaauaauaagauugacgaucaaauucaggacauaugggcauauaaugcugaauugcuaguacugcuugaaaaucagaaaacgcucgaugagcaugaugcaaauguaaacaaucuguauaacaaagugaagagggcacuggguuccaaugcaguggaagaugggaaaggaugcuucgaguuauaccauaaaugcgauaaccaguguauggagacaauucgaaacgggaccuaugacagaagaaaguauaaagaggaaucaagacuagagagacagaaaauagaggggguuaaacuggaaucugaaggaaccuacaaaauccucaccauuuauucgacugucgccucaucucuuguuauugcaaugggguucgcugccuucuuguucugggccauguccaauggaucuugcagaugcaacauuuguauauga

SEQ ID NO: 42289 - RNA, 1683 nt, Artificial Sequence
  derived and/or modified CDS sequence (wt) from hemagglutinin__InfluenzaA__AGQ81124
auggaaguagcaacacuaauaacuauacuacuaguaauaacaggaagcaaugcggauaaaaucugcauuggcuaccaaucaacaaacuccacagaaacuguagacacgcuaaccgaaaacaauguuccugugacacaugcuaaagaauugcuucauacagagcacaaugggaugcuaugugcaacaaaccuggggcguccucuuauacuagacaccuguaccauugaaggacuaaucuauggcaacccuucuugugaucuaccgcuggaagggagagaaugguccuacauugucgaaagaccaucggcuguuaauggagugugcuaccccggaaauguagaaaaccuagaagaauuaaggucacuuuuuaguuccgcuaguucuuaucaaagaauccagaucuuuccagauucaaucuggaaugugucuuacaguggaacaagcaaagcauguucagauucauucuacagaaacaugaggugguugacucaaaaggacaacaauuacccuguucaagacgcccaauacacaaauaauagaggaaagaacauucuuuucauguggggcauaaaucacccacccacugauacugcacagacaaaucuguacacaaggacugacacaacaacaaguguggcgacggaagauauaaauaggaccuucaaaccauugauagggccaaggccucuugucaauggucuacaaggaaggauugauuauuauugggcgguguuaaaaccaggucagacauugcgaguaagauccaacgggaaucuaaucgcuccaugguaugggcacauucucuuaggggagagucauggaagaauccugaaaacggauuuaaagagugguaacuguguagugcaaugucaaacagaaagaggugguuugaacacuacauugccauuucacaacguaagcaaguacgcauuuggaaauugcccaaaauauauuggaguaaagagucucaaauuggcagucggucugaggaaugugccugcuagaucaaguagaggacuauuuggagccauagcugguuucauagagggagguuggucaggauuaguugcugguugguauggguuccagcauucaaaugaucaaggaaccgguauggcugcagauagagacucaacucaaaaggcaauugacaaaauaacguccaaaguaaauaauauagucgacaaaaugaacaaacaguaugaaauuauugaccaugaauucagcgagauugaaacuagacucaauaugaucaaugauaagauugaugaccaaauucaagacauaugggcauauaaugcugaauugcuaguacugcuugaaaaucaaaagacucucgaugagcaugacgcaaauguaaacaaucuauauaacaaagugaagagggcacuggguuccaaugcaguggaagaugggaaaggaugcuucgaucuauaccauaaaugcgauaaccagugcauggagacaauucgaaacgggaccuauaacagaagaaaguaucagaaggaaucaagacuagagagacagaaaauagagggggucaaacuggaaucugaaggaaccuacaaaauccucaccauuuauucgacugucgccucaucucuuguuauugcaaugggguucgcugccuucuuguucugggccauguccaauggaucuugcagaugcaacauuuguauauaa

SEQ ID NO: 42290 - RNA, 1683 nt, Artificial Sequence
  derived and/or modified CDS sequence (wt) from hemagglutinin__InfluenzaA__AGQ81125
auggaaguagcaacacuaauaacuauacuacuaguaauaacaggaagcaaugcggauaaaaucugcauuggcuaccaaucaacaaacuccacagaaacuguagacacgcuaaccgaaaacaauguuccugugacacaugcuaaagaauugcuucauacagagcacaaugggaugcuaugugcaacaaaccuggggcguccucuuauacuagacaccuguaccauugaaggacuaaucuauggcaacccuucuugugaucuaccgcuggaagggagagaaugguccuacauugucgaaagaccaucggcuguuaauggagugugcuaccccggaaauguagaaaaccuagaagaauuaaggucacuuuuuaguuccgcuaguucuuaucaaagaauccagaucuuuccagauucaaucuggaaugugucuuacaguggaacaagcaaagcauguucagauucauucuacagaagcaugaggugguugacucaaaaggacaacaauuacccuguucaagacgcccaauacacaaauaauagaggaaagaacauucuuuucauguggggcauaaaucacccacccacugauacugcacagacaaaucuguacacaaggacugacacaacaacaaguguggcgacggaagauauaaauaggaccuucaaaccauugauagggccaaggccucuugucaauggucuacaaggaaggauugauuauuauugggcgguguuaaaaccaggucagacauugcgaguaagauccaacgggaaucuaaucgcuccaugguaugggcacauucucuuaggggugagucauggaagaauccugaaaacggauuuaaagagugguaacuguguagugcaaugucaaacagaaagaggugguuugaacacuacauugccauuucacaacguaagcaaguacgcauuuggaaauugcccaaaauauauuggaguaaagagucucaaauuggcagucggucugaggaaugugccugcuagaucaaguagaggacuauuuggagccauagcugguuucauagagggagguuggucaggauuaguugcugguugguauggguuccagcauucaaaugaucaaggaaccgguauggcugcagauagagacucaacucaaaaggcaauugacaaaauaacguccaaaguaaauaauauagucgacaaaaugaacaaacaguaugaaauuauugaccaugaauucagcgagauugaaacuagacucaauaugaucaaugauaagauugaugaccaaauucaagacauaugggcauauaaugcugaauugcuaguacugcuugaaaaucaaaagacucucgaugagcaugacgcaaauguaaacaaucuauauaacaaagugaagagggcacuggguuccaaugcaguggaagaugggaaaggaugcuucgaucuauaccauaaaugcgauaaccagugcauggagacaauucgaaacgggaccuauaacagaagaaaguaucaggaggaaucaagacuagagagacagaaaauagagggggucaaacuggaaucugaaggaaccuacaaaauccucaccauuuauucgacugucgccucaucucuuguuauugcaaugggguucgcugccuucuuguucugggccauguccaauggaucuugcagaugcaacauuuguauauaa

SEQ ID NO: 42291 - RNA, 1683 nt, Artificial Sequence
  derived and/or modified CDS sequence (wt) from hemagglutinin__InfluenzaA__AGQ81126
auggaaacaauaucacuaaugacuauacuacugauaacgacagcaagcaaugcagauaaaaucugcaucggucaccagucaacaaacuccacagaaacuguggacacgcuaacagaaaccaauguuccugugacacaugccaaagaauugcuccaaacagagcacaauggaaugcugugugcgacaaaucuggggcauccccucauucuagacacaugcacuaucgaaggacuaaucuauggcaaccccucuugugaccugcuauuggagggaagagaaugguccuacauagucgaaagacccucagcuguaaacggaacuuguuacccugggaauguagaaaaccuagaggaacucaggacacuuuuuaguuccgccaguuccuaccaaagaauccaaaucuucccagacacaauauggaauguuacuuacacuggaacaagcagaucauguucagguucauucuacaggaguaugagauggcugacucaaaaaagcggguuuuacccuguccaagacgccaaauacacaaauaacagggggaagaacauccucuucgugugggguauacaucacccacacaccuauaccgaccaaacaacuuuguacauaagaaacgacacaacaacaagugugacaacagaggaguugaauagaaucuucaaaccagugauagugccaaggcuucuugucaauggucagcaggggagaauugauuauuauuggucaguacuaaaaccaggccaaacauugcgaguaagauccaaugggaaucuaauugcuccaugguauggacacguucuuucaggagggagccauggaagaauccugaagacugauuuaaaaggugguaauuguguagugcaaugucagacugaaaaggguggauucaacaguacauugcccuuccacaauaucagcaaauaugcauuuggaaccugccccaaauauguaaaagucaauagucucaaacuggcaauuggucugaggaaugugccugcuagaucaaauagaggacuauuuggggcuaucgcugguuucauagaaggagguuggccaggacuaguagcuggcugguaugguuuccagcauucaaaugaucaagggguugguauggccgcagauagggauucaacucaaaaggcaguugauaaaauaacaucuaaggugaauaauauagucgacaagaugaauaagcaauaugaaauaauugaucaugaauucagugagguugaaacuagacucaauaugaucaauaauaagauugaugaccaaauacaagacauaugggcauauaaugcagaacugcuaguacuacuugaaaaccagaaaacgcucgaugagcaugaugcgaacguaaacaaucuauauaacaaggugaagagggcccugggcuccaaugcuauggaagaugggaaagguuguuucgaguuauaccauaagugugaugaucaaugcauggaaacaauucgaaacgggaccuauaauaggagaaaguauagagaggaaucaagauuagaacagcagagaauagaagggguuaaacuggaaucugagggaacuuacaaaauccucacuauuuauucgacugucgccucaucucuugugcuugcgaugggguuugcugccuuccuguucugggccauguccaaugguucuugcaggugcaacauuuguauauaa

SEQ ID NO: 42292 - RNA, 1683 nt, Artificial Sequence
  derived and/or modified CDS sequence (wt) from hemagglutinin__InfluenzaA__AGQ81127
auggaaguagcaacacuaauaacuauacuacuauuaauaacaggaagcaaugcggauaaaaucugcauuggcuaccaaucaacaaacuccacagaaacuguagacacacuaaccgaaaacaauguuccugugacacaugcuaaagaauugcuucacacagagcacaaugggaugcuaugugcaacaaaccuggggcguccucuuauucuagacaccuguaccauugaaggacuaaucuauggcaacccuucuugugaucuaccgcuggaagggagagaaugguccuacauugucgaaagaccaucggcuguuaauggagugugcuaccccggaaauguagaaaaccuagaagaauuaaggucacuuuuuaguucugcuaguucuuaccaaagaauccagaucuuuccagauucaaucuggaaugugucuuacaguggaacaagcaaagcauguucagauucauucuacagaagcaugaggugguugacucaaaagaacaacaauuacccuguucaagacgcccaauacacaaauaauagaggaaagaacauucuuuucauguggggcauaaaucacccacccacugauacugcacagacuaaucuguacacaaggacugacacaacaacaaguguggcgacggaagauauaaauaggaccuucaaaccauugauagggccaaggccucuugucaauggucuacaaggaaggauugauuauuauugggcgguguuaaaaccaggucagacauugcgaguaagauccaacgggaaucuaaucgcuccaugguauggacacauucucuuaggggagagucacggaagaauccugaaaacggauuuaaagagugguaacuguguagugcaaugucaaacagaaagaggugguuugaacacuacauugccauuucacaacguaagcaaguacgcauuuggaaauugcccaaaauauauuggaguaaagagucucaaauuggcagucggucugaggaaugugccugcuagaucaaguagaggacuauuuggagccauagcugguuucauagagggagguuggucaggauuaguugcugguugguauggguuccagcauucaaaugaucaaggaaccgguauggcugcagauagagacucaacucaaaaggcaauugacaaaauaacguccaaaguaaauaauauagucgacaaaaugaacaaacaguaugaaauuauugaccaugaauucagcgagauugaaacuagacucaauaugaucaaugauaagauugaugaccaaauucaagacauaugggcauauaaugcugaauuguuaguacugcuugaaaaucaaaaaacucucgaugagcaugacgcaaauguaaacaaucuauauaacaaagugaagagggcacuggguuccaaugcaguggaagaugggaaaggaugcuuugaucuauaccauaaaugcgauaaccagugcauggagacaauucgaaacgggaccuauaacagaagaaaguaucaggaggaaucaagacuagagagacagaaaauagagggggucaaacuggaaucugaaggaaccuacaaaauccucaccauuuauucgacugucgccucaucucuuguuauugcaaugggguucgcugccuucuuguucugggccaugucuaauggaucuugcagaugcaacauuuguauauaa

SEQ ID NO: 42293 - RNA, 1683 nt, Artificial Sequence
  derived and/or modified CDS sequence (wt) from hemagglutinin__InfluenzaA__AGQ81128
auggaagcagcaacaauaauaacuauacuacuaguaauaacaggaagcaaugcggauaaaaucugcauuggcuaccaaucaacaaacuccacagaaacuguagacacgcuaaccgaaaacaauguuccugugacacaugcgaaagaauugcuucacacagagcacaaugggaugcuaugugcaacaaaccuggggcguccucuuauucuagacaccuguaccauugaaggauuaaucuauggcaacccuucuugugaucuaccgcuggaagggagagaaugguccuacauugucgaaagaccaucggcuguuaauggagugugcuaccccggaaauguagaaaaccuggaggaauuaaggucacuuuuuaguuccgcuaguucuuaccaaagaauccagaucuuuccagauucaaucuggaauguaucuuacaguggaacaagcaaagcauguucagauucauucuacagaagcaugaggugguugacucaaaagaacaacaauuauccuguucaagacgcccaauacacaaauaauagaggaaagaacauucuuuucaugugggguauaaaucacccacccacugauacugcacagacaaaucuguacacaaggacugacacaacaacaaguguggcgacggaagacauaaauaggaccuucaaaccauugauagggccaaggccucuugucaauggucuacaaggaaggauugauuauuauugggcgguguuaaaaccaggucagacauugcgaguaagauccaacgggaaucuaaucgcuccaugguauggacacauucucuuaggggagagucacggaagaauccugaaaacggauuuaaagagugguaacuguguagugcaaugucaaacagaaagaggugguuugaacacuacauugccauuucacaacgugagcaaguacgcauucggaaauugcccaaaauauauuggaguaaagagucucaaauuggcagucggucugaggaaugugccugcuagaucaaguagaggacuauuuggagccauagcugguuucauagagggagguuggucaggauuaguugcugguugguauggguuccagcauucaaaugaucaaggaaccggaauggcugcagauagagacucaacucaaaaggcaauugacaaaauaacguccaaaguaaauaauauagucgacaaaaugaacaaacaguaugauauuauugaccaugaauucagcgagauugaaacuagacucaauaugaucaaugauaagauugaugaccaaauccaagacauaugggcauauaaugcugaauugcuaguacugcuugaaaaucaaaaaacucucgaugagcaugacgcaaauguaaacaaucuauauaacaaagugaagagggcacuggguuccaaugcaguggaagaugggaaaggaugcuucgaucuauaccauaaaugcgauaaccagugcauggagacaauucgaaacgggaccuauaacagaagaaaguaucaggaggaaucaagacuagagagacagaaaauagagggggucaaacuggaaucugaaggaaccuacaaaauccucaccauuuauucgacugucgccucaucucuuguuguugcaaugggguucgcugccuucuuguucugggccaugucuaauggaucuugcagaugcaacauuuguauauaa

SEQ ID NO: 42294 - RNA, 1683 nt, Artificial Sequence
  derived and/or modified CDS sequence (wt) from hemagglutinin__InfluenzaA__AGQ81130
auggagacaguaucacuaauaacuauacuacuaguaguaacaauaggcaaugcagauaaaaucugcaucggcuaccaaucaacaaacuccacagaaacuguagacacacuaacagaaaacaaugucccugugacacaugccaaagaauugcuccacacagagcauaaugggaugcugugugcaacaagcuugggacacccucuuauucuagacaccuguaccauugaaggacuaaucuauggcaauccuucuugugaucuauuguugggaggacgagaaugguccuauaucgucgagagaccaucagcuguuaacggauuguguuaucccgggaauguagaaaaucuagaagagcuaaggucacuuuuuaguucugcuaggucuuaucaaaggauccagauuuucccagacacaaucuggaaugugucuuacagugggacaagcaaagcauguucagauucauucuacagaagcaugagaugguugacucaaaagaacaacgcuuacccuauucaagacgcccaauacacaaauaaucaagaaaagaacauucuuuucauguggggcauaaaucacccacccaccgauacugugcagacaaaucuguacacaagaaccgacacaacaacgaguguggcaacagaagaaauaaauaggaccuucaaaccauugauaggaccaaggccucuugucaaugguuugcagggaagaauugauuauuauuggucgguauugaaaccgggucaaacacugcgaauaagaucuaaugggaaucuaauagcuccaugguauggacacauucuuucaggagagagccacggaagaauccuaaagacugauuuaaaaagggguagcugcacagugcaaugucagacagaaaaaggcggcuuaaacacaacauugccauuccaaaacguaaguaaguacgcauuuggaaacugcucuaaauacauuggcaugaagagucucaaacuugcaguuggucugaggaaugugccuucuagaucuaguagaggacuauucggggccauagcaggauuuauagagggagguuggucaggacuaguugcuggcugguauggauuccagcauucaaaugaccaagggguugguauggcagcagauagagacucaacccaaaaggcaauugauaaaauaacauccaaagugaauaacauagucgacaaaaugaacaagcaguaugaaauuauugaucaugaauucagcgagguugaaacuagacuuaacaugaucaauaauaagauugaugaucagauccaagauauaugggcauauaaugcagaauugcuaguucugcuugaaaaccaaaaaacacucgaugagcaugaugcaaauguaaacaaucuauauaauaaagugaagagggcauuggguuucaaugcgguggaagaugggaaaggauguuucgagcuauaccacaaaugugaugaccagugcauggagacaauucgaaacgggaccuacaacaggaggaaguaucaagaggaaucaaaauuagaaagacagaaaauagagggggucaagcuggaaucugaaggaacuuacaagauccucaccauuuauucgacugucgccucaucucuugugauugcaaugggguuugcugccuucuuguucugggccauguccaaugggucuugcagaugcaacauuuguauauaa

SEQ ID NO: 42295 - RNA, 1683 nt, Artificial Sequence
  derived and/or modified CDS sequence (wt) from hemagglutinin__InfluenzaA__AGQ81132
auggaaacaauaucacuaaugacuauacuacugauaacgacagcaagcaaugcagauaaaaucugcaucggucaccagucaacaaacuccacagaaacuguggacacgcuaacagaaaccaauguuccugugacacaugccaaagaauugcuccaaacagagcacaauggaaugcugugugcgacaaaucuggggcauccccucauucuagacacaugcacuaucgaaggacuaaucuauggcaaccccucuugugaccugcuauuggagggaagagaaugguccuacauagucgaaagacccucagcuguaaacggaacuuguuacccugggaauguagaaaaccuagaggaacucaggacacuuuuuaguuccgccaguuccuaccaaagaauccaaaucuucccagacacaauauggaauguuacuuacacuggaacaagcagaucauguucagguucauucuacaggaguaugagauggcugacucaaaaaagcggguuuuacccuguccaagacgccaaauacacaaauaacagggggaagaacauccucuucgugugggguauacaucacccacacaccuauaccgaccaaacaacuuuguacauaagaaacgacacaacaacaagugugacaacagaggaguugaauagaaucuucaaaccagugauagugccaaggcuucuugucaauggucagcaggggagaauugauuauuauuggucaguacuaaaaccaggccaaacauugcgaguaagauccaaugggaaucuaauugcuccaugguauggacacguucuuucaggagggagccauggaagaauccugaagacugacuuaaaaggugguaauuguguagugcaaugucaaacugaaaaggguggauucaacaguacauugcccuuccacaauaucagcaaauaugcauuuggaaccugccccaaauauguaaaagucaauagucucaaacuggcaauuggucugaggaaugugccugcuagaucaaauagaggacuauuuggggcuaucgcugguuucauagaaggagguuggccaggacuaguagcuggcugguaugguuuccagcauucaaaugaucaagggguugguauggccgcagauagggauucaacucaaaaggcaguugauaaaauaacaucuaaggugaauaauauagucgacaagaugaauaggcaauaugaaauaauugaucaugaauucagugagguugaaacuagacucaauaugaucaauaauaagauugaugaccaaauacaagacauaugggcauauaaugcagaacugcuaguacuacuugaaaaccagaaaacgcucgaugagcaugaugcgaacguaaacaaucuauauaacaaggugaagagggcccugggcuccaaugcuauggaagaugggaaagguuguuucgaguuauaccauaagugugaugaucaaugcauggaaacaauucgaaacgggaccuauaauaggagaaaguauagagaggaaucaagauuagaacagcagagaauagaagggguuaaacuggaaucugagggaacuuacaaaauccucacuauuuauucgacugucgccucaucucuugugcuugcgaugggguuugcugccuuccuguucugggccauguccaaugguucuugcaggugcaacauuuguauauaa

SEQ ID NO: 42296 - RNA, 1683 nt, Artificial Sequence
  derived and/or modified CDS sequence (wt) from hemagglutinin__InfluenzaA__AGQ81133
auggaaacaauaucacuaaugacuauacuacugauaacgacagcaagcaaugcagauaaaaucugcaucggucaccagucaacaaacuccacagaaacuguggacacgcuaacagaaaccaauguuccugugacacaugccaaagaauugcuccaaacagagcacaauggaaugcugugugcgacaaaucuggggcauccccucauucuagacacaugcacuauugaagggcuaaucuauggcaaccccucuugugaccugcuauuggagggaagagaaugguccuacauagucgaaagacccucagcuguaaacggaacuuguuacccugggaauguagaaaaccuagaggaacucaggacacuuuuuagcuccgccaguuccuaccaaagaauccaaaucuucccagacacaauauggaauguuacuuacacuggaacaagcagaucauguucagguucauucuacaggaguaugagauggcugacucaaaaaagcggguuuuacccuguccaagacgccaaauacacaaauaacagggggaagaacauccucuucgugugggguauacaucacccacauaccuauaccgaccaaacaacuuuguacauaagaaacgacacaacaacaagugugacaacagaggaguugaauagaaucuucaaaccagugauagugccaaggcuucuugucaauggucagcaggggagaauugauuauuauuggucaguacuaaaaccaggccaaacauugcgaguaagauccaaugggaaucuaauugcuccaugguauggacacauucuuucaggagggagccauggaagaauccugaagacugauuuaaaaagugguaauuguguagugcaaugucagacugaaaaggguggauucaacaguacauugcccuuccacaauaucagcaaauaugcauuuggaaccugccccaaauauguaaaagucaauagucucaaacuggcaauuggucugaggaaugugccugcuagaucaaauagaggacuauuuggggcuaucgcugguuucauagaaggagguuggccaggacuaguagcuggcugguaugguuuccagcauucaaaugaucaagggguugguauggccgcagauagggauucaacucaaaaggcaguugauaaaauaacaucuaaggugaauaauauagucgacaagaugaauaagcaauaugaaauaauugaucaugaauucagugagguugaaacuagacucaauaugaucaauaauaagauugaugaccaaauacaagacauaugggcauauaaugcagaacugcuaguacuacuugaaaaccagaaaacgcucgaugagcaugaugcgaacguaaacaaucuauauaacaaggugaagagggcccugggcuccaaugcuauggaagauggaaaagguuguuucgaguuauaccauaagugugaugaucaaugcauggaaacaauucgaaacgggaccuauaauaggagaaaguauagagaggaaucaagauuagaacagcagagaauagaagggguuaaacuggaaucugagggaacuuacaaaauccucacuauuuauucgacugucgccucaucucuugugcuugcgaugggguuugcugccuuccuguucugggccauguccaaugguucuugcaggugcaacauuuguauauaa

SEQ ID NO: 42297 - RNA, 1683 nt, Artificial Sequence
  derived and/or modified CDS sequence (wt) from hemagglutinin__InfluenzaA__AGQ81134
auggaaacaauaucacuaaugacuauacuacugauaacgacagcaagcaaugcagauaaaaucugcaucggucaccagucaacaaacuccacagaaacuguggacacgcuaacagaaaccaauguuccugugacacaugccaaagaauugcuccaaacagagcacaauggaaugcugugugcgacaaaucuggggcauccccucauucuagacacaugcacuauugaagggcuaaucuauggcaaccccucuugugaccugcuauuggagggaagagaaugguccuacauagucgaaagacccucagcugcaaacggaaccuguuacccugggaauguagaaaacccagaggaacucaggacacuuuuuagcuccgccaguuccuaccaaagaauccaaaucuucccagacacaauauggaauguuacuuacacuggaacaagcagaucauguucagguucauucuacaggaguaugagauggcugacucaaaaaagcggguuuuacccuguccaagacgccaaauacacaaauaacagggggaagaacauccucuucgugugggguauacaucacccacacaccuauaccgaccaaacaacuuuguacauaagaaacgacacaacaacaagugugacaacagaggaguugaauagaaucuucaaaccagugauagugccaaggcuucuugucaauggucagcaggggagaauugauuauuauuggucaguacuaaaaccaggccaaacauugcgaguaagauccaaugggaaucuaauugcuccaugguauggacacguucuuucaggagggagccauggaagaauccugaagacugauuuaaaaagugguaauuguguagugcaaugucagacugaaaaggguggauucaacaguacauugcccuuccacaauaucagcaaauaugcauuuggaaccugccccaaauauguaaaagucaauagucucaaacuggcaauuggucugaggaaugugccugcuagaucaaauagaggacuauuuggggcuaucgcugguuucauagaaggagguuggccaggacuaguagcuggcugguaugguuuccagcauucaaaugaucaagggguugguauggccgcagauagggauucaacucaaaaggcaguugauaaaauaacaucuaaggugaauaauauagucgacaagaugaauaagcaauaugaaauaauugaucaugaauucagugagguugaaacuagacucaauaugaucaauaauaagauugaugaccaaauacaagacauaugggcauauaaugcagaacugcuaguacuacuugaaaaccagaaaacgcucgaugagcaugaugcgaacguaaacaaucuauauaacaaggugaagagggcccugggcuccaaugcuauggaagaugggaaagguuguuucgaguuauaccauaagugugaugaucaaugcauggaaacaauucgaaacgggaccuauaauaggagaaaguauagagaggaaucaagauuagaacagcagagaauagaagggguuaaacuggaaucugagggaacuuacaaaauccucacuauuuauucgacugucgccucaucucuugugcuugcgaugggguuugcugccuuccuguucugggccauguccaaugguucuugcaggugcaacauuuguauauaa

SEQ ID NO: 42298 - RNA, 1683 nt, Artificial Sequence
  derived and/or modified CDS sequence (wt) from hemagglutinin__InfluenzaA__AGQ81135
auggaaguagcaacaauaauaacuauacuacuaguaauaacaggaagcaaugcggauaaaaucugcauuggcuaccaaucaacaaacuccacagaaacuguagacacgcuaaccgaaaacaauguuccugugacacaugcuaaagaauugcuccacacagagcacaaugggaugcuaugugcaacaaaccuggggcguccucuuauucuagacaccuguaccauugaaggacuaaucuauggcaacccuucuugugaucuaccgcuggaagggagagaaugguccuacauugucgaaagaccaucggcuguuaauggagugugcuaccccggaaauguagaaaaccuagaagaauuaaggucacuuuuuaguuccgcuaguucuuaccaaagaauccagaucuuuccagauucaaucuggaaugugucuuacaguggaacaagcaaagcauguucagauucauucuacagaagcaugaggugguugacucaaaagaacaacaauuacccuguucaagacgcccaauacacaaauaauagaggaaagaacauucuuuucauguggggcauaaaucacccacccacugauaaugcacagacaaaucuauacacaaggacugacacaacaacaaguguggcgacggaagauauaaauaggaccuucaaaccauugauagggccaaggccucuugucaauggucuacaaggaaggauugauuauuauugggcgguguuaaaaccaggucagacauugcgaguaagauccaacgggaaucuaaucgcuccaugguauggacacauucucuuaggggagagucacggaagaauccugaaaacggauuuaaaaagugguaacuguguagugcaaugucaaacagaaagaggugguuugaacacuacauugccauuucacaacguaagcaaguacucauuuggaaauugcccaaaauauauuggaguaaagagucucaaauuggcagucggucugaggaaugugccugcuagaucaaguagaggacuauuuggagccauagcugguuucauagagggagguuggucaggauuaguugcugguugguauggguuccagcauucaaaugaucaaggaaccgguauggcugcagauagagacucaacucaaaaggcaauugacaaaauaacguccaaaguaaauaauauagucgacaaaaugaacaaacaguaugaaauuauugaccaugaauucaacgagauugaaacuagacucaauaugaucaauaauaagauugaugaccaaauucaagacauaugggcauauaaugcugaauugcuaguacugcuugaaaaucaaaaaacucucgaugagcaugacgcaaauguaaacaaucuauauaacaaagugaagagggcacuggguuccaaugcaguggaagaugggaaaggaugcuucgaucuauaccauaaaugugauaaccagugcauggagacaauucgaaacgggaccuauaacaggagaaaguaucaggaggaaucaagacuagagagacagaaaauagagggggucaaacuggaaucugaaggaaccuacaaaauccucaccauuuauucgacugucgccucaucucuuguuauugcaaugggguucgcugccuucuuguucugggccauguccaauggaucuugcagaugcaacauuuguauauaa

SEQ ID NO: 42299 - RNA, 1683 nt, Artificial Sequence
  derived and/or modified CDS sequence (wt) from hemagglutinin__InfluenzaA__AGQ81136
auggaaacaauaucacuaaugacuauacuacugauaacgacagcaagcaaugcagauaaaaucugcaucggucaccagucaacaaacuccacagaaacuguggacacgcuaacagaaaccaauguuccugugacacaugccaaagaauugcuccaaacagagcacaauggaaugcugugugcgacaaaucuggggcauccccucauuuuagacacaugcacuaucgaaggacuaaucuauggcaaccccucuugugaccugcuauuggagggaagagaaugguccuacauagucgaaagacccucagcuguaaacggaacuuguuacccugggaauguagaaaaccuagaggaacucaggacacuuuuuaguuccgccaguuccuaccaaagaauccaaaucuucccagacacaauauggaauguuacuuacacuggaacaagcagaucauguucagguucauucuacaggaguaugagauggcugacucaaaaaagcggguuuuacccuguccaagacgccaaauacacaaauaacagggggaagaacauccucuucgugugggguauacaucacccacacaccuauaccgaccaaacaacuuuguacauaagaaacgacacaacaacaagugugacaacagaggaguugaauagaaucuucaaaccagugauagugccaaggcuucuugucaauggucagcaggggagaauugauuauuauuggucagugcuaaaaccaggccaaacauugcgaguaagauccaaugggaaucuaauugcuccaugguauggacacguucuuucaggagggagccauggaagaauccugaagacugacuuaaaaggugguaauuguguagugcaaugucaaacugaaaaggguggauucaacaguacauugcccuuccacaauaucagcaaauaugcauuuggaaccugccccaaauauguaaaagucaauagucucaaacuggcaauuggucugaggaaugugccugcuagaucaaauagaggacuauuuggggcuaucgcugguuucauagaaggagguuggccaggacuaguagcuggcugguaugguuuccagcauucaaaugaucaagggguugguauggccgcagauagggauucaacucaaaaggcaguugauaaaauaacaucuaaggugaauaauauagucgacaagaugaauaggcaauaugaaauaauugaucaugaguucagugagguugaaacuagacucaauaugaucaauaauaagauugaugaccaaauacaagacauauggacauauaaugcagaacugcuaguacuacuugaaaaccagaaaacgcucgaugagcaugaugcgaacguaaacaaucuauauaacaaggugaagagggcccugggcuccaaugcuauggaagaugggaaagguuguuucgaguuauaccauaagugugaugaucaaugcauggaaacaauucgaaacgggaccuauaauaggagaaaguauagagaggaaucaagauuagaacagcagagaauagaagggguuaaacuggaaucugagggaacuuacaaaauccucacuauuuauucgacugucgccucaucucuugugcuugcgaugggguuugcugccuuccuguucugggccauguccaaugguucuugcaggugcaacauuuguauauaa

SEQ ID NO: 42300 - RNA, 1683 nt, Artificial Sequence
  derived and/or modified CDS sequence (wt) from hemagglutinin__InfluenzaA__AGQ81137
auggaaacaauaucacuaaugacuauacuacugauaacgacagcaagcaaugcagauaaaaucugcaucggucaccagucaacaaacuccacagaaacuguggacacgcuaacagaaaccaauguuccugugacacaugccaaagaauugcuccaaacagagcacaauggaaugcugugugcgacaaaucuggggcauccccucauuuuagacacaugcacuaucgaaggacuaaucuauggcaaccccucuugugaccugcuauuggagggaagagaaugguccuacauagucgaaagacccucagcuguaaacggaacuuguuacccugggaauguagaaaaccuagaggaacucaggacacuuuuuaguuccgccaguuccuaccaaagaauccaaaucuucccagacacaauauggaauguuacuuacacuggaacaagcagaucauguucagguucauucuacaggaguaugagauggcugacucaaaaaagcggguuuuacccuguccaagacgccaaauacacaaauaacagggggaagaacauccucuucgugugggguauacaucacccacacaccuauaccgaccaaacaacuuuguacauaagaaacgacacaacaacaagugugacaacagaggaguugaauagaaucuucaaaccagugauagugccaaggcuucuugucaauggucagcaggggagaauugauuauuauuggucagugcuaaaaccaggccaaacauugcgaguaagauccaaugggaaucuaauugcuccaugguauggacacguucuuucaggagggagccauggaagaauccugaagacugacuuaaaaggugguaauuguguagugcaaugucaaacugaaaaggguggauucaacaguacauugcccuuccacaauaucagcaaauaugcauuuggaaccugcccuaaauauguaaaagucaauagucucaaacuggcgauuggucugaggaaugugccugcuagaucaaauagaggacuauuuggggcuaucgcugguuucauagaaggagguuggccaggacuaguagcuggcugguaugguuuccagcauucaaaugaucaagggguugguauggccgcagauagggauucaacucaaaaggcaguugauaaaauaacaucuaaggugaauaauauagucgacaagaugaauaggcaauaugaaauaauugaucaugaauucagugagguugaaacuagacucaauaugaucaauaauaagauugaugaccaaauacaagacauaugggcauauaaugcagaacugcuaguacuacuugaaaaccagaaaacgcucgaugagcaugaugcgaacguaaacaaucuauauaacaaggugaagagggcccugggcuccaaugcuauggaagaugggaaagguuguuucgaguuauaccauaagugugaugaucaaugcauggaaacaauucgaaacgggaccuauaauaggagaaaguauagagaggaaucaagauuagaacagcagagaauagaagggguuaaacuggaaucugagggaacuuacaaaauccucacuauuuauucgacugucgccucaucucuugugcuugcgaugggguuugcugccuuccuguucugggccauguccaaugguucuugcaggugcaacauuuguauauaa

SEQ ID NO: 42301 - RNA, 1683 nt, Artificial Sequence
  derived and/or modified CDS sequence (wt) from hemagglutinin__InfluenzaA__AGQ81138
auggaagcagcaacaauaauaacuauacuacuagcaauaacaggaagcaaugcggacaaaaucugcauuggcuaccaaucaacaaacuccacagaaacuguagacacgcuaaccgaaaacaacguuccugugacacaugcuaaagaauugcuucacacagagcacaaugggaugcuaugugcaacaaaccuggggcguccucuuauucuagacaccuguaccauugaaggauuaaucuauggcaacccuucuugugaucuaccgcuggaaggaagagaaugguccuacauugucgaaagaccaucagcuguuaauggagugugcuacccaggacacguagaaaaccuggaagaauuaaggucacuuuuuaguuccgcuaguucuuaccaaagaguccagaucuuuccagauucaaucuggaauguaucuuacaguggaacaagcaaagcauguucagauucauucuacagaagcaugaggugguuaacucaaaagaacaacaauuacccuguucaagacgcccaauacacaaauaauaaaggaaagaacauucuuuucauguggggcauaaaucacccacccacugauacugcacagacaaaucuguacacaaggacugacacaacaacaaguguggcgacggaagacauaaauaggaccuucaaaccauugauagggccaaggccucuugucaauggucuacaaggaaggauugauuauuauugggcgguguuaaaaccaggucagacauugcgaguaagauccaacgggaaucuaaucgcuccaugguauggacacauucucuuaggggagagucacggaagaauccugaaaacggauuuaaagagugguaacuguguagugcaaugucaaacagaaagaggugguuugaacacuacauugccauuucacaacgugagcaaguacgcauucggaaauugcccaaaauauauuggaguaaagagucucaaauuggcagucggucugaggaaugugcaugcuagaucaaguagaggacuauuuggagccauagcugguuucauagagggagguuggucaggauuaguugcugguugguauggguuccagcauucaaaugaucaaggaaccggaauggcugcagauagagacucaacucaaaaggcaauugacaaaauaacguccaaaguaaauaauauagucgacaaaaugaacaaacaguaugaaauuauugaccaugaauucagcgagauugaaacuagacucaauaugaucaaugauaagauugaugaccaaauucaagacauaugggcauauaaugcugaauugcuaguacugcuugaaaaucaaaaaacucucgaugagcaugacgcaaauguaaacaaucuauauaacaaagugaagagggcacuggguuccaaugcaguggaagaugggaaaggaugcuucgaucuauaccauaaaugcgauaaccagugcauggagacaauucgaaacgggaccuauaacaggagaaaguaucaggaggaaucaagacuagagagacagaaaauagagggggucaaacuggaaucugaaggaaccuacaaaauccucaccauuuauucgacugucgccucaucucuuguuauugcaaugggguucgcugccuucuuguucugggccaugucuaauggaucuugcagaugcaacauuuguauauaa

SEQ ID NO: 42302 - RNA, 1683 nt, Artificial Sequence
  derived and/or modified CDS sequence (wt) from hemagglutinin__InfluenzaA__AGQ81139
auggaaguagcaacaauaauaacuauacuacuaguaauaacaggaggcaaugcggauaaaaucugcauuggcuaucaaucaacaaacuccacagaaacuguagacacgcuaaccgaaaacaauguuccugugacacaugcuaaagaauugcuccacacagagcacaaugggaugcuaugugcaacaaaccuggggcguccucuuauucuagacaccuguaccauugaaggacuaaucuauggcaacccuucuugugaucuaccgcuggaagggagagaaugguccuacauugucgaaagaucaucggcuguuaauggagugugcuaccccggaaauguagaaaaccuagaagaauuaaggucacuuuuuaguuccgcuaguucuuaccaaagaauccagaucuuuccagauucaaucuggaaugugucuuacaguggaacaagcaaagcauguucagauucauucuacagaagcaugaggugguugacucaaaagaacaacaauuacccuguucaagacgcccaauacacaaauaauagaggaaagaacauucuuuucauguggggcauaaaucacccacccacugauaaugcacagacaaaucuauacacaaggacugacacaacaacaaguguggcgacggaagauauaaauaggaccuucaaaccauugauagggccaaggccucuugucaauggucuacaaggaaggauugauuauuauugggcgguguuaaaaccaggucagacauugcgaguaagauccaacgggaaucuaaucgcuccaugguauggacacauucucuuaggggagagucacggaagaauccugaaaacggauuuaaaaagugguaacuguguagugcaaugucaaacagaaagaggugguuugaacacuacauugccauuucacaacguaagcaaguacucauuuggaaauugcccaaaauauauuggaguaaagagucucaaauuggcagucggucugaggaaugugccugcuagaucaaguagaggacuauuuggagccauagcugguuucauagagggagguuggucaggauuaguugcugguugguauggguuccagcauucaaaugaucaaggaaccgguauggcugcagauagagacucaacucaaaaggcaauugacaaaauaacguccaaaguaaauaauauagucgacaaaaugaacaaacaguaugaaauuauugaccaugaauucagcgagauugaaacuagacucaauaugaucaauaauaagauugaugaccaaauucaagacauaugggcauauaaugcugaauugcuaguacugcuugaaaaucaaaaaacucucgaugagcaugacgcaaauguaaacaaucuauauaacaaagugaagagggcacuggguuccaaugcaguggaagaugggaaaggaugcuucgaucuauaccauaaaugugauaaccagugcauggagacaauucgaaacgggaccuauaacaggagaaaguaucaggaggaaucaagacuagagagacagaaaauagagggggucaaacuggaaucugaaggaaccuacaaaauccucaccauuuauucgacugucgccucaucucuuguuauugcaaugggguucgcugccuucuuguucugggccauguccaauggaucuugcagaugcaacauuuguauauaa

SEQ ID NO: 42303 - RNA, 1683 nt, Artificial Sequence
  derived and/or modified CDS sequence (wt) from hemagglutinin__InfluenzaA__AGQ81141
auggaagcagcaacaauaauaacuauacuacuaguaauaacaggaagcaaugcggauaaaaucugcauuggcuaccaaucaacaaacuccacagaaacuguagacacgcuaaccgaaaacaauguuccugugacacaugcgaaagaauugcuucacacagagcacaaugggaugcuaugugcaacagaccuggggcguccucuuauucuagacaccuguaccauugaaggauuaaucuauggcaacccuucuugugaucuaccgcuggaagggagagaaugguccuacauuguugaaagaccaucggcuguuaauggagugugcuacccuggaaauguagaaaaccuggaagaauuaaggucacuuuuuaguuccgcuaguucuuaccaaagaauccagaucuuuccagauucaaucuggaauguaucuuacaguggaacaagcaaagcauguucagauucauucuacagaagcaugaggugguugacucaaaagaacaacaauuauccuguucaagacgcccaauacacaaauaauagaggaaagaacauucuuuucaugugggguauaaaucacccacccacugauacugcacagacaaaucuguacacaaggacugacacaacaacaaguguggcgacggaagacauaaauagaaccuucaaaccauugauagggccaaggccucuugucaauggucuacaaggaaggauugauuauuauugggcgguguuaaaaccaggucagacauugcgaguaagauccaacgggaaucuaaucgcuccaugguauggacacauucucuuaggggagagucacggaagaauccugaaaacggauuuaaagagugguaacuguguagugcaaugucaaacagaaagaggugguuugaacacuacauugccauuucacaacgugagcaaguacgcauucggaaauugcccaaaauauauuggaguaaagagucucaaauuggcagucggucugaggaaugugccugcuagaucacguagaggacuauuuggagccauagcugguuucauagagggagguuggacaggauuaguugcugguugguauggguuccagcauucaaaugaucaaggaaccggaauggcugcagauagagacucaacucaaaaggcaauugacaaaauaacguccaaaguaaauaauauagucgacaaaaugaacaaacaguaugauauuauugaccaugaauucagcgagauugaaacuagacucaauaugaucaaugauaagauugaugaccaaauccaagacauaugggcauauaaugcugaauugcuaguacugcuugaaaaucaaaaaacucucgaugagcaugacgcaaauguaaacaaucuauauaacaaagugaagggggcacuggguuccaaugcaguggaagaugggaaaggaugcuucgaucuauaccauaaaugcgauaaccagugcauggagacaauucgaaacgggaccuauaacagaagaaaguaucaggaggaaucaagacuagagagacagaaaauagagggggucaaacuggaaucugaaggaaccuacaaaauccucaccauuuauucgacugucgccucaucucuuguuauugcaaugggguucgcugccuucuuguucugggccaugucuaauggaucuugcagaugcaacauuuguauauaa

SEQ ID NO: 42304 - RNA, 1683 nt, Artificial Sequence
  derived and/or modified CDS sequence (wt) from hemagglutinin__InfluenzaA__AGQ81143
auggaaguagcaacaauaauaacuauacuacuaguaauaacaggaagcaaugcggauaaaaucugcauuggcuaccaaucaacaaacuccacagaaacuguagacacgcuaaccgaaaacaauguuccugugacacaugcuaaagaauugcuccacacagagcacaaugggaugcuaugugcaacaaaccuggggcguccucuuauucuagacaccuguaccauugaaggacuaaucuauggcaacccuucuugugaucuaccgcuggaagggagagaaugguccuacauugucgaaagaccaucggcuguuaauggagugugcuaccccggaaauguagaaaaccuagaagaauuaaggucacuuuuuaguuccgcuaguucuuaccaaagaauccagaucuuuccagauucaaucuggaaugugucuuacaguggaacaagcaaagcauguucagauucauucuacagaagcaugaggugguugacucaaaagaacaacaauuacccuguucaagacgcccaauacacaaauaauagaggaaagaacauucuuuucauguggggcauaaaucacccacccacugauaaugcacagacaaaucuauacacaaggacugacacaacaacaaguguggcgacggaagauauaaauagaaccuucaaaccauugauagggccaaggccucuugucaauggucuacaaggaaggauugauuauuauugggcgguguuaaaaccaggucagacauugcgaguaagauccaacgggaaucuaaucgcuccaugguauggacacauucucuuaggggagagucacggaagaauccugaaaacggauuuaaaaagugguaacuguguagugcaaugucaaacagaaagaggugguuugaacacuacauugccauuucacaacguaagcaaguacucauuuggaaauugcccaaaauauauuggaguaaagagucucaaauuggcagucggucugaggaaugugccugcuagaucaaguagaggacuauuuggagccauagcugguuucauagagggagguuggucaggauuaguugcugguugguauggguuccagcauucaaaugaucaaggaaccgguauggcugcagauagagacucaacucaaaaggcaauugacaaaauaacguccaaaguaaauaauauagucgacaaaaugaacaaacaguaugaaauuauugaccaugaauucagcgagauugaaacuagacucaauaugaucaauaauaagauugaugaccaaauucaagacauaugggcauauaaugcugaauugcuaguacugcuugaaaaucaaaaaacucucgaugagcaugacgcaaauguaaacaaucuguauaacaaagugaagagagcacuggguuccaaugcaguggaagaugggaaaggaugcuucgaucuauaccauaaaugugauaaccagugcauggagacaauucgaaacgggaccuauaacaggagaaaguaucaggaggaaucaagacuagagagacagaaaauagagggggucaaacuggaaucugaaggaaccuacaaaauccucaccauuuauucgacugucgccucaucucuuguuauugcaaugggguucgcugccuucuuguucugggccauguccaauggaucuugcagaugcaacauuuguauauaa

SEQ ID NO: 42305 - RNA, 1683 nt, Artificial Sequence
  derived and/or modified CDS sequence (wt) from hemagglutinin__InfluenzaA__AGQ81144
auggaagcagcaacaauaauaacuauacuacuaguaguaacaggaagcaaugcagauaaaaucugcauuggcuaccaaucaacaaacuccacagaaacuguagacacacuaaccgaaaacaauguuccugugacacaugcuaaagaauugcuucacacagagcacaaugggaugcuaugugcaacaaaccuggggcguccucuuauucuagacaccuguaccauugaaggacuaaucuauggcaacccuucuugugaucuaccacuggaagggagagaaugguccuacauugucgaaagaccaucggcuguuaauggagugugcuaccccggaaauguagaaaaccuggaagaauuaaggucacuuuuuaguuccgcuaguucuuaccaaagaauccagaucuuuccagauucaaucuggaauguaucuuacgguggaacaagcaaagcauguucagauucauucuacaggagcaugaggugguugacucaaaagaacaacaauuauccuguucaagacgcccaauacacaaauaauagaggaaagaacauucuuuucauguggggcauaaaucacccacccacugauacugcacagacaaaucuguacacaaggacugacacaacaacaaguguggcgacggaagacauaaauaggaccuucaaaccauugauagggccaaggccucuugucaauggucuacaaggaaggauugauuauuauugggcggugcuaaaaccaggucagacauugcgaguaagauccaacgggaaucuaaucgcuccaugguauggacacauucucuuaggggagagucacggaagaauccugaaaacggauuuaaagagugguaauuguguagugcaaugucaaacagaaagaggugguuugaacacuacauugccauuucacaacgugagcaaguacgcauucggaaauugcccaaaauauauuggaguaaagagucucaaauuggcagucggucugaggaauaugccugcuagaucaaguagaggacuauuuggagccauagcugguuucauagagggagguuggucaggauuaguugcugguugguauggguuccagcauucaaaugaucaaggaaccggaauggcugcagauagagacucaacucaaaaggcaauugacaaaaucacguccaaaguaaauaauauagucgacaaaaugaacaaacaguaugaaauuauugaccaugaguucagcgagauugaaacuagacucaauaugaucaaugauaagauugaugaccaaauucaagacauaugggcauauaaugcugaauugcuaguacugcuugaaaaucaaaaaacucucgaugagcaugacgcaaauguaaacaaucuauauaacaaagugaagagggcacuggguuccaaugcaguggaagaugggaaaggaugcuucgaucuauaccauaaaugcgauaaccagugcauggagacaauucggaacgggaccuauaauagaagaaaguaucaggaggaaucaagacuagagagacagaaaauagagggggucaaacuggaaucugaaggaaccuacaaaauccucaccauuuauucgacugucgccucaucucuuguuauugcaaugggguucgcugccuucuuguucugggccaugucuaauggaucuugcagaugcaacauuuguauauaa

SEQ ID NO: 42306 - RNA, 1683 nt, Artificial Sequence
  derived and/or modified CDS sequence (wt) from hemagglutinin__InfluenzaA__AGQ81146
auggaagcagcaacaauaauaaccauacuacuaguaauaacaggaagcaaugcagauaaaaucuguauuggcuaccaaucaacaaacuccacagaaacuguagacacgcuaaccgaaaacaauguuccugugacacaugcuaaagaauugcuucacacagagcacaaugggaugcuaugugcaacaaaccuggggcguccucuuauucuggacaccuguaccauugaaggacuaaucuauggcaacccuucuugugaucuaccgcuggaagggaaagaaugguccuacauugucgaaagaccaucggcuguuaauggaaugugcuaccccggaaauguagaaaaccuggaagaauuaaggucacuuuuuaguuccgcuaguuccuaccaaagaauccagaucuuuccagauucaaucuggaauguaucuuacaguggaacaagcaaagcauguucagauucauucuacagaagcaugaggugguugacucaaaagaacaacaauuacccuguucaagacgcccaauacacaaauaauagaggaaaaaacauucuuuucauguggggcauaaaucacccacccacugacacugcacagacaaaucuguacacaaggacugacacaaaaacaaguguggcgacggaagaaauaaauaggaccuucaaaccauugauagggccaaggccucuugucaauggucuacaaggaaggauugauuauuauugggcgguguuaaaaccaggucagacauugcgaguaagauccaacgggaaucuaaucgcuccaugguauggacacauucucuuaggggagagucacggaagaauccugaaaacggauuuaaagagugguaauuguguagugcaaugucaaacagaaagagguggcuugaacacuacacugccauuucacaacgugagcaaguacgcauucggaaauugcccaaaauauauuggaguaaagagucucaaauuggcagucggucugaggaauguaccugcuagaucaaguagaggacuauuuggagccauagcugguuucauagagggagguuggucaggauuaguugcugguugguauggguuccagcauucaaaugaucagggaaccggaauggcugcagauagagacucaacucaaaaggcaauugacaaaauaacguccaaaguaaauaauauagucgacaaaaugaacaaacaguaugaaauuauugaccaugaauucagcgagauugaaacuagacucaauaugaucaaugauaagauugaugaccaaauucaagacauaugggcguauaaugcugaauugcuaguacugcuugaaaaucaaaaaacucucgaugagcaugacucaaauguaaacaaucuauauaacaaaguaaagagggcacuggguuccaaugcaguggaagaugggaaaggaugcuucgaucuauaccauaaaugcgauaaccagugcauggagacaauucgaaacgggaccuauaacagaagaaaguaucaggaggaaucaagacuagagagacagaaaauagagggggucaaacuggaaucugaaggaaccuacaaaauccucaccauuuauucgacugucgccucaucucuuguuauugcaaugggguucgcugccuucuuguucugggccaugucuaauggaucuugcagaugcaacauuuguauauaa

SEQ ID NO: 42307 - RNA, 1683 nt, Artificial Sequence
  derived and/or modified CDS sequence (wt) from hemagglutinin__InfluenzaA__AGQ81147
auggaagcagcaacaauaauaaccauacuacuaguaauaacaggaagcaaugcagauaaaaucuguauuggcuaccaaucaacaaacuccacagaaacuguagacacgcuaaccgaaaacaauguuccugugacacaugcuaaagaauugcuucacacagagcacaaugggaugcuaugugcaacaaaccuggggcguccucuuauucuggacaccuguaccauugaaggacuaaucuauggcaacccuucuugugaucuaccgcuggaagggaaagaaugguccuacauugucgaaagaccaucggcuguuaauggaaugugcuaccccggaaauguagaaaaccuggaagaauuaaggucacuuuuuaguuccgcuaguuccuaccaaagaauccagaucuuuccagauucaaucuggaauguaucuuacaguggaacaagcaaagcauguucagauucauucuacagaagcaugaggugguugacucaaaagaacaacaauuacccuguucaagacgcccaauacacaaauaauagaggaaagaacauucuuuucauguggggcauaaaucacccacccacugacacuguacagacaaaucuguacacaaggacugacacaaaaacaaguguggcgacggaagaaauaaauaggaccuucaaaccauugauagggccaaggccucuugucaauggucuacaaggaaggauugauuauuauugggcgguguuaaaaccaggucagacauugcgaguaagauccaacgggaaucuaaucgcuccaugguauggacacauucucuuaggggagagucacggaagaauccugaaaacggauuuaaagagugguaauuguguagugcaaugucaaacagaaagagguggcuugaacacuacacugccauuucacaacgugagcaaguacgcauucggaaauugcccaaaauauauuggaguaaagagucucaaauuggcagucggucugaggaauguaccugcuagaucaaguagaggacuauuuggagccauagcugguuucauagagggagguuggucaggauuaguugcugguugguauggguuccagcauucaaaugaucagggaaccggaauggcugcagauagagacucaacucaaaaggcaauugacaaaauaacguccaaaguaaauaauauagucgacaaaaugaacaaacaguaugaaauuauugaccaugaauucagcgagauugaaacuagacucaauaugaucaaugauaagauugaugaccaaauucaagacauaugggcauauaaugcugaauugcuaguacugcuugaaaaucaaaaaacucucgaugagcaugacgcaaauguaaacaaucuauauaacaaaguaaagagggcacuggguuccaaugcaguggaagaugggaaaggaugcuucgaucuauaccauaaaugcgauaaccagugcauggagacaauucgaaacgggaccuauaacagaagaaaguaucaggaggaaucaagacuagagagacagaaaauagagggggucaaacuggaaucugaaggaaccuacaaaauccucaccauuuauucgacugucgccucaucucuuguuauugcaaugggguucgcugccuucuuguucugggccaugucuaauggaucuugcagaugcaacauuuguauauaa

SEQ ID NO: 42308 - RNA, 1683 nt, Artificial Sequence
  derived and/or modified CDS sequence (wt) from hemagglutinin__InfluenzaA__AGQ81148
auggaagcagcaacaauaauaaccauacuacuaguaauaacaggaagcaaugcagauaaaaucuguauuggcuaccaaucaacaaacuccacagaaacuguagacacgcuaaccgaaaacaauguuccugugacacaugcuaaagaauugcuucacacagagcacaaugggaugcuaugugcaacaaaccuggggcguccucuuauucuggacaccuguaccauugaaggacuaaucuauggcaacccuucuugugaucuaccgcuggaagggaaagaaugguccuacauugucgaaagaccaucggcuguuaauggaaugugcuaccccggaaauguagaaaaccuggaagaauuaaggucacuuuuuaguuccgcuaguuccuaccaaagaauccagaucuuuccagauucaaucuggaauguaucuuacaguggaacaagcaaagcauguucagauucauucuacagaagcaugaggugguugacucaaaagaacaacaauuacccuguucaagacgcccaauacacaaauaauagaggaaagaacauucuuuucauguggggcauaaaucacccacccacugacacugcacagacaaaucuguacacaaggacugacacaaaaacaaguguggcgacggaagaaauaaauaggaccuucaaaccauugauagggccaaggccucuugucaauggucuacaaggaaggauugauuauuauugggcgguguuaaaaccaggucagacauugcgaguaagauccaacgggaaucuaaucgcuccaugguauggacacauucuauuaggggagagucacggaagaauccugaaaacggauuuaaagagugguaauuguguagugcaaugucaaacagaaagagguggcuugaacacuacacugcccuuucacaacgugagcaaguacgcauucggaaauugcccaaaauauauuggaguaaagagucucaaauuggcagucggucugaggaauguaccugcuagaucaaguagaggacuauuuggagccauagcugguuucauagagggagguuggucaggauuaguugcugguugguauggguuccagcauucaaaugaucagggaaccggaauggcugcagauagagacucaacucaaaaggcaauugacaaaauaacguccaaaguaaauaauauagucgacaaaaugaacaaacaguaugaaauuauugaccaugaauucagcgagauugaaacuagacucaauaugaucaaugauaagauugaugaccaaauucaagacauaugggcauauaaugcugaauugcuaguacugcuugaaaaucaaaaaacucucgaugagcaugacgcaaauguaaacaaucuauauaacaaaguaaagagggcacuggguuccaaugcaguggaagaugggaaaggaugcuucgaucuauaccauaaaugcgauaaccagugcauggagacaauucgaaacgggaccuauaacagaagaaaguaucaggaggaaucaagacuagagagacagaaaauagagggggucaaacuggaaucugaaggaaccuacaaaauccucaccauuuauucgacugucgccucaucucuuguuauugcaaugggguucgcugccuucuuguucugggccaugucuaauggaucuugcagaugcaacauuuguauauaa

SEQ ID NO: 42309 - RNA, 1683 nt, Artificial Sequence
  derived and/or modified CDS sequence (wt) from hemagglutinin__InfluenzaA__AGQ81149
auggaagcagcaacaauaauaacuauacuacuaguaauaacaggaagcaaugcggauaaaaucugcauuggcuaccaaucaacaaacuccacagaaacuguagacacgcuaaccgaaaacaauguuccugugacacaugcuaaagaauugcuucacacagggcacaaugggaugcuaugugcaacaaaccuggggcguccucuuauucuagacaccuguaccauugaaggacuaaucuauggcaacccuucuugugaucuaccgcuggaagggagagaaugguccuacauugucgaaagaccaucggcuauuaauggagugugcuaccccgggaauguagaaaaccuggaagaauugaggucacuuuuuaguuccgcuaguucuuaccaaagaauccagaucuuuccagauucaaucuggaauguaucuuacaguggaacaagcaaagcauguucagauucauucuacagaagcaugaggugguugacucaaaagaacaacaauuacccuguucaagacgcccaauacacaaauaauagaggaaagaacauucuuuucauguggggcauaaaucacccacccacugauacugcacagacaaaucuguacacaaggacugacacaacaacaaguguggcgacggaagacauaaauaggaccuucaaaccauugauagggccaaggccucuugucaauggucuacaaggaaggauugauuauuacugggcgguguuaaaaccaggucagacauugagaguaagauccaacgggaaucuaaucgcuccaugguauggacacauucuccuaggggagagucacggaagaauccugaaaacggauuuaaagagugguaacuguguagugcaaugucaaacagaaagaggugguuugaacacuacauugccauuucacaaugugagcaaguacgcauucggaaauugcccaaaauauauuggaguaaagagucucaaauuggcagucggucugaggaaugugccugcuagaucaaguagaggacuauuuggagccauagcugguuucauagagggagguuggucaggauuaguugcugguugguauggguuccaacauucaaaugaucaaggaaccggaauggcugcagauagagacucaacgcaaaaggcaauugacaaaauaacguccaaaguaaauaauauagucgacaaaaugaacaaacaguaugaaauuauugaccaugaauucagcgagauugaaacuagacucaauaugaucaaugauaagauugaugaccaaauucaagacauaugggcauauaaugcugaauugcuaguacugcuugaaaaucaaaaaacucucgaugagcaugacgcaaauguaaacaaucuauauaacaaaguuaagagggcacuugguuccaaugcaguggaagaugggaaaggaugcuucgaucuauaccauaaaugcgauaaccagugcauggagacaauucgaaacgggaccuauaacagaagaaaguaccaggaggaaucaagacuagagagacagaaaauagagggggucaaacuggaaucugaaggaaccuacaaaauccucaccauuuauucgacugucgccucaucucuuguuauugcaaugggguucgcugccuucuuguucugggccaugucuaaugguucuugcagaugcaacauuuguauauaa

SEQ ID NO: 42310 - RNA, 1683 nt, Artificial Sequence
  derived and/or modified CDS sequence (wt) from hemagglutinin__InfluenzaA__AGQ81150
auggaagcagcaacaauaauaacuauacuacuaguaauaacaggaagcaaugcggauaaaaucugcauuggcuaccaaucaacaaacuccacagaaacuguagacacgcuaaccgaaaacaauguuccugugacacaugcgaaagaauugcuucacacagagcacaaugggaugcuaugugcaacagaccuggggcguccucuuauucuagacaccuguaccauugaaggauuaaucuauggcaacccuucuugugaucuaccgcuggaagggagagaaugguccuacauuguugaaagaccaucggcuguuaauggagugugcuaccccggaaauguagaaaaccuggaagaauuaaggucacuuuuuaguuccgcuaguucuuaccaaagaauccagaucuuuccagauucaaucuggaauguaucuuacaguggaacaagcaaagcauguucagauucauucuacagaagcaugaggugguugacucaaaagaacaacaauuauccuguucaagacgcccaauacacaaaugauagaggaaauaacauucuuuucaugugggguauaaaucacccacccacugauacuguacagacaaaucuguacacaaggacugacacaacaacaaguguggcgacggaagacauaaauagaaccuucaaaccauugauagggccaaggccucuugucaauggucuacaaggaaggauugauuauuauugggcgguguuaaaaccaggucagacacugcgaguaagauccaacgggaaucuaaucgcuccaugguauggacacauucucuuaggggagagucacggaagaauccugaaaacggauuuaaagagugguaacuguguagugcaaugucaaacagaaagaggugguuugaacacuacauugccauuucacaacgugagcaaguacgcauucggaaauugcccaaaauauauuggaguaaagagucucaaauuggcagucggucugaggaaugugccugcuagaucaaguagaggacuauuuggagccauagcugguuucauagagggagguuggucaggauuaguugcugguugguauggguuccagcauucaaaugaucaaggaaccggaauggcugcagauagagacucaacucaaaaggcaauugacaaaauaacguccaaaguaaauaauauagucgacaaaaugaacaaacaguaugauauuauugaccaugaauucagcgagauugaaacuagacucaauaugaucaaugauaagauugaugaccaaauccaagacauaugggcauauaaugcugaauugcuaguacugcuugaaaaucaaaaaacucucgaugagcaugacgcaaauguaaacaaucuauauaacaaagugaagagggcacuggguuccaaugcaguggaagaugggaaaggaugcuucgaucuauaccauaaaugcgauaaccagugcauggagacaauucgaaacgggaccuauaacagaagaaaguaucaggaggaaucaagacuagagagacagaaaauagagggggucaaacuggaaucugaaggaaccuacaaaauccucaccauuuauucgacugucgccucaucucuuguuauugcaaugggguucgcugccuucuuguucugggccaugucuaauggaucuugcagaugcaacauuuguauauaa

SEQ ID NO: 42311 - RNA, 1683 nt, Artificial Sequence
  derived and/or modified CDS sequence (wt) from hemagglutinin__InfluenzaA__AGQ81152
auggaagcagcaacaauaauaacuauacuacuaguaauaacaggaagcaaugcggauaagaucugcauuggcuaccaaucaacaaacuccacagaaacuguagacacgcuaaccgaaaacaauguuccugugacacaugcuaaagaauugcuucacacagagcacaaugggaugcuaugugcaacaaaccuggggcguccucuuauucuagacaccuguaccauugaaggacuaaucuauggcaacccuucuugugaucuaccgcuggaagggagagacugguccuacauugucgaaagaccaucggcuguuaauggagugugcuaccccggaaauguagaaaaccuggaagaauuaaggucacuuuuuaguuccgcuaguucuuaccaaaaaauccagaucuuuccagauucaaucuggaauguaucuuacaguggaacaagcaaagcauguucagauucauucuacagaagcaugaggugguugacucaaaagaacaacaauuacccuguucaagacgcccaauacacaaauaauagaggaaagaacauucuuuuuauguggggcauaaaucacccacccacugauacuguacagacaaaucuguacacaaggacugacacaacaacaaguguggcgacggaagacauaaauaggaccuucaaaccauugauagggccaaggccucuuguuaauggucuacaaggaaggauugauuauuauugggcaguguuaaaaccaggucagacauugcgagugagauccaacgggaaccuaauugcuccaugguauggacacauucucuugggggagagucacggaagaauccugaaaacggauuuaaagagugguaacuguguagugcaaugucaaacagaaagaggugguuugaacacuacauugccauuucacaacgugagcaaguacgcauucggaaauugcccaaaauauauugggguaaagagucucaaauuggcagucggucugaggaaugugccugcuagaucaaguagaggacuauuuggagccauagcugguuuuauagagggagguuggucaggauuaguugcugguugguauggauuccagcauucaaaugaucaaggaaccggaauggcugcagauagagacucaacucagaaggcaauugacaaaauaacguccaaaguaaauaauauagucgacaaaaugaacaaacaguaugaaauuauugaccaugaauucagcgagauugaaacuagacucaauaugaucaaugauaagauugaugaccaaauucaagacauaugggcauauaaugcugaauuacuaguacugcuugaaaaucaaaaaacucucgaugagcaugacgcaaauguaaacaaucuauauaacaaagugaagagggcacuggguuccaaugcaguggaagaugggaaaggaugcuucgaucuauaccauaaaugcgauaaccagugcauggagacaauucgaaacgggaccuauaacagaagaaaguaucaggaggaaucaagauuagagagacagaaaauagagggggucaaacuggaaucugaaggaaccuacaaaauccucaccauuuauucgacugucgccucaucucuuguuauugcaaugggguucgcugccuucuuguucugggccaugucuaauggaucuugcagaugcaacauuuguauauaa

SEQ ID NO: 42312 - RNA, 1683 nt, Artificial Sequence
  derived and/or modified CDS sequence (wt) from hemagglutinin__InfluenzaA__AGQ81153
auggaagcagcaacaauaauaacuauacuacuaguaauaacaggaagcaaugcggauaaaaucugcauuggcuaccaaucaacaaacuccacagaaacuguagacacgcuaaccgaaaacaauguuccugugacacaugcuaaagaauugcuucacacagagcacaaugggaugcuaugugcaacaaaccuggggcguccucuuauucuagacaccuguaccauugaaggacuaaucuauggcaacccuucuugugaucuaccgcuggaagggagagacugguccuacauugucgaaagaccaucggcuguuaauggagugugcuaccccggaaauguagaaaaccuggaagaauuaaggucacuuuuuaguuccgcuaguucuuaccaaaaaauccagaucuuuccagauucaaucuggaauguaucuuacgguggaauaagcaaagcauguucaaauucauucuacagaagcaugaggugguugacucaaaagaacaacaauuacccuguucaagacgcccaauacacaaauaauagaggaaagaacauucuuuuuauguggggcauaaaucacccacccacuaauacuacacagacagaucuguacacaaggacugacacaacaacaaguguggcgacggaagacauacauaggaccuucaaaccauugauagggccaaggccucuuguuaauggucuacaaggaaggauugauuauuauugggcaguguuaaaaccaggucagacauugcgagugagauccaacgggaaccuaauugcuccaugguauggacacauucucuuggggaagagucacggaagaauccugaaaacggauuuaaagagugguaacuguguagugcaaugucaaacagaaagaggugguuugaacacuacauugccauuucacaacgugagcaaguacgcauucggaaauugcccaaaauauauugggguaaagagucucaaauuggcagucggucugaggaaugugccugcuagaucaaguagaggacuauuuggagccauagcugguuuuauagagggagguuggucaggauuaguugcugguugguauggauuccagcauucaaaugaucaaggaaccggaauggcugcagauagagacucaacucagaaggcaauugacaaaauaacguccaaaguaaauaauauagucgacaaaaugaacaaacaguaugaaauuauugaccaugaauucagcgagauugaaacuagacucaauaugaucaaugauaagauugaugaccaaauucaagacauaugggcauauaaugcugaauuacuaguacugcuugaaaaucaaaaaacucucgaugagcaugacgcaaauguaaacaaucuauauaacaaagugaagagggcacuggguuccaaugcaguggaagaugggaaaggaugcuucgaucuauaccauaaaugcgauaaccagugcauggagacaauucgaaacgggaccuauaacagaagaaaguaucaggaggaaucaagauuagagagacagaaaauagagggggucaaacuggaaucugaaggaaccuacaaaauccucaccauuuauucgacugucgccucaucucuuguuauugcaaugggguucgcugccuucuuguucugggccaugucuaauggaucuugcagaugcaacauuuguauauaa

SEQ ID NO: 42313 - RNA, 1683 nt, Artificial Sequence
  derived and/or modified CDS sequence (wt) from hemagglutinin__InfluenzaA__AGQ81155
auggaagcagcaacaauaauaacuauacuacuaguaauaacaggaagcaaugcggauaagaucugcauuggcuaccaaucaacaaacuccacagaaacuguagacacgcuaaccgaaaacaauguuccugugacacaugcuaaagaacugcuucacacagagcacaaugggaugcuaugugcaacaaaccuggggcguccucuuauucuagacaccuguaccauugaaggacuaaucuauggcaauccuucuugugaucuaccgcuggaagggagagacugguccuacauugucgaaagaccaucggcuguuaauggagugugcuaccccggaaauguagagaaccuggaagaauuaaggucacuuuuuaguuccgcuaguucuuaccaaaaaauccagaucuuuccagauucaaucuggaauguaucuuacaauggaacaagcaaagcauguucagauucauucuacagaagcaugaggugguugacucaaaagaacaacaauuacccuguucaagacgcccaauacacaaauaauagaggaaagaacauucuuuuuauguggggcauaaaucacccacccacugauacuacacagacaaaucuguacacaaggacugacacaacaacaaguguggcgacggaagacauaaauaggaccuucaaaccauugauagggccaaggccucuuguuaauggucuacaaggaaggauugauuauuauugggcaguguuaaaaccaggucagacauugcgagugagauccaacgggaaccuaauugcuccaugguauggacacauucucuugggggagagucacggaagaauccugaaaacggauuuaaagagugguaacuguguagugcaaugucaaacagaaagaggugguuugaacacuacauugccauuucacaacgugagcaaguacgcauucggagauugcccaaaauauauugggguaaagagucucaaauuggcagucggucugaggaaugugccugcuagaucaaguagaggacuauuuggagccauagcugguuuuauagagggagguuggucaggauuaguugcugguugguauggauuccagcauucaaaugaucaaggaaccggaauggcugcagauagagacucaacucagaaggcaauugacaaaauaacguccaaaguaaauaauauagucgacaaaaugaacaaacaguaugaaauuauugaccaugaauucagcgagauugaaacuagacucaauaugaucaaugauaagauugaugaccaaauucaagacauaugggcauauaaugcugaauuacuaguacugcuugaaaaucaaaaaacucucgaugagcaugacgcaaauguaaacaaucuauauaacaaagugaagagggcacuggguuccaaugcaguggaagaugggaaaggaugcuucgaucuauaccauaaaugcgauaaccagugcauggagacaauucgaaacgggaccuauaacagaagaaaguaucaggaggaaucaagauuagagagacaggaaauagagggggucaaacuggaaucugaaggaaccuacaaaauccucaccauuuauucgacugucgccucaucucuuguuauugcaaugggguucgcugccuucuuguucugggccaugucuaauggaucuugcagaugcaacauuuguauauaa

SEQ ID NO: 42314 - RNA, 1683 nt, Artificial Sequence
  derived and/or modified CDS sequence (wt) from hemagglutinin__InfluenzaA__AGQ81156
auggaagcagcaacaauaauaacuauacuacuaguaauaacaggaagcaaugcggauaaaaucugcauuggcuaccaaucaacaaacuccacagaaacuguagacacgcuaaccgaaaacaauguuccugugacacaugcuaaagaauugcuucacacagagcacaaugggaugcuaugugcaacaaaccuggggcguccucuuauucuagacaccuguaccauugaaggacuaaucuauggcaacccuucuugugaucuaccgcuggaagggagagacugguccuacauugucgaaagaccaucggcuguuaauggagugugcuaccccggaaauguagaaaaccuggaggaauuaaggucacuuuuuaguuccgcuaguucuuaccaaaaaauccagaucuuuccagauucaaucuggaauguaucuuacgguggaauaagcaaagcauguucaaauucauucuacagaagcaugaggugguugacucaaaagaacaacaauuacccuguucaagacgcccaauacacaaauaauagaggaaagaacauucuuuuuauguggggcauaaaucacccacccacuaauacuacacagacagaucuguacacaaggacugacacaacaacaaguguggcgacggaagacauacauaggaccuucaaaccauugauagggccaaggccucuuguuaauggucuacaaggaaggauugauuauuauugggcaguguuaaagccaggucagacauugcgagugagauccaacgggaaccuaauugcuccaugguauggacacauucucuugggggagagucacggaagaauccugaaaacggauuugaagagugguaacuguguagugcaaugucaaacagaaagaggugguuugaacacuacauugccauuucacaacgugagcaaguacgcauucggaaauugcccaaaauauauugggguaaagagucucaaauuggcagucggucugaggaaugugccugcuagaucaaguagaggacuauuuggagccauagcugguuuuauagagggagguuggucaggauuaguugcugguugguauggauuccagcauucaaaugaucaaggaaccggaauggcugcagauagagacucaacucagaaggcaauugacaaaauaacguccaaaguaaauaauauagucgacaaaaugaacaaacaguaugaaauuauugaccaugaauucagcgagauugaaacuagacucaauaugaucaaugauaagauugaugaccaaauucaagacauaugggcauauaaugcugaauuacuaguacugcuugaaaaucaaaaaacucucgaugagcaugacgcaaauguaaacaaucuauauaacaaagugaagagggcacuggguuccaaugcaguggaagaugggaaaggaugcuucgaucuauaccauaaaugcgauaaccagugcauggagacaauucgaaacgggaccuacaacagaagaaaguaucaggaggaaucaagauuagagagacagaaaauagagggggucaaacuggaaucugaaggaaccuacaaaauccucaccauuuauucgacugucgccucaucucuuguuauugcaaugggguucgcugccuucuuguucugggccaugucuaauggaucuugcagaugcaacauuuguauauaa

SEQ ID NO: 42315 - RNA, 1683 nt, Artificial Sequence
  derived and/or modified CDS sequence (wt) from hemagglutinin__InfluenzaA__AGQ81157
auggaagcagcaacaauaauaacuauacuacuaguaauaacaggaaacaaugcggauaagaucugcauuggcuaccaaucaacaaacuccacagaaacuguagacacgcuaaccgaaaacaauguuccugugacacaugcuaaagaacugcuucacacagagcacaaugggaugcuaugugcaacaaaccuggggcguccucuuauucuagacaccuguaccauugaaggacuaaucuauggcaauccuucuugugaucuaccgcuggaagggagagacugguccuacauugucgaaagaccaucggcuguuaauggagugugcuaccccggaaauguggagaaccuggaagaauuaaggucacuuuuuaguuccgcuaguucuuaccaaaaaauccagaucuuuccagauucaaucuggaauguaucuuacaauggaacaagcaaagcauguucagauucauucuacagaagcaugaggugguugacucaaaagaacaacaauuacccuguucaagacgcccaauacacaaauaauagaggaaagaacauucuuuuuauguggggcauaaaucacccacccacugauacuacacagacaaaucuguacacaaggacugacacaacaacaaguguggcgacggaagacauaaauaggaccuucaaaccauugauagggccaaggccucuuguuaauggucuacaaggaaggauugauuauuauugggcaguguuaaaaccaggucagacauugcgagugagauccaacgggaaccuaauugcuccaugguauggacacauucucuugggggagagucacggaagaauccugaaaacggauuuaaagagugguaacuguguagugcaaugucaaacagaaagaggugguuugaacacuacauugccauuucacaacgugagcaaguaugcauucggagauugcccaaaauauauugggguaaagagucucaaauuggcagucggucuaaggaaugugccugcuagaucaaguagaggacuauuuggagccauagcugguuuuauagagggagguuggucaggauuaguugcugguugguauggauuccagcauucaaaugaucaaggaaccggaauggcugcagauagagacucaacucagaaggcaauugacaaaauaacguccaaaguaaauaauauagucgacaaaaugaacaaacaguaugaaauuauugaccaugaauucagcgagauugaaacuagacucaauaugaucaaugauaagauugaugaccaaauucaagacauaugggcauauaaugcugaauuacuaguacugcuugaaaaucaaaaaacucucgaugagcaugacgcaaauguaaacaaucuauauaacaaagugaagagggcacuggguuccaaugcaguggaagaugggaaaggaugcuucgaucuauaccauaaaugcgauaaccagugcauggagacaauucgaaacgggaccuauaacagaagaaaguaucaggaggaaucaagauuagagagacagaaaauagagggggucaaacuggaaucugaaggaaccuacaaaauccucaccauuuauucgacugucgccucaucucuuguuauugcaaugggguucgcugccuucuuguucugggccaugucuaauggaucuugcagaugcaacauuuguauauaa

SEQ ID NO: 42316 - RNA, 1683 nt, Artificial Sequence
  derived and/or modified CDS sequence (wt) from hemagglutinin__InfluenzaA__AGQ81158
auggaaguaguaacaauaauaacuauacuacuaguaauaacaagaagcaaugcagauaaaauaugcauuggcuaccaaucaacaaacuccacagaaacuguagacacgcuaaccgaaaacaauguuccugugacacaugcuaaagaauugcuucacacagagcacaaugggaugcuaugugcaacaaaccuggggcguccucuuauucuagacaccuguaccauugaaggacuaaucuauggcaacccuucuugugaucuaccgcuggaagggagagaaugguccuacauugucgaaagaccaucggcuguaaauggagugugcuacccaggaaauguagaaaaccuagaagaauuaaggucacuuuuuaguuccgcuaguucuuaccaaagaauccagaucuuuccagauucaaucuggaauguaucuuacaguggaacaagcaaagcauguucagauucauucuacagaagcaugaggugguuaacucaaaagaacaacaauuacccuguucaagacgcccaauacacaaauaauagaggaaagaacauucuuuucauguggggcauaaaucacccacccacugauacugcacagacaaaucuguacacaaggacugacacaacaacaagcguagcgacggaagauauaaauaggaccuucaaaccauugauagggccaaggccucuuguuaauggucuacaaggaaggauugauuauuauugggcgguuuuaaaaccaggucagacacugcgaguaagauccaacgggaaucuaaucgcuccaugguauggacacauccuuuuaggggagagccacggaagaauccugaaaacggauuuaaagagugguagcuguguagugcaaugccaaacagaaagaggugguuugaacacuacauugccauuucacaacgugagcaaguacgcauuuggaaauugcccaaaauauauuggaguaaagagucucaaauuggcagucggucugaggaaugugccugcuagaucaaguagaggauuauuuggagccauagcugguuucauagagggagguuggucaggauuaguugcugguugguauggguuccagcauucaaaugaucaaggaacuggaauggcugcagauagagacucaacucaaaaggcaauugacaaaauaacguccaaaguaaauaauauagucgacaaaaugaacaaacaguaugaaauuauuaaccaugaauucagcgagauugaaacuagacucaauaugaucaaugauaagauugaugaccaaauucaagacauaugggcauauaaugcugaauugcuaguacugcuugaaaaucaaaaaacccucgaugagcaugacgcaaaugugaacaaucuuuauaacaaagugaagagggcacuggguuccaaugcaguggaagaugggaaaggaugcuucgaucuauaccauaaaugcgauaaccagugcauggagacaauucgaaacgggaccuauaacagaagaauguaucaggaggaaucaagacuagagaggcagaaaauagaaggggucaaacuggaaucugaaggaaccuacaaaauccucaccauuuauucgacugucgccucaucucuuguuauugcaaugggguucgcugccuucuuguucugggccaugucuaauggaucuugcagaugcaacauuuguauauaa

SEQ ID NO: 42317 - RNA, 1683 nt, Artificial Sequence
  derived and/or modified CDS sequence (wt) from hemagglutinin__InfluenzaA__AGQ81159
auggaagcagcaacaauaauaacuauacuacuaguaauaacaggaagcaaugcggauaaaaucugcauuggcuaccaaucaacaaacuccacagaaacuguagacacgcuaaccgaaaacaauguuccugugacacaugcuaaagaauugcuucacacagagcacaaugggaugcuaugugcaacaaaccuggggcguccucuuauucuagacaccuguaccauugaaggacuaaucuauggcaacccuucuugugaucuaccgcuggaagggagagacugguccuacauugucgaaagaccaucggcuguuaauggagugugcuaccccggaaauguagaaaaccuggaagaauuaaggucacuuuuuaguuccgcuaguucuuaccaaaaaauccagaucuuuccagauucaaucuggaauguaucuuacgauggaauaagcaaagcauguucaaauucauucuacagaagcaugaggugguugacuaaaaagaacaacaguuacccuguucaagacgcccaauacacaaauaauauaggaaagaacauucuuuuuauguggggcauaaaucacccacccacuaauacuacacagacagaucuguacacaaggacugacacaacaacaaguguggcaacggaagacauacauaggaccuucaaaccauugauagggccaaggccuccuguuaauggucuacuaggaaggauugauuauuauugggcaguguuaaagccaggucagacauugcgagugagauccaacgggaaccuaauugcuccaugguacggacacauucucuugggggagagucacggaagaauccugaaaacggauuugaagagugguaacuguguagugcaaugucaaacagaaagaggugguuugaacacuacauugccauuucacaacgugagcaaguacgcauucggaaauugcccaaaauauauugggguaaagagucucaaauuggcagucggucugaggaaugugccugcuagaucaaguagaggacuauuuggagccauagcugguuuuauagagggagguuggucaggauuaguugcugguugguauggauuccagcauucaaaugaucaaggaaccggaauggcugcagauagagacucaacucagaaggcaauugacaaaauaacguccaaaguaaauaauauagucgacaaaaugaacaaacaguaugaaauuauugaccaugaauucagcgagauugaaacuagacucaauaugaucaaugauaagauugaugaccaaauucaagacauaugggcauauaaugcugaauuacuaguacugcuugaaaaucaaaaaacucucgaugagcaugacgcaaauguaaacaaucuauauaacaaagugaagagggcacuggguuccaaugcaguggaagaugggaaaggaugcuucgaucuguaccauaaaugcgauaaccagugcauggagacaauucgaaacgggaccuauaacagaagaaaguaucaggaggaaucaagauuagagagacagaaaauagagggggucaaacuggaaucugaaggaaccuacaaaauccucaccauuuauucgacugucgccucaucucuuguuauugcaaugggguucgcugccuucuuguucugggccaugucuaauggaucuugcagaugcaacauuuguauauaa

SEQ ID NO: 42318 - RNA, 1683 nt, Artificial Sequence
  derived and/or modified CDS sequence (wt) from hemagglutinin__InfluenzaA__AGQ81161
auggagacaguaucacuaauaacuauacuacuaguagcaacaguaagcaaugcagauaaaaucugcaucggcuaucaaucaacaaacuccacagaaacuguggacacacuaacagaaaacaaugucccugugacacaugccaaagaacugcuccacacagagcauaaugggaugcugugugcaacaagcuugggacaaccucuuauuuuagacaccugcaccauugaagggcuaaucuauggcaauccuucuugugauccauugcuggaaggaagagaaugguccuauaucgucgagagaccaucagccguuaacggauuguguuaccccgggaauguagagaaucuagaagagcuaaggucacuuuuuaguucugcuaggucuuaucaaagaauccagauuuucccagacacaaucuggaaugugucuuacgaugggacaagcaaagcaugcucagguucauucuacagaaacaugagaugguugacucaaaagaacagcgauuacccuauucaagacgcccaauacacaaauaaucaagggaagaacauucuuuucauguggggcauaaaucacccacccaccgauacuacgcagagagaucuguacacgagaaccgacacaacaacgaguguggcaacagaagaaauaaauaggaucuucaaaccauugauuggaccaaggccucuugucaacgguuugaugggaagaauugauuauuauuggucgguauugaaaccgggucaaacacugcgaauaaaaucugaugggaaucuaauagcuccaugguauggacacauucuuucaggagagagccacggaagaauucugaagacugauuuaaaaaaggguagcugcacagugcaaugucagacagagaaagguggcuuaaacacaacauugccauuccaaaauguaaguaaguaugcauuuggaaacugcucaaaguacauuggcauaaagagucucaaacuugcaguuggucugaggaaugugccuucuagaucuaguagaggauuauucggggccauagcaggguuuauagagggagguuggucaggacuaguugcugguugguauggguuccagcauucaaaugaccaagggguugguauggcagcagauagagacucaacccaaaaggcaauugauaaaauaacauccaaagugaauaauauagucgacaaaaugaacaagcaguaugaaaucauugaucaugaauucagugagguagaaacuagacuuaacaugaucaauaauaagauugaugaucaaauccaggauauaugggcauauaaugcagaauugcuaguucugcuugaaaaccagaaaacacucgaugagcaugacgcaaauguaaacaaucuauauaauaaaguaaagagggcauuggguuccaaugcgguggaagaugggaaaggauguuucgagcuauaccacaaaugugaugaccaaugcauggagacaauucggaacgggaccuacaacagaaggaaguaucaagaggagucaaaauuagaaaggcagaaaauagagggggucaagcuggaaucugaaggaacuuacaaaauccucaccauuuauucgacugucgccucaucucuugugauugcaaugggguuugcugccuucuuguucugggccauguccaaugggucuugcagaugcaacauuuguauauaa

SEQ ID NO: 42319 - RNA, 1683 nt, Artificial Sequence
  derived and/or modified CDS sequence (wt) from hemagglutinin__InfluenzaA__AGQ81162
auggagacaguaucacuaauaacuauacuacuaguagcaacaguaagcaaugcagauaaaaucugcaucggcuaucaaucaacaaacuccacagaaacuguggacacacuaacagaaaacaaugucccugugacacaugccaaagaacugcuccacacagagcauaaugggaugcugugugcaacaagcuugggacaaccucuuauuuuagacaccugcaccauugaagggcuaaucuauggcaauccuucuugugaucuauugcuggaaggaagagaaugguccuauaucgucgagagaccaucagcuguuaacggauuguguuaccccgggaauguagagaaucuagaagagcuaaggucacuuuuuaguucugcuaggucuuaucaaagaauccagauuuucccagacacaaucuggaaugugucuuacgaugggacaagcaaagcaugcucagguucauucuacagaagcaugagaugguugacucaaaagaacagcgauuacccuauucaagacgcccaauacacaaauaaucaagggaagaacauucuuuucauguggggcauaaaucacccacccaccgauacuacgcagagggaucuguacacgagaaccgacacaacaacgaguguggcaacagaagaaauaaauaggaucuucaaaccauugauuggaccaaggccucuugucaacgguuugaugggaagaauugauuauuauuggucgguauugaaaccaggucaaacacugcgaauaaaaucugaugggaaucuaauagcuccaugguauggacacauucuuucaggagagagccacggaagaauucugaagacugauuuaaaaaaggguagcugcacagugcaaugucagacagagaaagguggcuuaaacacaacauugccauuccaaaauguaaguaaguaugcauuuggaaacugcucaaaguacaucggcauaaagagucucaaacuugcaguuggucugaggaaugugccuucuagaucuaguagaggauuauucggggccauagcaggguuuauagagggagguuggucaggacuaguugcugguugguauggguuccagcauucaaaugaccaagggguugguauggcagcagauagagacucaacccaaaaggcaauugauaaaauaacauccaaagugaauaauauagucgacaaaaugaacaagcaguaugaaaucauugaucaugaauucagugagguagaaacuagacuuaacaugaucaauaauaagauugaugaucaaauccaggauauaugggcauauaaugcagaauugcuaguucugcuugaaaaccagaaaacacucgaugagcaugacgcaaauguaaacaaucuauauaauaaaguaaagagggcguuggguuccaaugcgguggaagaugggaaaggauguuucgagcuauaccacaaaugugaugaccaaugcauggagacaauucggaacgggaccuacaacagaaagaaguaucaagaggagucaaaauuagaaagacagaaaauagagggggucaagcuggaaucugaaggaacuuacaaaauccucaccauuuauucgacugucgccucaucucuugugauugcaaugggguuugcugccuucuuguucugggccauguccaaugggucuugcagaugcaacauuuguauauaa

SEQ ID NO: 42320 - RNA, 1683 nt, Artificial Sequence
  derived and/or modified CDS sequence (wt) from hemagglutinin__InfluenzaA__AGQ81164
auggagacaguaucacuaauaacuauacuacuaguagcaacaguaagcaaugcagauaaaaucugcaucggcuaucaaucaacaaacuccacagaaacuguggacacacuaacagaaaacaaugucccugugacacaugccaaagaacugcuccacacagagcauaaugggaugcugugugcaacaagcuugggacaaccucuuauuuuagacaccugcaccauugaagggcuaaucuauggcaauccuucuugugaucuauugcuggaaggaagagaaugguccuauaucgucgagagaccaucagcuguuaacggauuguguuaccccgggaauguagagaaucuagaagagcuaaggucacuuuuuaguucugcuaggucuuaucaaagaauccagauuuucccagacacaaucuggaaugugucuuacgaugggacaagcaaagcaugcucagguucauucuacagaagcaugagaugguugacucaaaagaacagcgauuacccuauucaagacgcccaauacacaaauaaucaagggaagaacauucuuuucauguggggcauaaaucacccacccaccgauacuacgcagagagaucuguacacgagaaccgacacaacaacgaguguggcaacagaagaaauaaauaggaucuucaaaccauugauuggaccaaggccucuugucaacgguuugaugggaagaauugauuauuauuggucgguauugaaaccgggucaaacacugcgaauaaaaucugaugggaaucuaauagcuccaugguauggacacauucuuucaggagagagccacggaagaauucugaagacugauuuaaaaaaggguagcugcacagugcaaugucagacagagaaagguggcuuaaacacaacauugccauuccaaaauguaaguaaguaugcauuuggaaacugcucaaaguacauuggcauaaagagucucaaacuugcaguuggucugaggaaugugccuucuagaucuaguagaggauuauucggggccauagcaggguuuauagagggagguuggucaggacuaguugcugguugguauggguuccagcauucaaaugaccaagggguugguauggcagcagauagagacucaacccaaaaggcaauugauaaaauaacauccaaagugaauaauauagucgacaaaaugaacaagcaguaugaaaucauugaucaugaauucagugagguagaaacuagacuuaacaugaucaauaauaagauugaugaucaaauccaggauauaugggcauauaaugcagaauugcuaguucugcuugaaaaccagaaaacacucgaugagcaugacgcaaauguaaacaaucuauauaauaaaguaaagagggcguuggguuccaaugcgguggaagaugggaaaggauguuucgagcuauaccacaaaugugaugaccaaugcauggagacaauucggaacgggaccuacaacagaaggaaguaucaagaggagucaaaauuagaaagacagaaaauagagggggucaagcuggaaucugaaggaacuuacaaaauccucaccauuuauucgacugucgccucaucucuugugauugcaaugggguuugcugccuucuuguucugggccauguccaaugggucuugcagaugcaacauuuguauauaa

SEQ ID NO: 42321 - RNA, 1683 nt, Artificial Sequence
  derived and/or modified CDS sequence (wt) from hemagglutinin__InfluenzaA__AGQ81167
auggagacaguaucacuaauaacuauacuacuaguagcaacaguaagcaaugcagauaaaaucugcaucggcuaucaaucaacaaacuccacagaaacuguggacacacuaacagaaaacaaugucccugugacacaugccaaagaacugcuccacacagagcauaaugggaugcugugugcaacaagcuugggacaaccucuuauuuuagacaccugcaccauugaagggcuaaucuauggcaauccuucuugugaucuauugcuggaaggaagagaaugguccuauaucguugagagaccaucagcuguuaacggauuguguuaccccgggaauguagaaaaucuagaagagcuaaggucacuuuuuaguucugcuaggucuuaucaaagaauccagauuuucccagacacaauuuggaaugugucuuacaaugggacaagcaaagcaugcucagguucauucuacagaagcaugagaugguugacucaaaagaacagcaauuacccuauucaagacgcccaauacacaaauaaucaagggaagaacauucuuuucauguggggcauaaaucacccacccaccgauacuacgcagagagaucuguacacgagaaccgacacaacaacgaguguggcaacagaagaaauaaauaggaucuucaaaccauugauaggaccaaggccucuugucaacgguuugaugggaagaauugauuauuauuggucgguauugaaaccgggucaaacauugcgaauaaaaucugaugggaaucuaauagcuccaugguauggacacauucuuucaggagagagccacggaagaauucugaagacugauuuaaaaaaggguagcugcacagugcaaugucagacagagaaagguggcuuaaacacaacauugccauuccaaaauguaaguaaguaugcauuuggaaacugcucaaaauacauuggcauaaagagucucaaacuugcaguuggucugaggaaugugccuucuagaucuaguagaggacuauucggggccauagcaggguuuauagagggagguuggucaggacuaguugcugguugguauggguuccagcauucaaaugaccaagggguugguauggcggcagauagagacucaacccaaaaggcaauagauaaaauaacauccaaagugaauaauauagucgacaaaaugaacaagcaguaugaaaucauugaucaugaauucagugagguagaaacuagacuuaacaugaucaauaauaagauugaugaucaaauccaggauauaugggcauauaaugcagaauugcuaguucugcuugaaaaccagaaaacacucgaugagcaugacgcaaaugugaacaaucuauauaauaaaguaaagagggcguuggguuccaaugcgguggaagaugggaaagguuguuucgagcuauaccacaaaugugaugaccagugcauggagacaauucggaacgggaccuacaacagaaggaaguaucaagaggagucaaaauuagaaagacagaaaauagagggggucaaguuggaaucugaaggaacuuacaaaauccucaccauuuauucgacugucgccucaucucuugugauugcaaugggguuugcugccuucuuguucugggccauguccaaugggucuugcagaugcaacauuuguauauaa

SEQ ID NO: 42322 - RNA, 1683 nt, Artificial Sequence
  derived and/or modified CDS sequence (wt) from hemagglutinin__InfluenzaA__AGQ81168
auggagacaguaucacugauaacuauacuacuaguaguaacaguaagcaaugcagauaagaucugcaucggcuaucaaucaacaaacuccacagaaacuguagacacacuaacagaaaacaaugucccugugacacaugccagagaacugcuccacacagagcauaauggaaugcugugugcaacaagcuugggacacccucuuauucuagacaccuguaccauugaaggacuaaucuauggcaauccuucuugugaucuauuguugggaggaagagaaugguccuauaucgucgagagaccaucagcuguuaacggauuguguuaucccgggaauguagaaaaucuagaagagcuaaggucacuuuuuaguucugcuaggucuuaucaaaggauccagauuuucccagacacaaucuggaaugugucuuacagugggacaagcaaagcauguucagauucauucuacagaagcaugagaugguugacucaaaagggcaacgcuuacccuauucaagacgcccaauacacaaauaaucaaggaaagaacauucuuuucauguggggcauaaaucacccacccacugauacugcgcagacaaaucuguacacaagaaccgacacaacaacgaguguggcaacagaagagauaaauaggaccuucaaaccauugauaggaccaaggccucuugucaacgguuugaugggaagaauuaauuauuauuggucgguauuaaaaccgggucaaacacugcgaauaaaaucuaaugggaaucuaauagcuccaugguauggacacauucuuucaggagagagccacggaagaauccugaagacugauuuaaaaagggguagcugcacagugcagugucagacagagaaggguggcuuaaacacaacauugccauuccaaaaugugaguaaguaugcauuuggaaacugcucaaaauacauuggcaugaagagucucaaacuugcaguuggucugaggaaugugccuucuagaucuaguagaggacuauucggggccauagcaggauuuauagagggagguuggucaggacuaguugcugguugguauggauuccagcauucaaaugaccaaggaguugguauggcggcagauagagacucaacccaaaaggcaauugauaaaauaacauccaaagugaauaacauagucgacaaaaugaacaagcaguaugaaauuaucgaucaugaauucagcgagguugaaacuagacuuaacaugaucaauaauaagauugaugaucaaauccaagauauaugggcauauaaugcagaauugcuaguucugcuugaaaaccagaaaacacucgaugagcaugaugcaaauguaaacaaucuauacaauaaagugaagagggcguuggguuccaaugcgguggaagaugggaaaggauguuucgagcuauaccacaaaugugaugaccagugcauggagacaauucggaacgggaccuacaacagaaggaaguaucaagaggagucaaaauuagaaagacagaaaauagagggggucaagcuggaaucugaaggaacuuacaaaauccucaccauuuauucgacugucgccucaucucuugugauugcaaugggguuugcugccuucuuguucugggccauguccaaugggucuugcagaugcaacauuuguauauaa

SEQ ID NO: 42323 - RNA, 1683 nt, Artificial Sequence
  derived and/or modified CDS sequence (wt) from hemagglutinin__InfluenzaA__AGQ81169
auggagacaguaucacugauaacuauacuacuaguaguaacaguaagcaaugcagauaagaucugcaucggcuaucaaucaacaaacuccacagaaacuguagacacacuaacagaaaacaaugucccugugacacaugccagagaacugcuccacacagagcauaauggaaugcugugugcaacaagcuugggacacccucuuauucuagacaccuguaccauugaaggacuaaucuauggcaauccuucuugugaucuauuguugggaggaagagaaugguccuauaucgucgagagaccaucagcuguuaacggauuguguuaucccgggaauguagaaaaucuagaagagcuaaggucacuuuuuaguucugcuaggucuuaucaaaggauccagauuuucccagacacaaucuggaaugugucuuacagugggacaagcaaagcauguucagauucauucuacagaagcaugagaugguugacucaaaaggacaacgcuuacccuauucaagacgcccaauacacaaauaaucaagaaaagaacauucuuuucauguggggcauaaaucacccacccacugauacugugcagacaaaucuguacacaagaaccgacacaacaacgaguguggcaacagaagagauaaauaggaccuucaaaccauugauaggaccaaggccucuugucaacgguuugaugggaagaauuaauuauuauuggucgguauuaaaaccgggucaaacacugcgaauaaaaucuaaugggaaucuaauagcuccaugguauggacacauucuuucaggagagagccacggaagaauccugaagacugauuuaaaaagggguagcugcacagugcagugucagacagagaaggguggcuuaaacacaacauugccauuccaaaaugugaguaaguaugcauuuggaaacugcucaaaauacauuggcaugaagagucucaaacuugcaguuggucugaggaaugugccuucuagaucuaguagaggacuauucggggccauagcaggauuuauagagggagguuggucaggacuaguugcugguugguauggauuccagcauucaaaugaccaaggaguugguauggcggcagauagagacucaacccaaaaggcaauugauaaaauaacauccaaagugaauaacauagucgacaaaaugaacaagcaguaugaaauuaucgaucaugaauucagcgagguugaaacuagacuuaacaugaucaauaauaagauugaugaucaaauccaagauauaugggcauauaaugcagaauugcuaguucugcuugaaaaccagaaaacacucgaugagcaugaugcaaauguaaacaaucuauacaauaaagugaagagggcguuggguuccaaugcgguggaagaugggaaaggauguuucgagcuauaccacaaaugugaugaccagugcauggagacaauucggaacgggaccuacaacagaaggaaguaucaagaggagucaaaauuagaaagacagaaaauagagggggucaagcuggaaucugaaggaacuuacaaaauccucaccauuuauucgacugucgccucaucucuugugauugcaaugggguuugcugccuucuuguucugggccauguccaaugggucuugcagaugcaacauuuguauauaa

SEQ ID NO: 42324 - RNA, 1683 nt, Artificial Sequence
  derived and/or modified CDS sequence (wt) from hemagglutinin__InfluenzaA__AGQ81170
auggagacaguaucacugauaacuauacuacuaguaguaacaguaagcaaugcagauaagaucugcaucggcuaucaaucaacaaacuccacagaaacuguagacacacuaacagaaaacaaugucccugugacacaugccagagaacugcuccacacagagcauaauggaaugcugugugcaacaagcuugggacacccucuuauucuagacaccuguaccauugaaggacuaaucuauggcaauccuucuugugaucuauuguugggaggaagagaaugguccuauaucgucgagagaccaucagcuguuaacggauuguguuaucccgggaauguagaaaaucuagaagagcuaaggucacuuuuuaguucugcuaggucuuaucaaaggauccagauuuucccagacacaaucuggaaugugucuuacagugggacaagcaaagcauguucagauucauucuacagaagcaugagaugguugacucaaaaggacaacgcuuacccuauucaagacgcccaauacacaaauaaucaaggaaagaacauucuuuucauguggggcauaaaucacccacccacugauacugcgcagacaaaucuguacacaagaaccgacacaacaacgaguguggcaacagaagagauaaauaggaccuucaaaccauugauaggaccaaggccucuugucaacgguuugaugggaagaauuaauuauuauuggucgguauuaaaaccgggucaaacacugcgaauaaaaucuaaugggaaucuaauagcuccaugguauggacacauucuuucaggagagagccacggaagaauccugaagacugauuuaaaaagggguagcugcacagugcagugucagacagagaaggguggcuuaaacacaacauugccauuccaaaaugugaguaaguaugcauuuggaaacugcucaaaauacauuggcaugaagagucucaaacuugcaguuggucugaggaaugugccuucuagaucuaguagaggacuauucggggccauagcaggauuuauagagggagguuggucaggacuaguugcugguugguauggauuccagcauucaaaugaccaaggaguugguauggcugcagauagagacucaacccaaaaggcaauugauaaaauaacauccaaagugaauaacauagucgacaaaaugaacaagcaguaugaaauuaucgaucaugaauucagcgagguugaaacuagacuuaacaugaucaauaauaagauugaugaucaaauccaagauauaugggcauauaaugcagaauugcuaguucugcuugaaaaccagaaaacacucgaugagcaugaugcaaauguaaacaaucuauacaauaaagugaagagggcguuggguuccaaugcgguggaagaugggaaaggauguuucgagcuauaccacaaaugugaugaccagugcauggagacaauucggaacgggaccuacaacagaaggaaguaucaagaggagucaaaauuagaaagacagaaaauagagggggucaagcuggaaucugaaggaacuuacaaaauccucaccauuuauucgacugucgccucaucucuugugauugcaaugggguuugcugccuucuuguucugggccauguccaaugggucuugcagaugcaacauuuguauauaa

SEQ ID NO: 42325 - RNA, 1683 nt, Artificial Sequence
  derived and/or modified CDS sequence (wt) from hemagglutinin__InfluenzaA__AGQ81171
auggagacaguaucacugauaacuauacuacuaguaguaacaguaagcaaugcagauaagaucugcaucggcuaucaaucaacaaacuccacagaaacuguagacacacuaacagaaaacaaugucccugugacacaugccagagaacugcuccacacagagcauaauggaaugcugugugcaacaagcuugggacacccucuuauucuagacaccuguaccauugaaggacuaaucuauggcaauccuucuugugaucuauuguugggaggaagagaaugguccuauaucgucgagagaccaucagcuguuaacggauuguguuaucccgggaauguagaaaaucuagaagagcuaaggucacuuuuuaguucugcuaggucuuaucaaaggauccagauuuucccagacacaaucuggaaugugucuuacagugggacaagcaaagcauguucagauucauucuacagaagcaugagaugguugacucaaaaggacaacgcuuacccuauucaagacgcccaauacacaaauaaucaaggaaagaacauucuuuucauguggggcauaaaucacccacccacugauacugcgcagacaaaucuguacacaagaaccgacacaacaacgaguguggcaacagaagagauaaauaggaccuucaaaccauugauaggaccaaggccucuugucaacgguuugaugggaagaauuaauuauuauuggucgguauuaaaaccgggucaaacacugcgaauaaaaucuaaugggaaucuaauagcuccaugguauggacacauucuuucaggagagagccacggaagaauccugaagacugauuuaaaaagggguagcugcacagugcagugucagacagagaaggguggcuuaaacacaacauugccauuccaaaaugugaguaaguaugcauuuggaaacugcucaaaauacauuggcaugaagagucucaaacuugcaguuggucugaggaaugugccuucuagaucuaguagaggacuauucggggccauagcaggauuuauagagggagguuggucaggacuaguugcugguugguauggauuccagcauucaaaugaccaaggaguugggauggcggcagauagagacucaacccaaaaggcaauugauaaaauaacauccaaagugaauaacauagucgacaaaaugaacaagcaguaugaaauuaucgaucaugaauucagcgagguugaaacuagacuuaacaugaucaauaauaagauugaugaucaaauccaagauauaugggcauauaaugcagaauugcuaguucugcuugaaaaccagaaaacacucgaugagcaugaugcaaauguaaacaaucuauauaauaaagugaagagggcguuggguuccaaugcgguggaagaugggaaaggauguuucgagcuauaccacaaaugugaugaccagugcauggagacaauucggaacgggaccuacaacagaaggaaguaucaagaggagucaaaauuagaaagacagaaaauagagggggucaagcuggaaucugaaggaacuuacaaaauccucaccauuuauucgacugucgccucaucucuugugauugcaaugggguuugcugccuucuuguucugggccauguccaaugggucuugcagaugcaacauuuguauauaa

SEQ ID NO: 42326 - RNA, 1683 nt, Artificial Sequence
  derived and/or modified CDS sequence (wt) from hemagglutinin__InfluenzaA__AGQ81172
auggagacaguaucacugauaacuauacuacuaguaguaacaguaagcaaugcagauaagaucugcaucggcuaucaaucaacaaacuccacagaaacuguagacacacuaacagaaaacaaugucccugugacacaugccagagaacugcuccacacagagcauaauggaaugcugugugcaacaagcuugggacacccucuuauucuagacaccuguaccauugaaggacuaaucuauggcaauccuucuugugaucuauuguugggaggaagagaaugguccuauaucgucgagagaccaucagcuguuaacggauuguguuaucccgggaauguagaaaaucuagaagagcuaaggucacuuuuuaguucugcuaggucuuaucaaaggauccagauuuucccagacacaaucuggaaugugucuuacagugggacaagcaaagcauguucagauucauucuacagaagcaugagaugguugacucaaaaggacaacgcuuacccuauucaagacgcccaauacacaaauaaucaaggaaagaacauucuuuucauguggggcauaaaucacccacccacugauacugcgcagacaaaucuguacacaagaaccgacacaacaacgaguguggcaacagaagagauaaauaggaccuucaaaccauugauaggaccaaggccucuugucaacgguuugaugggaagaauuaauuauuauuggucgguauuaaaaccgggucaaacacugcgaauaaaaucuaaugggaaucuaauagcuccaugguauggacacauucuuucaggagagagccacggaagaauccugaagacugauuuaaaaagggguagcugcacagugcagugucagacagagaaggguggcuuaaacacaacauugccauuccaaaaugugaguaaguaugcauuuggaaacugcucaaaauacauuggcaugaagagucucaaacuugcaguuggucugaggaaugugccuucuagaucuaguagaggacuauucggggccauagcaggauuuauagagggagguuggucaggacuaguugcugguugguauggauuccagcauucaaaugaccaaggaguugguauggcggcagauagagacucaacccaaaaggcaauugauaaaauaacauccaaagugaauaacauagucgacaaaaugaacaagcaguaugaaauuaucgaucaugaauucagcgagguugaaacuagacuuaacaugaucaauaauaagauugaugaucaaauccaagauauaugggcauauaaugcagaauugcuaguucugcuugaaaaccagaaaacacucgaugagcaugaugcaaauguaaacaaucuauauaauaaagugaagagggcguuggguuccaaugcgguggaagaugggaaaggauguuucgagcuauaccacaaaugugaugaccagugcauggagacaauucggaacgggaccuacaacagaaggaaguaucaagaggagucaaaauuagaaagacagaaaauagagggggucaagcuggaaucugaaggaacuuacaaaauccucaccauuuauucgacugucgccucaucucuugugauugcaaugggguuugcugccuucuuguucugggccauguccaaugggucuugcagaugcaacauuuguauauaa

SEQ ID NO: 42327 - RNA, 1683 nt, Artificial Sequence
  derived and/or modified CDS sequence (wt) from hemagglutinin__InfluenzaA__AGQ81173
auggagacagcaucacugauaacuauacuacuaguaguaacaguaagcaaugcagauaagaucugcaucggcuaucaaucaacaaacuccacagaaacuguagacacacuaacagaaaacaaugucccugugacacaugccaaagaacugcuccacacagagcauaaugggaugcugugugcaacaagcuugggaaacccucuuauucuagacaccuguaccauugaaggacuaaucuauggcaauccuucuugugaucuauuguugggaggaagagaaugguccuauaucguugagagaccaucagcuguuaacggauuguguuaucccgggaauguagaaaaucuagaagagcuaaggucacuuuuuaguucugcuaggucuuaucaaaggauccagauuuucccagacacaaucuggaaugugucuuacagugggacaagcaaagcauguucagauucauucuacagaagcaugagaugguugacucaaaaggacaacgcuuacccuauucaagacgcccaauacacaaauaaucaaggaaagaacauucuuuucauguggggcauaaaucacccacccacugauacugcgcagacaaaucuguacacaagaaccgacacaacaacgaguguggcaacagaagagauaaauaggaccuucaaaccauugauaggaccaaggccucuugucaacgguuugaugggaagaauuaauuauuauuggucgguauuaaaaccgggucaaacacugcgaauaaaaucuaaugggaaucuaauagcuccaugguauggacacauucuuucaggagagagccacggaagaauccugaagacugauuuaaaaagggguagcugcacagugcagugucagacagagaaggguggcuuaaacacaacauugccauuccaaaaugugaguaaguaugcauuuggaaacugcucaaaauacauuggcaugaagagucucaaacuugcaguuggucugaggaaugugccuucuagaucuaguagaggacuauucggggccauagcaggauuuauagagggagguuggucaggacuaguugcugguugguauggauuccagcauucaaaugaccaagggguugguauggcggcagauagagacucaacccaaaaggcaauugauaaaauaacauccaaagugaauaacauagucgacaaaaugaacaagcaguaugaaauuaucgaucaugaauucagcgagguugaaacuagacuuaacaugaucaauaauaagauugaugaucaaauccaagauauaugggcauauaaugcagaauugcuaguucugcuugaaaaccagaaaacacucgaugagcaugaugcaaauguaaacaaucuauauaauaaagugaagagggcguuggguuccaaugcgguggaagaugggaaaggauguuucgagcuauaccacaaaugugaugaccagugcauggagacaauucgaaacgggaccuacaacagaaggaaguaucaagaggagucaaaauuagaaagacagaaaauagagggggucaagcuggaaucugaaggaacuuacaaaauucucaccauuuauucgacugucgccucaucucuugugauugcaaugggguuugcugccuucuuguucugggccauguccaaugggucuugcagaugcaacauuuguauauaa

SEQ ID NO: 42328 - RNA, 1683 nt, Artificial Sequence
  derived and/or modified CDS sequence (wt) from hemagglutinin__InfluenzaA__AGQ81175
auggagacaguaucacugauaacuauacuacuaguaguaacaguaagcaaugcagauaagaucugcaucggcuaucaaucaacaaacuccacagaaacuguagacacacuaacagaaaacaauguaccugugacacaugccagagaacugcuccacacagagcauaauggaaugcugugugcaacaagcuugggacacccucuuauucuagacaccuguaccauugaaggacuaaucuauggcaauccuucuugugaucuauuguugggaggaagagaaugguccuauaucgucgagagaccaucagcuguuaacggauuguguuaucccgggaauguagaaaaucuagaagagcuaaggucacuuuuuaguucugcuaggucuuaucaaaggauccagauuuucccagacacaaucuggaaugugucuuacagugggacaagcaaagcauguucagauucauucuacagaagcaugagaugguugacucaaaaggacaacgcuuacccuauucaagacgcccaauacacaaauaaucaaggaaagaacauucuuuucauguggggcauaaaucacccacccacugauacugcgcagacaaaucuguacacaagaaccgacacaacaacgaguguggcaacagaagagauaaauaggaccuucaaaccauugauaggaccaaggccucuugucaacgguuugaugggaagaauuaauuauuauuggucgguauuaaaaccgggucaaacacugcgaauaaaaucuaaugggaaucuaauagcuccaugguauggacacauucuuucaggagagagccacggaagaauccugaagacugauuuaaaaagggguagcugcacagugcagugucagacagagaaggguggcuuaaacacaacauugccauuccaaaaugugaguaaguaugcauuuggaaacugcucaaaauacauuggcaugaagagucucaaacuugcaguuggucugaggaaugugccuucuagaucuaguagaggacuauucggggccauagcaggauuuauagagggagguuggucaggacuaguugcugguugguauggauuccagcauucgaaugaccaaggaguugguauggcggcagauagagacucaacccaaaaggcaauugauaaaauaacauccaaagugaauaacauagucgacaaaaugaacaagcaguaugaaauuaucgaucaugaauucagcgagguugaaacuagacuuaacaugaucaauaauaagauugaugaucaaauccaagauauaugggcauauaaugcagaauugcuaguucugcuugaaaaccagaaaacacucgaugagcaugaugcaaauguaaacaaucuauauaauaaagugaagagggcguuggguuccaaugcgguggaagaugggaaaggauguuucgagcuauaccacaaaugugaugaccagugcauggagacaauucggaacgggaccuacaacagaaggaaguaucaagaggagucaaaauuagaaagacagaaaauagagggggucaagcuggaaucugaaggaacuuacaaaauccucaccauuuauucgacugucgccucaucucuugugauugcaaugggguuugcugccuucuuguucugggccauguccaaugggucuugcagaugcaacauuuguauauaa

SEQ ID NO: 42329 - RNA, 1683 nt, Artificial Sequence
  derived and/or modified CDS sequence (wt) from hemagglutinin__InfluenzaA__AGQ81177
auggagacaguaucacuaauaacuauacuacuaguagcaacaguaagcaaugcagauaaaaucugcaucggcuaucaaucaacaaacuccacagaaacuguggacacacuaacagaaaacaaugucccugugacacaugccaaagaacugcuccacacagagcauaaugggaugcugugugcaacaagcuugggacaaccucuuauuuuagacaccugcaccauugaagggcuaaucuauggcaauccuucuugugaucuauugcuggaaggaagagaaugguccuauaucgucgagagaccaucagcuguuaacggauuguguuaccccgggaauguagaaaaucuagaagagcuaaggucacuuuuuaguucugcuaggucuuaucaaagaauccagauuuucccagacacaaucuggaaugugucuuacaaugggacaagcaaagcaugcucagguucauucuacagaagcaugagaugguugacucgaaagaacggcgauuacccuauccaagacgcccaauacacaaauaaucaagggaagaacauucuuuucauguggggcauaaaucacccacccaccgauacuacgcagagagaucuguacacgagaaccgacacaacaacgaguguggcaacagaagaaauaaauaggaucuucaaaccauugauaggaccaaggccucuugucaacgguuugaugggaagaauugauuauuauuggucgguauugaaaccgggucaaacacugcgaauaaaaucugaugggaaucuaauagcuccaugguauggacacauucuuucaggagagagccacggaagaauucugaagacugauuuaaaaagggguagcugcacagugcaaugucagacagagaaagguggcuuaaacacaacauugccauuccaaaauguaaguaaguaugcauuuggaaacugcucaaaauacauuggcauaaagagucucaaacuugcaguuggucugaggaaugugccuucuagaucuaguagaggacuauucggggccauagcaggguuuauagagggagguuggucaggacuaguugcugguugguauggguuccagcauucaaaugaccaagggguugguauggcagcagauagagacucaacccaaaaggcaauugauaaaauaacauccaaagugaauaauauagucgacaaaaugaacaagcaguaugaaaucauugaucaugaauucagugagguagaaacuagacuuaacaugaucaauaauaagauugaugaucaaauccaggauauaugggcauauaaugcagaauugcuaguucugcuugaaaaccagaaaacacucgaugagcaugacgcaaauguaaacaaucuauauaauaaaguaaagagggcguuggguuccaaugcgguggaagaugggaaaggauguuucgagcuauaccacaaaugugaugaccaaugcauggagacaauucggaacgggaccuacaacagaaggaaguaucaagaggagucaaaauuagaaagacagaaaauagagggggucaagcuggaaucugaaggaacuuacaaaauccucaccauuuauucgacugucgccucaucucuugugauugcaaugggguuugcugccuucuuguucugggccauguccaaugggucuugcagaugcaacauuuguauauaa

SEQ ID NO: 42330 - RNA, 1683 nt, Artificial Sequence; identical to SEQ ID NO: 42329
  derived and/or modified CDS sequence (wt) from hemagglutinin__InfluenzaA__AGQ81178

SEQ ID NO: 42331 - RNA, 1683 nt, Artificial Sequence
  derived and/or modified CDS sequence (wt) from hemagglutinin__InfluenzaA__AGQ81181
auggagacaguaucacuaauaacuauacuacuaguagcaacaguaagcaaugcagauaaaaucugcaucggcuaucaaucaacaaacuccacagaaacuguggacacacuaacagaaaacaaugucccugugacacaugccaaagaacugcuccacacagagcauaaugggaugcugugugcaacaagcuugggacaaccucuuauuuuagacaccugcaccauugaagggcuaaucuauggcaauccuucuugugaucuauugcuggaagggagagaaugguccuauaucgucgagagaccaucagcuguuaacggauuguguuaccccgggaauguagagaaucuagaagagcuaaggucacuuuuuaguucugcuaggucuuaucaaagaauccagauuuucccagacacaaucuggaaugugucuuacaaugggacaagcaaagcaugcucagguucauucuacagaagcaugagaugguugacucaaaagaacagcaauuacccuauucaagacgcccaauacacaaauaaucaagggaagaacauucuuuucauguggggcauaaaucacccacccaccgacacuacgcagagagaucuguacacgagaaccgacacaacaacgaguguggcaacagaagaaauaaauaggaucuucaaaccauugauuggaccaaggccucuugucaacgguuugaugggaagaauugauuauuauuggucgguauugaaaccaggucaaacacugcgaauaaaaucugaugggaaucuaauagcuccaugguauggacacauucuuucaggagagagccacggaagaauucugaagacugauuuaaaaaaggguagcugcacagugcaaugucagacagagaaagguggcuuaaacacaacauugccauuccaaaauguaaguaaguaugcauuuggaaacugcucaaaguacauuggcauaaagagucucaaacuugcaguuggucugaggaaugugccuucuagaucuaguagaggauuauucggggccauagcaggguuuauagagggagguuggucaggacuaguugcugguugguauggguuccagcauucaaaugaccaagggguugguauggcagcagauagagacucaacccaaaaggcaauugauaaaauaacauccaaagugaauaauauagucgacaaaaugaacaagcaguaugaaaucauugaucaugaauucagugagguagaaacuagacuuaacaugaucaauaauaagauugaugaucaaauccaggauauaugggcauauaaugcagaauugcuaguucugcuugaaaaccagaaaacacucgaugagcaugacgcaaauguaaacaaucuauauaauaaaguaaagagggcguuggguuccaaugcgguggaagaugggaaaggauguuucgagcuauaccacaaaugugaugaccaaugcauggagacaauucggaacgggaccuacaacagaaggaaguaucaagaggagucaaaauuagaaagacagaaaauagagggggucaagcuggaaucugaaggaacuuacaaaauccucaccauuuauucgacugucgccucaucucuugugauugcaaugggguuugcugccuucuuguucugggccauguccaaugggucuugcagaugcaacauuuguauauaa

SEQ ID NO: 42332 - RNA, 1683 nt, Artificial Sequence; identical to SEQ ID NO: 42331
  derived and/or modified CDS sequence (wt) from hemagglutinin__InfluenzaA__AGQ81183

SEQ ID NO: 42333 - RNA, 1683 nt, Artificial Sequence; identical to SEQ ID NO: 42320
  derived and/or modified CDS sequence (wt) from hemagglutinin__InfluenzaA__AGQ81184

SEQ ID NO: 42334 - RNA, 1683 nt, Artificial Sequence
  derived and/or modified CDS sequence (wt) from hemagglutinin__InfluenzaA__AGQ81185
auggagacagcaucacuaauaacuauacuacuaguagcaacaguaagcaaugcagauaaaaucugcaucggcuaucaaucaacaaacuccacagaaacuguggacacacuaacagaaaacaaugucccugugacacaugccaaagaacugcuccacacagagcauaaugggaugcugugugcaacaagcuugggacaaccucuuauuuuagacaccugcaccauugaagggcuaaucuauggcaauccuucuugugaucuauugcuggaaggaagagaaugguccuauaucgucgagagaccaucagcuguuaacggauuguguuaccccgggaauguagaaaaucuagaagagcuaaggucacuuuuuaguucugcuaggucuuaucaaagaauccagauuuucccagacacaaccuggaaugugucuuacaaugggacaagcaaagcaugcucagguucauucuacagaagcaugagaugguugacucaaaagaacagcaauuacccuauccaagacgcccaauacacaaauaaucaagggaagaacauucuuuucauguggggcauaaaucacccacccaccgauacuacgcagagagaucuguacacgagaaccgacacaacaacgaguguggcaacagaagaaauaaauaggaucuucaaaccauugauaggaccaaggccucuugucaacgguuugaugggaagaauugauuauuauuggucgguauugaaaccgggucaaacacugcgaauaaaaucugaugggaaucuaauagcuccaugguauggacacauccuuucaggagagagccacggaagaauucugaagacugauuuaaagagggguagcugcacagugcaaugucagacagagaaagguggcuuaaacacaacauugccauuccaaaauguaaguaaguaugcauuuggaaacugcucaaaauacauuggcauaaagagucucaaacuugcaguuggucugaggaaugugccuucuagaucuaguagaggacuauucggggccauagcaggguuuauagagggagguuggucaggacuaguugcugguugguauggguuccagcauucaaaugaccaagggguugguauggcagcagauagagacucaacccaaaaggcaauugauaaaauaacauccaaagugaauaauauagucgacaaaaugaacaagcaguaugaaaucauugaucaugaauucagugagguagaaacuagacuuaauaugaucaauaauaagauugaugaucaaauccaggauauaugggcauauaaugcagaauugcuaguucugcuugaaaaccagaaaacacucgaugagcaugacgcaaauguaaacaaucuauauaauaaaguaaagagggcguuggguuccaaugcgguggaagaugggaaaggauguuucgagcuauaccacaaaugugauaaccaaugcauggagacaauucggaacgggaccuacaacagaaggaaguaucaagaggagucaaaauuagaaagacagaaaauagagggggucaagcuggaaucugaaggaacuuacaaaauccucaccauuuauucgacugucgccucaucucuugugauugcaaugggguuugcugccuucuuguucugggccauguccaaugggucuugcagaugcaacauuuguauauaa

SEQ ID NO: 42335 - RNA, 1683 nt, Artificial Sequence
  derived and/or modified CDS sequence (wt) from hemagglutinin__InfluenzaA__AGQ81186
auggagacaguaucacuaauaacuauacuacuaguagcaacaguaagcaaugcagauaaaaucugcaucggcuaucaaucaacaaacuccacagaaacuguggacacacuaacagaaaacaaugucccugugacacaugccaaagaacugcuccacacagagcauaaugggaugcugugugcaacaagcuugggacaaccucuuauuuuagacaccugcaccauugaagggcuaaucuauggcaauccuucuugugaucuauugcuggaaggaagagaaugguccuauaucgucgagagaccaucagcuguuaacggauuguguuaccccgggaauguagagaaucuagaagagcuaaggucacuuuuuaguucugcuaggucuuaucaaagaauccagauuuucccagacacaaucuggaaugugucuuacgaugggacaagcaaagcaugcucagguucauucuacagaagcaugagaugguugacucaaaagaacagcgauuacccuauucaagacgcccaauacacaaauaaucaagggaagaacauucuuuucauguggggcauaaaucacccacccaccgauacuacgcagagagaucuguacacgagaaccgacacaacaacgaguguggcaacagaagaaauaaauaggaucuucaaaccauugauuggaccaaggccucuugucaacgguuugaugggaagaauugauuauuauuggucgguauugaaaccaggucaaacacugcgaauaaaaucugaugggaaucuaauagcuccaugguauggacacauucuuucaggagagagccacggaagaauucugaagacugaucuaaaaaaggguagcugcacagugcaaugucagacagagaaagguggcuuaaacacaacauugccauuccaaaauguaaguaaguaugcauuuggaaacugcucaaaguacauuggcauaaagagucucaaacuugcaauuggucugaggaaugugccuucuagaucuaguagaggauuauucggggccauagcaggguuuauagagggagguuggucaggacuaguugcugguugguauggguuccagcauucaaaugaccaagggguugguauggcagcagauagagacucaacccaaaaggcaauugauaaaauaacauccaaagugaauaauauagucgacaaaaugaacaagcaguaugaaaucauugaucaugaauucagugagguagaaacuagacuuaacaugaucaauaauaagauugaugaucaaauccaggauauaugggcauauaaugcagaauugcuaguucugcuugaaaaccagaaaacacucgaugagcaugacgcaaauguaaacaaucuauauaauaaaguaaagagggcguuggguuccaaugcgguggaagaugggaaaggauguuucgagcuauaccacaaaugugaugaccaaugcauggagacaauucggaacgggaccuacaacagaaagaaguaucaagaggagucaaaauuagaaagacagaaaauagagggggucaagcuggaaucugaaggaacuuacaaaauccucaccauuuauucgacugucgccucaucucuugugauugcaaugggguuugcugccuucuuguucugggccauguccaaugggucuugcagaugcaacauuuguauauaa

SEQ ID NO: 42336 - RNA, 1683 nt, Artificial Sequence
  derived and/or modified CDS sequence (wt) from hemagglutinin__InfluenzaA__AGQ81190
auggagacaguaucacugauaacuauacuacuaguaguaacaguaagcaaugcagauaagaucugcaucggcuaucaaucaacaaacuccacagaaacuguagacacacuaacagaaaacaaugucccugugacacaugccagagaacugcuccacacagagcauaauggaaugcugugugcaacaagcuugggacacccucuuauucuagacaccuguaccauugaaggacuaaucuauggcaauccuucuugugaucuauuguugggaggaagagaaugguccuauaucgucgagagaccaucagcuguuaacggauuguguuaucccgggaauguagaaaaucuagaagagcuaaggucacuuuuuaguucugcuaggucuuaucaaaggauccagauuuucccagacacaaucuggaaugugucuuacagugggacaagcaaagcauguucagauucauucuacagaagcaugagaugguugacucaaaaggacaacgcuuacccuauucaagacgcccaauacacaaauaaucaaggaaagaacauucuuuucauguggggcauaaaucacccacccacugauacugcgcagacaaaucuguacacaagaaccgacacaacaacgaguguggcaacagaagagauaaauaggaccuucaaaccauugauaggaccaaggccucuugucaacgguuugaugggaagaauuaauuauuauuggucgguauuaaaaccgggucaaacacugcgaauaaaaucuaaugggaaucuaauagcuccaugguauggacacauucuuucaggagagagccacggaagaauccugaagacugauuuaaaaagggguagcugcacagugcagugucagacagagaaggguggcuuaaacacaacauugccauuccaaaaugugaguaaguaugcauuuggaaacugcucaaaauacauuggcaugaagagucucaaacuugcaguuggucugaggaaugugccuucuagaucuaguagaggacuauucggggccauagcaggauuuauagagggagguuggucaggacuaguugcugguugguauggauuccagcauucaaaugaccaaggaguugguauggcggcagauagagacucaacccaaaaggcaauugauaaaauaacauccaaagugaauaacauagucgacaaaaugaacaagcaguaugaaauuaucgaucaugaauucagcgagguugaaacuagacuuaacaugaucaauaauaagauugaugaucaaauccaagauauaugggcauauaaugcagaauugcuaguucugcuugaaaaccagaaaacacucgaugagcaugaugcaaauguaaacaaucuauacaauaaagugaagagggcguuggguuccaaugcgguggaagaugggaaaggauguuucgagcuauaccacaaaugugaugaccagugcauggagacaauucggaacgggaccuacaacagaaggaaguaucaagaggagucaaaauuagaaagacagaaaauagagggggucaagcuggaaucugaaggaacuuacaaaauccucaccauuuauucgacugucgccucaucucuugugauugcaaugggguuugcugccuucuuguucugggccauguccaaugggucuugcagaugcaacauuuguauauaa

SEQ ID NO: 42337 - RNA, 1683 nt, Artificial Sequence; identical to SEQ ID NO: 42325
  derived and/or modified CDS sequence (wt) from hemagglutinin__InfluenzaA__AGQ81191

SEQ ID NO: 42338 - RNA, 1683 nt, Artificial Sequence; identical to SEQ ID NO: 42329
  derived and/or modified CDS sequence (wt) from hemagglutinin__InfluenzaA__AGQ81192

SEQ ID NO: 42339 - RNA, 1683 nt, Artificial Sequence
  derived and/or modified CDS sequence (wt) from hemagglutinin__InfluenzaA__AGQ81193
auggagacaguaucacuaauaacuauacuacuaguagcaacaguaagcaaugcagauaaaaucugcaucggcuaucaaucaacaaacuccacagaaacuguggacacacuaacagaaaacaaugucccugugacacaugccaaagaacugcuccacacagagcauaaugggaugcugugugcaacaagcuugggacaaccucuuauuuuagacaccugcaccauugaagggcuaaucuauggcaauccuucuugugaucuauugcuggaaggaagagaaugguccuauaucgucgagagaccaucagcuguuaacggauuguguuaccccgggaauguagaaaaucuagaagagcuaaggucacuuuuuaguucugcuaggucuuaucaaagaauccagauuuucccagacacaaucuggaaugugucuuacacugggacaagcaaagcaugcucagguucauucuacagaagcaugagaugguugacucaaaagaacggcgauuacccuauccaagacgcccaauacacaaacaaucaagggaagaacauucuuuucauguggggcauaaaucacccacccaccgauacuacgcagagagaucuguacacgagaaccgacacaacaacgaguguggcaacagaagaaauaaauaggaucuucaaaccauugauaggaccaaggccucuugucaacgguuugaugggaagaauugauuauuauuggucgguauugaaaccgggucaaacacugcgaauaaaaucugaugggaaucuaauagcuccaugguauggacacguucuuucaggagagagccacggaagaauucugaagacugauuuaaaaagggguagcugcacagugcaaugucagacagagaaagguggcuuaaacacaacauugccauuccaaaauguaaguaaguaugcauuuggaaacugcucaaaauacauuggcauaaagagucucaaacuugcaguuggucugaggaaugugccuucuagaucuaguagaggacuauucggggccauagcaggguuuauagagggagguuggucaggacuaguugcugguugguauggguuccagcauucaaaugaccaagggguugguauggcagcagauagagacucaacccaaaaggcaauugauaaaauaacauccaaagugaauaauauagucgacaaaaugaacaagcaguaugaaaucauugaucaugaauucagugagguagaaacuagacuuaacaugaucaauaauaagauugaugaucaaauccaggauauaugggcauauaaugcagaauugcuaguccugcuugaaaaccagaaaacacucgaugagcaugacgcaaauguaaacaaucuauauaauaaaguaaagagggcguuggguuccaaugcgguggaagaugggaaaggauguuucgagcuauaccacaaaugugaugaccaaugcauggagacaauucggaacgggaccuacaacagaaggaaguaucaagaggagucaaaauuagaaagacagaaaauagagggggucaagcuggaaucugaaggaacuuacaaaauccucaccauuuauucgacugucgccucaucucuugugauugcaaugggguuugcugccuucuuguucugggccauguccaaugggucuugcagaugcaacauuuguauauaa

SEQ ID NO: 42340 - RNA, 1683 nt, Artificial Sequence; identical to SEQ ID NO: 42326
  derived and/or modified CDS sequence (wt) from hemagglutinin__InfluenzaA__AGQ81194

SEQ ID NO: 42341 - RNA, 1686 nt, Artificial Sequence
  derived and/or modified CDS sequence (wt) from hemagglutinin__InfluenzaA__AGQ81195
auguacaaaauaguagugauaaucacacuccuuggaacugugaagggucuugauaaaaucugccugggacaccaugcaguggccaaugggaccaucguaaagacucucacaaaugaacaggaagaggugaccaaugcuacugaaacaguggaggguaaaagccuaaacagauuauguaugaaaggaagaaaucauaaagaccugggcaacugccauccaauaggaaugcuaauagggacaccagcuugugaucugcaucuuacaggaacaugggacacucucauugaacgagagaaugcuauugcuuacugcuacccuggagcuacuauaaaugaggaagcacugaggcagaaaauaauggagaguggaggaaucagcaaaauaagcacuggauucacuuauggaucuuccauaaauucggccggaaccacuagagcaugcaugaggaauggagggaacagcuuuuaugcagagcuuaaguggcuaguaucaaagagcaaaggacaaaacuucccucagaccacgaacacuuacagaaacacagacacaucugaacaccucauaauguggggaauucaucaucccucuagcacccaagagaagaaugaucuauaugggacacaaucacuguccauaucggucgggaguuccacuuaucagaacaauuuuguuccgguuguuggagcaagaccucaggucaauggacaaaguggcagaaucgauuuucacuggacacuaguacaaccaggugauaauaucacuuucucacacaaugggggucugauagcaccgagccgaguuagcaaauugauuggaagaggauuggggauucagucagacgcaucaauagacaauaauugugaguccaaauguuuuuggagaggggguucuauaaauacaaggcuucccuuucaaaaucugucaccaagaacagugggucaauguccuaaauaugugaacaaaaggagcuugaugcuggcaacaggaaugagaaacgugccagaaauaaugcaagggagaggucuauuuggugcaauagcgggguuuauagagaaugggugggaaggaaugguagauggcugguaugguuucagacaccaaaaugcucagggcacaggccaagccgcugauuacaagaguacucaggcagcuauugaccaaaucacuggaaaacugaauagacuuauugaaaaaaccaauacugaguucgagucaauagaaucugaguucagugagauugaacaucagaucgguaacgucaucaauuggacuaaggauucaauaaccgacaucuggacuuaucaggcugagcuauugguagcaauggagaaccagcauacaaucgauauggcugauucagagauguugaaucuauaugaaagagugaggaaacaacucaggcagaaugcagaagaagacgggaaaggauguuuugaaauauaucaugcuugugaugacucaugcauggagagcauaagaaacaacaccuaugaccauucacaguacagagaagaagcucuuuugaacagacugaauaucaacccagugacacucucuucuggcuauaaagacaucauccucugguuuagcuucggggcaucauguuuuguucuucuagccguugucaugggucuugucuuuuucugccugaagaauggaaacaugcgaugcacaaucuguauuuag

SEQ ID NO: 42342 - RNA, 1686 nt, Artificial Sequence
  derived and/or modified CDS sequence (wt) from hemagglutinin__InfluenzaA__AGQ81196
auguacaaaauaguaguaauaaucgcgcuccuuggagcugugaaaggucuugacaaaaucugccuaggacaucaugcgguggccaaugggaccaucguaaagacucucacaaacgaacaggaggaagugaccaaugcuacugaaacaguggagagugcaagccuaaacagguuauguaugaaaggaagaagccauaaagaccugggcaacugccauccaauaggaauguugauaggaacaccagcuugugaucugcaucuuacagggacaugggacacucucauugaacgagagaaugcuauugcuuacugcuacccuggagcaaccguaaaugaagaagcacugaggcagaaaauaauggagagugggggaaucagcaaaauuagcacuggcuucacuuaugggucuuccauaaauucggccggaaccacuaaagcaugcaugaggaauagagggaauagcuuuuacgcagagcucaaguggcugguaucaaagagcaaaggacaaaacuucccccagaccacgaacacuuacagaaacacggauacggcugaacaucucauaauguggggaauucaucacccuucuagcacucaagagaagaaugaucuauaugggacacaaucauuguccauaucgguugggaguuccacuuaccagaacaauuuuguuccgguuguuggggcaaggccccaagucaauggacaaagcggaagaaucgauuuucacuggacacuaguacagccaggugauaauaucaccuucucacacaaugggggucugauagcaccgagucgaguuaguaaauugguuggaagaggauuggggauucaaucagacgcaccaauagacaauaauugugagucuaaauguuuuuggagaggggguucuauaaauacaagacucccuuuccaaaauuugucaccaagaacagugggccaauguccuaaauacgugaacaaaaggagcuugaugcuugcaacaggaaugagaaaugugccagaaauaaugcaagggagaggucuauuuggugcaauagcgggauuuauagagaauggaugggaaggaaugguagaugguugguacgguuucagacaccaaaacgcucagggcacaggccaagccgccgacuacaagaguacucagacagccauugaccagaucacuggaaaacugaauagacuuauugagaaaaccaacacugaguuugaaucaauagaaucugaauucagugagaucgaacaccaaaucgggaacgucaucaauuggacuaaggauucaauaacugacaucuggacuuaucaggcugagcuauugguagcaauggagaaccagcacacaaucgauauggcugacucagagauguuaaaucuauaugagagagugaggaaacaacucaggcagaaugcugaagaggacggaaaaggauguuuugagauauaucaugcuugugaugacucaugcauggagagcauaagaaacaacaccuaugaucauucacaauacagagaagaggcucuuuugaacagacugaauaucaauccagugaaacucucuuccggcuauaaagacaucauccuuugguuuagcuucggggcaucauguuuuguucuucuagccguugucaugggucuuguuuucuucugucugaagaauggaaacaugcgaugcacaaucuguauuuag

SEQ ID NO: 42343 - RNA, 1686 nt, Artificial Sequence
  derived and/or modified CDS sequence (wt) from hemagglutinin__InfluenzaA__AGQ81198
auguacaaaauaguagugauaaucgcgcuccuuggagcugugaagggucuugauaaaaucugccugggacaucaugcaguggccaaugggaccaucguaaagacccucacaaaugaacaggaagaggugaccaaugcuacugaaacaguggagaguacaagccuaaacagauuauguaugaaaggaagaaaccauaaagaccugggcaacugccauccaauaggaaugcuaauagggacaccagcuugugaucugcaucuuacagggacgugggacacucucauugaacgagagaaugcuauugcuuacugcuacccuggagcuacuauaaaugaagaagcacugaggcagaaaauaauggagaguggaggaaucagcaaaauaagcacuggauucacuuauggaucuuccauaaauucggcuggaaacacuaaagcaugcaugaggaauggagggaauagcuuuuaugcagagcuuagguggcugguaucaaagaacaaaggacaaaacuucccucagaccacgaacacuuacagaaacacagacacggcugaacaccucauaauauggggaauucaucaucccucuagcacuaaagagaagaaugaucuauaugggacacaaucacuguccauaucggucgggaguuccacuuaccagaacaauuuuguuccgguuguuggagcaagaccucaggucaauggacaaaguggcagaaucgauuuucacuggacacuuguacagccaggugauaauaucaccuucucacacaaugggggucugauagcaccgagccgaguuagcaaauugauuggaagaggauuggggauucaaucagacgcaccaauagacaauaauugugaguccaaauguuuuuggagaggggguucuauaaauacaaggcuucccuuucaaaauuugucaccaagaacagugggucaauguccuaaauaugugaacaaaaagagcuugaugcuugcaacaggaaugagaaacgugccagaaauaaugcaagggagaggucuauuuggugcaauagcgggguuuauagagaaugggugggaaggaaugguagauggcugguaugguuucagacaccaaaaugcucagggcacaggccaagccgcugauuacaagaguacucaggcagcuauugaccaaaucacuggaaaacugaauagacuuauugaaaaaaccaauacugaguucgagucaauagaaucugaguucagugagaucgaacaccagaucgguaacgucaucaauuggacuaaggauucaauaaccgacaucuggacuuaucaggcugagcuauugguagcaauggagaaccagcauacaaucgauauggcugauucagagauguugaaucuauaugaaagagugaggaaacaacucaggcagaaugcagaagaagacgggaaaggauguuuugaaauauaucaugcuugugaugacucaugcauggagagcauaagaaacaacaccuaugaccauucacaguacagagaagaagcucuuuugaacagacugaauaucaacccagugacacucucuucuggcuauaaagacaucauccucugguuuagcuucggggcaucauguuuuguucuucuagccguugucaugggucuugucuucuucugucugaagaauggaaacaugcgaugcacaaucuguauuuag

SEQ ID NO: 42344 - RNA, 1686 nt, Artificial Sequence
  derived and/or modified CDS sequence (wt) from hemagglutinin__InfluenzaA__AGQ81199
auguacaaaauaguaguaauaaucgcgcuccuuggagcugugaaaggucuugacaaaaucugccuaggacaucaugcgguggccaaugggaccaucguaaagacucucacaaacgaacaggaggaagugaccaaugcuacugaaacaguggagagugcaagccuaaacagguuauguaugaaaggaagaagccauaaagaccugggcaacugccauccaauaggaauguugauaggaacaccagcuugugaucugcaucuuacagggacaugggacacucucauugaacgagagaaugcuauugcuuacugcuacccuggagcaaccguaaaugaagaagcacugaggcagaaaauaauggagagugggggaaucagcaaaauuagcacuggcuucacuuaugggucuuccauaaauucggccggaaccacuaaagcaugcaugaggaauggagggaauagcuuuuacgcagagcucaaguggcugguaucaaagagcaaaggacaaaacuucccccagaccacgaacacuuacagaaacacggauacggcugaacaucucauaauguggggaauucaucacccuucuagcacucaagagaagaaugaucuauaugggacacaaucauuguccauaucgguugggaguuccacuuaccagaacaauuuuguuccgguuguuggggcaaggccccaagucaauggacaaagcggaagaaucgauuuucacuggacacuaguacagccaggugauaauaucaccuucucacacaaugggggucugauagcaccgagucgaguuaguaaauugguuggaagaggauuggggauucaaucagacgcaccaauagacaauaauugugagucuaaauguuuuuggagaggggguucuauaaauacaagacucccuuuccaaaauuugucaccaagaacagugggccaauguccuaaauacgugaacaaaaggagcuugaugcuugcaacaggaaugagaaaugugccagaaauaaugcaagggagaggucuauuuggugcaauagcgggauuuauagagaauggaugggaaggaaugguagaugguugguacgguuucagacaccaaaacgcucagggcacaggccaagccgccgacuacaagaguacucagacagccauugaccagaucacuggaaaacugaauagacuuauugagaaaaccaacacugaguuugaaucaauagaaucugaauucagugagaucgaacaccaaaucgggaacgucaucaauuggacuaaggauucaauaacugacaucuggacuuaucaggcugagcuauugguagcaauggagaaccagcacacaaucgauauggcugacucagagauguuaaaucuauaugagagagugaggaaacaacucaggcagaaugcugaagaggacggaaaaggauguuuugagauauaucaugcuugugaugacucaugcauggagagcauaagaaacaacaccuaugaucauucacaauacagagaagaggcucuuuugaacagacugaauaucaauccagugaaacucucuuccggcuauaaagacaucauccuuugguuuagcuucggggcaucauguuuuguucuucuagccguugucaugggucuuguuuucuucugucugaagaauggaaacaugcgaugcacaaucuguauuuag

SEQ ID NO: 42345 - RNA, 1698 nt, Artificial Sequence
  derived and/or modified CDS sequence (wt) from hemagglutinin__InfluenzaA__AGQ81200
augaagaaaacacugcuauuugcagcuauuuuccuuuauguaaaggcagaugaaaucugcaucggcuauuuaagcaacaacucaacggacaagguugacacaauaaucgagaacaaugucacgguaacuagcucaguggaacuagucgaaacagaacacacuggaucauucuguucaaucaaugggaaacaaccaauaggccuuggagauugcuccuucgcuggguggauauuggggaaucccaugugugaugaccuaauugguaagacuucauggucuuacaucguggagaagcccaacccagcaaacggaaucuguuacccaggaacauuagagaaugaagaggaacugagauugaaauucaguggaguccuggaauucagcaaauucgaagcauucacaucaaccggauggggugcuguaaauucaggagcaggagugacugcugcauguaaguuugggagcuccaauuccuucuuccgaaacaugguauggcugauacaccaaucaggaacauacccuguaauaaagaggaccuucaacaacaccaaaggaagagauguguugguuguuuggggaauucaccacccugccacacugaaagagcaucaggaccuauauaagaaagacagcuccuauguagcaguggguucagaaaccuacaacaggagauucauaccagaaaucagcacuaggcccaaaguuaauggacaggcuggaaggaugacauuuuauuggacaauagucaaaccaggggagucaauaacauuugaaucuaauggugcauuccuggcuccuagauaugcuuuugaaauugucucuguuggaaaugggaaacuauucaggagugaacugaauauugaaucaugcucuaccaaaugucaaacggaaauaggaggaauuaauacaaacaaaagcuuucacaguguucauagaaacacuaucggagacugucccaaauaugugaaugucaaaucuuuaaagcuugccacgggacucagaaaugucccagcaauagcaucaagaggguuauuuggagcaauagccggguuuauagaagguggauggccuggacugaucaauggaugguacggguuucaacacagaaaugaagaaggaacagguauagcagcagacaaggagucaacucagaaggcaauagaccagauaacguccaaaguaaauaauaucgucgacaagaugaauacaaauuucgagucugugcaacacgaauucagugaaauagaggagaggauaaaccaauugucgaaacauguagaugacucuguaguugacaucuggucauauaaugcacaacuccucguuuugcuugaaaaugagaagacccuggaccuccacgauuccaaugucagaaaucuccaugagaagguuaggaggaugcuaaaggacaaugccaaagaugaggggaacggauguuucaccuuuuaccauaagugugauaacgaaugcauugaaaggguuagaaacgggacauacgaucacaaagaauucgaggaagaaucuaaaaucaaucgucaggagaucgagggagugaaauuagacuccagugggaauguauauaaaauacugucaauuuacagcugcauugcaagcagucucguauuggcagcacucaucauggguuucauccucugggcgugcaguaauggaucauguagauguaccauuugcauuuaa

SEQ ID NO: 42346 - RNA, 1698 nt, Artificial Sequence
  derived and/or modified CDS sequence (wt) from hemagglutinin__InfluenzaA__AGQ81202
augaagaaaacacugcuauuugcagcuauuuuccuuuaugugaaggcagaugaaaucugcaucggcuauuuaagcaacaacucaacagacaagguugacacaauaaucgagaacaaugucacggugacuagcucaguggaacuagucgaaacagaacacacuggaucauucuguucaaucaaugggaaacaaccaauaagucuuggagauugcuccuucgcuggguggauauuggggaaucccaugugugaugaccuaauugguaagacuucauggucuuacaucguggagaagcccaacccagcaaacgggaucuguuacccaggaacauuggagaaugaagaggaacugagauugaaauucaguggaguccuggaauucagcaaauucgaagcauucacaucaaacggauggggugcuguaaauucaggggcaggagugacugcugcauguaaguuugggagcuccaauuccuucuuccgaaacacgguauggcugauacaccaaucaggaacauacccuguaauaaagaggaccuucaacaacaccaaaggaagagauguguugguuguuuggggaguucaccacccugccacacugaaagagcaucaggaccuauacaagaaagacagcuccuauguagcaguggguucggaaaccuacaacaggagauucauaccagaaaucagcacuaggcccaaaguuaauggacaggcuggaaggaugacauuuuauuggacaauagucaaaccaggggaaucaauaacauuugaaucuaauggugcauuccuggcuccuagauaugcuuuugagauugucucuguuggaaaugggaaacuauucaggagugaacugaauauugaaucaugcucuaccaaaugucaaacggaaauaggaggaauuaauacaaacaaaagcuuucacaguguucauagaaacacuaucggagacugucccaaauaugugaaugucaaaucuuuaaagcuugccacgggacucagaaaugucccagcaauagcaucaagaggcuuguuuggagcaauagccggguuuauagaagguggauggccuggacugaucaauggaugguacggguuucaacacaggaaugaagaaggaacaggaauagcagcagacaaggagucaacucagaaggcaauagaccagauaacguccaaaguaaacaauaucgucgacagaaugaauacaaauuucgaaucugugcaacacgaguccagugaaauagaggagaggauaaaccaauugucgaaacauguagaugauucuaugguugacaucuggucauauaaugcacaacuccuuguuuugcuugaaaaugagaagacccuggaucuccaugauuccaaugucagaaaucuccaugagaagguuaggaggaugcuaaaggacaaugccaaagaugaggggaacggauguuucaccuuuuaccauaagugugauaacaaaugcaucgaaaggguuagaaacgggacauaugaucacaaagaauucgaggaagaaucuaaaaucaaucgucaggagaucgagggaguaaaauuagacuccagugggaauguauauaaaauacugucaauuuacagcugcauugcaagcagucucguauuggcagcacucaucauggguuucauccucugggcgugcaguaauggaucauguagauguaccauuugcauuuag

SEQ ID NO: 42347 - RNA, 1698 nt, Artificial Sequence
  derived and/or modified CDS sequence (wt) from hemagglutinin__InfluenzaA__AGQ81203
augaagaaaacacugcuauuugcagcuauuuuccuuuaugugaaggcagaugaaaucugcaucggauacuuaagcaacaacucaacagacaaaguugacacaauaaucgagaacaaugucacgguaacuagcucaguggaacuagucgaaacagaacacacuggaucauucuguucaaucaaugggaaacaaccaauaagccuuggagauugcuccuucgcuggguggauauuggggaauccaaugugugaugaccuaauugguaagacuucauggucuuacaucguggagaaacccaacccagcaaacggaaucuguuacccaggaacauuggagaaugaagaagaacugagauugaaauucaguggaguccuggaauucaacaaauucgaagcauucacaucaaacggauggggugcuguaaauucaggagcaggagugacugcugcauguaaguuugggagcuccaauucuuucuuccgaaacaugguauggcugauacaccaaucaggaacauacccuguaauaaagaggaccuucaacaacaccaaaggaagagauguguugguuguuuggggaauucaccacccugccacacugaaagagcaucaggaccuauacaagaaggacagcuccuauguagcaguggguucagaaacuuacaacaggagauucauaccagaaaucagcacuaggcccaaaguuaauggacaggcuggacggaugacauuuuauuggacaauagucaaaccaggggagucaauaacauuugaaucuaauggugcauuccuggcuccuagauaugcuuuugagauugucucuguuggaaaugggaaacuauucaggagugaacugaauauugaaucaugcucuaccaagugucaaacagaaauaggaggaaucaauacaaacaagagcuuucacaguguucauagaaacacuaucggagacugucccaaauaugugaaugucaaaucuuuaaagcuugccacgggacucagaaaugucccagcaauagcaucaagaggcuuguuuggagcaauagccggguuuauagaagguggauggccuggacugaucaauggaugguacggguuucaacacaggaaugaagaaggaacagguauagcagcagacaaggagucaacucagaaggcgauagaccaaauaacguccaaaguaaauaauaucgucgacaggaugaauacaaauuucgagucugugcaacacgaauucagugaaauagaggagaggauaaaccaauugucgaaacauguagaugauucugugguugacauuuggucauauaaugcacaacuccucguucugcuugaaaaugaaaagacccuggaccuccacgauuccaaugucagaaaucuccaugagaagguuaggaggaugcuaaaggacaaugccaaagaugaggggaacggauguuucaccuuuuaccauaagugugauaacgaaugcaucgaaaggguuaggaacgggacauacgaucacaaagaauucgaggaagagucuaaaaucaaucgucaggagaucgagggagugaaauuagacuccagugggaauguauauaaaauacugucaauuuacagcugcauugcaagcagucucguauuggcagcacucaucauggguuucauccucugggcgugcaguaauggaucauguagauguaccauuugcauuuag

SEQ ID NO: 42348 - RNA, 1698 nt, Artificial Sequence
  derived and/or modified CDS sequence (wt) from hemagglutinin__InfluenzaA__AGQ81204
augaagaaaacacugcuauuugcagcuauuuuccuuuaugugaaggcagaugaaaucugcaucggauacuuaagcaacaacucaacagacaaaguugacacaauaaucgagaacaaugucacgguaacuagcucaguggaacuagucgaaacagaacacacuggaucauucuguucaaucaaugggaaacaaccaauaagccuuggagauugcuccuucgcuggguggauauuggggaaucccaugugugaugaccuaauugguaagacuucauggucuuacaucguggagaaacccaacccagcaaacggaaucuguuacccaggaacauuggagaaugaagaagaacugagauugaaauucaguggaguccuggaauucaacaaauucgaagcauucacaucaaacggauggggugcuguaaauucaggagcaggagugacugcugcauguaaguuugggagcuccaauucuuucuuccgaaacaugguauggcugauacaccaaucaggaacauacccuguaauaaagaggaccuucaacaacaccaaagggagagauguguugguuguuuggggaauucaccacccugccacacugaaagagcaucaggaccuauacaagaaggacagcuccuauguagcaguggguucagaaacuuacaacaggagauucauaccagaaaucagcacuaggcccaaaguuaauggacaggcuggacggaugacauuuuauuggacaauagucaaaccaggggagucaauaacauuugaaucuaauggugcauuccuggcuccuagauaugcuuuugagauugucucuguuggaaaugggaaacuauucaggagugaacugaauauugaaucaugcucuaccaagugucaaacagaaauaggaggaaucaauacaaacaagagcuuucacaguguucauagaaacacuaucggagacugucccaaauaugugaaugucaaaucuuuaaagcuugccacgggacucagaaaugucccagcaauagcaucaagaggcuuguuuggagcaauagccggguuuauagaagguggauggccuggacugaucaauggaugguacggguuucaacacaggaaugaagaaggaacagguauagcagcagacaaggagucaacucagaaggcgauagaccaaauaacguccaaaguaaauaauaucgucgacaggaugaauacaaauuucgggucugugcaacacgaauucagugaaauagaggagaggauaaaccaauugucgaaacauguagaugauucugugguugacauuuggucauauaaugcacaacuccucguucugcuugaaaaugaaaagacccuggaccuccacgauuccaaugucagaaaucuccaugagaagguuaggaggaugcuaaaggacaaugccaaagaugaggggaacggauguuucaccuuuuaccauaagugugauaacgaaugcaucgaaaggguuaggaacgggacauacgaucacaaagaauucgaggaagagucuaaaaucaaucgucaggagaucgagggagugaaauuagacuccagugggaauguauauaaaauacugucaauuuacagcugcauugcaagcagucucguauuggcagcacucaucauggguuucauccucugggcgugcaguaauggaucauguagauguaccauuugcauuuag

SEQ ID NO: 42349 - RNA, 1698 nt, Artificial Sequence
  derived and/or modified CDS sequence (wt) from hemagglutinin__InfluenzaA__AGQ81205
augaagaaaacacugcuauuugcagcuauuuuccuuuaugugaaggcagaugaaaucugcaucggauacuuaagcaacaacucaacagacaaaguugacacaauaaucgagaacaaugucacgguaacuagcucaguggaacuagucgaaacagaacacacuggaucauucuguucaaucaaugggaaacaaccaauaagccuuggagauugcuccuucgcuggguggauauuggggaauccaaugugugaugaccuaauugguaagacuucauggucuuacaucguggagaaacccaacccagcaaacggaaucuguuacccaggaacauuggagaaugaagaagaacugagauugaaauucaguggaguccuggaauucaacaaauucgaagcauucacaucaaacggauggggugcuguaaauucaggagcaggagugacugcuacauguaaauuugggagcuccaauucuuucuuccgaaacaugguauggcugauacaccaaucaggaacauacccuguaauaaagaggaccuucaacaacaccaaaggaagagauguguugguuguuuggggaauucaccacccugccacacugaaagagcaucaggaccuauacaagaaggacagcuccuauguagcaguggguucagaaacuuacaacaggagauucauaccagaaaucagcacuaggcccaaaguuaauggacaggcuggacggaugacauuuuauuggacaauagucaaaccaggggagucaauaacauuugaaucuaauggugcauuccuggcuccuagauaugcuuuugagauugucucuguuggaaaugggaaacuauucaggagugaacugaauauugaaucaugcucuaccaagugucaaacagaaauaggaggaaucaauacaaacaagagcuuucacaguguucauagaaacacuaucggagacugucccaaauaugugaaugucaaaucuuuaaagcuugccacgggacucagaaaugucccagcaauagcaucaagaggcuuguuuggagcaauagccggguuuauagaagguggauggccuggacugaucaauggaugguacggguuucaacacaggaaugaagaaggaacagguauagcagcagacaaggagucaacucagaaggcgauagaccaaauaacguccaaaguaaauaauaucgucgacaggaugaauacaaauuucgagucugugcaauacgaauucagugaaauagaggagaggauaaaccaauugucgaaacauguagaugauucugugguugacauuuggucauauaaugcacaacuccucguucugcuugaaaaugaaaagacccuggaccuccacgauuccaaugucagaaaucuccaugagaagguuaggaggaugcuaaaggacaaugccaaagaugaggggaacggauguuucaccuuuuaccauaagugugauaacgaaugcaucgaaaggguuaggaacgggacauacgaucacaaagaauucgaggaagagucuaaaaucaaucgucaggagaucgagggagugaaauuagacuccagugggaauguauauaaaauacugucaauuuacagcugcauugcaagcagucucguauuggcagcacucaucauggguuucauccucugggcgugcaguaauggaucauguagauguaccauuugcauuuag

SEQ ID NO: 42350 - RNA, 1698 nt, Artificial Sequence
  derived and/or modified CDS sequence (wt) from hemagglutinin__InfluenzaA__AGQ81206
augaagaaaacacugcuauuugcagcuauuuuccuuuaugcaaaggcagaugaaaucugcaucggcuauuuaagcaacaauucaacagacaaagucgacacaauaaucgagaacaaugucacgguaacuagcucaguggaacuagucgagacagaacacacuggaucauucuguucaaucaaugggaaacaaccaauaagccuuggagauugcucuuucgcuggguggauauuggggaaucccaugugugaugaccuaauugguaagacuucauggucuuacaucguggagaaacccaacccagcaaacggaaucuguuacccaggaacauuggagaaugaagaagaacugagaucgaaauucaguggaguccuggaauucagcaaauucgaagcauucacaucaaacggauggggugcuguaaauucaggagcaggagugacugcugcauguaaguuugggagcuccaauuccuucuuccgaaacaugguauggcugauacaccaaucaggaacauauccuguaauaaagaggaccuucaacaacaccaaaggaagagauguguugguuguuuggggaauucaccacccugccacacugaaagagcaucaggaccuauacaagaaggacagcuccuauguagcaguggguucagaaaccuacaacaggagauucauaccagaaaucagcacuaggcccaaaguuaauggacaggcuggacggaugacauuuuauuggacaauagucaaaccagaggagucaauaacauuugaaucuaauggugcauuccuggcuccuagauaugcuuuugagauugucucuguuggaaaugggaaacuauucaggagugaacugaauauugaaucaugcucuaccaaaugucaaacggaaauaggaggaauuaauacaaacaaaagcuuucacaguguucauagaaacacuaucggagacugucccaaauaugugaaugucaaaucguuaaagcuugccacgggacucagaaaugucccagcaauagcaucaagaggcuuguucggagcaauagccggguuuauagaagguggauggccuggacugaucaauggaugguacggguuucaacacaggaaugaagaaggaacagguauagcagcagacaaggagucaacucagaaggcaauagaccagauaacguccaaaguaaauaauaucgucgacaggaugaauacaaauuucgagucugugcaacacgaauucagugaaauagaggagaggauaaaccaauugucgaaacauguagaugauucugugguugacaucuggucauauaaugcacaacuccucguuuugcuugaaaaugagaagacccuggaccuccaugauuccaaugucagaaaucuccaugagaagguuaggagaaugcuaaaggacaaugccaaagaugaggggaacggguguuucaccuuuuaccauaagugugauaaugaaugcaucgaaaggguuaggaacgggacauacgaucacaaagaauucgaggaagaaucuaaaaucaaucgucaggagaucgagggagugaaauuagacuccagugggaaugucuauaaaauacugucaauuuacagcugcauugcaagcagucucauauuggcagcacucaucauggguuucauccucugggcgugcaguaauggaucauguagauguaccauuugcauuuag

SEQ ID NO: 42351 - RNA, 1698 nt, Artificial Sequence
  derived and/or modified CDS sequence (wt) from hemagglutinin__InfluenzaA__AGQ81209
augaagaaaacacugcuauuugcagcuauuuuccuuuauguaaaggcagaugaaaucuguaucggcuauuuaagcaacaacucaacagacaaaguugacacaauaauugagaacaaugucacuguaacuagcucaguggaacuaguugaaacagaacacacugggucauucuguucaaucaaugggaaacaaccaauaagccuuggagauugcuccuuugcuggguggauauugggaaaucccaugugugaugaccuaauugguaagacuucaugguccuacauuguggagaagcccaacccagcaaacggaaucuguuacccaggaacauuggagaaugaagaagaacugagauugaaauucaguggaauccuggaauucagcaaauucgaagcauucacaucaaacggauggggugcugugaauucaggagcaggagugaccgcugcaugcaaguuugggagcuccaauucauucuuccgaaacaugguauggcugauacaccaaucaggaacauacccuguaauaaagagaaccuucaacaacaccaaaggaagagauguguugauuguuuggggaauucaccacccugccacacugaaagagcaccaggaccuauacaagaaggacagcuccuauguagcaguggguucagaaaccuacaacaggagauucauaccagaaaucagcacuaggcccaaaguuaauggacaggcuggacggaugacauuuuauuggacaauagucaaaccaggggagucaauaacauuugagucuaauggugcauuccuggcuccuagauaugcuuuugagauugucuccguugggaauggaaaacuauucaggagugaacugaauauugaaucaugcucuaccaaaugucaaacagaaauaggaggaauuaauacaaacaaaagcuuucacaguguucacagaaacacuaucggagacugucccaaauaugugaaugucaaaucucuaaagcuugccacgggacucagaaaugucccagcaauagcaucaagaggcuuguuuggagcaauagccggauuuauagaagguggauggccuggacugaucaauggaugguacggguuucaacauaggaaugaagaaggaacaggcauagcagcagacaaggagucaacucagaaggcaauagaccagauaacguccaaaguaaauaauaucgucgacagaaugaauacaaauuucgagucugugcaacacgaauucagugaaauagaggagaggauaaaccaguugucgaaacauguagaugauucuguggucgacaucuggucauauaaugcacaacuucucguuuugcuugaaaaugagaagacccuggaccuccacgauuccaaugucagaaaucuccaugagaagguuagaaggaugcuaaaagacaaugccaaagacgaggggaacggauguuucaccuuuuaccauaagugugauaaugaaugcaucgaaaggguuagaaacggaacauaugaucacaaggaauucgaagaagaaucuaaaaucaaucgucaggagaucgagggagugaaauuagacucuagugggaauguguauagaauacugucaauuuacagcugcauugcaagcagucucguauuggcagcgcucaucauggguuucauccucugggcgugcaguaauggaucauguagauguaccauuugcauuuag

SEQ ID NO: 42352 - RNA, 1698 nt, Artificial Sequence
  derived and/or modified CDS sequence (wt) from hemagglutinin__InfluenzaA__AGQ81211
augaagaaaacacugcuauuugcagcuauuuuccuuuauguaaaggcagaugaaaucuguaucggcuauuuaagcaacaacucaacagacaaaguugacacaauaauugagaacaaugucacuguaacuagcucaguggaacuagucgaaacagaacacacugggucauucuguucaaucaaugggaaacaaccaauaagccuuggagauugcuccuuugcuggguggauauugggaaaucccaugugugaugaccuaauugguaagacuucaugguccuacauuguggagaagcccaacccagcaaacggaaucuguuacccaggaacauuggagaaugaagaagaacugagauugaaauucaguggaguccuggaauucagcaaauucgaagcauucacaucaaacggauggggugcugugaauucaggagcaggagugaccgcugcaugcaaguuugggagcuccaauucauucuuccgaaacaugguauggcugauacaccaaucaggaacauacccuguaauaaagagaaccuucaacaacaccaaaggaagagauguguugauuguuuggggaauucaccacccugccacacugaaagagcaccaggaccuauacaagaaggacagcuccuauguagcaguggguucagaaaccuacaacaggagauucauaccagaaaucagcacuaggcccaaaguuaauggacaggcuggacggaugacauuuuauuggacaauagucaaaccaggggagucaauaacauuugagucuaauggugcauuccuggcuccuagauaugcuuuugagauugucuccguugggaauggaaaacuauucaggagugaacugaauauugaaucaugcucuaccaaaugucaaacagaaauaggaggaauuaauacaaacaaaagcuuucacaguguucacagaaacacuaucggagacugucccaaauaugugaaugucaaaucucuaaagcuugccacgggacucagaaaugucccagcaauagcaucaagaggcuuguuuggagcaauagccggauuuauagaagguggauggccuggacugaucaauggaugguacggguuucaacauaggaaugaagaaggaacaggcauagcagcagacaaggagucaacucagaaggcaauagaccagauaacguccaaaguaaauaauaucgucgacagaaugaauacaaauuucgagucugugcaacacgaauucagugaaauagaggagaggauaaaccaguugucgaaacauguagaugauucuguggucgacaucuggucauauaaugcacaacuucucguuuugcuugaaaaugagaagacccuggaccuccacgauuucaaugucagaaaucuccaugagaagguuagaaggaugcuaaaagacaaugccaaagacgaggggaacggauguuucaccuuuuaccauaagugugauaaugaaugcaucgaaaggguuagaaacggaacauaugaucacaaggaauucgaagaagaaucuaaaaucaaucgucaggagaucgagggagugaaauuagacucuagugggaauguguauagaauacugucaauuuacagcugcauugcaagcagucucguauuggcagcgcucaucauggguuucauccucugggcgugcaguaauggaucauguagauguaccauuugcauuuag

SEQ ID NO: 42353 - RNA, 1698 nt, Artificial Sequence
  derived and/or modified CDS sequence (wt) from hemagglutinin__InfluenzaA__AGQ81213
augaagaaaacacugcuauuugcagcuauuuuccuuuauguaagggcagaugaaaucuguaucggcuauuuaaguaacaacucaacagacaaaguugacacaauaauugagaacaaugucaccguaacuagcucaguggaacuagucgaaacagaacacacugggucauucuguucaauuaaugggaaacaaccaauaagccuuggagauugcuccuuugcuggguggauauugggaaaucccaugugugauggccuaauugguaagacuucauggucuuacauuguggaaaagcccaacccagcaaacggaaucuguuacccaggaacauuggagaaugaagaagaacugagauugaaauucaguagaguccuggaauucagcaaauucgaagcauucacaucaaauggauggggugcugugaauucaggagcaggagugacugcugcaugcaaguuugggagcuccaauuccuucuuccgaaacaugguauggcugauacaccaaucaggaacauacccuguaauaaagaggaccuucaacaacaccaaaggaagagauguguugguuguuuggggaauucaucacccugccacacugaaagagcaccaggaucuauacaagaaggacagcuccuauguagcaguggguucagaaaccuacaacaggagauucauaccagaaaucagcacuaggcccacaguuaaugggcaggcuggacggaugaccuuuuauuggacaauagucaaaccaggagaaucaauaacauuugagucuaauggugcauuccuagcucccagauaugcuuuugagauugucuccguugggaauggaaaacuauucaggagugaacugaauauugaaucaugcucuaccaaaugucaaacggaaauaggaggaauuaauacaaacaaaagcuuucacaguguucacagaaacacuaucggagacugucccaaauaugugaaugucaaaucucuaaagcuugccacgggacucagaaaugucccagcaauagcaucaagaggcuuguuuggagcaauagccggguuuauagaagguggauggcccggacugaucaauggaugguacggguuucaacauagaaaugaagaaggaacaggcauagcagcagacaaagagucaacucagaaggcaauagaccagauaacauccaaaguaaauaauauagucgacagaaugaauacaaauuucgagucugugcaacacgaauucagugaaauagaggagaggauaaaccaguugucgaaacauguagaugauucuguggucgacaucuggucauauaaugcacaacuucucguuuugcuugaaaaugagaaaacccuggaccuccacgauuccaaugucagaaaucuccaugagaagguuagaagaaugcuaaaggacaaugccaaagacgaggggaacggauguuucaccuuuuaccauaagugugauaaugaaugcaucgaaaggguuagaaacgggacauaugaucacaaggaauucgaagaagaaucuaaaaucaaucgucaggagaucgagggagugaaauuagacucuagugggaauguguauaaaauacugucaauuuacagcugcauugcaagcagucucguauuggcagcgcucaucauggguuucauccucugggcgugcaguaauggaucauguagauguaccauuugcauuuag

SEQ ID NO: 42354 - RNA, 1698 nt, Artificial Sequence
  derived and/or modified CDS sequence (wt) from hemagglutinin__InfluenzaA__AGQ81214
augaagaaaacacugcuauuugcagcuauuuuccuuuauguaaaggcagaugaaaucuguaucggcuacuuaagcaacaacucaacagacaaaguugacacaauaauugaaaacaaugucacuguaacuagcucaguggaacuagucgaaacagaacacacugggucauucuguucaaucaaugggaaacaaccaauaagccuuggagauugcuccuuugcuggguggauauugggaaaucccaugugugaugaccuaauugguaagacuucaugguccuacauuguggagaagcccaacccagcaaacggaaucuguuacccaggaacauuggagaaugaagaagaacugagauugaaauucaguggaguccuggaauucagcaaauucgaagcauucacaucaaacggauggggugcuguaaauucaggagcaggagugacugcugcaugcaaguuugggagcuccaauuccuucuuccgaaacaugguauggcugauacaccaaucaggaacauacccuguaauaaagaggaccuucaacaacaccaagggaagagauguguugauuguuuggggaauucaccacccugcaacacugaaagagcaccaggaucuauacaagaaggacagcuccuauguagcaguggguucagaaaccuacaacaggagauucauaccagaaaucagcacuaggcccaaaguuaauggacaggcuggacggaugaccuuuuauuggacaauagucaaaccaggagagucaauaacauuugagucuaauggugcauuccuagcuccuagauaugcuuuugagauugucuccguugggaaugggaaacuauucaggagugaacugaauauugaaucaugcucuaccaaaugucaaacagaaauaggaggaauuaauacaaacaaaagcuuucacaguguucacagaaacacuaucggagacugucccaaauaugugaaugucaaaucucuaaagcuugccacgggacucagaaaugucccagcaauaacaucaagaggcuuguuuggagcaauagccggguuuauagaagguggauggccuggacugaucaauggaugguacggguuucaacauaggaaugaagaaggaacaggcauagcggcagacaaggagucaacucagaaggcaauagaccagauaacguccaaaguaaauaauaucgucgacagaaugaauacaaauuucgagucugugcaacacgaauucagugaaauagaggggaggauaaaccaguugucgaaacauguagaugauucuguggucgacaucuggucauauaaugcacagcuucucguuuugcuugaaaaugagaagacccuggaucuccacgauuccaaugucagaaaucuccaugagaagguuagaaggaugcuaaaggacaaugccaaagacgaggggaacggauguuucaccuuuuaccauaagugugauaaugaaugcauugaaaggguuagaaacggaacauaugaucacaaggaauucgaagaagaaucuaaaauaaaucgucaggagaucgagggagugaaauuagacucuagugggaauguguauaaaauacugucaauuuacagcugcauugcaagcagucucguauuggcagcacucaucauggguuucauccucugggcgugcaguaacggaucauguagauguaccauuugcauuuag

SEQ ID NO: 42355 - RNA, 1698 nt, Artificial Sequence
  derived and/or modified CDS sequence (wt) from hemagglutinin__InfluenzaA__AGQ81215
augaagaaaacacugcuauuugcagcuauuuuccuuuauguaaaagcagaugaaaucuguaucggcuauuuaagcaacaacucaacagacaagguugacacaauaaucgagaacaaugucacaguaacuagcucaguggaacuaguugaaacagaacacacuggaucauucuguucaaucaaugggaaacaaccaauaagccuuggagauugcuccuuugcgggguggauauugggaaaucccaugugugauggccuaauugguaagacuucaugguccuacauuguggagaagcccaacccagcaaacggaaucuguuacccaggaacauuggagaaugaagaagaacugagauugaaauucaguggaauacuggaauucagcaaauucgaagcauucacaucaaacggauggggugcugugaauucaggagcaggagugacugcugcaugcaaguuugggagcuccaauuccuucuuccgacacaugguauggcugauacaccaaucgggaacauacccuguaauaaagaggaccuucaacaacaccaaaggaagagauguguugguuguuuggggaauucaccacccugccacacugaaagagcaacaggaucuauacaagaaggacagcuccuauguagcaguggguucagaaaccuacaacaggagauucauaccagaaaucagcacuaggcccaaaguuaauggacaagcuggacggaugacauuuuauuggacaauagucaaaccaggagagucaauaacauuugagucuaauggugcauuccuagcuccuagauaugcuuuugagauuguuuccguuggaaauggaaaacuauucaggagugaacugaauauugaaucaugcucuaccaaaugucaaacagaaauaggagggauuaauacaaacaaaagcuuucacaguguucacagaaacacuaucggagacugucccaaauaugugaaugucaaaucucuaaagcuugccacaggacucagaaaugucccagcaauagcaucaagaggcuuguuuggggcaauagccggauuuauagaagguggauggccuggacugaucaauggaugguacggguuucaacauagaaaugaagaaggaacaggcauagcagcagacaaggagucaacucagaaggcaauagaccaaauaacguccaaaguaaauaauaucgucgacagaaugaauacaaauuucgagucugugcaacacgaauucagugaaauagaggagaggauaaaccaguugucgaaacauguagaugauucuguggucgacaucuggucauauaaugcacagcuccucguuuugcuugaaaaugagaagacccuggaccuccacgauuccaaugucagaaaucuccaugagaagguuagaagaaugcuaaaggacaaugccaaagacgaggggaacggauguuucaccuuuuaccauaagugugauaaugaaugcaucgaaaggguuagaaacggaacauaugaucacaaagaauuugaagaagaaucuaaaaucaaucgucaggagaucgagggagugaaauuagacuccagugggaauguguauaaaauacugucaauuuacagcugcauugcaagcagucucguauuggcggcacucauuauggguuucauccucugggcaugcaguaauggaucauguagauguaccauuugcauuuag

SEQ ID NO: 42356 - RNA, 1698 nt, Artificial Sequence
  derived and/or modified CDS sequence (wt) from hemagglutinin__InfluenzaA__AGQ81216
augaagaaaacacugcuauuugcagcuaucuuccuuuauguaaaggcagaugagaucugcaucggcuauuuaagcaacaacucaacagacaaaguugacacaauaaucgagaacaaugucacgguaacuagcucaguggaacuagucgaaacagagcacacuggaucauucuguucaaucaaugggaaacaaccaauaagccuuggagauugcuccuuugcuggguggauauuggggaaucccaugugugaugaucuaauugguaagacuucaugguccuacauuguagagaagcccaacccagcaaacggaaucuguuacccaggaacauuggagaaugaagaagaacugagauugaaauucaguggaguccuggaauucagcaaauuugaagcauucacaucaaauggauggggugcuguaaauucaggagcaggagugacugcugcaugcaaguuugggagcuccaauuccuucuuccgaaacaugguauggcugauacaccaaucaggaacauacccuguaacaaaaaggaccuucaacaacaccaaaggaagagauguguugguugucuggggaauucaccacccugccacacugaaagagcaucaggaucuauacaagaaggacagcuccuauguagcaguggguucagaaaccuacaacaggagauucacaccagaaaucagcacuaggcccaaaguuaauggacaggcuggacggaugacauuuuauuggacaauagucaaaccaggagagucaauaacauuugagucuaauggugcauucuuggcuccuagauaugcuuuugaaauugucuccguuggaaauggaaaacuauucaggagugaacugaauauugaaucaugcucuaccaaaugucaaacagaaauaggaggaauuaauacaaacaaaagcuuucacaguguucauaggaacacuaucggagauugccccaaauauguaaaugucaagucucuaaagcuugccacgggacucagaaaugucccagcaauagcaucaaaaggcuuauuuggagcaauagccggauuuauagaagguggauggccugggcugaucaauggaugguacggauuucaacacaggaaugaagaagggacagguauagcagcagacaaagagucaacucagaaggcaauagaccaaauaacguccaaaguaaacaauaucgucgacaggaugaauacaaauuucgagucuguucgacacgaguucagugaaauagaggagaggauaaaucaauugucgaaacauguagaugauucuguaguugacaucuggucauauaaugcacaacuccucguuuugcuugaaaaugagaagacccuggaccuucacgauuccaaugucagaaaucuccaugagaggguuagaaggaugcuaaaagacaaugccaaagaugaggggaacggauguuucaccuuuuaccacaagugugacaacgaaugcauugaaagggucagaaacgggacauaugaucacaaagaauucgaggaagaauccaaaaucaaucgucaggagaucgagggagugaaauuagacuccagugggaauguguauaaaauacugucaauuuacagcugcauugcaagcagucucguauuggcagcacucaucauggguuucauccucugggcgugcgguaauggaucauguagauguaccauuugcauuuag

SEQ ID NO: 42357 - RNA, 1698 nt, Artificial Sequence
  derived and/or modified CDS sequence (wt) from hemagglutinin__InfluenzaA__AGQ81217
augaagaaaacacugcuauuugcagcuauuuuccuuuaugcaaaggcagaugaaaucugcaucggcuauuuaagcaacaauucaacagacaaagucgacacaauaaucgagaacaaugucacgguaacuagcucaguggaacuagucgagacagaacacacuggaucauucuguucaaucaaugggaaacaaccaauaagccuuggagauugcucuuucgcuggguggauauuggggaaucccaugugugaugaccuaauugguaagacuucauggucuuacaucguggagaaacccaacccagcaaacggaaucuguuacccaggaacauuggagaaugaagaagaacugagauugaaauucaguggaguccuggaauucagcagauucgaagcauucacaucaaacggauggggugcuguaaauucaggagcaggagugacugcugcauguaaguuugggagcuccaauuccuucuuccgaaacaugguauggcugauacaccaaucaggaacauauccuguaauaaagaggaccuucaacaacaccaaaggaagagauguguugguuguuuggggaauucaccacccugccacacugaaagagcaucaggaccuauacaagaaggacagcuccuauguagcaguggguucagaaaccuacaacaggagauucauaccagaaaucagcacuaggcccaaaguuaauggacaggcuggacggaugacauuuuauuggacaauagucaaaccagaggagucaauaacauuugaaucuaauggugcauuccuggcuccuagauaugcuuuugagauugucucuguuggaaaugggaaacuauucaggagugaacugaauauugaaucaugcucuaccaaaugucaaacggaaauaggaggaauuaauacaaacaaaagcuuucacaguguucauagaaacacuaucggagacugucccaaauaugugaaugucaaaucguuaaagcuugccacgggacucagaaaugucccagcaauagcaucaagaggcuuguucggagcaauagccggguuuauagaagguggauggccuggacugaucaauggaugguacggguuucaacacaggaaugaagaaggaacagguauagcagcagacaaggagucaacucagaaggcaauagaccagauaacguccaaaguaaauaauaucgucgacaggaugaauacaaauuucgagucugugcaacacgaauucagugaaauagaggagaggauaaaccaauugucgaaacauguagaugauucugugguugacaucuggucauauaaugcacaacuccucguuuugcuugaaaaugagaagacccuggaccuccaugauuccaaugucagaaaucuccaugagaagguuaggagaaugcuaaaggacaaugccaaagaugaggggaacggauguuucaccuuuuaccauaagugugauaaugaaugcaucgaaaggguuaggaacgggacauacgaucacaaagaauucgaggaagaaucuaaaaucaaucgucaggagaucgagggagugaaauuagacuccagugggaaugucuauaaaauacugucaauuuacagcugcauugcaagcagucucauauuggcagcacucaucauggguuucauccucugggcgugcaguaauggaucauguagauguaccauuugcauuuag

SEQ ID NO: 42358 - RNA, 1704 nt, Artificial Sequence
  derived and/or modified CDS sequence (wt) from hemagglutinin__InfluenzaA__AGQ88499
auggagaaaauagugcuucuuuuugcaacaaucagccuuguuaaaagcgaucauauuugcauugguuaucaugcaaauaacucgacagagcagguugacacaauaauggaaaagaacguuacuguuacacaugcccaagacauacuggaaaagacacacaacgggaagcucugcgaucuaaauggagugaagccucugauuuuaaaagauuguaguguagcaggauggcuccucggaaacccaaugugugacgaauucaucaaugugccagaauggucuuacauaguagagaaggccaauccagccaaugaccucuguuacccagggaauuucaacgauuaugaggaauugaaacaccuauugagcagaauaaaccauuuugagaaaauacaaaucauccccaaagauucuuggacagaucaugaagccucauugggggugagugcagcauguccauaccagggaaauuccuccuucuucagaaaugugguauggcuuaucaaaaaggacaaugcauacccaacaauaaagaaaggcuacaauaauacuaaccaagaagaucucuugguacugugggggauucaccauccuaauaaugaggcagagcagacaaggcucuaucaaaacccaaccaccuauauuuccauugggacaucaacacuaaaccagagauugguaccaaaaauagccacuagauccaaaauaaacggacaaaguggcagaauagauuucuucuggacaauuuuaaaaccgaaugaugcaauccacuucgagaguaauggaaauuucauugcuccagaauaugcauacaaaauugucaagaaaggagacucaacaauuaugaaaagugaaguggaauaugguaacugcaacaccaggugucagacuccgauaggggcgauaaacucuaguaugccguuccacaacauacacccucucaccaucggagaaugucccaaauaugugaaaucaaacaaacuaguccuugcuacugggcucagaaauaguccucaaagagagagaagaagaaaaagaggauuguuuggagcuauagcagguuuuauagagggaggauggcagggaaugguagaugguugguauggguaccaccacagcaaugagcaggggaguggguacgcugcagacaaggaaucaacucaaaaggcaauagacggagucaccaauaaggucaacucgaucauugacaaaaugaacacucaguuugaggccguaggaagggaauuuaauaacuuagagaggagaauagagaauuugaacaagaagauggaagacggauuccuagaugucuggacuuauaaugcugaacuucugguucucauggaaaaugagagaacucuagacuaccaugacucaaaugucaggaaccuuuacgacaaggucagacuacagcuuaaggauaacgcaaaagagcuggguaacgguuguuucgaguucuaucacaaauguaauaaugaauguauggaaaguguaagaaacggaacguaugacuacccgcaguauucagaagaagcaagauuaaaaagagaggaaauaaguggaguaaaauuggaaucaauaggaaucuaccaaauacugucaauuuauucaacaguggcgaguucccuaguacuggcaaucaugauggcuggucuaucuuuauggauguguuccaacgggucguuacagugcagaauuugcauuuaa

SEQ ID NO: 42359 - RNA, 1683 nt, Artificial Sequence; identical to SEQ ID NO: 42254
  derived and/or modified CDS sequence (wt) from hemagglutinin__InfluenzaA__AGR33888

SEQ ID NO: 42360 - RNA, 1683 nt, Artificial Sequence; identical to SEQ ID NO: 42254
  derived and/or modified CDS sequence (wt) from hemagglutinin__InfluenzaA__AGR33889

SEQ ID NO: 42361 - RNA, 1683 nt, Artificial Sequence
  derived and/or modified CDS sequence (wt) from hemagglutinin__InfluenzaA__AGR33890
augaacacucaaauccuaguauucgcucugauugcgaucacuccaacaaauucagacaaaaucugccucggacaucaugcugugucaaacggaaccaaaguaaacacauuaacugaaagaggaguggaagucgucaaugcaacugaaacaguggaacgaacaagcauccccaggaucugcucaaaagggaaaagaacaguugaccucggucaauguggacuccuagggacaaucacugggccaccucaaugugaccaauuccuagaauuuucagccgauuuaauuauugagaggcgagaaggaagugaugucuguuauccugggaaauucgugaaugaagaagcucugaggcaaauucucagggaaucaggcggaaucgacaaggaagcaaugggauucacauacagcggaauaagaacuaauggagcaaccagugcauguaggagaucaggaucuucauucuaugcagaaaugaaauggcuccuaucaaacacagauaaugcugcuuucccgccgaugacuaagucauauaaaaauacaagaaaggccccagcucuaauaauaugggggauccaucauuccguaucaacugcagagcaaaccaagcuauaugggaguggaaacaaacuggugacaguuaggaguucuaauuaucaacaaucuuuugugccgaguccaggagcgggaccacaaguuaauggucaaucuggaaggauugacuuucauuggcuaaugcuaaaucccaaugacacagucaccuucagcuucaauggggcuuucauagcuccagaccgugcaagcuuccugagagggaaaucuaugggaauccagaguggaguacagguugaugccaauugugaaggggacugcuaucauaguggagggacaauaauaaguaauuugccauuucagaacauagacagcagaguaguaggaaaauguccgagauauguuaagcaaaagagucugcugcuagcaacagggaugaagaauguuccugagauuccaaagggaagaggccuauuuggugcuauagcggguuucauugaaaauggaugggaaggccuaauugaugggugguaugguuucagacaccagaaugcacagggagagggaacugcugcagauuacaaaagcacucaaucggcaauuaaucaaaugacaggaaaauuaaaccggcuuauagaaaaaaccaaccaacaauuugaguugauagacaaugaauucacugagguagagaagcaaauugguaaugugauaaauuggaccagagacucuauaacagaaguguggucauacaaugcugaacucuugguagcaauggagaaccagcauacaauugaucuggcugauucagaaaugaacaaacuguacgaacgagugaaaagacagcugagagagaaugcugaagaagauggcacugguugcuuugaaauauuucacaaaugugaugaugacuguauggccaguauuagaaauaacaccuaugaucacagcaaauacagggaggaagcaaugcaaaauagaauacagauugacccagucaaacuaagcagcggcuacaaagaugugauacuuugguuuagcuucggggcaucauguuucauacuucuagccauugcaaugggccuugucuucauaugugugaaaaauggaaacaugcggugcacuauuuguauauaa

SEQ ID NO: 42362 - RNA, 1683 nt, Artificial Sequence
  derived and/or modified CDS sequence (wt) from hemagglutinin__InfluenzaA__AGR33892
augaacacucaaauccuaguauucgcucugauugcgaucauuccaacaaaugcagacaaaaucugccucggacaucaugcugugucaaacggaaccaaaguaaacacauuaacugaaagaggaguggaagucgucaaugcaacugaaacaguggaacgaacaagcauccccaggaucugcucaaaagggaaaagaacaguugaccucggucaauguggacuccuagggacaaucacugggccaccucaaugugaccaauuccuagaauuuucagccgauuuaauuauugagaggcgagaaggaagugaugucuguuauccugggaaauucgugaaugaagaagcucugaggcaaauucucagggaaucaggcggaaucaacaaggaagcaaugggauucacauacagcggaauaagaacuaauggagcaaccagugcauguaggagaucaggaucuucauucuaugcagaaaugaaauggcuccuaucaaacacagauaaugcugcuuucccgccgaugacuaagucauauaaaaauacaagaaaggccccagcucuaauaauaugggggauccaucauuccggaucaacugcagagcaaaccaagcuauaugggaguggaaacaaaauggugacaguuaggaguucuaauuaucaacaaucuuuugugccgaguccaggagcgggaccacaaguuaauggucaaucuggaaggauugacuuucauuggcuaaugcuaaaucccaaugacacagucacuuuuagcuucaauggggcuuucauagcuccagaccgugcaagcuuccugagagggaaaucuaugggaauccagaguggaguacagguugaugccaauugugaaggggacugcuaucauaguggagggacaauaauaaguaauuugccauuucagaacauagacagcagaguaguaggaaaauguccgagauauguuaagcaaaagagucugcugcuagcaacagggaugaagaauguuccugagauuccaaagggaagaggccuauuuggugcuauagcggguuucauugaaaauggaugggaaggccuaauugaugggugguaugguuucagacaccagaaugcacagggagagggaacugcugcagauuacaaaagcacucaaucggcaauuaaucagaugacaggaaaauuaaaccggcuuauagaaaaaaccaaccaacaauuugaguugauagacaaugaauucacugagguagagaagcaaauugguaaugugauaaauuggaccagagacucuauaacagaaguguggucauacaaugcugaacucuugguagcaauggagaaccagcauacaauugaucuggcugauucagaaaugaacaaacuguacgaacgagugaaaagacagcugagagagaaugcugaagaagauggcacugguugcuuugaaauauuucacaaaugugaugaugacuguauggccaguauuagaaauaacaccuaugaucacagcaaauacagggaggaagcaaugcaaaauagaauacagauugacccagucaaacuaagcagcggcuacaaagaugugauacuuugguuuagcuucggggcaucauguuucauacuucuagccauugcaaugggccuugucuucauauguguagaaaauggaaacaugcggugcacuauuuguauauaa

SEQ ID NO: 42363 - RNA, 1683 nt, Artificial Sequence; identical to SEQ ID NO: 42244
  derived and/or modified CDS sequence (wt) from hemagglutinin__InfluenzaA__AGR33895

SEQ ID NO: 42364 - RNA, 1683 nt, Artificial Sequence
  derived and/or modified CDS sequence (wt) from hemagglutinin__InfluenzaA__AGR33897
auggagacaguaucacuaauaacuauacuacuaguagcaacaguaagcaaugcagauaaaaucugcaucggcuaucaaucaacaaacuccacagaaacuguggacacacuaacagaaaacaaugucccugugacacaugccaaagaacugcuccacacagagcauaaugggaugcugugugcaacaagcuugggacaaccucuuauuuuagacaccugcaccauugaagggcuaaucuauggcaauccuucuugugaucuauugcuggaaggaagagaaugguccuauaucgucgagagaccgucagcuguuaacggauuguguuaccccgggaauguagagaaucuagaagagcuaaggucacuuuuuaguucugcuaggucuuaucaaagaauccagauuuucccagacacaaucuggaaugugucuuacgaugggacaagcaaagcaugcucagguucauucuacagaagcaugagaugguugacucaaaagaacagcgauuacccuauucaagacgcccaauacacaaauaaucaagggaagaacauucuuuucauguggggcauaaaucacccacccaccgauacuacgcagagagaucuguacacgagaaccgacacaacaacgaguguggcaacagaagaaauaaauaggaucuucaaaccauugauuggaccaaggccucuugucaacgguuugaugggaagaauugauuauuauuggucgguauugaaaccgggucaaacacugcgaauaaaaucugaugggaaucuaauagcuccaugguauggacacauucuuucaggagagagccacggaagaauucugaagacugauuuaaaaaaggguagcugcacagugcaaugucagacagagaaagguggcuuaaacacaacauugccauuccaaaauguaaguaaguaugcauuuggaaacugcucaaaguacauuggcauaaagagucucaaacuugcaguuggucugaggaaugugccuucuagaucuaguagaggauuauucggggccauagcaggguuuauagagggagguuggucaggacuaguugcugguugguauggguuccagcauucaaaugaccaagggguugguauggcagcagauagagacucaacccaaaaggcaauugauaaaauaacauccaaagugaauaauauagucgacaaaaugaacaagcaguaugaaaucauugaucaugaauucagugagguagaaacuagacuuaacaugaucaauaauaagauugaugaucaaauccaggauauaugggcauauaaugcagaauugcuaguucugcuugaaaaccagaaaacacucgaugagcaugacgcaaauguaaacaaucuauauaauaaaguaaagagggcguuggguuccaaugcgguggaagaugggaaaggauguuucgagcuauaccacaaaugugaugaccaaugcauggagacaauucggaacgggaccuacaacagaaggaaguaucaagaggagucaaaauuagaaagacagaaaauagagggggucaagcuggaaucugaaggaacuuacaaaauccucaccauuuauucgacugucgccucaucucuugugauugcaaugggguuugcugccuucuuguucugggccauguccaaugggucuugcagaugcaacauuuguauauaa

SEQ ID NO: 42365 - RNA, 1683 nt, Artificial Sequence
  derived and/or modified CDS sequence (wt) from hemagglutinin__InfluenzaA__AGR33899
auggagacaguaucacuaauaacuauacuacuaguagcaacaguaagcaaugcagauaaaaucugcaucggcuaucaaucaacaaacuccacagaaacuguggacacacuaacagaaaacaaugucccugugacacaugccaaagaacugcuccacacagagcauaaugggaugcugugugcaacaagcuugggacaaccucuuauuuuagacaccugcaccauugaagggcuaaucuauggcaauccuucuugugaucuauugcuggaagggagagaaugguccuauaucgucgagagaccaucagcuguuaacggauuguguuaccccgggaauguagagaaucuagaagagcuaaggucacuuuuuaguucugcuaggucuuaucaaagaauccagauuuucccagacacaaucuggaaugugucuuacaaugggacaagcaaagcaugcucagguucauucuacagaagcaugagaugguugacucaaaagaacagcaauuacccuauucaagacgcccaauacacaaauaaucaagggaagaacauucuuuucauguggggcauaaaucacccacccaccgacacuacgcagagagaucuguacacgagaaccgacacaacaacgaguguggcaacagaagaaauaaauaggaucuucaaaccauugauuggaccaaggccucuugucaacgguuugaugggaagaauugauuauuauuggucgguauugaaaccaggucaaacacugcgaauaaaaucugaugggaaucuaauagcuccaugguauggacacauucuuucaggagagagccacggaagaauucugaagacugauuuaaaaaaggguagcugcacagugcaaugucagacagagaaagguggcuuaaacacaacauugccauuccaaaauguaaguaaguaugcauuuggaaacugcucaaaguacauuggcauaaagagucucaaacuugcaguuggucugaggaaugugccuucuagaucuaguagaggauuauucggggccauagcaggguuuauagagggagguuggucaggacuaguugcugguugguauggauuccagcauucaaaugaccaagggguugguauggcagcagauagagauucaacccaaaaggcaauugauaaaauaacauccaaagugaauaauauagucgacaaaaugaacaagcaguaugaaaucauugaucaugaauucagugagguagaaacuagacuuaacaugaucaauaauaagauugaugaucaaauccaggauauaugggcauauaaugcagaauugcuaguucugcuugaaaaccagaaaacacucgaugagcaugacgcaaauguaaacaaucuauauaauaaaguaaagagggcguuggguuccaaugcgguggaagaugggaaaggauguuucgagcuauaccacaaaugugaugaccaaugcauggagacaauucggaacgggaccuacaacagaaguaaguaucaagaggagucaaaauuagaaagacagaaaauagagggggucaagcuggaaucugaaggaacuuacaaaauccucaccauuuauucgacugucgccucaucucuugugauugcaaugggguuugcugccuucuuguucugggccauguccaaugggucuugcagaugcaacauuuguauauaa

SEQ ID NO: 42366 - RNA, 1683 nt, Artificial Sequence
  derived and/or modified CDS sequence (wt) from hemagglutinin__InfluenzaA__AGR33900
auggagacaguaucacuaauaacuauacuacuaguagcaacaguaagcaaugcagauaaaaucugcaucggcuaucaaucaacaaacuccacagaaacuguggacacacuaacagaaaacaaugucccugugacacaugccaaagaacugcuccacacagagcauaaugggaugcugugugcaacaagcuugggacaaccucuuauuuuagacaccugcaccauugaagggcuaaucuauggcaauccuucuugugaucuauugcuggaaggaagagaaugguccuauaucgucgagagaccaucagcuguuaacggauuguguuaccccgggaauguagagaaucuagaagagcuaaggucacuuuuuaguucugcuaggucuuaucaaagaauccagauuuucccagacacaaucuggaaugugucuuacaaugggacaagcaaagcaugcucagguucauucuacagaagcaugagaugguugacucaaaagaacagcgauuacccuauucaagacgcccaauacacaaauaaucaagggaagaacauucuuuucauguggggcauaaaucacccacccaccgauacuacgcagagagaucuguacacgagaaccgacacaacaacgaguguggcaacagaagaaauaaauaggaucuucaaaccauugauuggaccaaggccucuugucaacgguuugaugggaagaauugauuauuauuggucaguauugaaaccgggucaaacacugcgaauaaaaucugaugggaaucuaauagcuccaugguauggacacauucuuucaggagagagccacggaagaauucugaagacugauuuaaaaaaggguagcugcacagugcaaugucagacagagaaagguggcuuaaacacaacauugccauuccaaaauguaaguaaguaugcauuuggaaacugcucaaaguacauuggcauaaagagucucaaacuugcaguuggucugaggaaugugccuucuagaucuaguagaggauuauucggggccauagcaggguuuauagagggagguuggucaggacuaguugcugguugguauggguuccagcauucaaaugaccaagggguugguauggcagcagauagagacucaacccaaaaggcaauugauaaaauaacauccaaagugaauaauauagucgacaaaaugaacaagcaguaugaaaucauugaucaugaauucagugagguagaaacuagacuuaacaugaucaauaauaagauugaugaucaaauccaggauauaugggcauauaaugcagaauugcuaguucugcuugaaaaccagaaaacacucgaugagcaugacgcaaauguaaacaaucuauauaauaaaguaaagagggcguuggguuccaaugcgguggaagaugggaaaggauguuucgaucuauaccacaaaugugaugaccaaugcauggagacaauucggaacgggaccuacaacagaaggaaguaucaagaggagucaaaauuagaaagacagaaaauagagggggucaagcuggaaucugaaggaacuuacaaaauccucaccauuuauucgacugucgccucaucucuugugauugcaaugggguuugcugccuucuuguucugggccauguccaaugggucuugcagaugcaacauuuguauauaa

SEQ ID NO: 42367 - RNA, 1683 nt, Artificial Sequence
  derived and/or modified CDS sequence (wt) from hemagglutinin__InfluenzaA__AGR33902
auggagacagcaucacuaauaacuauacuacuaguagcaacaguaagcaaugcagauaaaaucugcaucggcuaucaaucaacaaacuccacagaaacuguggacacacuaacagaaaacaaugucccugugacacaugccaaagaacugcuccacacagagcauaaugggaugcugugugcaacaagcuugggacaaccucuuauuuuagacaccugcaccauugaagggcuaaucuauggcaauccuucuugugaucuauugcuggaaggaagagaaugguccuauaucgucgagagaccaucagcuguuaacggauuguguuaccccgggaauguagaaaaucuagaagagcuaaggucacuuuuuaguucugcuaggucuuaucaaagaauccagaucuucccagacaccaccuggaaugugucuuacaaugggauaagcaaagcaugcucagguucauucuacagaagcaugagaugguugacucaaaagaacagcaauuacccuauccaagacgcccaauacacaaauaaucaagggaagaacauucuuuucauguggggcauaaaucacccacccaccgauacuacgcagagagaucuguacacgagaaccgacacaacaacgaguguggcaacagaagaaauaaauaggaucuucaaaccauugauaggaccaaggccucuugucaacgguuugaugggaagaauugauuauuauuggucgguauugaaaccgggucaaacacugcgaauaaaaucugaugggaaucuaauagcuccaugguauggacacauucuuucaggagagagccacggaagaauucugaagacugauuuaaagagggguagcugcacagugcaaugucagacagagaaagguggcuuaaacacaacauugccauuccaaaauguaaguaaguaugcauuuggaaacugcucaaaauacauuggcauaaagagucucaaacuugcaguuggucugaggaaugugccuucuagaucuaguagaggacuauucggggccauagcaggguuuauagagggagguuggucaggacuaguugcugguugguauggguuccagcauucaaaugaccaagggguugguauggcagcagauagagacucaacccaaaaggcaauugauaaaauaacauccaaagugaauaauauagucgacaaaaugaacaagcaguaugaaaucauugaucaugaauucagugagguagaaacuagacuuaacaugaucaauaauaagauugaugaucaaauccaggauauaugggcauauaaugcagaauugcuaguucugcuugaaaaccagaaaacacucgaugagcaugacgcaaauguaaacaaucuauauaauaaaguaaagagggcguuggguuccaaugcgguggaagaugggaaaggauguuucgagcuauaccacaaaugugauaaccaaugcauggagacaauucggaacgggaccuacaacagaaggaaguaucaagaggagucaaaauuagaaagacagaaaauagagggggucaagcuggaaucugaaggaacuuacaaaauccucaccauuuauucgacugucgccucaucucuugugauugcaaugggguuugcugccuucuuguucugggccauguccaaugggucuugcagaugcaacauuuguauauag

SEQ ID NO: 42368 - RNA, 1698 nt, Artificial Sequence; identical to SEQ ID NO: 37543
  derived and/or modified CDS sequence (wt) from hemagglutinin__InfluenzaA__AGR49817

SEQ ID NO: 42369 - RNA, 1698 nt, Artificial Sequence
  derived and/or modified CDS sequence (wt) from hemagglutinin__InfluenzaA__AGR49841
augaaaguaaaacuacugguccuguuaugcacauuuacagcuacauaugcagacacaauauguauaggcuaccaugcuaacaacucgaccgacacuguugacacaguacuugaaaagaaugugacagugacacacucugucaaccugcuugagaacagucacaauggaaaacuaugucuauuaaaaggaauagccccacuacaauuggguaacugcagcguugccggguggaucuuaggaaacccagaaugcgaauuacugauuuccaaagagucaugguccuacauuguagaaaaaccaaauccugagaauggaacauguuacccagggcauuucgcugacuaugaggaacugagggagcaauugaguucaguaucuucauuugagagguucgaaauauuccccaaagaaagcucauggcccaaccacaccguaaccggagugucagcaucaugcucccauaauggggaaagcaguuuuuacagaaauuugcuauggcugacggggaagaaugguuuguacccaaaccugagcaaguccuaugcaaacaacaaagaaaaagaaguccuuguacuaugggguguucaucacccgccaaacauaguugaccaaaagacccucuaccguacagaaaaugcuuauguuucuguagugucuucacauuauagcagaaaauucaccccagaaauagccaaaagacccaaaguaagagaccaagaaggaagaaucaacuacuacuggacucugcuugaacccagggauacaauaauauuugaggcaaauggaaaucuaauagcgccaagauaugcuuucgcacugaguagaggcuuuggaucaggaaucaucaacucaaaugcaccaauggguaaaugugaugcgaagugccaaacaccucagggagcuauaaacagcagucuuccuuuccagaacguacacccagucacaauaggagaguguccaaaguaugucaggagugcaaaauuaaggaugguuacaggacuaaggaacaucccauccauucaauccagagguuuguuuggagccauugccgguuucauugaagggggguggacuggaaugguagaugguugguaugguuaucaucaucagaaugagcaaggaucuggcuaugcugcagaucaaaaaagcacacaaaaugccauuaaugggauuacaaacaaggugaauucuguaauugagaaaaugaacacucaauucacagcagugggcaaagaauucaacaaauuggaaagaaggauggaaaacuugaauaaaaaaguugaugauggguuuauagacauuuggacauauaaugcagaacuguugguucuacuggaaaaugaaaggacuuuggauuuccaugacuccaaugugaagaaucuguaugagaaaguaaaaagccaguuaaagaauaaugcuaaagaaauaggaaauggguguuuugaauucuaucacaaguguaacgaugaaugcauggagaguguaaagaauggaacuuaugacuauccaaaauauuccgaagaaucaaaguuaaacagggagaaaauugauggagugaaauuggaaucaauaggagucuaucagauucuggcgaucuacucaacagucgccaguucucugguucuuuuggucucccugggggcaaucagcuucuggauguguuccaaugggucuuugcaguguagaauaugcaucuaa

SEQ ID NO: 42370 - RNA, 1698 nt, Artificial Sequence; identical to SEQ ID NO: 37543
  derived and/or modified CDS sequence (wt) from hemagglutinin__InfluenzaA__AGR49853

SEQ ID NO: 42371 - RNA, 1698 nt, Artificial Sequence
  derived and/or modified CDS sequence (wt) from hemagglutinin__InfluenzaA__AGR49865
augaaaguaaaacuacugguccuguuaugcacauuuacagcuacauaugcagacacaauauguauaggcuaccaugcuaacaacucgaccgacacuguugacacaguacuugaaaagaaugugacagugacacacucugucaaccugcuugagaacaaucacaauggaaaacuaugucuauuaaaaggaauagccccacuacaauuggguaacugcagcguugccggguggaucuuaggaaacccagaaugcgaauuauugauuuccaaggagucaugguccuacauuguagaaaaaccaaauccugagaauggaacauguuacccagggcauuucgcugacuaugaggaacugagggagcaauugaguucaguaucuucauuugagagguucgaaauauuccccaaagaaagcucauggcccaaccacaccguaaccggagugucagcaucaugcucccauaauggggaaagcaguuuuuacagaaauuugcuauggcugacggggaagaaugguuuguacccaaaccugagcaaguccuaugcaaacaacaaagaaaaagaaguccuuguacuaugggguguucaucacccgccaaacauaguuaaccaaaagacccucuaucguacagaaaaugcuuauguuucuguagugucuucacauuauagcagaaaauucaccccagaaauagccaaaagacccaaaguaagagaucaagaaggaagaaucaacuacuacuggacucugcuugaacccggggauacaauaauauuugaggcaaauggaaaucuaauagcgccaagauaugcuuucgcacugaauagaggcuuuggaucagggaucaucaacucaaaugcaccaauggauaaaugugaugcgaagugccaaacaccucagggagcuauaaacagcagucuuccuuuccagaacguacacccagucacaauaggagaguguccaaaguaugucaggagugcaaaauuaaggaugguuacaggacuaaggaacaucccauccauucaauccagagguuuguuuggagccauugccgguuucauugaagggggguggacuggaaugguagaugguugguaugguuaucaucaucagaaugagcaaggaucuggcuaugcugcagaucaaaaaagcacacaaaaugccauuaaugggauuacaaacaaggugaauucuguaauugagaaaaugaacacucaauucacagcagugggcaaagaauucaacaaauuggaaagaaggauggaaaacuugaauaaaaaaguugaugauggguuuauagacguuuggacauauaaugcagaacuguugguucuacuggaaaaugaaaggacuuuggauuuccaugacuccaaugugaagaaucuguaugagaaaguaaaaagccaguuaaagaauaaugcuaaagaaauaggaaauggguguuuugaauucuaucacaaguguaacgaugaaugcauggagaguguaaagaauggaacuuaugacuauccaaaauauuccgaagaaucaaaguuaaacagggagaaaauugauggagugaaauuggaaucaaugggagucuaucagauucuggcgaucuacucaacagucgccaguucucugguucuuuuggucucccugggggcaaucagcuucuggauguguuccaaugggucuuugcaguguagaauaugcaucuaa

SEQ ID NO: 42372 - RNA, 1701 nt, Artificial Sequence; identical to SEQ ID NO: 34676
  derived and/or modified CDS sequence (wt) from hemagglutinin__InfluenzaA__AGR49877

SEQ ID NO: 42373 - RNA, 1701 nt, Artificial Sequence
  derived and/or modified CDS sequence (wt) from hemagglutinin__InfluenzaA__AGR49888
augaagacuaucauugcuuugagcuacauucuaugucugguuuucgcucaaaaacuuccuggaaaugacaacagcacugcgacgcugugccuugggcaccaugcaguaccaaacggaacgauagugaaaacaaucacgaaugaccaaauugaaguuacuaaugcuacugagcugguucagaguuccucaacaggugaaauaugcgacaguccucaucagauccuugauggagaaaacugcacacuaauagaugcucuauugggagacccucagugugauggcuuccaaaauaagaaaugggaccuuuuuguugaacgaagcaaagccuacagcaacuguuacccuuaugaugugccggauuaugccucccuuaggucacuaguugccucauccggcacacuggaguuuaacaaugaaagcuucaauuggacuggagucacucaaaacggaacaagcucugcuugcauaaggagaucuaauaacaguuucuuuaguagauugaauugguugacccacuuaaaauucaaauacccagcauugaacgugacuaugccaaacaaugaacaauuugacaaauuguacauuugggggguucaccacccggguacggacaaugaccaaaucuuccuguaugcucaagcaucaggaagaaucacaguaucuaccaaaagaagccaacaaacuguaaucccgaauaucggaucuagacccagaguaaggaauaucccuagcagaauaagcaucuauuggacaauaguaaaaccgggagacauacuuuugauuaacagcacagggaaucuaauugcuccuagggguuacuucaaaauacgaagugggaaaagcucaauaaugagaucagaugcacccauuggcaaaugcaauucugaaugcaucacuccaaauggaagcauucccaaugacaaaccauuccaaaauguaaacaggaucacauacggggccugucccagauauguuaagcaaaacacucugaaauuggcaacaggaaugcgaaauguaccagagaaacaaacuagaggcauauuuggcgcaauagcggguuucauagaaaaugguugggagggaaugguggaugguugguacgguuucaggcaucaaaauucugagggaagaggacaagcagcagaucucaaaagcacucaagcagcaaucgaucaaaucaaugggaagcugaauagauugaucgggaaaaccaacgagaaauuccaucagauugaaaaagaauucucagaagucgaagggagaauccaggaccuugagaaauauguugaggacacuaaaauagaucucuggucauacaacgcggagcuucuuguugcccuggagaaccaacauacaauugaucuaacugacucagaaaugaacaaacuguuugaaaaaacaaagaagcaacugagggaaaaugcugaggauaugggcaaugguuguuucaaaauauaccacaaaugugacaaugccugcauaggaucaaucagaaauggaacuuaugaccacgauguauacagagaugaagcauugaacaaccgguuccagaucaaggggguugagcugaagucaggguacaaagauuggauccuauggauuuccuuugccauaucauguuuuuugcuuuguguugcuuuguugggguucaucaugugggccugccaaaaaggcaacauuaggugcaacauuugcauuuga

SEQ ID NO: 42374 - RNA, 1701 nt, Artificial Sequence
  derived and/or modified CDS sequence (wt) from hemagglutinin__InfluenzaA__AGR49900
augaagacuaucauugcuuugagcuacauucuaugucugguuuucgcucaaaaacuuccuggaaaugacaacagcacggcaacgcugugccuugggcaccaugcaguaccaaacggaacgauagugaaaacaaucacgaaugaccaaauugaaguuacuaaugcuacugagcugguucagaguuccucaacaggugaaauaugcgacaguccucaucagauccuugauggagaaaacugcacacuaauagaugcucuauugggagacccucagugugauggcuuccaaaauaaaaaaugggaccuuuuuguugaacgcagcaaagccuacagcaaauguuacccuuaugaugugccggauuaugccucccuuaggucacuaguugccucauccggcacacuggaguuuaacaaugaaagcuucaauuggacuggagucacucaaaacggaacaagcucugcuugcauaaggagaucuaauaacaguuucuuuaguagauugaacugguugacccacuuaaaauucaaauacccagcauugaacgugacuaugccaaacaaugaaaaauuugacaaauuguacauuugggggguucaccacccggguacggacaaugaccaaaucuuccuguaugcucaagcaucaggaagaaucacagucucuaccaaaagaagccaacaaacuguaaucccgaauaucggaucuagacccagaguaaggaauauccccagcagaauaagcaucuauuggacaauaguaaaaccgggagacauacuuuugauuaacagcacagggaaucuaauugcuccuagggguuacuucaaaauacgaagugggaaaagcucaauaaugagaucagaugcacccauuggcaaaugcaauucugaaugcaucacuccaaauggaagcauucccaaugacaaaccauuccaaaauguaaacaggaucacauacggggccugucccagauauguuaagcaaaacacucugaaauuggcaacagggaugcgaaauguaccagagaaacaaacuagaggcauauuuggcgcaaucgcggguuucauagaaaaugguugggagggaaugguggaugguugguacgguuucaggcaucaaaauucugagggaauaggacaagcagcagaucucaaaagcacccaagcagcaaucgaucaaaucaaugggaagcugaauagguugaucgggaaaaccaacgagaaauuccaucagauugaaaaagaauucucagaagucgaagggagaauucaggaccuugagaaauauguugaggacaccaaaauagaucucuggucauacaacgcggagcuucuuguugcccuggagaaccaacauacaauugaucuaacugacucagaaaugaacaaacuguuugaaaaaacaaagaagcaacugagggaaaaugcugaggauaugggcaaugguuguuucaaaauauaccacaaaugugacaaugccugcauaggaucaaucagaaauggaacuuaugaccacgauguauacagagaugaagcauuaaacaaccgguuccagaucaagggcguugagcugaagucaggauacaaagauuggauccuauggauuuccuuugccauaucauguuuuuugcuuuguguugcuuuguugggguucaucaugugggccugccaaaaaggcaacauuaggugcaacauuugcauuuga

SEQ ID NO: 42375 - RNA, 1701 nt, Artificial Sequence
  derived and/or modified CDS sequence (wt) from hemagglutinin__InfluenzaA__AGR49912
augaagacuaucauugcuuugagcuacauucuaugucugguuuccgcucaaaaacuuccuggaaaugacaacagcacggcaacgcugugccuugggcaccaugcaguaccaaacggaacgauagugaaaacaaucacgaaugaccaaauugaaguuacuaaugcuacugagcugguucagaguuccucaacaggugaaauaugcgacaguccucaucagauccuugauggagaaaacugcacacuaauagaugcucuauugggagacccucagugugauggcuuccaaaauaagaaaugggaccuuuuuguugaacgcagcaaagccuacagcaacuguuacccuuaugaugugccggauuaugccucccuuaggucacuaguugccucaucuggcacacuggaguuuaacaaugaaagcuucaauuggacuggagucacucaaaacggaacaagcucugcuugcauaaggagaucuaauaacaguuucuuuaguagacugaauugguugacccacuuaaaauucaaauacccagcauugaacgugacuaugccaaacaaugaagaauuugacaaauuguacauuugggggguucaccacccggguacggacaaugaccaaaucuuccuguaugcucaagcaucaggaagaaucacagucucuaccaaaagaagccaacaaaccguaaucccgaauaucggaucuagacccagaguaaggaauauccccagcagaauaagcaucuauuggacaauaguaaaaccgggagacauacuuuugauuaacagcacagggaaucuaauugcuccuagggguuacuucaaaauacgaagugggaaaagcucaauaaugagaucagaugcacccauuggcaaaugcaauucuaaaugcaucacuccaaauggaagcauucccaaugacaaaccauuccaaaauguaaacaggaucacauacggggccugucccagauaugugaagcaaaacacucugaaauuggcaacagggaugcgaaauguaccagagaaacaaacuagaggcauauuuggcgcaaucgcggguuucauagaaaaugguugggagggaaugguggaugguugguacgguuucaggcaucaaaauucugagggaauaggacaagcagcagaucucaaaagcacucaagcagcaaucgaucaaaucaaugggaagcugaauagguugaucgggaaaaccaacgagaaauuccaucagauugaaaaagaauucucagaagucgaagggagaauucaggaccuugagaaauauguugaggacaccaaaauagaucucuggucauacaacgcggagcuucuuguugcccuggagaaccaacauacaauugaucuaacugacucagaaaugaacaaacuguuugaaaaaacaaagaagcaacugagggaaaaugcugaggauaugggcaaugguuguuucaaaauauaccacaaaugugacaaugccugcauaggaucaaucagaaauggaacuuaugaccacgauguauacagagaugaagcauuaaacaaccgguuccagaucaagggcguugagcugaagucaggauacaaagauuggauccuauggauuuccuuugccauaucauguuuuuugcuuuguguugcuuuguugggguucaucaugugggccugccaaaaaggcaacauuaggugcaacauuugcauuuga

SEQ ID NO: 42376 - RNA, 1701 nt, Artificial Sequence
  derived and/or modified CDS sequence (wt) from hemagglutinin__InfluenzaA__AGR49924
augaagacuaucauugcuuugagcuacauucuaugucugguuuccgcucaaaaacuuccuggaaaugacaacagcacggcaacgcugugccuugggcaccaugcaguaccaaacggaacgauagugaaaacaaucacgaaugaccaaauugaaguuacuaaugcuacugagcugguucagaguuccucaacaggugaaauaugcgacaguccucaucagauccuugauggagaaaacugcacacuaauagaugcucuauugggagacccucagugugauggcuuccaaaauaagaaaugggaccuuuuuguugaacgcagcaaagccuacagcaacuguuacccuuaugaugugccggauuaugccucccuuaggucacuaguugccucaucuggcacacuggaguuuaacaaugaaagcuucaauuggacuggagucacucaaaacggaacaagcucugcuugcauaaggagaucuaauaacaguuucuuuaguagacugaauugguugacccacuuaaaauucaaauacccagcauugaacgugacuaugccaaacaaugaagaauuugacaaauuguacauuugggggguucaccacccggguacggacaaugaccaaaucuuccuguaugcucaagcaucaggaagaaucacagucucuaccaaaagaagccaacaaaccguaaucccgaauaucggaucuagacccagaguaaggaauauccccagcagaauaagcaucuauuggacaauaguaaaaccgggagacauacuuuugauuaacagcacagggaaucuaauugcuccuagggguuacuucaaaauacgaagugggaaaagcucaauaaugagaucagaugcacccauuggcaaaugcaauucuaaaugcaucacuccaaauggaagcauucccaaugacaaaccauuccaaaauguaaacaggaucacauacggggccugucccagauaugugaagcaaaacacucugaaauuggcaacagggaugcgaaauguaccagagaaacaaacuagaggcauauuuggcgcaaucgcggguuucauagaaaaugguugggagggaaugguggaugguugguacgguuucaggcaucaaaauucugagggaauaggacaagcagcagaucucaaaagcacucaagcagcagucgaucaaaucaaugggaagcugaauagguugaucgggaaaaccaacgagaaauuccaucagauugaaaaagaauucucagaagucgaagggagaauucaggaccuugagaaauauguugaggacaccaaaauagaucucuggucauacaacgcggagcuucuuguugcccuggagaaccaacauacaauugaucuaacugacucagaaaugaacaaacuguuugaaaaaacaaagaagcaacugagggaaaaugcugaggauaugggcaaugguuguuucaaaauauaccacaaaugugacaaugccugcauaggaucaaucagaaauggaacuuaugaccacgauguauacagagaugaagcauuaaacaaccgguuccagaucaagggcguugagcugaagucaggauacaaagauuggauccuauggauuuccuuugccauaucauguuuuuugcuuuguguugcuuuguugggguucaucaugugggccugccaaaaaggcaacauuaggugcaacauuugcauuuga

SEQ ID NO: 42377 - RNA, 1701 nt, Artificial Sequence
  derived and/or modified CDS sequence (wt) from hemagglutinin__InfluenzaA__AGR49936
augaagacuaucauugcuuugagcuacauucuaugucugauuuccgcucaaaaauuuccuggaaaugacaacagcacggcaacgcugugccuugggcaccaugcaguaccaaacggaacgauagugaaaacaaucacgaaugaccaaauugaaguuacuaaugcuacugagcugguucagaguuccucaacaggugaaauaugcgacaguccucaucagauccuugauggagaaaacugcacacuaauagaugcucuauugggagacccucagugugauggcuuccaaaauaagaaaugggaccuuuuuguugaacgcagcaaagccuacagcaacuguuacccuuaugaugugccggguuaugccucccuuaggucacuaguugccucaucuggcacacuggaguuuaacaaugaaagcuucaauuggacuggagucacucaaaacggaacaagcucugcuugcauaaggagaucuaacaacaguuucuuuaguagacugaauugguugacccacuuaaaauucaaauacccagcauugaacgugacuaugccaaacaaugaagaauuugacaaauuguacauuugggggguucaccacccggguacggacaaugaccaaaucuuccuguaugcucaagcaucaggaagaaucacagucucuaccaaaagaagccaacaaacuguaaucccgaauaucggaucuagacccagaguaaggaauauccccagcagaauaagcaucuauuggacaauaguaaaaccgggagacauacuuuugauuaacagcacagggaaucuaauugcuccuagggguuacuucaaaauacgaagugggaaaagcucaauaaugagaucagaugcacccauuggcaaaugcaauucugaaugcaucacuccaaauggaagcauucccaaugacaaaccauuccaaaauguaaacaggaucacauacggggccugucccagauauguuaagcaaaacacucugaaauuggcaacagggaugcgaaauguaccagagaaacaaacuagaggcauauuuggcgcaaucgcggguuucauagaaaaugguugggagggaaugguggaugguugguacgguuucaggcaucaaaauucugagggaauaggacaagcagcagaucucaaaagcacucaagcagcaaucgaucaaaucaaugggaagcugaauagguugaucgggaaaaccaacgagaaauuccaucagauugaaaaagaauucucagaagucgaagggagaauucaggaccuugagaaauauguugaggacaccaaaauagaucucuggucauacaacgcagagcuucuuguugcccuggagaaccaacauacaauugaucuaacugacucagaaaugaacaaacuguuugaaaaaacaaagaagcaacugagggaaaaugcugaggauaugggcaaugguuguuucaaaauauaccacaaaugugacaaugccugcauaggaucaaucagaaauggaacuuaugaccacgauguauacagagaugaagcauuaaacaaccgguuccagaucaagggcguugagcugaagucaggauacaaagauuggauccuauggauuuccuuugccauaucauguuuuuugcuuuguguugcuuuguugggguucaucaugugggccugccaaaaaggcaacauuaggugcaacauuugcauuuga

SEQ ID NO: 42378 - RNA, 1701 nt, Artificial Sequence
  derived and/or modified CDS sequence (wt) from hemagglutinin__InfluenzaA__AGR49948
augaagacuaucauugcuuugagcuacauucuaugucugguuuccgcucaaaaacuuccuggaaaugacaacagcacggcaacacugugccuugggcaccaugcaguaccaaacggaacgauagugaaaacaaucacgaaugaccaaauugaaguuacuaaugcuacugagcugguucagaguuccucaacaggugaaauaugcgacaguccucaucagguccuugauggagaaaacugcacacuaauagaugcucuauugggagacccucagugugauggcuuccaaaauaagaaaugggaccuuuuuguugaacgcagcaaagccuacagcaacuguuacccuuaugaugugccggauuaugccucccuuaggucacuaguugccucaucuggcacacuggaguuuaacaaugaaagcuucaauuggacuggagucacucaaaacggaacaagcucugcuugcauaaggagauccaauaacaguuucuuuaguagacugaauugguugacccacucaaaauucaaauacccagcauugaacgugacuaugccaaacaaugaagaauuugacaaauuguacauuugggggguucaccacccggguacggacaaugaccaaaucuuccuguaugcucaagcaucaggaagaaucacagucucuaccaaaagaagccaacaaacugugaucccgaauaucggaucuagacccagaguaaggaauauccccagcagaauaagcaucuauuggacaauaguaaaaccgggagacauacuuuugauuaacagcacagggaaucuaauugcuccuagggguuacuucaaaauacgaagugggaaaagcucaauaaugagaucagaugcacccauuggcaaaugcaauucugaaugcaucacuccaaauggaagcauucccaaugacaaaccauuccaaaauguaaacaggaucacauacggggccugucccagauauguuaagcaaaacacucuaaaauuggcaacagggaugcgaaauguaccagagaaacaaacuagaggcauauuuggcgcaaucgcggguuucauagaaaaugguugggagggaaugguggaugguugguacgguuucaggcaucaaaauucugagggaauaggacaagcagcagaucucaaaagcacucaagcagcaaucgaucaaaucaaugggaagcugaauagguugaucgggaaaaccaacgagaaauuccaucagauugaaaaagaauucucagaagucgaagggagaauucaggaccuugagaaauauguugaggacaccaaaauagaucucuggucauacaacgcggagcuucuuguugcccuggagaaccaacauacaauugaucuaacugacucagaaaugaacaaacuguuugaaaaaacaaagaagcaacugagggaaaaugcugaggauaugggcaaugguuguuucaaaauauaccacaaaugugacaaugccugcauaggaucaaucagaaauggaacuuaugaccacgagguauacagagaugaagcauuaaacaaccgguuccagaucaagggcguugagcugaagucaggauacaaagauuggauccuauggauuuccuuugccauaucauguuuuuugcuuuguguugcuuuguugggguucaucaugugggccugccaaaaaggcaacauuaggugcaacauuugcauuuga

SEQ ID NO: 42379 - RNA, 1701 nt, Artificial Sequence
  derived and/or modified CDS sequence (wt) from hemagglutinin__InfluenzaA__AGR49960
augaagacuaucauugcuuugagcuacauucuaugucugguuucugcucaaaaauuuccuggaaaugacaacagcacggcaacgcugugccuugggcaccaugcaguaccaaacggaacgauagugaaaacaaucacgaaugaccaaauugaaguuacuaaugcuacugagcugguucagaguuccucaacaggugaaauaugcgacaguccucaucagauccuugauggagaaaacugcacacuaauagaugcucuauugggagacccucagugugauggcuuccaaaauaagaaaugggaccuuuuuguugaacgcagcaaagccuacagcaacuguuacccuuaugaugugccggauuaugccucccuuaggucacuaguugccucaucuggcacacuggaguuuaacaaugaaagcuucaauuggacuggagucacucaaaacggaacaagcucugcuugcauaaggagaucuaauaacaguuucuuuaguagacugaauugguugacccacuuaaaauucaaauacccagcauugaacgugaccaugccaaacaaugaagaauuugacaaauuguacauuugggggguucaccacccggguacggacaaugaccaaaucuuccuguaugcucaagcaucaggaagaaucacagucucuaccaaaagaagccaacaaacuguaaucccgaauaucggaucuagacccagaguaaggaauauccccagcagaauaagcaucuauuggacaauaguaaaaccgggagacauacuuuuaauuaacagcacagggaaucuaauugcuccuagggguuacuucaaaauacgaagugggaaaagcucaauaaugagaucagaugcacccauuggcaaaugcaauucugaaugcaucacuccaaauggaagcauucccaaugacaaaccauuccaaaauguaaacaggaucacauacggggccugucccagauauguuaagcaaaacacucugaaauuggcaacagggaugcgaaauguaccagagaaacaaacuagaggcauauuuggcgcaaucgcggguuucauagaaaaugguugggagggaaugguggaugguugguacgguuucaggcaucaaaauucugagggaauaggacaagcagcagaucucaaaagcacucaagcagcaaucgaucaaaucaaugggaagcugaauagguugaucgggaaaaccaacgagaaauuccaucagauugaaaaagaauucucagaagucgaagggagaauucaggaccuugagaaauauguugaggacaccaaaauagaucucuggucauacaacgcggagcuucuuguugcccuggagaaccaacauacaauugaucuaacugacucagaaaugaacaaacuguuugaaaaaacaaagaagcaacugagggaaaaugcugaggauaugggcaaugguuguuucaaaauauaccacaaaugugacaaugccugcauaggaucaaucagaaauggaacuuaugaccacgauguguacagagaugaagcauuaaacaaccgguuccagaucaagggcguugagcugaagucaggauacaaagauuggauccuauggauuuccuuugccauaucauguuuuuugcuuuguguugcuuuguugggguucaucaugugggccugccaaaaaggcaacauuaggugcaacauuugcauuuga

SEQ ID NO: 42380 - RNA, 1701 nt, Artificial Sequence
  derived and/or modified CDS sequence (wt) from hemagglutinin__InfluenzaA__AGR49972
augaaggcaauacuaguaguucugcuauauacauuugcaaccgcaaaugcagacacauuauguauagguuaucaugcgaacaauucaacagacacuguagacacgguacuagaaaagaauguaacaguaacacacucuguuaaccuucuagaagacaagcauaacgggaaacuaugcaaacuaagagggguagccccauugcauuuggguaaauguaacauugcuggcuggauccugggaaauccagagugugaaucacucuccacagcaagcucaugguccuacauuguggaaacaucuaguucagacaauggaacguguuacccaggagauuucaucgauuaugaggagcuaagagagcaauugagcucagugucaucauuugaaagguuugagauauuccccaagacaaguucauggcccaaucaugacucgaacaaagguguaacggcagcauguccucaugcuggagcaaaaagcuucuacaaaaauuuaauauggcuaguuaaaaaaggaaauucauacccaaagcucagcaaauccuacauuaaugauaaagggaaagaaguccucgugcuauggggcauucaccauccaucuacuagugcugaccaacaaagucucuaucagaaugcagaugcauauguuuuuguggggucaucaagauacagcaagaaguucaagccggaaauagcaauaagacccaaagugagggaucaagaagggagaaugaacuauuacuggacaauaguagagccgggagacaaaauaacauucgaagcaacuggaaaucuagugguaccgagauaugcauucgcaauggaaagaaaugcuggaucugguauuaucauuucagauacaccaguccacgauugcaauacaacuugucagacacccaagggugcuauaaacaccagccucccauuucagaauauacauccgaucacaauuggaaaauguccaaaauauguaaaaagcacaaaauugagacuggccacaggauugaggaaugucccgucuauucaaucuagaggccuauuuggggccauugccgguuucauugaagggggguggacagggaugguagauggaugguacgguuaucaccaucaaaaugagcaggggucaggauaugcagccgaccugaagagcacacagaaugccauugacgagauuacuaacaaaguaaauucuguuauugaaaagaugaauacacaguucacagcaguagguaaagaguucaaccaccuggaaaaaagaauagagaauuuaaauaaaaaaguugaugaugguuuccuggacauuuggacuuacaaugccgaacuguugguucuauuggaaaaugaaagaacuuuggacuaccacgauucaaaugugaagaacuuauaugaaaagguaagaagccagcuaaaaaacaaugccaaggaaauuggaaacggcugcuuugaauuuuaccacaaaugcgauaacacgugcauggaaagugucaaaaaugggacuuaugacuacccaaaauacucagaggaagcaaaauuaaacagagaagaaauagaugggguaaagcuggaaucaacaaggauuuaccagauuuuggcgaucuauucaacugucgccaguucauugguacugguagucucccugggggcaaucaguuucuggaugugcucuaaugggucucuacaguguagaauauguauuuaa

SEQ ID NO: 42381 - RNA, 1698 nt, Artificial Sequence; identical to SEQ ID NO: 38710
  derived and/or modified CDS sequence (wt) from hemagglutinin__InfluenzaA__AGR49983

SEQ ID NO: 42382 - RNA, 1698 nt, Artificial Sequence; identical to SEQ ID NO: 38710
  derived and/or modified CDS sequence (wt) from hemagglutinin__InfluenzaA__AGR49995

SEQ ID NO: 42383 - RNA, 1701 nt, Artificial Sequence
  derived and/or modified CDS sequence (wt) from hemagglutinin__InfluenzaA__AGR50007
augaaggcaauacuaguaguucugcuauauacauuugcaaccgcaaaugcagacacauuauguauagguuaucaugcgaacaauucaacagacacuguagacacaguacuagaaaagaauguaacaguaacacacucuguuaaccuucuagaagacaagcauaacgggaaacuaugcaaacuaagagggguagccccauugcauuuggguaaauguaacauugcuggcuggauccugggaaauccagagugugaaucacucuccacagcaagcucaugguccuacauuguggaaacaucuaguucagacaauggaacguguuacccaggagauuucaucgauuaugaggagcuaagagagcaauugagcucagugucaucauuugaaagguuugagauauuccccaagacaaguucauggcccaaucaugacucgaacaaagguguaacggcagcauguccucaugcuggagcaaaaagcuucuacaaaaauuuaauauggcuaguuaaaaaaggaaauucauacccaaagcucagcaaauccuacauuaaugauaaagggaaagaaguccucguacuauggggcauucaccauccaucuacuagugcugaccaacaaagucucuaucagaaugcagaugcauauguuuuuguggggucaucaagauacagcaagaaguucaagccggaaauagcaauaagacccaaagugagggaucaagaagggagaaugaacuauuacuggacacuaguagagccgggagacaaaauaacauucgaagcaacuggaaaucuagugguaccgagauaugcauucgcaauggaaagaaaugcuggaucugguauuaucauuucagauacaccaguccacgauugcaauacaacuugucagacacccaagggugcuauaaacaccagccucccauuucagaauauacauccgaucacaauuggaaaauguccaaaauauguaaaaagcacaaaauugagacuggccacaggauugaggaaugucccgucuauucaaucuagaggccuauuuggggccauugccgguuucauugaaggaggguggacagggaugguagauggaugguacgguuaucaccaucaaaaugagcaggggucaggauaugcagccgaccugaagagcacacaaaaugccauugacgagauuacuaacaaaguaaauucuguuauugaaaagaugaauacacaguucacagcaguagguaaagaguucaaccaccuggaaaaaagaauagagaauuuaaauaaaaaaguugaugaugguuuccuggacauuuggacuuacaaugccgaacuguugguucuauuggaaaaugaaagaacuuuggacuaccacgauucaaaugugaagaacuuauaugaaaagguaagaagccagcuaaaaaacaaugccaaggaaauuggaaacggcugcuuugaauuuuaccacaaaugcgauaacacgugcauggaaagugucaaaaaugggacuuaugacuacccaaaauacucagaggaagcaaaauuaaacagagaagaaauagaugggguaaagcuggaaucaacaaggauuuaccagauuuuggcgaucuauucaacugucgccaguucauugguacugguagucucccugggggcaaucaguuucuggaugugcucuaaugggucucuacaguguagaauauguauuuaa

SEQ ID NO: 42384 - RNA, 1701 nt, Artificial Sequence; identical to SEQ ID NO: 34676
  derived and/or modified CDS sequence (wt) from hemagglutinin__InfluenzaA__AGR50018

SEQ ID NO: 42385 - RNA, 1701 nt, Artificial Sequence; identical to SEQ ID NO: 34705
  derived and/or modified CDS sequence (wt) from hemagglutinin__InfluenzaA__AGR50029

SEQ ID NO: 42386 - RNA, 1701 nt, Artificial Sequence
  derived and/or modified CDS sequence (wt) from hemagglutinin__InfluenzaA__AGR50040
augaagacuaucauugcuuugagcuacauucuaugucugguuuucgcucaaaaacuuccuggaaaugacaacagcacggcaacgcugugccuugggcaccaugcaguaccaaacggaacgauagugaaaacaaucacgaaugaccaaauugaaguuacuaaugcuacugagcugguucagaguuccucaacaggugaaauaugcgacaguccucaucagauccuugauggagaaaacugcacacuaauagaugcucuauugggagacccucagugugauggcuuccaaaauaagaaaugggaccuuuuuguugaacgcagcaaagccuacagcaacuguuacccuuaugaugugccggauuaugccucccuuaggucacuaguugccucauccggcacacuggaguuuaacaaugaaagcuucaauuggacuggagucacucaaaacggaacaagcucugcuugcauaaggagaucuaauaacaguuucuuuaguagauugaauugguugacccacuuaaaauucaaauacccagcauugaacgugacuaugccaaacaaugaacaauuugacaaauuguacauuugggggguucaccacccggguacggacaaugaccaaaucuuccuguaugcucaagcaucaggaagaaucacagucucuaccaaaagaagccaacaaacuguaaucccgaauaucggaucuagacccagaguaaggaauaucccuagcagaauaagcaucuauuggacaauaguaaaaccaggagacauacuuuugauuaacagcacagggaaucuaauugcuccuagggguuacuucaaaauacgaagugggaaaagcucaauaaugagaucagaugcacccauuggcaaaugcaauucugaaugcaucacuccaaauggaagcauucccaaugacaaaccauuccaaaauguaaacaggaucacauacggggccugucccagauauguuaagcaaaacacucugaaauuggcaacagggaugcgaaauguaccagagaaacaaacuagaggcauauuuggcgcaaucgcggguuucauagaaaaugguugggagggaaugguggaugguugguacgguuucaggcaucaaaauucugagggaagaggacaagcagcagaucucaaaagcacucaagcagcaaucgaucaaaucaaugggaagcugaauagauugaucggaaaaaccaacgagaaauuccaucagauugaaaaggaauucucagaagucgaagggagaauucaggaccuugagaaauauguugaggacacuaaaauagaucucuggucauacaacgcggagcuucuuguugcccuggagaaccaacauacaauugaucuaacugacucagaaaugaacaaacuguuugaaaaaacaaaaaagcaacugagggaaaaugcugaggauaugggcaaugguuguuucaaaauauaccacaaaugugacaaugccugcaugggaucaaucagaaauggaacuuaugaccacgauguauacagagaugaagcauuaaacaaccgguuccagaucaagggaguugagcugaagucaggguacaaagauuggauccuauggauuuccuuugccauaucauguuuuuugcuuuguguugcuuuguugggguucaucaugugggccugccaaaaaggcaacauuaggugcaacauuugcauuuga

SEQ ID NO: 42387 - RNA, 1701 nt, Artificial Sequence
  derived and/or modified CDS sequence (wt) from hemagglutinin__InfluenzaA__AGR50052
augaaggcaauacuaguaguuuugcuauauacauuugcaaccgcaaaugcagacacauuauguauagguuaucaugcgaacaauucaacagacacuguagacacaguacuagaaaagaauguaacaguaacacacucuguuaaccuucuagaagacaagcauaacgggaaacuaugcaaacuaagagggguagccccauugcauuuggguaaauguaacauugcuggcuggauccugggaaauccagagugugaaucacucuccacagcaagcucaugguccuacauuguggaaacaucuaguucagacaauggaacguguuacccaggagauuucaucgauuaugaggagcuaagagagcaauugagcucagugucaucauuugaaagguuugagauauuccccaagacaaguucauggcccaaucaugacucgaacaaagguguaacggcagcauguccucaugcuggagcaaaaagcuucuacaaaaauuuaauauggcuaguuaaaaaaggaaauucauacccaaagcucagcaaauccuacauuaaugauaaagggaaagaaguccucguacuauggggcauucaccauccaucuacuagugcugaccaacaaagucucuaucagaaugcagaugcauauguuuuuguggggucaucaagauacagcaagaaguucaagccggaaauagcaauaagacccaaagugagggaucaagaagggagaaugaacuauuacuggacacuaguagagccgggagacaaaauaacauucgaagcaacuggaaaucuagugguaccgagauaugcauuugcaauggaaagaaaugcuggaucugguauuaucauuucagauacaccaguccacgauugcaauacaacuugucagacacccaagggugcuauaaacaccagccucccauuucagaauauacauccgaucacaauuggaaaauguccaaaauauguaaaaagcacaaaauugagacuggccacaggauugaggaaugucccgucuauucaaucuagaggccuauuuggggccauugccgguuucauugaaggaggguggacagggaugguagauggaugguacgguuaucaccaucaaaaugagcaggggucaggauaugcagccgaccugaagagcacacagaaugccauugacgagauuacuaacaaaguaaauucuguuauugaaaagaugaauacacaguucacagcaguagguaaagaguucaaccaccuggaaaaaagaauagagaauuuaaauaaaaaaguugaugaugguuuccuggacauuuggacuuacaaugccgaacuguugguucuauuggaaaaugaaagaacuuuggacuaccacgauucaaaugugaagaacuuauaugaaaagguaagaagccagcuaaaaaacaaugccaaggaaauuggaaacggcugcuuugaauuuuaccacaaaugcgauaacacgugcauggaaagugucaaaaaugggacuuaugacuacccaaaauacucagaggaagcaaaauuaaacagagaagaaauagaugggguaaagcuggaaucaacaaggauuuaccagauuuuggcgaucuauucaacugucgccaguucauugguacugguagucucccugggggcaaucaguuucuggaugugcucuaaugggucucuacaguguagaauauguauuuaa

SEQ ID NO: 42388 - RNA, 1701 nt, Artificial Sequence
  derived and/or modified CDS sequence (wt) from hemagglutinin__InfluenzaA__AGR50063
augaaggcaauacuaguaguucugcuauauacauuugcaaccgcaaaugcagacacauuauguauagguuaucaugcgaacaauucaacagacacuguagacacaguacuagaaaagaauguaacaguaacacacucuguuaaccuucuagaagacaagcauaacgggaaacuaugcaaacuaagagggguagccccauugcauuuggguaaauguaacauugcuggcuggauccugggaaauccagagugugagucacucuccacagcaagcucaugguccuacauuguggaaacaucuaguucagacaauggaacguguuacccaggagauuucaucgauuaugaggagcuaagagagcaauugagcucagugucaucauuugaaagguuugagauauuccccaagacaaguucauggcccaaucaugacucgaacaaagguguaacggcagcauguccucaugcuggagcaaaaagcuucuacaaaaauuuaauauggcuaguuaaaaaaggaaauucauacccaaagcucagcaaauccuacauuaaugauaaagggaaagaaguccucguacuauggggcauucaccauccaucuacuagugcugaccaacaaagucucuaucagaaugcagaugcauauguuuuuguggggucaucaagauacagcaagaaguucaagccggaaauagcaauaagacccaaagugagggaucaagaagggagaaugaacuauuacuggacacuaguagagccgggagacaaaauaacauucgaagcaacuggaaaucuagugguaccgagauaugcauucgcaauggaaagaaaugcuggaucugguauuaucauuucagauacaccaguccacgauugcaauacaacuugucagacacccaagggugcuauaaacaccagccucccauuucagaauauacauccgaucacaauuggaaaauguccaaaauauguaaaaagcacaaaauugagacuggccacaggauugaggaaugucccgucuauucaaucuagaggccuauuuggggccauugccgguuucauugaaggaggauggacagggaugguagauggaugguacgguuaucaccaucaaaaugagcaggggucaggauaugcagccgaccugaagagcacacagaaugccauugacgagauuacuaacaaaguaaauucuguuauugaaaagaugaauacacaguucacagcaguagguaaagaguucaaccaccuggaaaaaagaauagagaauuuaaauaaaaaaguugaugaugguuuccuggacauuuggacuuacaaugccgaacuguugguucuauuggaaaaugaaagaacuuuggacuaccacgauucaaaugugaagaacuuauaugaaaagguaagaagccagcuaaaaaacaaugccaaggaaauuggaaacggcugcuuugaauuuuaccacaaaugcgauaacacgugcauggaaagugucaaaaaugggacuuaugacuacccaaaauacucagaggaagcaaaauuaaacagagaagaaauagaugggguaaagcuggaaucaacaaggauuuaccagauuuuggcgaucuauucaacugucgccaguucauugguacugguagucucccugggggcaaucaguuucuggaugugcucuaaugggucucuacaguguagaauauguauuuaa

SEQ ID NO: 42389 - RNA, 1701 nt, Artificial Sequence
  derived and/or modified CDS sequence (wt) from hemagglutinin__InfluenzaA__AGR50074
augaaggcaauacuaguaguucugcuauauacauuugcaaccgcaaaugcagacacauuauguauagguuaucaugcgaacaauucaacagacacuguagacacaguacuagaaaagaauguaacaguaacacacucuguuaaccuucuagaagacaagcauaacgggaaacuaugcaaacuaagagggguagccccauugcauuuggguaaauguaacauugcuggcuggauccugggaaauccagagugugaaucacucuccacagcaagcucaugguccuacauuguggaaacaucuaguucagacaauggaacguguuacccaggagauuucaucgauuaugaggagcuaagagagcaauugagcucagugucaucauuugaaagguuugagauauuccccaagacaaguucauggcccaaucaugacucgaacaaagguguaacggcagcauguccucaugcuggagcaaaaagcuucuacaaaaauuuaauauggcuaguuaaaaaaggaaauucauacccaaagcucagcaaauccuacauuaaugauaaagggaaagaaguccucgugcuauggggcauucaccauccaucuacuagugcugaccaacaaagucucuaucagaaugcagaugcauauguuuuuguggggucaucaagauacagcaagaaguucaagccggaaauagcaauaagacccaaagugaggaaucaagaagggagaaugaacuauuacuggacacuaguagagccgggagacaaaauaacauucgaagcaacuggaaaucuagugguaccgagauaugcauucgcaauggaaagaaaugcuggaucugguauuaucauuucagauacaccaguccacgauugcaauacaacuugucagacacccaagggugcuauaaacaccagccucccauuucagaauauacauccgaucacaauuggaaaauguccaaaauauguaaaaagcacaaaauugagacuggccacaggauugaggaaugucccgucuauucaaucuagaggccuauuuggggccauugccgguuucauugaagggggguggacagggaugguagauggaugguacgguuaucaccaucaaaaugagcaggggucaggauaugcagccgaccugaagagcacacagaaugccauugacgagauuacuaacaaaguaaauucuguuauugaaaagaugaauacacaguucacagcaguagguaaagaguucaaccaccuggaaaaaagaauagagaauuuaaauaaaaaaguugaugaugguuuccuggacauuuggacuuacaaugccgaacuguugguucuauuggaaaaugaaagaacuuuggacuaccacgauucaaaugugaagaacuuauaugaaaagguaagaagccagcuaaaaaacaaugccaaggaaauuggaaacggcugcuuugaauuuuaccacaaaugcgauaacacgugcauggaaagugucaaaaaugggacuuaugacuacccaaaauacucagaggaagcaaaauuaaacagagaagaaauagaugggguaaagcuggaaucaacaaggauuuaccagauuuuggcgaucuauucaacugucgccaguucauugguacugguagucucccugggggcaaucaguuucuggaugugcucuaaugggucucuacaguguagaauauguauuuaa

SEQ ID NO: 42390 - RNA, 1701 nt, Artificial Sequence; identical to SEQ ID NO: 34676
  derived and/or modified CDS sequence (wt) from hemagglutinin__InfluenzaA__AGR50085

SEQ ID NO: 42391 - RNA, 1701 nt, Artificial Sequence; identical to SEQ ID NO: 34676
  derived and/or modified CDS sequence (wt) from hemagglutinin__InfluenzaA__AGR50096

SEQ ID NO: 42392 - RNA, 1701 nt, Artificial Sequence; identical to SEQ ID NO: 34676
  derived and/or modified CDS sequence (wt) from hemagglutinin__InfluenzaA__AGR50107

SEQ ID NO: 42393 - RNA, 1701 nt, Artificial Sequence; identical to SEQ ID NO: 34898
  derived and/or modified CDS sequence (wt) from hemagglutinin__InfluenzaA__AGR50118

SEQ ID NO: 42394 - RNA, 1701 nt, Artificial Sequence
  derived and/or modified CDS sequence (wt) from hemagglutinin__InfluenzaA__AGR50129
augaaggcaauacuaguaguucugcuauauacauuugcaaccgcaaaugcagacacauuauguauagguuaucaugcgaacaauucaacagacacuguagacacaguacuagaaaagaauguaacaguaacacacucuguuaaccuucuagaagacaagcauaacgggaaacuaugcaaacuaagagggguagccccauugcauuuggguaaauguaacauugcuggcuggauccugggaaauccagagugugaaucacucuccacagcaagcucaugguccuacauuguggaaacaucuaguucagacaauggaacguguuacccaggagauuucaucgauuaugaggagcuaagagagcaauugagcucagugucaucauuugaaagguuugagauauuccccaagacaaguucauggcccaaucaugacucgaacaaagguguaacggcagcauguccucaugcuggagcaaaaagcuucuacaaaaauuuaauauggcuaguuaaaaaaggaaauucauacccaaagcucagcaaauccuacauuaaugauaaagggaaagaaguccucgugcuauggggcauucaccauccaucuacuagugcugaccaacaaagucucuaucagaaugcagaugcauauguuuuuguggggucaucaagauacagcaagaaguucaagccggaaauagcaauaagacccaaagugagggaucaagaagggagaaugaacuauuacuggacacuaguagagccgggagacaaaauaacauucgaagcaacuggaaaucuagugguaccgagauaugcauucgcaauggaaagaaaugcuggaucugguauuaucauuucagauacaccaguccacgauugcaauacaacuugucagacacccaagggugcuauaaacaccagccucccauuucagaauauacauccgaucacaauuggacaauguccaaaauauguaaaaagcacaaaauugagacuggccacaggauugaggaaugucccgucuauucaaucuagaggccuauuuggggccauugccgguuucauugaagggggguggacagggaugguagauggaugguacgguuaucaccaucaaaaugagcaggggucaggauaugcagccgaccugaagagcacacagaaugccauugacgagauuacuaacaaaguaaauucuguuauugaaaagaugaauacacaguucacagcaguagguaaagaguucaaccaccuggaaaaaagaauagagaauuuaaauaaaaaaguugaugaugguuuccuggacauuuggacuuacaaugccgaacuguugguucuauuggaaaaugaaagaacuuuggacuaccacgauucaaaugugaagaacuuauaugaaaagguaagaagccagcuaaaaaacaaugccaaggaaauuggaaacggcugcuuugaauuuuaccacaaaugcgauaacacgugcauggaaagugucaaaaaugggacuuaugacuacccaaaauacucagaggaagcaaaauuaaacagagaagaaauagaugggguaaagcuggaaucaacaaggauuuaccagauuuuggcgaucuauucaacugucgccaguucauugguacugguagucucccugggggcaaucaguuucuggaugugcucuaaugggucucuacaguguagaauauguauuuaa

SEQ ID NO: 42395 - RNA, 1701 nt, Artificial Sequence
  derived and/or modified CDS sequence (wt) from hemagglutinin__InfluenzaA__AGR50140
augaaggcaauacuaguaguuuugcuauauacauuugcaaccgcaaaugcagacacauuauguauagguuaucaugcgaacaauucaacagacacuguagacacaguacuagaaaagaauguaacaguaacacacucuguuaaccuucuagaagacaagcauaacgggaaacuaugcaaacuaagagggguagccccauugcauuuggguaaauguaacauugcuggcuggauccugggaaauccagagugugaaucacucuccacagcaagcucaugguccuacauuguggaaacaucuaguucagacaauggaacguguuacccaggagauuucaucgauuaugaggagcuaagagagcaauugagcucagugucaucauuugaaagguuugagauauuccccaagacaaguucauggcccaaucaugacucgaacaaagguguaacggcagcauguccucaugcuggagcaaaaagcuucuacaaaaauuuaauauggcuaguuaaaaaaggaaauucauacccaaagcucagcaaauccuacauuaaugauaaagggaaagaaguccucgugcuauggggcauucaccauccaucuacuagugcugaccaacaaagucucuaucagaaugcagaugcauauguuuuuguggggucaucaagauacagcaagaaguucaagccggaaauagcaauaagacccaaagugagggaucaagaagggagaaugaacuauuacuggacacuaguagagccgggagacaaaauaacauucgaagcaacuggaaaucuagugguaccgagauaugcauucgcaauggaaagaaaugcuggaucugguauuaucauuucagauacaccaguccacgauugcaauacaacuugucagacacccaagggugcuauaaacaccagccucccauuucagaauauacauccgaucacaauuggaaaauguccaaaauauguaaaaagcacaaaauugagacuggccacaggauugaggaaugucccgucuauucaaucuagaggccuauuuggggccauugccgguuucauugaagggggguggacagggaugguagauggaugguacgguuaucaccaucaaaaugagcaggggucaggauaugcagccgaccugaagagcacacagaaugccauugacgagauuacuaacaaaguaaauucuguuauugaaaagaugaauacacaguucacagcaguagguaaagaguucaaccaccuggaaaaaagaauagagaauuuaaauaaaaaaguugaugaugguuuccuggacauuuggacuuacaaugccgaacuguugguucuauuggaaaaugaaagaacuuuggacuaccacgauucaaaugugaagaacuuauaugaaaagguaagaagccagcuaaaaaacaaugccaaggaaauuggaaacggcugcuuugaauuuuaccacaaaugcgauaacacgugcauggaaagugucaaaaaugggacuuaugacuacccaaaauacucagaggaagcaaaauuaaacagagaagaaauagaugggguaaagcuggaaucaacaaggauuuaccagauuuuggcgaucuauucaacugucgccaguucauugguacugguagucucccugggggcaaucaguuucuggaugugcucuaaugggucucuacaguguagaauauguauuuaa

SEQ ID NO: 42396 - RNA, 1701 nt, Artificial Sequence; identical to SEQ ID NO: 34863
  derived and/or modified CDS sequence (wt) from hemagglutinin__InfluenzaA__AGR50151

SEQ ID NO: 42397 - RNA, 1698 nt, Artificial Sequence
  derived and/or modified CDS sequence (wt) from hemagglutinin__InfluenzaA__AGR50162
augaaaguaaaacuacugguccuguuaugcacauuuacagcuacauaugcagacacaauauguauaggcuaccaugcuaacaacucgaccgacacuguugacacaguacuugaaaagaaugugacagugacacacucugucaaccugcuugagaacagucacaauggaaaacuaugucuauuaaaaggaauagccccacuacaauuggguaacugcagcguugccggguggaucuuaggaaacccagaaugcgaauuacugauuuccaaagagucaugguccuacauuguagaaaaaccaaauccugagaauggaacauguuacccagggcauuucgcugacuaugaggaacugagggagcaauugaguucaguaucuucauuugagagguucgaaauauuccccaaagaaagcucauggcccaaccacaccguaaccggagugucagcaucaugcucccauaauggggaaagcaguuuuuacagaaauuugcuauggcugacggggaagaaugguuuguacccaaaccugagcaaguccuaugcaaacaacaaagaaaaagaaguccuuguacuaugggguguucaucacccgccaaacauaguugaccaaaagacccucuaccguacagaaaaugcuuauguuucuguagugucuucacauuauagcagaaaauucaccccagaaauagccaaaagacccaaaguaagagaucaagaaggaagaaucaacuacuacuggacucugcuugaacccggggauacaauaauauuugaggcaaauggaaaucuaauagcgccaagauaugcuuucgcacugaguagaggcuuuggaucaggaaucaucaacucaaaugcaccaauggguaaaugugaugcgaagugucaaacaccucagggagcuauaaacagcagucuuccuuuccagaacguacacccagucacaauaggagaguguccaaaguaugucaggagugcaaaauuaaggaugguuacaggacuaaggaacaucccauccauucaauccagagguuuguuuggagccauugccgguuucauugaagggggguggacuggaaugguagaugguugguaugguuaucaucaucagaaugagcaaggaucuggcuaugcugcagaucaaaaaagcacacaaaaugccauuaaugggauuacaaacaaggugaauucuguaauugagaaaaugaacacucaauucacagcagugggcaaagaauucaacaaauuggaaagaaggauggaaaacuugaauaaaaaaguugaugauggguuuauagacauuuggacauauaaugcagaacuguugguucuacuggaaaaugaaaggacuuuggauuuccaugacuccaaugugaagaaucuguaugagaaaguaaaaagccaguuaaagaauaaugcuaaagaaauaggaaauggguguuuugaauucuaucacaaguguaacgaugaaugcauggagaguguaaagaauggaacuuaugacuauccaaaauauuccgaagaaucaaaguuaaacaaggagaaaauugauggagugaaauuggaaucaaugggagucuaucagauucuggcgaucuacucaacagucgccaguucucugguucuuuuggucucccugggggcaaucagcuucuggauguguuccaaugggucuuugcaguguagaauaugcaucuaa

SEQ ID NO: 42398 - RNA, 1701 nt, Artificial Sequence; identical to SEQ ID NO: 34823
  derived and/or modified CDS sequence (wt) from hemagglutinin__InfluenzaA__AGR50174

SEQ ID NO: 42399 - RNA, 1701 nt, Artificial Sequence; identical to SEQ ID NO: 34747
  derived and/or modified CDS sequence (wt) from hemagglutinin__InfluenzaA__AGR50185

SEQ ID NO: 42400 - RNA, 1701 nt, Artificial Sequence; identical to SEQ ID NO: 34676
  derived and/or modified CDS sequence (wt) from hemagglutinin__InfluenzaA__AGR50196

SEQ ID NO: 42401 - RNA, 1701 nt, Artificial Sequence
  derived and/or modified CDS sequence (wt) from hemagglutinin__InfluenzaA__AGR50207
augaaggcaauacuaguaguucugcuauauacauuugcaaccgcaaaugcagacacauuauguauagguuaucaugcgaacaauucaacagacacuguggacacaguacuagaaaagaauguaacaguaacacacucuguuaaccuucuagaagacaagcauaacgggaaacuaugcaaacuaagagggguagccccauugcauuuggguaaauguaacauugcuggcuggauccugggaaauccagagugugaaucacucuccacagcaagcucaugguccuacauuguggaaacaucuaguucagacaauggaacguguuacccaggagauuucaucgauuaugaggagcuaagagagcaauugagcucagugucaucauuugaaagguuugagauauuccccaagacaaguucauggcccaaucaugacucgaacaaagguguaacggcagcauguccucaugcuggagcaaaaagcuucuacaaaaauuuaauauggcuaguuaaaaaaggaaaaucauacccaaagcucagcaaauccuacauuaaugauaaagggaaagaaguccucguacuauggggcauucaccauccaucuacuagugcugaccaacaaagucucuaucagaaugcagaugcauauguuuuuguggggucaucaagauacagcaagaaguucaagccggaaauagcaauaagacccaaagugagggaucaagaagggagaaugaacuauuacuggacacuaguagagccgggagacaaaauaacauucgaagcaacuggaaaucuagugguaccgagauaugcauucgcaauggaaagaaaugcuggaucugguauuaucauuucagauacaccaguccacgauugcaauacaacuugucagacacccaagggugcuauaaacaccagccucccauuucagaauauacauccgaucacaauuggaaaauguccaaaauauguaaaaagcacaaaauugagacuggccacaggauugaggaaugucccgucuauucaaucuagaggccuauuuggggccauugccgguuucauugaaggaggguggacagggaugguagauggaugguacgguuaucaccaucaaaaugagcaggggucaggauaugcagccgaccugaagagcacacagaaugccauugacgagauuacuaacaaaguaaauucuguuauugaaaagaugaauacacaguucacagcaguagguaaagaguucaaccaccuggaaaaaagaauagagaauuuaaauaaaaaaguugaugaugguuuccuggacauuuggacuuacaaugccgaacuguugguucuauuggaaaaugaaagaacuuuggacuaccacgauucaaaugugaagaacuuauaugaaaagguaagaagccagcuaaaaaacaaugccaaggaaauuggaaacggcugcuuugaauuuuaccacaaaugcgauaacacgugcauggaaagugucaaaaaugggacuuaugacuacccaaaauacucagaggaagcaaaauuaaacagagaagaaauagaugggguaaagcuggaaucaacaaggauuuaccagauuuuggcgaucuauucaacugucgccaguucauugguacugguagucucccugggggcaaucaguuucuggaugugcucuaaugggucucuacaguguagaauauguauuuaa

SEQ ID NO: 42402 - RNA, 1701 nt, Artificial Sequence
  derived and/or modified CDS sequence (wt) from hemagglutinin__InfluenzaA__AGR50218
augaaggcaauacuaguaguucugcuauauacauuugcaaccgcaaaugcagacacauuauguauagguuaucaugcgaacaauucaacagacacuguagacacaguacuagaaaagaauguaacaguaacacacucuguuaaccuucuagaagacaagcauaacgggaaacuaugcaaacuaagagggguagccccauugcauuuggguaaauguaacauugcuggcuggauccugggaaauccagagugugaaucacucuccacagcaagcucaugguccuacauuguggaaacaucuaguucagacaauggaacguguuacccaggagauuucaucgauuaugaggagcuaagagagcaauugagcucagugucaucauuugaaagguuugagauauuccccaagacaaguucauggcccaaucaugacucgaacaaagguguaacggcagcauguccucaugcuggagcaaaaagcuucuacaaaaauuuaauauggcuaguuaaaaaaggaaauucauacccaaagcucagcaaauccuacauuaaugauaaagggaaagaaguccucgugcuauggggcauucaccauccaucuacuagugcugaccaacaaagucucuaucagaaugcagaugcauauguuuuuguggggucaucaagauacagcaagaaguucaagccggaaauagcaauaagacccaaagugagggaucaagaagggagaaugaacuauuacuggacacuaguagagccgggagacaaaauaacauucgaagcaacuggaaaucuagugguaccgagauaugcauucgcaauggaaagaaaugcuggaucugguauuaucauuucagauacaccaguccacgauugcaauacaacuugucagacacccaagggugcuauaaacaccagccucccauuucagaauauacauccgaucacaauuggaaaauguccaaaauauguaaaaagcacaaaauugagacuggccacaggauugaggaaugucccgucuauucaaucuagaggccuauuuggggccauugccgguuucauugaagggggguggacagggaugguagauggaugguacgguuaucaccaucaaaaugagcaggggucaggauaugcagccgaccugaagagcacacagaaugccauugacgagauuacuaacaaaguaaauucuguuauugaaaagaugaauacacaguucacagcaguagguaaagaguucaaccaucuggaaaaaagaauagagaauuuaaauaaaaaaguugaugaugguuuccuggacauuuggacuuacaaugccgaacuguugguucuauuggaaaaugaaagaacuuuggacuaccacgauucaaaugugaagaacuuauaugaaaagguaagaagccagcuaaaaaacaaugccaaggaaauuggaaacggcugcuuugaauuuuaccacaaaugcgauaacacgugcauggaaagugucaaaaaugggacuuaugacuacccaaaauacucagaggaagcaaaauuaaacagagaagaaauagaugggguaaagcuggaaucaacaaggauuuaccagauuuuggcgaucuauucaacugucgccaguucauugguacugguagucucccugggggcaaucaguuucuggaugugcucuaaugggucucuacaguguagaauauguauuuaa

SEQ ID NO: 42403 - RNA, 1701 nt, Artificial Sequence
  derived and/or modified CDS sequence (wt) from hemagglutinin__InfluenzaA__AGR50229
augaaggcaauacuaguaguucugcuauauacauuugcaaccgcaaaugcagacacauuauguauagguuaucaugcgaacaauucaacagacacuguagacacaguacuagaaaagaauguaacaguaacacacucuguuaaccuucuagaagacaagcauaacgggaaacuaugcaaacuaagagggguagccccauugcauuuggguaaauguaacauugcuggcuggauccugggaaauccagagugugaaucacucuccacagcaagcucaugguccuacauuguggaaacaucuaguucagacaauggaacguguuacccaggagauuucaucgauuaugaggagcuaagagagcaauugagcucagugucaucauuugaaagguuugagauauuccccaagacaaguucauggcccaaucaugacucgaacaaagguguaacggcagcauguccucaugcuggagcaaaaagcuucuacaaaaaucuaauauggcuaguuaaaaaaggaaauucauacccaaagcucagcaaauccuacauuaaugauaaagggaaagaaguccucgugcuauggggcauucaccauccaucuacuagugcugaccaacaaagucucuaucagaaugcagaugcauauguuuuuguggggucaucaagauacagcaagaaguucaagccggaaauagcaauaagacccaaagugagggaucaagaagggagaaugaacuauuacuggacacuaguagagccgggagacaaaauaacauucgaagcaacuggaaaucuagugguaccgagauaugcauucgcaauggaaagaaaugcuggaucugguauuaucauuucagauacaccaguccacgauugcaauacaacuugucagacacccaagggugcuauaaacaccagccucccauuucagaauauacauccgaucacaauuggaaaauguccaaaauauguaaaaagcacaaaauugagacuggccacaggauugaggaaugucccgucuauucaaucuagaggccuauuuggggccauugccgguuucauugaagggggguggacagggaugguagauggaugguacgguuaucaccaucaaaaugagcaggggucaggauaugcagccgaccugaagagcacacagaaugccauugacgagauuacuaacaaaguaaauucuguuauugaaaagaugaauacacaguucacagcaguagguaaagaguucaaccaccuggaaaaaagaauagagaauuuaaauaaaaaaguugaugaugguuuccuggacauuuggacuuacaaugccgaacuguugguucuauuggaaaaugaaagaacuuuggacuaccacgauucaaaugugaagaacuuauaugaaaagguaagaagccagcuaaaaaacaaugccaaggaaauuggaaacggcugcuuugaauuuuaccacaaaugcgauaacacgugcauggaaagugucaaaaaugggacuuaugacuacccaaaauacucagaggaagcaaaauuaaacagagaagaaauagaugggguaaagcuggaaucaacaaggauuuaccagauuuuggcgaucuauucaacugucgccaguucauugguacugguagucucccugggggcaaucaguuucuggaugugcucuaaugggucucuacaguguagaauauguauuuaa

SEQ ID NO: 42404 - RNA, 1701 nt, Artificial Sequence
  derived and/or modified CDS sequence (wt) from hemagglutinin__InfluenzaA__AGR50240
augaaggcaauacuaguaguucugcuauauacauuugcaaccgcaaaugcagacacauuauguauagguuaucaugcgaacaauucaacagacacuguagacacaguacuagaaaagaauguaacaguaacacacucuguugaccuucuagaagacaagcauaacgggaaacuaugcaaacuaagagggguagccccauugcauuuggguaaauguaacauugcuggcuggauccugggaaauccagagugugaaucacucuccacagcaagcucaugguccuacauuguggaaacaucuaguucagacaauggaacguguuacccaggagauuucaucgauuaugaggagcuaagagagcaauugagcucagugucaucauuugaaagguuugagauauuccccaagacaaguucauggcccaaucaugacucgaacaaagguguaacggcagcauguccucaugcuggagcaaaaagcuucuacaaaaauuuaauauggcuaguuaaaaaaggaaauucauacccaaagcucagcaaauccuacauuaaugauaaagggaaagaaguccucgugcuaugggguauucaccauccaucuacuagugcugaccaacaaagucucuaucagaaugcagaugcauauguuuuuguggggucaucaagauacagcaagaaguucaagccggaaauagcaauaagacccaaagugagggaucaagaagggagaaugaacuauuacuggacacuaguagagccgggagacaaaauaacauucgaagcaacuggaaaucuagugguaccgagauaugcauucgcaauggaaagaaaugcuggaucugguauuaucauuucagauacaccaguccacgauugcaauacaacuugucagacacccaagggugcuauaaacaccagccucccauuucagaauauacauccgaucacaauuggaaaauguccaaaauauguaaaaagcacaaaauugagacuggccacaggauugaggaaugucccgucuauucaaucuagaggccuauuuggggccauugccgguuucauugaagggggguggacagggaugguagauggaugguacgguuaucaccaucaaaaugagcaggggucaggauaugcagccgaccugaagagcacacagaaugccauugacgagauuacuaacaaaguaaauucuguuauugaaaagaugaauacacaguucacagcaguagguaaagaguucaaccaccuggaaaaaagaauagagaauuuaaauaaaaaaguugaugaugguuuccuggacauuuggacuuacaaugccgaacuguugguucuauuggaaaaugaaagaacuuuggacuaccacgauucaaaugugaagaacuuauaugaaaagguaagaagccagcuaaaaaacaaugccaaggaaauuggaaacggcugcuuugaauuuuaccacaaaugcgauaacacgugcauggaaagugucaaaaaugggacuuaugacuacccaaaauacucagaggaagcaaaauuaaacagagaagaaauagaugggguaaagcuggaaucaacaaggauuuaccagauuuuggcgaucuauucaacugucgccaguucauugguacugguagucucccugggggcaaucaguuucuggaugugcucuaaugggucucuacaguguagaauauguauuuaa

SEQ ID NO: 42405 - RNA, 1701 nt, Artificial Sequence
  derived and/or modified CDS sequence (wt) from hemagglutinin__InfluenzaA__AGR50251
augaaggcaauacuaguaguucugcuauauacauuugcaaccgcaaaugcagacacauuauguauagguuaucaugcgaacaauucaacagacacuguagacacaguacuagaaaagaauguaacaguaacacacucuguuaaccuucuagaagacaagcauaacgggaaacuaugcaaacuaagagggguagccccauugcauuuggguaaauguaacauugcuggcuggauccugggaaauccagagugugaaucacucuccacagcaagcucaugguccuacauuguggaaacaucuaguucagacaauggaacguguuacccaggagauuucaucgauuaugaggagcuaagagagcaauugagcucagugucaucauuugaaagguuugagauauuccccaagacaaguucauggcccaaucaugacucgaacaaagguguaacggcagcauguccucaugcuggagcaaagagcuucuacaaaaauuuaauauggcuaguuaaaaaaggaaauucauacccaaagcucagcaaauccuacauuaaugauaaagggaaagaaguccucgugcuauggggcauucaccauccaucuacuagugcugaccaacaaagucucuaucagaaugcagaugcauauguuuuuguggggucaucaagauacagcaaaaaguucaagccggaaauagcaauaagacccaaagugagggaucaagaagggagaaugaacuauuacuggacacuaguagagccgggagacaaaauaacauucgaagcaacuggaaaucuagugguaccgagauaugcauucgcaauggaaagaaaugcuggaucugguauuaucauuucagauacaccaguccacgauugcaauacaacuugucagacacccaagggugcuauaaacaccagccucccauuucagaauauacauccgaucacaauuggaaaauguccaaaauauguaaaaagcacaaaauugagacuggccacaggauugaggaaugucccgucuauucaaucuagaggccuauuuggggccauugccgguuucauugaagggggguggacagggaugguagauggaugguacgguuaucaccaucaaaaugagcaggggucaggauaugcagccgaccugaagagcacacagaaugccauugacgagauuacuaacaaaguaaauucuguuauugaaaagaugaauacacaguucacagcaguagguaaagaguucaaccaccuggaaaaaagaauagagaauuuaaauaaaaaaguugaugaugguuuccuggacauuuggacuuacaaugccgaacuguugauucuauuggaaaaugaaagaacuuuggacuaccacgauucaaaugugaagaacuuauaugaaaagguaagaagccagcuaaaaaacaaugccaaggaaauuggaaacggcugcuuugaauuuuaccacaaaugcgauaacacgugcauggaaagugucaaaaaugggacuuaugacuacccaaaauacucagaggaagcaaaauuaaacagagaagaaauagaugggguaaagcuggaaucaacaaggauuuaccagauuuuggcgaucuauucaacugucgccaguucauugguacugguagucucccugggggcaaucaguuucuggaugugcucuaaugggucucuacaguguagaauauguauuuaa

SEQ ID NO: 42406 - RNA, 1701 nt, Artificial Sequence
  derived and/or modified CDS sequence (wt) from hemagglutinin__InfluenzaA__AGR50262
augaaggcaauacuaguaguucugcuauauacauuugcaaccgcaaaugcagacacauuauguauagguuaucaugcgaacaauucaacagacacuguagacacaguacuagaaaagaauguaacaguaacacacucuguuaaccuucuagaagacaagcauaacgggaaacuaugcaaacuaagagggguagccccauugcauuuggguaaauguaacauugcuggcuggauccugggaaauccagagugugaaucacucuccacagcaagcucaugguccuacauuguggaaacaucuaguucagacaauggaacguguuacccaggagauuucaucgauuaugaggagcuaagagagcaauugagcucagugucaucauuugaaagguuugagauauuccccaagacaaguucauggcccaaucaugacucgaacaaagguguaacggcagcauguccucaugcuggagcaaaaagcuucuacaaaaauuuaauauggcuaguuaaaaaaggaaauucauacccaaagcucagcaaauccuacauuaaugauaaagggaaagaaguccucgugcuauggggcauucaccauccaucuacuagugcugaccaacaaagucucuaucagaaugcagaugcauauguuuuuguggggucaucaagauacagcaagaaguucaagccggaaauagcaauaagacccaaagugagggaucaagaagggagaaugaacuauuacuggacacuaguagagccgggagacaaaauaacauucgaagcaacuggaaaucuagugguaccgagauaugcauucgcaauggaaagaaaugcuggaucugguauuaucauuucagauacaccaguccacgauugcaauacaacuugucagacacccaagggugcuauaaacaccagccucccauuucagaauauacauccgaucacaauuggaaaauguccaaaauauguaaaaagcacaaaauugagacuggccacaggauugaggaaugucccgucuauucaaucuagaggccuauuuggggccauugccgguuucauugaagggggguggacagggaugguagauggaugguacgguuaucaccaucaaaaugagcaggggucaggauaugcagccgaccugaagagcacacagaaugccauugacgagauuacuaacaaaguaaauucuguuauugaaaagaugaauacacaguucacagcaguagguaaagaguucaaccaccuggaaaaaagaauagagaauuuaaauaaaaaaguugaugaugguuuccuggacauuuggacuuacaaugccgaacuguugguucuauuggaaaaugaaaaaacuuuggacuaccacgauucaaaugugaagaacuuauaugaaaagguaagaagccagcuaaaaaacaaugccaaggaaauuggaaacggcugcuuugaauuuuaccacaaaugcgauaacacgugcauggaaagugucaaaaaugggacuuaugacuacccaaaauacucagaggaagcaaaauuaaacagagaagaaauagaugggguaaagcuggaaucaacaaggauuuaccagauuuuggcgaucuauucaacugucgccaguucauugguacugguagucucccugggggcaaucaguuucuggaugugcucuaaugggucucuacaguguagaauauguauuuaa

SEQ ID NO: 42407 - RNA, 1701 nt, Artificial Sequence; identical to SEQ ID NO: 34676
  derived and/or modified CDS sequence (wt) from hemagglutinin__InfluenzaA__AGR50273

SEQ ID NO: 42408 - RNA, 1701 nt, Artificial Sequence
  derived and/or modified CDS sequence (wt) from hemagglutinin__InfluenzaA__AGR50284
augaaggcaauacuaguaguucugcuauauacauuugcaaccgcaaaugcagacacauuauguauagguuaucaugcgaacaauucaacagacacuguagacacaguacuagaaaagaauguaacaguaacacacucuguuaaccuucuagaagacaagcauaacgggaaacuaugcaaacuaagagggguagccccauugcauuuggguaaauguaacauugcuggcuggauccugggaaauccagagugugaaucacucuccacagcaagcucaugguccuacauuguggaaacaucuaguucagacaauggaacguguuacccaggagauuucaucgauuaugaggagcuaagagagcaauugagcucagugucaucauuugaaagguuugagauauuccccaagacaaguucauggcccaaucaugacucgaacaaagguguaacggcagcauguccucaugcuggagcaaaaagcuucuacaaaaauuuaauauggcuaguuaaaaaaggaaauucauacccaaagcucagcaaauccuacauuaaugauaaagggaaagaaguccucgugcuauggggcauucaccauccaucuacuagugcugaccaacaaagucucuaucagaaugcagaugcauauguuuuuguggggucaucaagauacagcaagaaguucaagccggaaauagcaauaagacccaaagugagggaucaagaagggagaaugaacuauuacuggacacuaguagagccgggagacaaaauaacauucgaagcaacuggaaaucuagugguaccgagauaugcauucgcaauggaaagaaaugcuggaucugguauuaucauuucagauucaccaguccacgauugcaauacaacuugucagacacccaagggugcuauaaacaccagccucccauuucagaauauacauccgaucacaauuggaaaauguccaaaauauguaaaaagcacaaaauugagacuggccacaggauugaggaaugucccgucuauucaaucuagaggccuauuuggggccauugccgguuucauugaagggggguggacagggaugguagauggaugguacgguuaucaccaucaaaaugagcaggggucaggauaugcagccgaccugaagagcacacagaaugccauugacgagauuacuaacaaaguaaauucuguuauugaaaagaugaauacacaguucacagcaguagguaaagaguucaaccaccuggaaaaaagaauagagaauuuaaauaaaaaaguugaugaugguuuccuggacauuuggacuuacaaugccgaacuguugguucuauuggaaaaugaaagaacuuuggacuaccacgauucaaaugugaagaacuuauaugaaaagguaagaagccagcuaaaaaacaaugccaaggaaauuggaaacggcugcuuugaauuuuaccacaaaugcgauaacacgugcauggaaagugucaaaaaugggacuuaugacuacccaaaauacucagaggaagcaaaauuaaacagagaagaaauagaugggguaaagcuggaaucaacaaggauuuaccagauuuuggcgaucuauucaacugucgccaguucauugguacugguagucucccugggggcaaucaguuucuggaugugcucuaaugggucucuacaguguagaauauguauuuaa

SEQ ID NO: 42409 - RNA, 1701 nt, Artificial Sequence; identical to SEQ ID NO: 35411
  derived and/or modified CDS sequence (wt) from hemagglutinin__InfluenzaA__AGR50295

SEQ ID NO: 42410 - RNA, 1701 nt, Artificial Sequence; identical to SEQ ID NO: 34676
  derived and/or modified CDS sequence (wt) from hemagglutinin__InfluenzaA__AGR50306

SEQ ID NO: 42411 - RNA, 1701 nt, Artificial Sequence; identical to SEQ ID NO: 34823
  derived and/or modified CDS sequence (wt) from hemagglutinin__InfluenzaA__AGR50317

SEQ ID NO: 42412 - RNA, 1701 nt, Artificial Sequence
  derived and/or modified CDS sequence (wt) from hemagglutinin__InfluenzaA__AGR50328
augaaggcaauacuaguaguucugcuauauacauuugcaaccgcaaaugcagacacauuauguauagguuaucaugcgaacaauucaacagacacuguagacacaguacuagaaaagaauguaacaguaacacacucuguuaaccuucuagaagacaagcauaacgggaaacuaugcaaacuaagagggguagccccauugcauuuggguaaauguaacauugcuggcuggauccugggaaauccagagugugaaucacucuccacagcaagcucaugguccuacauuguggaaacaucuaguucagacaauggaacguguuacccaggagauuucaucgauuaugaggagcuaagagagcaauugagcucagugucaucauuugaaagguuugagauauuccccaagacaaguucauggcccaaucaugacucgaacaaagguguaacggcagcauguccucaugcuggagcaaaaagcuucuacaaaaauuuaauauggcuaguuaaaaaaggaaaaucauacccaaagcucagcaaauccuacauuaaugauaaagggaaagaaguccucgugcuauggggcauucaccauccaucuacuagugcugaccaacaaagucucuaucagaaugcagaugcauauguuuuuguggggucaucaagauacagcaagaaguucaagccggaaauagcaauaagacccaaagugagggaucaagaagggagaaugaacuauuacuggacacuaguagagccgggagacaaaauaacauucgaagcaacuggaaaucuagugguaccgagauaugcauucgcaauggaaagaaaugcuggaucugguauuaucauuucagauacaccaguccacgauugcaauacaacuugucagacacccaagggugcuauaaacaccagccucccauuucagaauauacauccgaucacaauuggaaaauguccaaaauauguaaaaagcacaaaauugagacuggccacaggauugaggaaugucccgucuauucaaucuagaggccuauuuggggccauugccgguuucauugaagggggguggacagggaugguagauggaugguacgguuaucaccaucaaaaugagcaggggucaggauaugcagccgaccugaagagcacacagaaugccauugacgagauuacuaacaaaguaaauucuguuauugaaaagaugaauacacaguucacagcaguagguaaagaguucaaccaccuggaaaaaagaauagagaauuuaaauaaaaaaguugaugaugguuuccuggacauuuggacuuacaaugccgaacuguugguucuauuggaaaaugaaagaacuuuggacuaccacgauucaaaugugaagaacuuauaugaaaagguaagaagccagcuaaaaaacaaugccaaggaaauuggaaacggcugcuuugaauuuuaccacaaaugcgauaacacgugcauggaaagugucaaaaaugggacuuaugacuacccaaaauacucagaggaagcaaaauuaaacagagaagaaauagaugggguaaagcuggaaucaacaaggauuuaccagauuuuggcgaucuauucaacugucgccaguucauugguacugguagucucccugggggcaaucaguuucuggaugugcucuaaugggucucuacaguguagaauauguauuuaa

SEQ ID NO: 42413 - RNA, 1701 nt, Artificial Sequence
  derived and/or modified CDS sequence (wt) from hemagglutinin__InfluenzaA__AGR50339
augaaggcaauacuaguaguucugcuauauacauuugcaaccgcaaaugcagacacauuauguauagguuaucaugcgaacaauucaacagacacuguagacacaguacuagaaaagaauguaacaguaacacacucuguuaaccuucuagaagacaagcauaacgggaaacuaugcaaacuaagagggguagccccauugcauuuggguaaauguaacauugcuggcuggauccugggaaauccagagugugaaucacucuccacagcaagcucaugguccuacauuguggaaacaucuaguucagacaauggaacguguuacccaggagauuucaucgauuaugaggagcuaagagagcaauugagcucagugucaucauuugaaagguuugagauauuccccaagacaaguucauggcccaaucaugacucgaacaaagguguaacggcagcauguccucaugcuggagcaaaaagcuucuacaaaaauuuaauauggcuaguuaaaaaaggaaauucauacccaaagcucagcaaauccuacauuaaugauaaagggaaagaaguccucgugcuauggggcauucaccauccaucuacuagugcugaccaacaaagucucuaucagaaugcagaugcauauguuuuuguggggucaucaagauacagcaagaaguucaagccggaaauagcaauaagacccaaagugagggaucaagaagggagaaugaacuauuacuggacacuaguagagccgggagacaaaauaacauucgaagcaacuggaaaucuagugguaccgagauaugcauucgcaauggaaagaaaugcuggaucugguauuaucauuucagauacaccaguccacgauugcaauacaacuugucagacauccaagggugcuauaaacaccagccucccauuucagaauauacauccgaucacaauuggaaaauguccaaaauauguaaaaagcacaaaauugagacuggccacaggauugaggaaugucccgucuauucaaucuagaggccuauuuggggccauugccgguuucauugaagggggguggacagggaugguagauggaugguacgguuaucaccaucaaaaugagcaggggucaggauaugcagccgaccugaagagcacacagaaugccauugacgagauuacuaacaaaguaaauucuguuauugaaaagaugaauacacaguucacagcaguagguaaagaguucaaccaccuggaaaaaagaauagagaauuuaaauaaaaaaguugaugaugguuuccuggacauuuggacuuacaaugccgaacuguugguucuauuggaaaaugaaagaacuuuggacuaccacgauucaaaugugaagaacuuauaugaaaagguaagaagccagcuaaaaaacaaugccaaggaaauuggaaacggcugcuuugaauuuuaccacaaaugcgauaacacgugcauggaaagugucaaaaaugggacuuaugacuacccaaaauacucagaggaagcaaaauuaaacagagaagaaauagaugggguaaagcuggaaucaacaaggauuuaccagauuuuggcgaucuauucaacugucgccaguucauugguacugguagucucccugggggcaaucaguuucuggaugugcucuaaugggucucuacaguguagaauauguauuuaa

SEQ ID NO: 42414 - RNA, 1701 nt, Artificial Sequence
  derived and/or modified CDS sequence (wt) from hemagglutinin__InfluenzaA__AGR50350
augaaggcaauacuaguaguucugcuauauacauuugcaaccgcaaaugcagacacauuauguauagguuaucaugcgaacaauucaacagacacuguagacacaguacuagaaaagaauguaacaguaacacacucuguuaaccuucuagaagacaagcauaacgggaaacuaugcaaacuaagagggguagccccauugcauuuggguaaauguaacauugcuggcuggaucaugggaaauccagagugugaaucacucuccacagcaagcucaugguccuacauuguggaaacaucuaguucagacaauggaacguguuacccaggagauuucaucgauuaugaggagcuaagagagcaauugagcucagugucaucauuugaaagguuugagauauuccccaagacaaguucauggcccaaucaugacucgaacaaagguguaacggcagcauguccucaugcuggagcaaaaagcuucuacaaaaauuuaauauggcuaguuaaaaaagggaauucauacccaaagcucagcaaauccuacauuaaugauaaagggaaagaaguccucgugcuauggggcauucaccauccaucuacuagugcugaccaacaaagucucuaucagaaugcagaugcauauguuuuuguggggucaucaagauacagcaagaaguucaagccggaaauagcaauaagacccaaagugagggaucaagaagggagaaugaacuauuacuggacacuaguagagccgggagacaaaauaacauucgaagcaacuggaaaucuagugguaccgagauaugcauucgcaauggaaagaaaugcuggaucugguauuaucauuucagauacaccaguccacgauugcaauacaacuugucagacacccaagggugcuauaaacaccagccucccauuucagaauauacauccgaucacaauuggaaaauguccaaaauauguaaaaagcacaaaauugagacuggccacaggauugaggaaugucccgucuauucaaucuagaggccuauuuggggccauugccgguuucauugaagggggguggacagggaugguagauggaugguacgguuaucaccaucaaaaugagcaggggucaggauaugcagccgaccugaagagcacacagaaugccauugacgagauuacuaacaaaguaaauucuguuauugaaaagaugaauacacaguucacagcaguagguaaagaguucaaccaccuggaaaaaagaauagagaauuuaaauaaaaaaguugaugaugguuuccuggacauuuggacuuacaaugccgaacuguugguucuauuggaaaaugaaagaacuuuggacuaccacgauucaaaugugaagaacuuauaugaaaagguaagaagccagcuaaaaaacaaugccaaggaaauuggaaacggcugcuuugaauuuuaccacaaaugcgauaacacgugcauggaaagugucaaaaaugggacuuaugacuacccaaaauacucagaggaagcaaaauuaaacagagaagaaauagaugggguaaagcuggaaucaacaaggauuuaccagauuuuggcgaucuauucaacugucgccaguucauugguacugguagucucccugggggcaaucaguuucuggaugugcucuaaugggucucuacaguguagaauauguauuuaa

SEQ ID NO: 42415 - RNA, 1698 nt, Artificial Sequence
  derived and/or modified CDS sequence (wt) from hemagglutinin__InfluenzaA__AGR50361
augaaaguacaacuacugguccuguuaugcacauuuacagcuacauaugcagacacaauauguauaggcuaccaugcuaacaacucgaccgacacuguugacacaguacuugaaaagaaugugacagugacacacucugucaaccugcuugagaacagucacaauggaaaacuaugucuauuaaaaggaauagccccacuacaauuggguaacugcagcguugccggguggaucuuaggaaacccagaaugcgaauuacugauuuccaaagagucaugguccuacauuguagaaaaaccaaauccugagaauggaacauguuacccagggcauuucgcugacuaugaggaacugagggagcaauugaguucaguaucuucauuugagagguucgaaauauuccccaaagaaagcucauggcccaaccacaccguaaccggagugucagcaucaugcucccauaauggggaaagcaguuuuuacagaaauuugcuauggcugacggggaagaaugguuuguacccaaaccugagcaaguccuaugcaaacaacaaagaaaaagaaguccuuguacuaugggguguucaucacccgccaaacauaguugaccaaaagacccucuaccguacagaaaaugcuuauguuucuguagugucuucacauuauagcagaaaauucaccccagaaauagccaaaagacccaaaguaagagaucaagaaggaagaaucaacuacuacuggacucugcuugaacccggggauacaauaauauuugaggcaaauggaaaucuaauagcgccaagauaugcuuucgcacugaguagaggcuuuggaucaggaaucaucaacucaaaugcaccaauggguaaaugugaugcgaagugccaaacaccucagggagcuauaaacagcagucuuccuuuccagaacguacacccagucacaauaggagaguguccaaaguaugucaggagugcaaaauuaaggaugguuacaggacuaaggaacaucccauccauucaauccagagguuuguuuggagccauugccgguuucauugaagggggguggacuggaaugguagaugguugguaugguuaucaucaucagaaugagcaaggaucuggcuaugcugcagaucaaaaaagcacacaaaaugccauuaaugggauuacaaacaaggugaauucuguaauugagaaaaugaacacucaauucacagcagugggcaaagaauucaacaaauuggaaagaaggauggaaaacuugaauaaaaaaguugaugauggguuuauagacauuuggacauauaaugcagaacuguugguucuacuggaaaaugaaaggacuuuggauuuccaugacuccaaugugaagaaucuguaugagaaaguaaaaagccaguuaaagaauaaugcuaaagaaauaggaaauggguguuuugaauucuaucacaaguguaacgaugaaugcauggagaguguaaagaauggaacuuaugacuauccaaaauauuccgaagaaucaaaguuaaacagggagaaaauugauggagugaaauuggaaucaaugggagucuaucagauucuggcgaucuacucaacagucgccaguucucugguucuuuuggucucccugggggcaaucagcuucuggauguguuccaaugggucuuugcaguguagaauaugcaucuaa

SEQ ID NO: 42416 - RNA, 1701 nt, Artificial Sequence
  derived and/or modified CDS sequence (wt) from hemagglutinin__InfluenzaA__AGT18718
augaagguaauacuaguaguucugcuauacacauuugcaaccgcaaaugcagacacauuauguauagguuaucaugcgaacaauucaacagacacuguagacacaguacuagaaaagaauguaacaguaacacacucuguuaaccuucuagaagacaagcauaacgggaaacuaugcaaacuaagagggguagccccauugcauuuggguaaauguaacauugcuggcuggauccugggaaauccagagugugaaucacucuccacagcaaguucaugguccuacauuguggaaacaucuaguucagacaauggaacguguuacccaggagauuucaucaauuaugaggagcuaagagagcaauugagcucagugucaucauuugaaagguuugagauauuccccaagacaaguucauggcccaaucaugacucgaacaaagguguaacggcagcauguccucaugcuggagcaaaaagcuucuacaaaaauuuaauauggcuaguuaaaaaaggaaauucauacccaaagcucagcaaauccuacauuaaugauaaagggaaagaaguccucguacuguggggcauucaccauccaucuacuacugcugaccaacaaagucucuaucagaaugcagaugcauauguuuuuguggggacaucaagauacagcaagaaguucaagccggaaauagcaauaagacccaaagugagggaucaagaagggagaaugaacuauuacuggacacuaauagagccgggagacaaaauaacauucgaagcaacuggaaaucuagugguaccgagauaugcauucgcaauggaaagaaaugcuggaucugguauuaucauuucagauacaccaguccacgauugcaauacaacuugucagacacccgagggugcuauaaacaccagccucccauuucagaauauacauccgaucacaauuggaaaauguccaaaguauguaaaaagcacaaaauugagacuggccacaggauugaggaaugucccgucuauucaaucuagaggccuauucggggccauugccggcuucauugaagggggguggacagggaugguagauggaugguacgguuaucaccaucaaaaugagcaggggucaggauaugcagccgaccugaagagcacacaaaaugccauugacaagauuacuaacaaaguaaauucuguuauugaaaagaugaauacacaguucacagcaguggguaaagaguucaaccaccuggaaaaaagaauagagaauuuaaauaaaaaaguugaugaugguuuccuggacauuuggacuuacaaugccgaacuguugguucuauuggaaaaugaaagaacuuuggacuaccacgauucaaaugugaagaacuuguaugaaaagguaagaaaccaguuaaaaaacaaugccaaggaaauuggaaacggcugcuuugaauuuuaccacaaaugcgauaacacgugcauggaaagugucaaaaaugggacuuaugacuacccaaaauacucagaggaagcaaaauuaaacagagaaaaaauagaugggguaaagcuggaaucaacaaggauuuaccagauuuuggcgaucuauucaacugucgccaguucauugguacugguagucucccugggggcaaucaguuucuggaugugcucuaaugggucucuacaguguagaauauguauuuaa

SEQ ID NO: 42417 - RNA, 1701 nt, Artificial Sequence
  derived and/or modified CDS sequence (wt) from hemagglutinin__InfluenzaA__AGT18720
augaagguaauacuaguaguucugcuauacacauuugcaaccgcaaaugcagacacauuauguauagguuaucaugcgaacaauucaacagacacuguagacacaguacuagaaaagaauguaacaguaacacacucuguuaaccuucuagaagacaagcauaacgggaaacuaugcaaacuaagagggguagccccauugcauuuggguaaauguaacauugcuggcuggauccugggaaauccagagugugaaucacucuccacagcaaguucaugguccuacauuguggaaacaucuaguucagacaauggaacguguuacccaggagauuucaucaauuaugaggagcuaagagagcaauugagcucagugucaucauuugaaagguuugagauauuccccaaggcaaguucauggcccaaucaugacucaaacaaagguguaacggcagcauguccucaugcuggagcaaaaagcuucuacaaaaauuuaauauggcuaguuaaaaaaggaaauucauacccaaagcucagcaaauccuacauuaaugauaaagggaaagaaguccucgugcuguggggcauucaccauccaaauacgacugcggaccaacaaagucucuaucagaaugcagaugcauauguuuuuguggggacaucaagauacagcaagaaguucaagccggaaauagcaauaagacccaaagugagggaucaagaaaggagaaugaacuauuacuggacacuaauagagccgggagacaaaauaacauucgaagcaacuggaaaucuagugguaccgagauaugcauucgcaauggaaagaaaugcuggaucugguauuaucauuucagacacaccaguccacgauugcaauacaacuugucagacacccgagggugcuauaaacaccagccucccauuucagaauauacauccgaucacaauuggaaaauguccaaaguauguaaaaagcacaaaauugagacuggccacaggauugaggaaugucccgucuauucaaucuagaggccuauucggggccauugccggcuucauugaagggggguggacagggaugguagauggaugguacgguuaucaccaucaaaaugagcaggggucaggauaugcagccgaccugaagagcacacaaaaugccauugacaagauuacuaacaaaguaaauucuguuauugaaaagaugaauacacaguucacagcaguggguaaagaguucaaccaccuggaaaaaagaauagagaauuuaaauaaaaaaguugaugaugguuuccuggacauuuggacuuacaaugccgaacuguugguucuauuggaaaaugaaaggacuuuggacuaccacgauucaaaugugaagaacuuguaugaaaagguaagaaaccaguuaaaaaacaaugccaaggaaauuggaaacggcugcuuugaauuuuaccacaaaugcgauaacacgugcauggaaagugucaaaaaugggacuuaugacuacccaaaauacucagaggaagcaaaauuaaacagagaaaaaauagaugggguaaagcuggaaucaacaaggauuuaccagauuuuggcgaucuauucaacugucgccaguucauugguacugguagucucccugggggcaaucaguuucuggaugugcucuaaugggucucuacaguguagaauauguauuuaa

SEQ ID NO: 42418 - RNA, 1701 nt, Artificial Sequence
  derived and/or modified CDS sequence (wt) from hemagglutinin__InfluenzaA__AGT18721
augaaggcaauacuaguaguucugcuauacacauuugcaaccgcaaaugcagacacauuauguauagguuaucaugcgaacaauucaacagacacuguagacacaguacuagaaaagaauguaacaguaacacacucuguuaaccuucuagaagacaagcauaacgggaaacuaugcaaacuaagagggguagccccauugcauuuggguaaauguaacauugcuggcuggauccugggaaauccagagugugaaucacucuccacagcaaguucaugguccuacauuguggaaacaucuaguucagacaauggaacguguuacccaggagauuucaucaauuaugaggagcuaagagagcaauugagcucagugucaucaauacaaaggucugagauaugcaccaagacaaguucauggcccaaucaugacucgaacaaagguguaacggcagcauguccucaugcuggagcaaaaagcuucuacaaaaauuuaauauggcuaguuaaaaaaggaaauucauacccaaagcucagcaaauccuacauuaaugauaaagggaaagaaguccucguacuguggggcauucaccaucaaaauagcaggggucaccaacaaagucucuaucagaaugcagaugcauauguuuuuguggggacaucaagauacagcaagaaguucaagccggaaauagcaauaagacccaaagugaaggaacaagacggcagaauggacuauuacuggacacuaauagagccgggagacaaaauaacauucgaagcaacuggaaaucuagugguaccgagauaugcauucgcaauggaaagaaaugcuggaucugguauuaucauuucagauacaccaguccacgauugcaacacaacuugucagacacccgagggugcuauaaacaccagccucccauuucagaauauacauccgaucacaauuggaaaauguccaaaguauguaaaaagcacaaaauugagacuggccacaggauugaggaaugucccgucuauucaaucuagaggccuauucggggccauugccggcuucauugaagggggguggacagggaugguagauggaugguacgguuaucaccaucaaaaugagcaggggucaggauaugcagccgaccugaagagcacacaaaaugccauugacaagauuacuaacaaaguaaauucuguuauugaaaagaugaauacacaguucacagcaguggguaaagaguucaaccaccuggaaaaaagaauagagaauuuaaauaaaaaaguugaugaugguuuccuggacauuuggacuuacaaugccgaacuguugguucuauuggaaaaugaaagaacuuuggacuaccacgauucaaaugugaagaacuuguaugaaaagguaagaaaccaguuaaaaaacaaugccaaggaaauuggaaacggcugcuuugaauuuuaccacaaaugcgauaacacgugcauggaaagugucaaaaaugggacuuaugacuacccaaaauacucagaggaagcaaaauuaaacagagaaaaaauagauggaguaaagcuggaaucaacaaggauuuaccagauuuuggcgaucuauucaacugucgccaguucauugguacugguagucucccugggggcaaucaguuucuggaugugcucuaaugggucucuacaguguagaauauguauuuaa

SEQ ID NO: 42419 - RNA, 1701 nt, Artificial Sequence
  derived and/or modified CDS sequence (wt) from hemagglutinin__InfluenzaA__AGT18722
augaaggcaauacuaguaguucugcuauacacauuugcaaccgcaaaugcagacacauuauguauagguuaucaugcgaacaauucaacagacacuguagacacaguacuagaaaagaauguaacaguaacacacucuguuaaccuucuagaagacaagcauaacgggaaacuaugcaaacuaagagggguagccccauugcauuuggguaaauguaacauugcuggcuggauccugggaaauccagagugugaaucacucuccacagcaaguucaugguccuacauuguggaaacaucuaaaucaaacaacagaacguguuacccaggagauuucaucaauuaugaggagcuaagagagcaauugagcucagugucaucauuugaaagguuugagauauuccccaagacaaguucauggcccaaucaugacucgaacaaagguguaacggcagcauguccucaugcuggagcaaaaagcuucuacaaaaauuuaauauggcuaguuaaaaaaggaaauucauacccaaagcucagcaaauccuacauuaaugauaaagggaaagaaguccucgugcuguggggcauucaccauccaucuacuacugcugaccaacaaagucucuaucagaaugcagaugcauauguuuuuguggggacaucaagauacagcaagaaguucaagccggaaauagcaauaagacccaaagugagggaucaagaagguaggaugaacuauuacuggacacuaauagagccgggagacaaaauaacauucgaagcaacuggaaaucuagugguaccgagauaugcauucgcaauggaaagaaaugcuggaucugguauuaucauuucagauacaccaguccacgauugcaacacaacuugucagacacccgagggugcuauaaacaccagccucccauuucagaauauacauccgaucacaauuggaaaauguccaaaguauguaaaaagcacaaaauugagacuggccacaggauugaggaaugucccgucuauucaaucuagaggccuauucggggccauugccggcuucauugaagggggguggacagggaugguagauggaugguacgguuaucaccaucaaaaugagcaggggucaggauaugcagccgaccugaagagcacacaaaaugccauugacaagauuacuaacaaaguaaauucuguuauugaaaagaugaauacacaguucacagcaguggguaaagaguucaaccaccuggaaaaaagaauagagaauuuaaauaaaaaaguugaugaugguuuccuggacauuuggacuuacaaugccgaacuguugguucuauuggaaaaugaaagaacuuuggacuaccacgauucaaaugugaagaacuuguaugaaaagguaagaaaccaguuaaaaaacaaugccaaggaaauuggaaacggcugcuuugaauuuuaccacaaaugcgauaacacgugcauggaaagugucaaaaaugggacuuaugacuacccaaaauacucagaggaagcaaaauuaaacagagaaaaaauagaugggguaaagcuggaaucaacaaggauuuaccagauuuuggcgaucuauucaacugucgccaguucauugguacugguagucucccugggggcaaucaguuucuggaugugcucuaaugggucucuacaguguagaauauguauuuaa

SEQ ID NO: 42420 - RNA, 1701 nt, Artificial Sequence
  derived and/or modified CDS sequence (wt) from hemagglutinin__InfluenzaA__AGT18723
augaaggcaauacuaguaguucugcuauacacauuugcaaccgcaaaugcagacacauuauguauagguuaucaugcgaacaauucaacagacacuguagacacaguacuagaaaagaauguaacaguaacacacucuguuaaccuucuagaagacaagcauaacgggaaacuaugcaaacuaagagggguagccccauugcauuuggguaaauguaacauugcuggcuggauccugggaaauccagagugugaaucacucuccacagcaaguucaugguccuacauuguggaaacaucuaaaacaaacaacagaacguguuacccaggagauuucaucaauuaugaggagcuaagagagcaauugagcucagugucaucauuugaaagguuugagauauuccccaagacaaguucauggcccaaucaugacucgaacaaagguguaacggcagcauguccucaugcuggagcaaaaagcuucuacaaaaauuuaauauggcuaguuaaaaaaggaaauucauacccaaagcucagcaaauccuacauuaaugauaaagggaaagaaguccucgugcuguggggcauucaccaucaaaauaagaaggcggaacaacaaacacccuaucagaaugcagaugcauauguuuuuguggggacaucaagauacagcaagaaguucaagccggaaauagcaauaagacccaaagugagggaucaagaagguaggauggacuauuacuggacacuaauagagccgggagacaaaauaacauucgaagcaacuggaaaucuagugguaccgagauaugcauucgcaauggaaagaaaugcuggaucugguauuaucauuucagauacaccaguccacgauugcaauacaacuugucagacacccgagggugcuauaaacaccagccucccauuucagaauauucauccgaucacaauuggaaaauguccaaaguauguaaaaagcacaaaauugagacuggccacaggauugaggaaugucccgucuauucaaucuagaggccuauucggggccauugccggcuucauugaagggggguggacagggaugguagauggaugguacgguuaucaccaucaaaaugagcaggggucaggauaugcagccgaccugaagagcacacaaaaugccauugacaagauuacuaacaaaguaaauucuguuauugaaaagaugaauacacaguucacagcaguggguaaagaguucaaccaccuggaaaaaagaauagagaauuuaaauaaaaaaguugaugaugguuuccuggacauuuggacuuacaaugccgaacuguugguucuauuggaaaaugaaagaacuuuggacuaccacgauucaaaugugaagaacuuguaugaaaagguaagaaaccaguuaaaaaacaaugccaaggaaauuggaaacggcugcuuugaauuuuaccacaaaugcgauaacacgugcauggaaagugucaaaaaugggacuuaugacuacccaaaauacucagaggaagcaaaauuaaacagagaaaaaauagaugggguaaagcuggaaucaacaaggauuuaccagauuuuggcgaucuauucaacugucgccaguucauugguacugguagucucccugggggcaaucaguuucuggaugugcucuaaugggucucuacaguguagaauauguauuuaa

SEQ ID NO: 42421 - RNA, 1701 nt, Artificial Sequence
  derived and/or modified CDS sequence (wt) from hemagglutinin__InfluenzaA__AGT18724
augaaggcaauacuaguaguucugcuauacacauuugcaaccgcaaaugcagacacauuauguauagguuaucaugcgaacaauucaacagacacuguagacacaguacuagaaaagaauguaacaguaacacacucuguuaaccuucuagaagacaagcauaacgggaaacuaugcaaacuaagagggguagucccauugcauuuggguaaauguaacauugcuggcuggauccugggaaauccagagugugaaucacucuccacagcaaguucaugguccuacauuguggaaacaucuaaaacaaacaacagaacguguuacccaggagauuucaucaauuaugaggagcuaagagagcaauugagcucagugucaucauuugaaagguuugagauauuccccaagacaaguucauggcccaaucaugacucgaacaaagguguaacggcagcauguccucaugcuggagcaaaaagcuucuacaaaaauuuaauauggcuaguuaaaaaaggaaauucauacccaaagcucagcaaauccuacauuaaugauaaagggaaagaaguccucgugcuguggggcauucaccauccaucuacuacugcugaccaacaaacacucuaucagaaugcagaugcauauguuuuuguggggacaucaagauacagcaagaaguucaagccggaaauagcaauaagacccaaagugagggaucaagaagggagaaugaacuauuaccggacacuaauagagccggaaaacaaaauaacauucgaagcaacuggaaaucuagugguaccgagauaugcauucgcaauggaaagaaaugcuggaucugguauuaucauuucagauacaccaguccacgauugcaauacaacuugucagacacccgagggugcuauaaacaccagccucccauuucagaauauacauccgaucacaauuggaaaauguccaaaguauguaaaaagcacaaaauugagacuggccacaggauugaggaaugucccgucuauucaaucuagaggccuauucggggccauugccggcuucauugaagggggguggacagggaugguagauggaugguacgguuaucaccaucaaaaugagcaggggucaggauaugcagccgaccugaagagcacacaaaaugcuauugacaagauuacuaacaaaguaaauucuguuauugaaaagaugaauacacaguucacagcaguggguaaagaguucaaccaccuggaaaaaagaauagagaauuuaaauaaaaaaguugaugaugguuuccuggacauuuggacuuacaaugccgaacuguugguucuauuggaaaaugaaagaacuuuggacuaccacgauucaaaugugaagaacuuguaugaaaagguaagaaaccaguuaaaaaacaaugccaaggaaauuggaaacggcugcuuugaauuuuaccacaaaugcgauaacacgugcauggaaagugucaaaaaugggacuuaugacuacccaaaauacucagaggaagcaaaauuaaacagagaaaaaauagaugggguaaagcuggaaucaacaaggauuuaccagauuuuggcgaucuauucaacugucgccaguucauugguacugguagucucccugggggcaaucaguuucuggaugugcucuaaugggucucuacaguguagaauauguauuuaa

SEQ ID NO: 42422 - RNA, 1701 nt, Artificial Sequence
  derived and/or modified CDS sequence (wt) from hemagglutinin__InfluenzaA__AGT18725
augaagguaauacuaguaguucugcuauacacauuugcaaccgcaaaugcagacacauuauguauagguuaucaugcgaacaauucaacagacacuguagacacaguacuagaaaagaauguaacaguaacacacucuguuaaccuucuagaagacaagcauaacgggaaacuaugcaaacuaagagggguagccccauugcauuuggguaaauguaacauugcuggcuggauccugggaaauccagagugugaaucacucuccacagcaaguucaugguccuacauuguggaaacaucgaguucagacaauggaacguguuacccaggagauuucaucaauuaugaggagcuaagagagcaauugagcucagugucaucauuugaaagguuugagauauuccccaagacaaguucauggcccaaucaugacucgaacaaagguguaacggcagcauguccucaugcuggagcaaaaagcuucuacaaaaauuuaauauggcuaguuaaaaaaggaaauucauacccaaagcucagcaaauccuacauuaaugauaaagggaaagaaguccucguacuguggggcauucaccauccaucuacuagugcugaccaacaaagucucuaucagaaugcagacgcauauguuuuuguggggacaucaagauacagcaagaaguucaagccggaaauagcaauaagacccaaagugagggaucaagaagggagaaugaacuauuacuggacacuaguagagccgggagacaaaauaacauucgaagcaacuggaaaucuagugguaccgagauaugcauucgcaauggaaagaaaugcuggaucugguauuaucauuucagauacaccaguccacgauugcaauacaacuugucagacacccgagggugcuauaaacaccagccucccauuucagaauauacauccgaucacaauuggaaaauguccaaaguauguaaaaagcacaaaauugagacuggccacaggauugaggaaugucccgucuauucaaucuagaggccuauucggggccauugccggcuucauugaagggggguggacagggaugguagauggaugguacgguuaucaccaucaaaaugagcaggggucaggauaugcagccgaccugaagagcacacaaaaugccauugacaagauuacuaacaaaguaaauucuguuauugaaaagaugaauacacaguucacagcaguggguaaagaguucaaccaccuggaaaaaagaauagagaauuuaaauaaaaaaguugaugaugguuuccuggacauuuggacuuacaaugccgaacuguugguucuauuggaaaaugaaagaacuuuggacuaccacgauucaaaugugaagaacuuguaugaaaagguaagaacccaguuaaaaaacaaugccaaggaaauuggaaacggcugcuuugaauuuuaccacaaaugcgauaacacgugcauggaaagugucaaaaaugggacuuaugacuacccaaaauacucagaggaagcaaaauuaaacagagaaaaaauagaugggguaaagcuggaaucaacaaggauuuaccagauuuuggcgaucuauucaacugucgccaguucauugguacugguagucucccugggggcaaucaguuucuggaugugcucuaaugggucucuacaguguagaauauguauuuaa

SEQ ID NO: 42423 - RNA, 1701 nt, Artificial Sequence
  derived and/or modified CDS sequence (wt) from hemagglutinin__InfluenzaA__AGT18734
augaaggcaauacuaguaguucugcuauacacauuugcaaccgcaaaugcagacacauuauguauagguuaucaugcgaacaauucaacagacacuguagacacaguacuagaaaagaauguaacaguaacacacucuguuaaccuucuagaagacaagcauaacgggaaacuaugcaaacuaagagggguagccccauugcauuuggguaaauguaacauugcuggcuggauccugggaaauccagagugugaaucacucuccacagcaaguucaugguccuacauuguggaaacaucuaguucagacaauggaacguguuacccaggagauuucaucaauuaugaggagcuaagagagcaauugagcucagugucaucauuugaaagguuugagauauuccccaagacaaguucauggcccaaucaugacucgaacaaagguguaacggcagcauguccucaugcuggagcaaaaagcuucuacaaaaauuuaauauggcuaguuaaaaaaggaaauucauacccaaagcucagcaaauccuacauuaaugauaaagggaaagaaguccucgugcuguggggcauucaccauccaucuacuacugcugaccaacaaagucucuaucagaaugcagaugcauauguuuuuguggggacaucaagauacagcaagaaguucaagccggaaauagcaauaagaccaaaagugagggaucaagaagggagaauuaacuauuacuggacacuaauagagccgggagacaaaauaacauucgaagcaacuggaaaucuagugguaccgagauaugcauucgcaauggaaagaaaugcuggaucugguauuaucauuucagauacaccaguccacgauugcaacacaacuugucagacacccgagggugcuauaaacaccagccucccauuucagaauauacauccgaucacaauuggaaaauguccaaaguauguaaaaagcacaaaauugagacuggccacaggauugaggaaugucccgucuauucaaucuagaggccuauucggggccauugccggcuucauugaagggggguggacagggaugguagauggaugguacgguuaucaccaucaaaaugagcaggggucaggauaugcagccgaccugaagagcacacaaaaugccauugacaagauuacuaacaaaguaaauucuguuauugaaaagaugaauacacaguucacagcaguggguaaagaguucaaccaccuggaaaaaagaauagagaauuuaaauaaaaaaguugaugaugguuuccuggacauuuggacuuacaaugccgaacuguugguucuauuggaaaaugaaagaacuuuggacuaccacgauucaaaugugaagaacuuguaugaaaagguaagaaaccaguuaaaaaacaaugccaaggaaauuggaaacggcugcuuugaauuuuaccacaaaugcgauaacacgugcauggaaagugucaaaaaugggacuuaugacuacccaaaauacucagaggaagcaaaauuaaacagagaaaaaauagaugggguaaagcuggaaucaacaaggauuuaccagauuuuggcgaucuauucaacugucgccaguucauugguacugguagucucccugggggcaaucaguuucuggaugugcucuaaugggucucuacaguguagaauauguauuuaa

SEQ ID NO: 42424 - RNA, 1701 nt, Artificial Sequence
  derived and/or modified CDS sequence (wt) from hemagglutinin__InfluenzaA__AGT18735
augaaggcaauacuaguaguucugcuauacacauuugcaaccgcaaaugcagacacauuauguauagguuaucaugcgaacaauucaacagacacuguagacacaguacuagaaaagaauguaacaguaacacacucuguuaaccuucuagaagacaagcauaacgggaaacuaugcaaacuaagagggguagccccauugcauuuggguaaauguaacauugcuggcuggauccugggaaauccagagugugaaucacucuccacagcaaguucaugguccuacauuguggaaacaucuaguucagacaauggaacguguuacccaggagauuucaucaauuaugaggagcuaagagagcaauugagcucagugucaucauuugaaagguuugagauauuccccaagacaaguucauggcccaaucaugacucgaacaaagguguaacggcagcauguccucaugcuggagcaaaaagcuucuacaaaaauuuaauauggcuaguuaaaaaaggaaauucauacccaaagcucagcaaauccuacauuaaugauaaagggaaagaaguccucgugcuguggggcauucaccauccaucuacuacugcugaccaacaaagucucuaucagaaugcagaugcauauguuuuuguggggacaucaagauacagcaagaaguucaagccggaaauagcaauaagacccaaagugagggaucaagaagggagaaugaacuauuacuggacacuaauagagccgggagacaaaauaacauucgaagcaacuggaaaucuagugguaccgagauaugcauucgcaauggaaagaaaugcuggaucugguauuaucauuucagauacaccaguccacgauugcaauacaacuugucagacacccgagggugcuauaaacaccagccucccauuucagaauauacauccgaucacaauuggaaaauguccaaaguauguaaaaagcacaaaauugagacuggccacaggauugaggaaugucccgucuauucaaucuagaggccuauucggggccauugccggcuucauugaagggggguggacagggaugguagauggaugguacgguuaucaccaucaaaaugagcaggggucaggauaugcagccgaccugaagagcacacaaaaugccauugacaagauuacuaacaaaguaaauucuguuauugaaaagaugaauacacaguucacagcaguggguaaagaguucaaccaccuggaaaaaagaauagagaauuuaaauaaaaaaguugaugaugguuuccuggacauuuggacuuacaaugccgaacuguugguucuauuggaaaaugaaagaacuuuggacuaccacgauucaaaugugaagaacuuguaugaaaagguaagaaaccaguuaaaaaacaaugccaaggaaauuggaaacggcugcuuugaauuuuaccacaaaugcgauaacacgugcauggaaagugucaaaaaugggacuuaugacuacccaaaauacucagaggaagcaaaauuaaacagagaaaaaauagaugggguaaagcuggaaucaacaaggauuuaccagauuuuggcgaucuauucaacugucgccaguucauugguacugguagucucccugggggcaaucaguuucuggaugugcucuaaugggucucuacaguguagaauauguauuuaa

SEQ ID NO: 42425 - RNA, 1701 nt, Artificial Sequence
  derived and/or modified CDS sequence (wt) from hemagglutinin__InfluenzaA__AGT18748
augaagacuaucauugcuuugagcuacauucuaugucugguuuucgcucaaaaacuuccuggaaaugacaauagcacggcaacgcugugccuugggcaccaugcaguaccaaacggaacgauagugaaaacaaucacgaaugaccgaauugaaguuacuaaugcuacugagcugguucagaauuccucaauaggugaaauaugcgacaguccucaucagauucuugaugaggaaaacugcacacuaauagaugcucuauugggagacccucagugugaugacuuucaaaauaagaaaugggaccuuuuuguugaacgaagcaaagccuacagcaacuguuacccuuaugaugugccggauuaugccucccuuaggucacuaguugccucauccggcacacuggaguuuaacaaugaaagcuucaauugggcuggagucacucaaaacggaacaaguucugcuugcagaaggggaucuaauaguaguuucuuuaguagauuaaauugguugacccacuuaaacuucaaauacccagcauugaacgugacuaugccaaacaaugaacaauuugacaaauuguacauuugggggguucaccacccgaguacggacaaggaccaaaucuuccuguaugcucaaucaucaggaagaaucacaguaucuaccaaaagaagccaacaagcuguaaucccgaauaucggaucuagacccagaauaaggaauaucccuagcagaauaagcaucuauuggacaauaguaaaaccgggagacauacuuuugauuaacagcacagggaaucuaauugcuccuagggguuacuucaaaauacgaagugggaaaagcucaauaaugagaucagaugcacccauuggcaaaugcaagucugaaugcaucacuccaaauggaagcauucccaaugacaaaccauuccaaaauguaaacaggaucacauacggggccugucccagauauguuaagcaaagcacucugaaauuggcaacaggaaugcgaaaugugccagagaaacaaacuagaggcauauuuggcgcaauagcggguuucauagaaaaugguugggagggaaugguggaugguugguacgguuucaggcaucaaaauucugagggaagaggacaagcagcagaucucaaaagcacucaagcagcaaucgaucaaaucaaugggaagcugaaucgauugaucgggaaaaccaacgagaaauuccaucagauugaaaaagaauucucagaaguagaagggagaauucaggaccuugagaaauauguugaggacacaaaaauagaucucuggucauacaacgcggagcuucuuguugcccuggagaaccaacauacaauugaucuaacugacucagaaaugaacaaacuguuugaaaaaacaaagaagcaauugagggaaaaugcugaggauaugggcaaugguuguuucaaaauauaccacaaaugugacaaugccugcauaggaucaaucagaaauggaacuuaugaccacgauguauacagggaugaagcauuaaacaaccgguuccagaucaagggaguugagcugaagucaggguacaaagauuggauccuauggauuuccuuugccauaucauguuuuuugcuuuguguugcuuuguugggguucaucaugugggccugccaaaagggcaacauuaggugcaacauuugcauuuga

SEQ ID NO: 42426 - RNA, 1701 nt, Artificial Sequence
  derived and/or modified CDS sequence (wt) from hemagglutinin__InfluenzaA__AGT18749
augaagacuaucauugcuuugagcuacauucuaugucugguuuucgcucaaaaacuuccugaaaaugacaacagcacggcaacgcugugccuugggcaccaugcaguaccaaacggaacgauagugaaaacaaucacggaugaccaaauugaaguuacuaaugcuacugagcugguucagaauuccucaacaggugaaauaugugacaguccucaucagauccuugauggagaaaacugcacacuaauagaugcucuauugggagacccucagugugauggcuuccaaaauaagaaaugggaccuuuuuguugaacgaagcaaagccuacagcaacuguuacccuuaugaugugccggauuaugccucccuuaggucacuaguugccucauccggcacacuggaguuuaacaaugaaagcuucaauuggacuggaguuacucaaaacgggacaagcucugcuugcauaaggagaucuaauaauaguuucuuuaguagauugaauugguugacccacuuaaacuucaaauacccagcauugaacgugacuaugccaaacaaugaacaauuugacaaauuguacauuugggggguucaccacccggguacggacaaggaccaaaucuuccuguaugcucaagcaucaggaagaaucacaguaucuaccaaaagaagccaacaagcuguaaucccgaauaucggaucuagacccagaguaaggaauaucccuagcagaauaagcaucuauuggacaauaguaaaaccgggagacauacuuuugauuaacagcacagggaaucuaauugcuccuagggguuacuucagaauacgaagugggagaagcucaauaaugagaucagaugcacccauuggcaaaugcaauucugaaugcaucacuccaaauggaagcauucccaaugacaaaccauuccaaaauguaaacaggaucacauacggggccugccccagauauguuaagcaaaacacccugaaauuggcaacaggaaugcgaaauguaccagagaaacaaacuagaggcauauuuggcgcaauagcggguuucauagaaaaugguugggagggaaugguggaugguugguacgguuucaggcaucaaaauucugagggaagagggcaagcagcagaucucaaaagcacucaagcagcaaucgaucaaaucaaugggaagcugaauagauugaucgggaaaaccaaugagaaauuccaucagauugaaaaagaauucucagaagucgaagggagaauucaggaccuugagaaauauguugaggacacuaaaauagaucucuggucauacaacgcggagcuucuuguugcccuggagaaccaacacacaauugaucuaacugacucagaaaugaacaaacuguuugaaaaaacaaagaagcaacugagggaaaaugcugaggauaugggcaaugguuguuucaaaauauaccacaaaugugacaaugccugcauaggaucaaucagaaauggaacuuaugaucacgauguauacagagaugaagcauuaaacaaccgguuccagaucaagggaguugagcugaagucaggguacaaagauuggauccuauggauuuccuuugccauaucauguuuuuugcuuuguguugcuuuguugggguucaucaugugggccugccaaaaaggcaacauuaggugcaacauuugcauuuga

SEQ ID NO: 42427 - RNA, 1701 nt, Artificial Sequence
  derived and/or modified CDS sequence (wt) from hemagglutinin__InfluenzaA__AGT18751
augaagacugucauugcuuugagcuacauucuaugucugguuuucgcucaaaaacuuccuggaaaugacaacagcacggcaacgcugugccuugggcaccaugcaguaccaaacggaacgauagugaaaacaaucacgaaugaccaaauugaaguuacuaaugcuacugagcugguucagaauuccucaacaggugaaauaugcgacaguccucaucagauccuugauggagaaaacugcacacuaauagaugcucuauugggagacccucagugugauggcuuccaaaauaagaaaugggaccuuuuuguugaacgaagcaaagccuacagcaacuguuacccuuaugaugugccggauuaugccucccuuaggucacuaguugccucauccggcacacuggaguuuaacaaugaaagcuucaauuggacuggagucacucaaaacggaacaagcucugcuugcauaaggagaucuaauaauaguuucuuuaguagauugaauugguugacccacuuaaacuucaaauacccagcauugaacgugacuaugccaaacaaugaacaauuugacaaauuguacauuugggggguucaccacccggguacggacaaggaccaaaucuuccuguaugcucaagcaucaggaagaaucacaguaucuaccaaaagaagccaacaagcuguaaucccgaauaucggaucuagacccagaguaaggaauaucccuagcagaauaagcaucuauuggacaauaguaaaaccgggagacauacuuuugauuaacagcacagggaaucuaauugcuccuagggguuacuucaaaauacgaagugggagaagcucaauaaugagaucagaugcacccauuggcaaaugcaauucugaaugcaucacuccaaauggaagcauucccaaugacaaaccauuccagaauguaaacaggaucacauacggggccugccccagauauguuaagcaaaacacccugaaauuggcaacaggaaugcgaaauguaccagagaaacaaacuagaggcauauuuggcgcaauagcagguuucauagaaaaugguugggagggaaugguggaugguugguacgguuucaggcaucaaaauucugagggaagaggacaagcagcagaucucaaaagcacucaagcagcaaucgaucaaaucaaugggaagcugaauagauugaucgggaaaaccaacgagaaauuccaucagauugaaaaagaauucucagaagucgaagggagaauucaggaccuugagaaauauguugaggacacuaaaauagaucucuggucauacaagucggagcuucuuguugcccuggagaaccaacacacaauugaucuaacugacucagaaaugaacaaacuguuugaaaaaacaaagaagcaacugagggaaaaugcugaggauaugggcaaugguuguuucaaaauauaccacaaaugugacaaugccugcauaggaucaaucagaaauggaacuuaugaucacgauguauacagagaugaagcauuaaacaaccgguuccagaucaagggaguugagcugaagucaggguacaaagauuggauccuauggauuuccuuugccauaucauguuuuuugcuuuguguugcuuuguugggguucaucaugugggccugccaaaaaggcaacauuaggugcaacauuugcauuuga

SEQ ID NO: 42428 - RNA, 1701 nt, Artificial Sequence
  derived and/or modified CDS sequence (wt) from hemagglutinin__InfluenzaA__AGT18752
augaagacuaucauugcuuugagcuacauuauaugucugguuuucgcucaaaaacuuccuggaaaugacaacagcacggcaacgcugugccuugggcaccaugcaguaccaaacggaacgauagugaaaacaaucacgaaugaccaaauugaaguuacuaaugcuacugagcugguucagaauuccucaacaggugaaauaugcaacaguccucaucagauacuugauggagaaaacugcacacuaauagaugcucuauugggagacccucagugugauggcuuccaaaauaagaaaugggaccuuuuuguugaacgaagcaaagccuacagcaacuguuaccccuaugaugugccggauuaugccucccuuaggucacuaguugccucauccggcacacuggaguuuaacaaugaaagcuucaauuggacuggagucacucaaaacggaacaagcucugcuugcauaaggagaucuaauaauaguuucuuuaguagauugaauugguugacccacuuaaacuucaaauacccagcauugaacgugacuaugccaaacaaugaacaauuugacaaauuguacauuugggggguucaccacccagguacggacaaggaccaaaucuuccuguaugcucaagcaucaggaagaaucacaguaucuaccaaaagaagccaacaagcuguaaucccgaauaucggaucuagacccagaguaaggaauaucccuagcagaauaagcaucuauuggacaauaguaaaaccgggagacauacuuuugauuaacagcacagggaaucuaauugcuccuagggguuacuucaaaauacgaagugggagaagcucaauaaugagaucagaugcacccauuggcaaaugcaauucugaaugcaucacuccaaauggaagcauucccaaugacaaaccauuccaaaauguaaacaggaucacauacggggccugccccagauauguuaagcaaaacacccugaaauuggcaacaggaaugcgaaauguaccagagaaacaaacuagaggcauauuuggugcaauagcggguuucauagaaaaugguugggagggaaugguggaugguugguacgguuucaggcaucaaaauucugagggaagaggacaagcagcagaucucaaaagcacucaagcagcaaucgaucaaaucaaugggaagcugaauagauugaucgggaaaaccaacgagaaauuccaucagauugaaaaagaauucucagaagucgaagggagaauucaggaccuugagaaauauguugaggacacuaaaauagaucucuggucauacagcucggagcuucuuguugcccuggagaaccaacacacaauugaucuaacugacucagaaaugaacaaacuguuugaaaaaacaaagaagcaacugagggaaaaugcugaggauaugggcaaugguuguuucaaaauauaccacaaaugugacaaugccugcauaggaucaaucagaaauggaacuuaugaucacgauguauacagagaugaagcauuaaacaaccgguuccagaucaagggaguugagcugaagucaggguacaaagauuggauccuauggauuuccuuugccauaucauguuuuuugcuuuguguugcuuuguugggguucaucaugugggccugccaaaaaggcaacauuaggugcaacauuugcauuuga

SEQ ID NO: 42429 - RNA, 1701 nt, Artificial Sequence
  derived and/or modified CDS sequence (wt) from hemagglutinin__InfluenzaA__AGT18753
augaagacuaucauugcuuugagcuacauucuaugucugguuuucgcucaaaaacuuccuggaaaugacaacagcacggcaacgcugugccuugggcaccaugcaguaccaaacggaacgauagugaaaacaaucacgaaugaccaaauugaaguuacuaaugcuacugagcugguucagaauuccucaacaggugaaauaugcaacaguccucaucagauacuugauggagaaaacugcacacuaauagaugcucuauugggagacccucagugugauggcuuccaaaauaagaaaugggaccuuuuuguugaacgaagcaaagccuacagcaacuguuaccccuaugaugugccggauuaugccucccuuaggucacuaguugccucauccggcacacuggaguuuaacaaugaaagcuucaauuggacuggagucacucaaaacggaacaagcucugcuugcauaaggagaucuaauaauaguuucuuuaguagauugaauugguugacccacuuaaacuucaaauacccagcauugaacgugacuaugccaaacaaugaacaauuugacaaauuguacauuugggggguucaccacccagguacggacaaggaccaaaucuuccuguaugcucaagcaucaggaagaaucacaguaucuaccaaaagaagccaacaagcuguaaucccgaauaucggaucuagacccagaguaaggaauaucccuagcagaauaagcaucuauuggacaauaguaaaaccgggagacauacuuuugauuaacagcacagggaaucuaauugcuccuagggguuacuucaaaauacgaagugggagaagcucaauaaugagaucagaugcacccauuggcaaaugcaauucugaaugcaucacuccaaauggaagcauucccaaugacaaaccauuccaaaauguaaacaggaucacauacggggccugccccagauauguuaagcaaaacacccugaaauuggcaacaggaaugcgaaauguaccagagaaacaaacuagaggcauauuuggugcaauagcggguuucauagaaaaugguugggagggaaugguggaugguugguacgguuucaggcaucaaaauucugagggaagaggacaagcagcagaucucaaaagcacucaagcagcaaucgaucaaaucaaugggaagcugaauagauugaucgggaaaaccaacgagaaauuccaucagauugaaaaagaauucucagaagucgaagggagaauucaggaccuugagaaauauguugaggacacuaaaauagaucucuggucauacaagucggagcuucuuguugcccuggagaaccaacacacaauugaucuaacugacucagaaaugaacaaacuguuugaaaaaacaaagaagcaacugagggaaaaugcugaggauaugggcaaugguuguuucaaaauauaccacaaaugugacaaugccugcauaggaucaaucagaaauggaacuuaugaucacgauguauacagagaugaagcauuaaacaaccgguuccagaucaagggaguugagcugaagucaggguacaaagauuggauccuauggauuuccuuugccauaucauguuuuuugcuuuguguugcuuuguugggguucaucaugugggccugccaaaaaggcaacauuaggugcaacauuugcauuuga

SEQ ID NO: 42430 - RNA, 1701 nt, Artificial Sequence
  derived and/or modified CDS sequence (wt) from hemagglutinin__InfluenzaA__AGT18754
augaagacuaucauugcuuugagcuacauucuaugucugguuuucgcucaaaaacuuccugaaaaugacaacagcacggcaacgcugugccuugggcaccaugcaguaccaaacggaacgauagugaaaacaaucacggaugaccaaauugaaguuacuaaugcuacugagcugguucagaauuccucaacaggugaaauaugugacaguccucaucagauccuugauggagaaaacugcacacuaauagaugcucuauugggagacccucagugugauggcuuccaaaauaagaaaugggaccuuuuuguugaacgaggcaaagccuacagcaacuguuacccuuaugaugugccggauuaugccucccucaggucacuaguugccacauccggcacacuggaguuuaacaaugaaagcuucaauuggacuggagucacucaaaacgggacaagcucugcuugcauaaggagaucuaauaauaguuucuuuaguagauugaauugguugacccacuuaaacuucaaauacccagcauugaacgugacuaugccaaacaaugaacaauuugacaaauuguacauuugggggguucaccacccggguacggacaaggaccaaaucuuccuguaugcucaagcaucaggaagaaucacaguaucuaccaaaagaagccaacaagcuguaaucccgaauaucggaucuagacccagaguaaggaauaucccuagcagaauaagcaucuauuggacaauaguaaaaccgggagacauacuuuugauuaacagcacagggaaucuaauugcuccuagggguuacuucaaaauacgaagugggagaagcucaauaaugagaucagaugcacccauuggcaaaugcaauucugaaugcaucacuccaaauggaagcauucccaaugacaaaccauuccaaaauguaaacaggaucacauacggggccugccccagauauguuaagcaaaacacccugaaauuggcaacaggaaugcgaaauguaccagagaaacaaacuagaggcauauuuggcgcaauagcggguuucauagaaaaugguugggagggaaugguggaugguugguacgguuucaggcaucaaaauucugagggaagagggcaagcagcagaucucaaaagcacucaagcagcaaucgaucaaaucaaugggaagcugaauagauugaucgggaaaaccaaugagaaauuccaucagauugaaaaagaauucucagaagucgaagggagaauucaggaccuugagaaauauguugaggacacuaaaauagaucucuggucauacaacgcggagcuucuuguugcccuggagaaccaacacacaauugaucuaacugacucagaaaugaacaaacuguuugaaaaaacaaagaagcaacugagggaaaaugcugaggauaugggcaaugguuguuucaaaauauaccacaaaugugacaaugccugcauaggaucaaucagaaauggaacuuaugaucacgauguauacagagaugaagcauuaaacaaccgguuccagaucaagggaguugagcugaagucaggguacaaagauuggauccuauggauuuccuuugccauaucauguuuuuugcuuuguguugcuuuguugggguucaucaugugggccugccaaaaaggcaacauuaggugcaacauuugcauuuga

SEQ ID NO: 42431 - RNA, 1701 nt, Artificial Sequence
  derived and/or modified CDS sequence (wt) from hemagglutinin__InfluenzaA__AGT18756
augaagacuaucauugcuuugagcuacguucuaugucugguuuucgcucaaaaacuuccuggaaaugacaauagcacggcaacgcugugccuugggcaccaugcaguaccaaacggaacgauagugaaaacaaucacgaaugaccgaauugaaguuacuaaugcuacugagcugguucagaauuccucaauaggugaaauaugcgacaguccucaucagauccuugauggagaaaacugcacacuaauagaugcucuauugggagacccucagugugaugacuuucaaaauaagaaaugggaccuuuuuguugaacgaagcaaagccuacagcaacuguuacccuuaugaugugccggauuaugccucccuuaggucacuaguugccucauccggcacacuggaguuuaacaaugaaagcuucaauugggcuggagucacucaaaacggaacaaguucugcuugcagaaggggaucuaauaguaguuucuuuaguagauuaaauugguugacccacuuaaacuucaaauacccagcauugaacgugacuaugccaaacaaugaacaauuugacaaauuguacauuugggggguucaccacccggguacggacaaggaccaaaucuuccuguaugcucaaucaucaggaagaaucacaguaucuaccaaaagaagccaacaagcuguaaucccgaauaucggaucuagacccagaauaaggaauaucccuagcagaauaagcaucuauuggacaauaguaaaaccgggagacauacuuuugauuaacagcacagggaaucuaauugcuccuagggguuacuucaaaauacgaagugggaaaagcucaauaaugagaucagaugcacccauuggcaaaugcaagucugaaugcaucacuccaaauggaagcauucccaaugacaaaccauuccaaaauguaaacaggaucacauacggggccugucccagauauguuaagcaaagcacucugaaauuggcaacaggaaugcgaaaugugccagagaaacaaacuagaggcauauuuggcgcaauagcggguuucauagaaaaugguugggagggaaugguggaugguugguacgguuucaggcaucaaaauucugagggaagaggacaagcagcagaucucaaaagcacucaagcagcaaucgaucaaaucaaugggaagcugaaucgauugaucgggaaaaccaacgagaaauuccaucagauugaaaaagaauucucagaaguagaagggagaauucaggaccuugagaaauauguugaggacacaaaaauagaucucuggucauacaagucggagcuucuuguugcccuggagaaccaacauacaauugaucuaacugacucagaaaugaacaaacuguuugaaaaaacaaagaagcaacugagggaaaaugcugaggauaugggcaaugguuguuucaaaauauaccacaaaugugacaaugccugcauaggaucaaucagaaauggaacuuaugaccacgauguauacagggaugaagcauuaaacaaccgguuccagaucaagggaguugagcugaagucaggguacaaagauuggauccuauggauuuccuuugccauaucauguuuuuugcuuuguguugcuuuguugggguucaucaugugggccugccaaaagggcaacauuaggugcaacauuugcauuuga

SEQ ID NO: 42432 - RNA, 1701 nt, Artificial Sequence
  derived and/or modified CDS sequence (wt) from hemagglutinin__InfluenzaA__AGT18757
augaagacuaucauugcuuugagcuacauucuaugucugguuuucgcucaaaaacuuccuggaaaugacaauagcacggcaacgcugugccuugggcaccaugcaguaccaaacggaacgauagugaaaacaaucacgaaugaccgaauugaaguuacuaaugcuacugagcugguucagaauuccucaauaggugaaauaugcgacaguccucaucagauccuugauggagaaaacugcacacuaauagaugcucuauugggagacccucagugugaugacuuucaaaauaagaaaugggaccuuuuuguugaacgaagcaaagccuacagcaacuguuacccuuaugaugugccggauuaugccucccuuaggucacuaguugccucauccggcacacuggaguuuaacaaugaaagcuucaauugggcuggagucacucaaaacggaacaaguucugcuugcagaaggggaucuaauaguaguuucuuuaguagauuaaauugguugacccacuuaaacuucaaauacccagcauugaacgugacuaugccaaacaaugaacaauuugacaaauuguacauuugggggguucaccacccggguacggacaaggaccaaaucuuccuguaugcucaaucaucaggaagaaucacaguaucuaccaaaagaagccaacaagcuguaaucccgaauaucggaucuagacccagaauaaggaauaucccuagcagaauaagcaucuauuggacaauaguaaaaccgggagacauacuuuugauuaacagcacagggaaucuaauugcuccuagggguuacuucaaaauacgaagugggaaaagcucaauaaugagaucagaugcacccauuggcaaaugcaagucugaaugcaucacuccaaauggaagcauucccaaugacaaaccauuccaaaauguaaacaggaucacauacggggccugucccagauauguuaagcaaagcacucugaaauuggcaacaggaaugcgaaaugugccagagaaacaaacuagaggcauauuuggcgcaauagcggguuucauagaaaaugguugggagggaaugguggaugguugguacgguuucaggcaucaaaauucugagggaagaggacaagcagcagaucucaaaagcacucaagcagcaaucgaucaaaucaaugggaagcugaaucgauugaucgggaaaaccaacgagaaauuccaucagauugaaaaagaauucucagaaguagaagggagaauucaggaccuugagaaauauguugaggacaccaaaauagaucucuggucauacaacgcggagcuucuuguugcccuggagaaccaacauacaauugaucuaacugacucagaaaugaacaaacuguuugaaaaaacaaagaagcaacugagggaaaaugcugaggauaugggcaaugguuguuucaaaauauaccacaaaugugacaaugccugcauaggaucaaucagaaauggaacuuaugaccacgauguauacagggaugaagcauuaaacaaccgguuccagaucaagggaguugagcugaagucaggguacaaagauuggauccuauggauuuccuuugccauaucauguuuuuugcuuuguguugcuuuguugggguucaucaugugggccugccaaaagggcaacauuaggugcaacauuugcauuuga

SEQ ID NO: 42433 - RNA, 1701 nt, Artificial Sequence
  derived and/or modified CDS sequence (wt) from hemagglutinin__InfluenzaA__AGT18758
augaagacuaucauugcuuugagcuacauucuaugucugguuuucgcucaaaaacuuccuggaaaugacaauagcacggcaacgcugugccuugggcaccaugcaguaccaaacggaacgauagugaaaacaaucacgaaugaccgaauugaaguuacuaaugcuacugagcugguucagaauuccucaauaggugaaauaugcgacaguccucaucagauccuugauggagaaaacugcacacuaauagaugcucuauugggagacccucagugugaugacuuucaaaauaagaaaugggaccuuuuuguugaacgaagcaaagccuacagcaacuguuacccuuaugaugugccggauuaugccucccuuaggucacuaguugccucauccggcacacuggaguuuaacaaugaaagcuucaauugggcuggagucacucaaaacggaacaaguucugccugcagaaggggaucuaauaguaguuucuuuaguagauuaaauugguugacccacuuaaacuucaaauacccagcauugaacgugacuaugccaaacaaugaacaauuugacaaauuguacauuugggggguucaccacccggguacggacaaggaccaaaucuuccuguaugcucaaucaucaggaagaaucacaguaucuaccaaaagaagccaacaagcuguaaucccgaauaucggaucuagacccagaauaaggaauaucccuagcagaauaagcaucuauuggacaauaguaaaaccgggagacauacuuuugauuaacagcacagggaaucuaauugcuccuagggguuacuucaaaauacgaagugggaaaagcucaauaaugagaucagaugcacccauuggcaaaugcaagucugaaugcaucacuccaaauggaagcauucccaaugacaaaccauuccaaaauguaaacaggaucacauacggggccugucccagauauguuaagcaaagcacucugaaauuggcaacaggaaugcgaaaugugccagagaaacaaacuagaggcauauuuggcgcaauagcggguuucauagaaaaugguugggagggaaugguggaugguugguacgguuucaggcaucaaaauucugagggaagaggacaagcagcagaucucaaaagcacucaagcagcaaucgaucaaaucaaugggaagcugaaucgauugaucgggaaaaccaacgagaaauuccaucagauugaaaaagaauucucagaaguagaagggagaauucaggaccuugagaaauauguugaggacacaaaaauagaucucuggucauacagcucggagcuucuuguugcccuggagaaccaacauacaauugaucuaacugacucagaaaugaacaaacuguuugaaaaaacaaagaagcaauugagggaaaaugcugaggauaugggcaaugguuguuucaaaauauaccacaaaugugacaauaccugcauaggaucaaucagaaauggaacuuaugaccacgauguauacagggaugaagcauuaaacaaccgguuccagaucaagggaguugagcugaagucaggguacaaagauuggauccuauggauuuccuuugccauaucauguuuuuugguuuguguugcuuuguugggguucaucaugugggccugccaaaagggcaacauuaggugcaacauuugcauuuga

SEQ ID NO: 42434 - RNA, 1701 nt, Artificial Sequence
  derived and/or modified CDS sequence (wt) from hemagglutinin__InfluenzaA__AGT18759
augaagacuaucauugcuuugagcuacauucuaugucugguuuucgcucaaaaacuuccuggaaaugacaauagcacggcaacgcugugccuugggcaccaugcaguaccaaacggaacgauagugaaaacaaucacgaaugaccgaauugaaguuacuaaugcuacugagcugguucagaauuccucaauaggugaaauaugcgacaguccucaucagauccuugauggagaaaacugcacacuaauagaugcucuauugggagacccucagugugaugacuuucaaaauaagaaaugggaccuuuuuguugaacgaagcaaagccuacagcaacuguuacccuuaugaugugccggauuaugccucccuuaggucacuaguugccucauccggcacacuggaguuuaacaaugaaagcuucaauugggcuggagucacucaaaacggaacaaguucugccugcagaaggggaucuaauaguaguuucuuuaguagauuaaauugguugacccacuuaaacuucaaauacccagcauugaacgugacuaugccaaacaaugaacaauuugacaaauuguacauuugggggguucaccacccggguacggacaaggaccaaaucuuccuguaugcucaaucaucaggaagaaucacaguaucuaccaaaagaagccaacaagcuguaaucccgaauaucggaucuagacccagaauaaggaauaucccuagcagaauaagcaucuauuggacaauaguaaaaccgggagacauacuuuugauuaacagcacagggaaucuaauugcuccuagggguuacuucaaaauacgaagugggaaaagcucaauaaugagaucagaugcacccauuggcaaaugcaagucugaaugcaucacuccaaauggaagcauucccaaugacaaaccauuccaaaauguaaacaggaucacauacggggccugucccagauauguuaagcaaagcacucugaaauuggcaacaggaaugcgaaaugugccagagaaacaaacuagaggcauauuuggcgcaauagcggguuucauagaaaaugguugggagggaaugguggaugguugguacgguuucaggcaucaaaauucugagggaagaggacaagcagcagaucucaaaagcacucaagcagcaaucgaucaaaucaaugggaagcugaaucgauugaucgggaaaaccaacgagaaauuccaucagauugaaaaagaauucucagaaguagaagggagaauucaggaccuugagaaauauguugaggacacaaaaauagaucucuggucauacagcucggagcuucuuguugcccuggagaaccaacauacaauugaucuaacugacucagaaaugaacaaacuguuugaaaaaacaaagaagcaacugagggaaaaugcugaggauaugggcaaugguuguuucaaaauauaccacaaaugugacaaugccugcauaggaucaaucagaaauggaacuuaugaccacgauguauacagggaugaagcauuaaacaaccgguuccagaucaagggaguugagcugaagucaggguacaaagauuggauccuauggauuuccuuugccauaucauguuuuuugguuuguguugcuuuguugggguucaucaugugggccugccaaaagggcaacauuaggugcaacauuugcauuuga

SEQ ID NO: 42435 - RNA, 1701 nt, Artificial Sequence
  derived and/or modified CDS sequence (wt) from hemagglutinin__InfluenzaA__AGT18760
augaagacuaucauugcuuugagcuacauucuaugucugguuuucgcucaaaaacuuccuggaaaugacaauagcacggcaacgcugugccuugggcaccaugcaguaccaaacggaacgauagugaaaacaaucacgaaugaccgaauugaaguuacuaaugcuacugagcugguucagaauuccucaauaggugaaauaugcgacaguccucaucagauccuugauggagaaaacugcacacuaauagaugcucuauugggagacccucagugugaugacuuucaaaauaagaaaugggaccuuuuuguugaacgaaacaaagccuacagcaacuguuacccuuaugaugugccggauuaugccucccuuaggucacuaguugccucauccggcacacuggaguuuaacaaugaaagcuucaauugggcuggagucacucaaaacggaacaaguucugcuugcagaaggggaucuaauaguaguuucuuuaguagauuaaauugguugacccacuuaaacuucaaauacccagcauugaacgugacuaugccaaacaaugaacaauuugacaaauuguacauuugggggguucaccacccggguacggacaaggaccaaaucuuccuguaugcucaaucaucaggaagaaucacaguaucuaccaaaagaagccaacaagcuguaaucccgaauaucggaucuagacccagaauaaggaauaucccuagcagaauaagcaucuauuggacaauaguaaaaccgggagacauacuuuugauuaacagcacagggaaucuaauugcuccuagggguuacuucaaaauacgaagugggaaaagcucaauaaugagaucagaugcacccauuggcaaaugcaagucugaaugcaucacuccaaauggaagcauucccaaugacaaaccauuccaaaauguaaacaggaucacauacggggccugucccagauauguuaagcaaagcacucugaaauuggcaacaggaaugcgaaaugugccagagaaacaaacuagaggcauauuuggcgcaauagcggguuucauagaaaaugguugggagggaaugguggaugguugguacgguuucaggcaucaaaauucugagggaagaggacaagcagcagaucucaaaagcacucaagcagcaaucgaucaaaucaaugggaagcugaaucgauugaucgggaaaaccaacgagaaauuccaucagauugaaaaagaauucucagaaguagaagggagaauucaggaccuugagaaauauguugaggacacaaaaauagaucucuggucauacaagucggagcuucuuguugcccuggagaaccaacauacaauugaucuaacugacucagaaaugaacaaacuguuugaaaaaacaaagaagcaacugagggaaaaugcugaggauaugggcaaugguuguuucaaaauauaccacaaaugugacaaugccugcauaggaucaaucagaaauggaacuuaugaccacgauguauacagggaugaagcauuaaacaaccgguuccagaucaagggaguugagcugaagucaggguacaaagauuggauccuauggauuuccuuugccauaucauguuuuuugguuuguguugcuuuguugggguucaucaugugggccugccaaaagggcaacauuaggugcaacauuugcauuuga

SEQ ID NO: 42436 - RNA, 1701 nt, Artificial Sequence
  derived and/or modified CDS sequence (wt) from hemagglutinin__InfluenzaA__AGT18761
augaagacuaucauugcuuugagcuacauucuaugucugguuuucgcucaaaaacuuccuggaaaugacaauagcacggcaacgcugugccuugggcaccaugcaguaccaaacggaacgauagugaaaacaaucacgaaugaccgaauugaaguuacuaaugcuacugagcugguucagaauuccucaauaggugaaauaugcgacaguccucaucagauccuugauggagaaaacugcacacuaauagaugcucuauugggagacccucagugugaugacuuucaaaauaagaaaugggaccuuuuuguugaacgaagcaaagccuacagcaacuguuacccuuaugaugugccggauuaugccucccuuaggucacuaguugccucauccggcacacuggaguuuaacaaugaaagcuucaauugggcuggagucacucaaaacggaacaaguucugcuugcagaaggggaucuaauaguaguuucuuuaguagauuaaauugguugacccacuuaaacuucaaauacccagcauugaacgugacuaugccaaacaaugaacaauuugacaaauuguacauuugggggguucaccacccggguacggacaaggaccaaaucuuccuguaugcucaaucaucaggaagaaucacaguaucuaccaaaagaagccaacaagcuguaaucccgaauaucggaucuagacccagaauaaggaauaucccuagcagaauaagcaucuauuggacaauaguaaaaccgggagacauacuuuugauuaacagcacagggaaucuaauugcuccuagggguuacuucaaaauacgaagugggaaaagcucaauaaugagaucagaugcacccauuggcaaaugcaagucugaaugcaucacuccaaauggaagcauucccaaugacaaaccauuccaaaauguaaacaggaucacauacggggccugucccagauauguuaagcaaagcacucugaaauuggcaacaggaaugcgaaaugugccagagaaacaaacuagaggcauauuuggcgcaauagcggguuucauagaaaaugguugggagggaaugguggaugguugguacgguuucaggcaucaaaauucugagggaagaggacaagcagcagaucucaaaagcacucaagcagcaaucgaucaaaucaaugggaagcugaaucgauugaucgggaaaaccaacgagaaauuccaucagauugaaaaagaauucucagaaguagaagggagaauucaggaccuugagaaauauguugaggacacaaaaauagaucucuggucauacagcucggaguuucuuguugcccuggagaaccaacauacaauugaucuaacugacucagaaaugaacaaacuguuugaaaaaacaaagaagcaacugagggaaaaugcugaggauaugggcaaugguuguuucaaaauauaccacaaaugugacaaugccugcauaggaucaaucagaaauggaacuuaugaccacgauguauacagggaugaagcauuaaacaaccgguuccagaucaagggaguugagcugaagucaggguacaaagauuggauccuauggauuuccuuugccauaucauguuuuuugguuuguguugcuuuguugggguucaucaugugggccugccaaaagggcaacauuaggugcaacauuugcauuuga

SEQ ID NO: 42437 - RNA, 1701 nt, Artificial Sequence
  derived and/or modified CDS sequence (wt) from hemagglutinin__InfluenzaA__AGT37102
auggaagcaaaacuaguuguacuauucugugcauucacuacacugaaagcugacaucauuuguguaggcuaccaugcuaacaauuccacagacacugucgacacaauaauggagaagaaugugacugucacccauucgguuaauuuacuagaaaacagccauaauggaaaacucugcagccugaauggaaaggccccuuuacaacugggaaauugcaacguagcaggauggauccuuggcaacccagaaugugaccugcuucucaccgcaaauucguggucauacauaauagagacuucaaguucaaagaauggaacaugcuacccuggagaauucucugauuaugaggaauuaagggaguugcugaguacaguuuccucauuugaaagauuugaaauuuucccaaaagcaaccucauggccaaaucaugaaacaaccaaaggugccacaauugcgugcucccacucuggagccagcaguuuuuauaggaacuugcuauggauaguaaagaagggaaacuccuacccuaagaucagcaaaucauacacaaacaacagagggaaggaagugcuuguaaucuggggagugcaccacccuccgacugacaguagccaacaagcccucuaucagaauacccauacauauauuucaguuggaucaucaaaauacuaccaaagguucacaccaguaguagcagccagacccaaaaucagagaacaagaaggcagaaugaauuauuacuggacacuguuagaacaaggagauaccauaacuuuugaagccacuggaaacuuaauagcaccaugguacgcauuugcauuggauaugggaucuagcucuggaauuauggugucggaugcuccuguucacaauuguacuacaaagugucaaaccccucauggggccuugaaaagcaaucuuccuuuucagaauguacaucccaucacuauuggagaaugccccaaauauguuaaaagcacccaacuaagaauggcaacaggauuaaggaauauaccguccauucaauccagaggacuuuuuggggcaauugccggauucauugaaggaggauggacaggaaugauagaugguugguauggauaccaccaucaaaaugagcagggaucuggcuacgccgcagaucagaaaagcacacaaauugcgauugaugggaucagcaacaagguaaacucaauaauugaaaaaaugaacguucaauuuacuucagugggcaaggaguucaaugaucuagagaaaaggauugagaauuuaaacaagaaagucgaugauggauuuuuggauguauggacauauaacgcugaauugcucguuuugcucgaaaacgaaagaacucuagauuuccaugacuuuaacguaaaaaauuuauaugaaaaggucaaaucacaacugaggaacaaugccaaggaaaucgggaauggcuguuucgaguucuaccacaaaugugauaaugaaugcauggaaaacgugaagaauggcacuuauaauuaucccaaauauucagaagaauccaaacuaaauagagagaaaauagacgguguaaaacuagaaucaauaggaguccaccagauuuuggcgaucuacuccacagucgccaguucccugguuuuguuagucucccugggggcaaucagcuucuggauguguucuaaugggucauugcaaugcagaauaugcauuuaa

SEQ ID NO: 42438 - RNA, 1701 nt, Artificial Sequence
  derived and/or modified CDS sequence (wt) from hemagglutinin__InfluenzaA__AGU01877
augaaggcaauacuaguaguucugcuauacacauuugcaaccgcaaaugcagacacauuauguauagguuaucaugcgaacaauucaacagacacuguagauacaguacuagaaaagaauguaacaguaacacacucuguuaaccuucuagaagacaagcauaacgggaaacuaugcaaacuaagagggguagccccauugcauuuggguaaauguaacauugcuggcuggauccugggaaauccagagugugaaucacucuccacagcaaguucaugguccuacauuguggaaacaucuaguucagacaauggaacguguuacccaggagauuucaucaauuaugaggagcuaagagagcaauugagcucagugucaucauuugaaagguuugagauauuccccaagacaaguucauggcccaaucaugacucgaacaaagguguaacggcagcauguccucaugcuggagcaaaaagcuucuacaaaaauuuaauauggcuaguuaaaaaaggaaauucauacccaaagcucagcaaauccuacauuaaugauaaagggaaagaaguccucgugcuguggggcauucaccauccaucuacuacuacugaccaacaaagucucuaucagaaugcagaugcauaugucuuuguggggacaucaagauacagcaagaaguucaagccggaaauagcaauaagacccaaagugagggaucaagaagggagaaugaacuauuacuggacacuaauagagccgggagacaaaauaacauucgaagcaacuggaaaucuagugguaccgagauaugcauucgcaauggaaagaaaugcuggaucugguauuaucauuucagauacaccaguccacgauugcaauacaacuugucagacacccgagggugcuauaaacaccagccucccauuucagaauauacauccgaucacaauuggaaaauguccaaaguauguaaaaagcacaaaauugagacuggccacaggauugaggaaugucccgucuauucaaucuagaggccuauucggggccauugccggcuucauugaagggggguggacagggaugguagauggaugguacgguuaucaccaucaaaaugagcaggggucaggauaugcagccgaccugaagagcacacaaaaugccauugacaagauuacuaacaaaguaaauucuguuauugaaaagaugaauacacaguucacagcaguggguaaagaguucaaccaccuggaaaaaagaauagagaauuuaaauaaaaaaguugaugaugguuuccuggacauuuggacuuacaaugccgaacuguugguucuauuggaaaaugaaagaacuuuggacuaccacgauucaaaugugaagaacuuguaugaaaagguaagaaaccaguuaaaaaacaaugccaaggaaauuggaaacggcugcuuugaauuuuaccacaaaugcgauaacacgugcauggaaagugucaaaaaugggacuuaugacuacccaaaauacucagaggaagcaaaauuaaacagagaaaaaauagaugggguaaagcuggaaucaacaaggauuuaccagauuuuggcgaucuauucaacugucgccaguucauugguacugguagucucccugggggcaaucaguuucuggaugugcucuaaugggucucuacaguguagaauauguauuuaa

SEQ ID NO: 42439 - RNA, 1701 nt, Artificial Sequence
  derived and/or modified CDS sequence (wt) from hemagglutinin__InfluenzaA__AGU01878
augaaggcaauacuaguaguuaugcuauauacacuugcaaccgcaaaugcagacacauuauguauagguuaucaugcgaacaauucaacagacacuguagacacaguacuagaaaagaauguaacaguaacacacucuguuaaucuucuagaagacaagcaugacgggaaacuaugcaaacuaagagggguagccccauugcauuuggguaaauguaacauugcuggcuggauccugggaaauccagagugugaaucacucuccacagcaagcucaugguccuacauuguggaaacaucugguucagacaauggaacguguuacccaggagauuucaucgauuaugaggagcuaagagagcaauugagcucagugucaucauuugaaagguuugagauauuccccaaaacaaguucauggccaaaucaugacucgaacaaagguguaacggcagcauguccucaugcuggagcaaaaggcuucuacaaaaauuuaauauggcuaguuaaaaaaggaaauucauacccaaagcucagcauauccuacauuaaugacaaagggaaagaaguccucgugcuauggggcauucaccauccaucuacuacugcugaccaacaaagucucuaucagaaugcagauacauauguuuuuguggggacaucaagauacagcaagaaguucaagccggaaauagcaauaagacccaaagugagggaucaagaagggagaaugaacuauuacuggacacuaguagagccgggagacaaaauaacauucgaagcaacuggaaaucuagugguaccgagauaugcauuugcaauggaaagaaaugcuggaucugguauuaucauuucagauacaccaguucacgauugcaauacaacuugucagacacccaagggugcuauaaacaccagccucccauuucagaauauacauccgaucacaauuggaaaauguccaaaauauguaaaaagcacaaaauugagacuggccacaggauugaggaaugucccgucuauucaaucuagaggccuauuuggggccauugcuggcuucauugaagggggguggacagggaugguagauggaugguacgguuaucaccaucaaaaugagcaggggucaggauaugcagccgaccugaagagcacacagaaugccauugacaagauuacuaacaaaguaaauucuguuauugaaaagaugaauacacaguucacagcaguagguaaagaguucaaccaccuggaaaaaagaauagagaauuuaaauaaaaaaguugaugaugguuuccuggacauuuggacuuacaaugccgaacuguugguucuauuggaaaaugaaagaacuuuggacuaccacgauucaaaugugaagaacuuauaugaaaagguaagaaaccaguuaaaaaacaaugccaaggaaauuggaaauggcugcuuugaauuuuaccacaaaugcgauaacacgugcauggaaagugucaaaaaugggacuuaugauuacccaaaauacucagaggaagcaaaauuaaacagagaagaaauagaugggguaaagcuggaaucaacaaggauuuaccagauuuuggcgaucuauucaacugccgcuaguucauugguacugguagucucccugggggcaaucaguuuuuggaugugcucuaaugggucucuacaguguagaauauguauuuaa

SEQ ID NO: 42440 - RNA, 1701 nt, Artificial Sequence
  derived and/or modified CDS sequence (wt) from hemagglutinin__InfluenzaA__AGU01879
augaaggcaauacuaguaguuaugcuguauacauuugcaaccgcaaaugcagacacauuauguauagguuaucaugcgaacaauucaacagacacuguagacacaguacuagaaaagaauguaacaguaacacacucuguuaaucuucuagaagacaaacauaacgagaaacuaugcaaacuaagagggguagccccauugcauuuggguaaauguaacauugcuggcuggauccugggaaauccagagugugaaucacucuccacagcaagcucaugguccuacauuguggaaacaucugguucagacaauggaacguguuacccaggagauuucaucgauuaugaagagcuaagagagcaauugagcucagugucaucauuugaaagguuugagauauuccccaaaacaaguucauggcccaaucaugacucgaacaaagguguaacggcagcauguccucaagcuggagcaaaaggcuucuacaaaaauuuaauauggcuaguuaaaaaaggaaauucauacccaaagcucagcaaauccuacauuaaugauaaagggaaagaaguccucgugcuauggggcauucaccauccaucuacuacugccgaccaacaaagucucuaucagaaugcagauacauauguuuuuguggggacaucaagauacagcaagaaauucaagccggaaauagcaauaagacccaaaguaagggaucaagaagggagaaugaacuauuacuggacacuaguagagccgggagacaaaauaacauucgaagcaacuggaaaucuagugguaccgagauaugcauuugcaauggaaagaaaugcuggaucugguauuaucauuucagauacaccaguccacgauugcaauacaacuugucagacacccaagggugcuauaaacaccagccucccauuucagaauauacauccgaucacaauuggaaaauguccaaaauauguaaaaagcacaaaauugagacuggccacaggauugaggaaugucccgucuauucaaucuaggggccuauuuggggccauugcuggcuucauugaagggggguggacagggaugguagauggaugguacgguuaucaccaucaaaaugagcaggggucaggauaugcagccgaccugaagagcacacagaaugccauugacaagauuacuaacaaaguaaauucuguuauugaaaagaugaauacacaguucacagcaguagguaaagaguucaaccaccuggaaaaaagaauagagaauuuaaauaaaaaaguugaugaugguuuccuggacauuuggacuuacaaugccgaacuguugguucuauuggaaaaugaaagaacuuuggacuaccacgauucaaaugugaagaacuuauaugaaaagguaagaaaccaguuaaaaaacaaugccaaggaaauuggaaauggcugcuuugaauuuuaccacaaaugcgauaauacgugcauggaaagugucaaaaaugggacuuaugacuacccaaaauacucagaggaagcaaaauuaaacagagaagaaauagaugggguaaagcuggaaucaacaaggauuuaccaaauuuuggcgaucuauucaacugucgcuaguucauugguacugguagucucccugggggcaaucaguuuuuggaugugcucuaaugggucuuuacaguguagaauauguauuuaa

SEQ ID NO: 42441 - RNA, 1701 nt, Artificial Sequence
  derived and/or modified CDS sequence (wt) from hemagglutinin__InfluenzaA__AGU01881
augaaggcaauacuaguaguucugcuauacacauuugcaaccgcaaaugcagacacauuauguauagguuaucaugcgaacaauucaacagacacuguagacacaguacuagaaaagaauguaacaguaacacacucuguuaaccuucuagaagacaaacauaacgggaaacuaugcaaacuaagagggguaaccccauugcauuuggguaaauguaacauugcuggcuggauccugggaaauccagagugugaaucacucuccacagcaaguucaugguccuacauuguggaaacaucuaguucagacaauggaacguguuacccaggagauuucaucaauuaugaggagcuaagagagcaauugagcucagugucaucauuugaaagguuugagauguuccccaagacaaguucauggcccaaucaugacucgaacaaagguguaacggcagcauguccucaggcuggagcaaaaagcuucuacaaaaauuuaauauggcuaguuaaaaaaggaaauucauacccaaagcucagcaaauccuacauuaaugauaaagggaaagaaguccucgugcuguggggcauucaccauccaucuacuacugcugaccaacaaagucucuaucagaaugcagaugcauauguuuuuguggggacaucaagauacagcaagaaguucaagccggaaauagcaauaagacccaaagugagggaucaagaagggagaaugaacuauuacuggacacuaauagagccgggagacaaaauaacauucgaagcaacuggaaaucuagugguaccgagauaugcauucgcaauggaaagaaaugcuggaucugguauuaucauuucagauacaccaguccacgauugcaauacaacuugucagacacccgagggugcuauaaacaccagccucccauuucagaauauacauccgaucacaauuggaaaauguccaaaguauguaaaaagcacaaaauugagacuggccacaggauugaggaaugucccgucuauucaaucuagaggccuauucggggccauugccggcuucauugaagggggguggacagggaugguagauggaugguacgguuaucaccaucaaaaugagcaggggucaggauaugcagccgaccugaagagcacacaaaaugccauugacaagauuacuaacaaaguaaauucuguuauugaaaagaugaauacacaguucacagcaguggguaaagaguucaaccaccuggaaaaaagaauagagaauuuaaauaaaaaaguugaugaugguuuccuggacauuuggacuuacaaugccgaacuguugguucuauuggaaaaugaaagaacuuuggacuaccacgauucaaaugugaagaacuuguaugaaaagguaagaaaccaguuaaaaaacaaugccaaggaaauuggaaacggcugcuuugaauuuuaccacaaaugcgauaacacgugcauggaaagugucaaaaaugggacuuaugacuacccaaaauacucagaggaagcaaaauuaaacagagaaaaaauagaugggguaaaguuggaaucaacaaggauuuaccagauuuuggcgaucuauucaacugucgccaguucauugguacugguagucucccugggggcaaucaguuucuggaugugcucuaaugggucucuacaguguagaauauguauuuaa

SEQ ID NO: 42442 - RNA, 1701 nt, Artificial Sequence
  derived and/or modified CDS sequence (wt) from hemagglutinin__InfluenzaA__AGU01883
augaaggcaauacuaguaguuaugcuauauacauuugcaaccgcaaaugcagacacauuauguauagguuaucaugcgaacaauucaacagacacuguagacacaguacuagaaaagaauguaacaguaacacacucuguuaaucuucuagaagacaagcauaacgggaaacuaugcaaacuaagagggguagccccauugcauuuggguaaauguaacauugcuggcuggauccugggaaauccagagugugaaucacucuccacagcaagcucaugguccuacauuguggaaacaucugguucagacaauggaacguguuacccaggagauuucaucgauuaugaggagcuaagagagcaauugagcucagugucaucauuugaaagguuugagauauuccccaaaacaaguucauggccaaaucaugacucgaacaaagguguaacggcagcauguccucaugcuggagcaaaaggcuucuacaaaaauuuaauauggcuaguuaaaaaaggaaauucauacccaaagcucagcauauccuacauuaauaacaaagagaaagaaguccucgugcuauggggcauucaccauccaucuacuacugcugaccaacaaagucucuaucagaaugcagauacauauguuuuuguggggacaucaagauacagcaagaaguucaagccggaaauagcaauaagacccaaagugagggaucaagaagggagaaugaacuauuacuggacacuaguagagccgggagacaaaauaacauucgaagcaacuggaaaucuagugguaccgagauaugcauuugcaauggaaagaaaugcuggaucugguauuaucauuucagauacaccaguucacgauugcaauacaacuugucagacacccaagggugcuauaaacaccagccucccauuucagaauauacauccgaucacaauuggaaaauguccaaaauauguaaaaagcacaaaauugagacuggccacaggauugaggaaugucccgucuauucaaucuagaggccuauuuggggccauugcuggcuucauugaagggggguggacagggaugguagauggaugguacgguuaucaccaucaaaaugagcaggggucaggauaugcagccgaccugaagagcacacagaaugccauugacaagauuacuaacaaaguaaauucuguuauugaaaagaugaauacacaauucacugcaguagguaaagaguucaaccaccuggaaaaaagaauagagaauuuaaauaaaaaaguugaugaugguuuccuggacauuuggacuuacaaugccgaacuguugguucuauuggaaaaugaaagaacuuuggacuaccacgauucaaaugugaagaacuuauaugaaaagguaagaaaccaguuaaaaaacaaugccaaggaaauuggaaauggcugcuuugaauuuuaccacaaaugcgauaacacgugcauggaaagugucaaaaaugggacuuaugauuacccaaaauacucagaggaagcaaaauuaaacagagaagaaauagaugggguaaagcuggaaucaacaaggauuuaccagauuuuggcgaucuauucaacugccgcuaguucauugguacugguagucucccugggggcaaucaguuuuuggaugugcucuaaugggucucuacaguguagaauauguauuuga

SEQ ID NO: 42443 - RNA, 1701 nt, Artificial Sequence
  derived and/or modified CDS sequence (wt) from hemagglutinin__InfluenzaA__AGU01884
augaaggcaauacuaguaguuaugcuauauacauuugcaaccgcaaaugcagacacauuauguauagguuaucaugcgaacaauucaacagacacuguagacacaguacuagaaaagaauguaacaguaacacacucuguuaaucuucuagaagacaagcauaacgggaaacuaugcaaacuaagagggguagccccauugcauuuggguaaauguaacauugcuggcuggauccugggaaauccagagugugaaucacucuccacagcaagcucaugguccuacauuguggaaacaucugguucagacaauggaacguguuacccaggagauuucaucgauuaugaggagcuaagagagcaauugagcucagugucaucauuugaaagguuugagauauuccccaaaacaaguucauggccaaaucaugacucgaacaaagguguaacggcagcauguccucaugcuggagcaaaaggcuucuacaaaaauuuaauauggcuaguuaaaaaaggaaauucauacccaaagcucagcauauccuacauuaaugacaaaggaaaagaaguccucgugcuauggggcauucaccauccaucuacuacugcugaccaacaaagucucuaucagaaugcagauacauauguuuuuguggggacaucaagauacagcaagaaguucaagccggaaauagcaauaagacccaaagugagggaucaagaagggagaaugaacuauuacuggacacuaguagagccgggagacaaaauaacauucgaagcaacuggaaaucuagugguaccgagauaugcauuugcaauggaaagaaaugcuggaucugguauuaucauuucagauacaccaguucacgauugcaauacaacuugucagacacccaagggugcuauaaacaccagccucccauuucagaauauacauccgaucacaauuggaaaauguccaaaauauguaaaaagcacaaaauugagacuggccacaggauugaggaaugucccgucuauucaaucuagaggccuauuuggggccauugcuggcuucauugaagggggguggacagggaugguagauggaugguacgguuaucaccaucaaaaugagcaggggucaggauaugcagccgaccugaagagcacacagaaugccauugacaagauuacuaacaaaguaaauucuguuauugaaaagaugaauacacaguucacagcaguagguaaagaauucaaccaccuggaaaaaagaauagagaauuuaaauaaaaagguugaugaugguuuccuggacauuuggacuuacaaugccgaacuguugguucuauuggaaaaugaaagaacuuuggacuaccacgauucaaaugugaagaacuuauaugaaaagguaagaaaccaguuaaaaaacaaugccaaggaaauuggaaauggcugcuuugaauuuuaccacaaaugcgauaacacgugcauggaaagugucaaaaaugggacuuaugauuacccaaaauacucagaggaagcaaaauuaaacagagaagaaauagaugggguaaagcuggaaucaacaaggauuuaccagauuuuggcgaucuauucaacugccgcuaguucauugguacugguagucucccugggggcaaucaguuuuuggaugugcucuaaugggucucuacaguguagaauauguauuuaa

SEQ ID NO: 42444 - RNA, 1701 nt, Artificial Sequence
  derived and/or modified CDS sequence (wt) from hemagglutinin__InfluenzaA__AGU01885
augaaggcaauacuaguaguuaugcuguauacauuugcaaccgcaaaugcagacacauuauguauagguuaucaugcgaacaauucaacagacacuguagacacaguacuagaaaagaauguaacaguaacacacucuguuaaucuucuagaagacaaacauaacgagaaacuaugcaaacuaagagggguagccccauugcauuuggguaaauguaacauugcuggcuggauccugggaaauccagagugugaaucacucuccacagcaagcucaugguccuacauuguggaaacaucugguucagacaauggaacguguuacccaggagauuucaucgauuaugaagagcuaagagagcaauugagcucagugucaucauuugaaagguuugagauauuccccaaaacaaguucauggcccaaucaugacucgaacaaagguguaacggcagcauguccucaagcuggagcaaaaggcuucuacaaaaauuuaauauggcuaguuaaaaaaggaaauucauacccaaagcucagcaaauccuacauuaaugauaaagggaaagaaguccucgugcuauggggcauucaccauccaucuacuacugccgaccaacaaagucucuaucagaaugcagauacauauguuuuuguggggacaucaagauacagcaagaaauucaagccggaaauagcaauaagacccaaaguaagggaucaagaagggagaaugaacuauuacuggacacuaguagagccgggagacaaaauaacauucgaagcaacuggaaaucuagugguaccgagauaugcauuugcaauggaaagaaaugcuggaucugguauuaucauuucagauacaccaguccacgauugcaauacaacuugucagacacccaagggugcuauaaacaccagccucccauuucagaauguacauccgaucacaauuggaaaauguccaaaauauguaaaaagcacaaaauugagacuggccacaggauugaggaaugucccgucuauucaaucuaggggccuauuuggggccauugcuggcuucauugaagggggguggacagggaugguagauggaugguacgguuaucaccaucaaaaugagcaggggucaggauaugcagccgaccugaagagcacacagaaugccauugacaagauuacuaacaaaguaaauucuguuauugaaaagaugaauacacaguucacagcaguagguaaagaguucaaccaccuggaaaaaagaauagagaauuuaaauaaaaaaguugaugaugguuuccuggacauuuggacuuacaaugccgaacuguugguucuauuggaaaaugaaagaacuuuggacuaccacgauucaaaugugaagaacuuauaugaaaagguaagaaaccaguuaaaaaacaaugccaaggaaauuggaaauggcugcuuugaauuuuaccacaaaugcgauaauacgugcauggaaagugucaaaaaugggaccuaugacuacccaaaauacucagaggaagcaaaauuaaacagagaagaaauagaugggguaaagcuggaaucaacaaggauuuaccaaauuuuggcgaucuauucaacugucgcuaguucauugguacugguagucucccugggggcaaucaguuuuuggaugugcucuaaugggucuuuacaguguagaauauguauuuaa

SEQ ID NO: 42445 - RNA, 1701 nt, Artificial Sequence
  derived and/or modified CDS sequence (wt) from hemagglutinin__InfluenzaA__AGU01887
augaaggcaauacuaguaguucugcuauacacauuugcaaccgcaaaugcagacacauuauguauagguuaucaugcgaacaauucaacagacacuguagacacaguacuagaaaagaauguaacaguaacacacucuguuaaccuucuagaagacaagcauaacgggaaacuaugcaaacuaagagggguagccccauugcauuuggguaaauguaacauugcuggcuggauccugggaaauccagagugugaaucacucuccacagcaaguucaugguccuacauuguggaaacaucuaguucagacaauggaacguguuacccaggagauuucaucaauuaugaggagcuaagagagcaauugagcucagugucaucauuugaaagguuugagauauuccccaagacaaguucauggcccaaucaugacucgaacaaagguguaacggcagcauguccucaugcuggagcaaaaagcuucuacaaaaauuuaauauggcuaguuaaaaaaggaaauucauacccaaagcucagcaaauccuacauuaaugauaaagggaaagaaguccucgugcuguggggcauucaccauccaucuacuacugcugaucaacaaagucucuaucagaaugcagaugcauauguuuuuguggggacaucaagauacagcaaaaaguucaagccggaaauagcaauaagaccuaaagugagggaucaagaagggagaaugaacuauuacuggacacuaauagagccgggagacaaaauaacauucgaagcaacuggaaaucuagugguaccgagauaugcauucgcaguggaaagaaaugcuggaucugguauuaucauuucagauacaccaguccacaauugcaauacaacuugucagacacccgagggugcuauaaacaccagccucccauuucagaauauacauccgaucacaauuggaaaauguccaaaguauguaaaaagcacaaaauugagacuggccacaggauugaggaaugucccgucuauucaaucuagaggccuauucggggccauugccggcuucauugaagggggguggacagggaugguagauggaugguacgguuaucaccaucaaaaugagcaggggucaggauaugcagccgaccugaagagcacacaaaaugccauugacaagauuacuaacaaaguaaauucuguuauugaaaagaugaauacacaguucacagcaguggguaaagaguucaaccaccuggaaaaaagaauagagaauuuaaauaaaaaaguugaugaugguuuccuggacauuuggacuuacaaugccgaacuguugguucuauuggaaaaugaaagaacuuuggacuaccacgauucaaaugugaagaacuuguaugaaaagguaagaaaccaguuaaaaaacaaugccaaggaaauuggaaacggcugcuuugaauuuuaccacaaaugcgauaacacgugcauggaaagugucaaaaaugggacuuaugacuacccaaaauacucagaggaagcaaaauuaaacagagaaaaaauagaugggguaaagcuggaaucaacaaggauuuaccagauuuuggcgaucuauucaacugucgccaguucauugguacugguagucucccugggggcaaucaguuucuggaugugcucuaaugggucucuacaguguagaauauguauuuaa

SEQ ID NO: 42446 - RNA, 1701 nt, Artificial Sequence
  derived and/or modified CDS sequence (wt) from hemagglutinin__InfluenzaA__AGU01888
augaaggcaauacuaguaguuaugcuguauacauuugcaaccgcaaaugcagacacauuauguauagguuaucaugcgaacaauucaacagacacuguagacacaguacuagaaaagaauguaacaguaacacacucuguuaaucuucuagaagacaaacauaacgggaaacuaugcaaacuaagagggguagccccauugcauuuggguaaauguaacauugcuggcuggauccugggaaauccagagugugaaucacucuccacagcaagcucaugguccuacauuguggaaacaucugguucagacaauggaacguguuacccaggagauuucaucgauuaugaagagcuaagagagcaauugagcucagugucaucauuugaaagguuugagauauuccccaaaacaaguucauggcccaaucaugacucgaacaaagguguaacggcagcauguccucaagcuggagcaaaaggcuucuacaaaaauuuaauauggcuaguuaaaaaaggaaauucauacccaaagcucagcaaauccuacauuaaugauaaagggaaagaaguccucgugcuauggggcauucaccauccaucuacuacugccgaccaacaaagucucuaucagaaugcagauacauauguuuuuguggggacaucaagauacagcaagaaauucaagccggaaauagcaauaagacccaaaguaagggaucaagaagggagaaugaacuauuacuggacacuaguagagccgggagacaaaauaacauucgaagcaacuggaaaucuagugguaccgagauaugcauuugcaauggaaagaaaugcuggaucugguauuaucauuucagauacaccaguccacgauugcaauacaacuugucagacacccaagggugcuauaaacaccagccucccauuucagaauauacauccgaucacaauuggaaaauguccaaaauauguaaaaagcacaaaauugagacuggccacaggauugaggaaugucccgucuauucaaucuaggggccuauuuggggccauugcuggcuucauugaagggggguggacaggaaugguagauggaugguacgguuaucaccaucaaaaugagcaggggucaggauaugcagccgaccugaagagcacacagaaugccauugacaagauuacuaacaaaguaaauucuguuauugaaaagaugaauacacgguucacagcaguagguaaagaguucaaccaccuggaaaaaagaauagagaauuugaauaaaaaaguugaugaugguuuccuggacauuuggacuuacaaugccgaacuguugguucuauuggaaaaugaaagaacuuuggacuaccacgauucaaaugugaagaacuuauaugaaaagguaagaaaccaguuaaaaaacaaugccaaggaaauuggaaauggcugcuuugaauuuuaccacaaaugcgauaacacgugcauggaaagugucaaaaaugggacuuaugacuacccaaaauacucagaggaagcaaaauuaaacagagaagaaauagaugggguaaagcuggaaucaacaaggauuuaccaaauuuuggcgaucuauucaacugucgcuaguucauugguacugguagucucccugggggcaaucaguuuuuggaugugcucuaaugggucuuuacaguguagaauauguauuuaa

SEQ ID NO: 42447 - RNA, 1701 nt, Artificial Sequence
  derived and/or modified CDS sequence (wt) from hemagglutinin__InfluenzaA__AGU01889
augaaggcaauacuaguaguucugcuauacacauuugcaaccgcaaaugcagacacauuauguauagguuaucaugcgaacaauucaacagacacuguagauacaguacuagaaaagaauguaacaguaacacacucuguuaaccuucuagaagacaagcauaacgggaaacuaugcaaacuaagagggguagccccauugcauuuggguaaauguaacauugcuggcuggauccugggaaauccagagugugaaucacucuccacagcaaguucaugguccuacauuguggaaacaucuaguucagacaauggaacguguuacccaggagauuucaucaauuaugaggagcuaagagagcaauugagcucagugucaucauuugaaagguuugagauauuccccaagacaaguucauggcccaaucaugacucgaacaaagguguaacggcagcauguccucaugcuggagcaaaaagcuucuacaaaaauuuaauauggcuaguuaaaaaaggaaauucauacccaaagcucagcaaauccuacauuaaugauaaagggaaagaaguccucgugcuguggggcauucaccauccaucuacuacuacugaccaacaaagucucuaucagaaugcagaugcauauguuuuuguggggacaucaagauacagcaagaaguucaagccggaaauagcaauaagacccaaagugagggaucaagaagggagaaugaacuauuacuggacacuaauagagccgggagacaaaauaacauucgaagcaacuggaaaucuagugguaccgagauaugcauucgcaauggaaagaaaugcuggaucugguauuaucauuucagauacaccaguccacgauugcaauacaacuugucagacacccgagggugcuauaaacaccagccucccauuucagaauauacauccgaucacaauuggaaaauguccaaaguauguaaaaagcacaaaauugagacuggccacaggauugaggaaugucccgucuauucaaucuagaggccuauucggggccauugccggcuucauugaagggggguggacagggaugguagauggaugguacgguuaucaccaucaaaaugagcaggggucaggauaugcagccgaccugaagagcacacaaaaugccauugacaagauuacuaacaaaguaaauucuguuauugaaaagaugaauacacaguucacagcaguggguaaagaguucaaccaccuggaaaaaagaauagagaauuuaaauaaaaaaguugaugaugguuuccuggacauuuggacuuacaaugccgaacuguugguucuauuggaaaaugaaagaacuuuggacuaccacgauucaaaugugaagaacuuguaugaaaagguaagaaaccaguuaaaaaacaaugccaaggaaauuggaaacggcugcuuugaauuuuaccacaaaugcgauaacacgugcauggaaagugucaaaaaugggacuuaugacuacccaaaauacucagaggaagcaaaauuaaacagagaaaaaauagaugggguaaagcuggaaucaacaaggauuuaccagauuuuggcgaucuauucaacugucgccaguucauugguacugguagucucccugggggcaaucaguuucuggaugugcucuaaugggucucuacaguguagaauauguauuuaa

SEQ ID NO: 42448 - RNA, 1701 nt, Artificial Sequence
  derived and/or modified CDS sequence (wt) from hemagglutinin__InfluenzaA__AGU01890
augaaggcaauacuaguaguuaugcuguauacauuugcaaccgcaaaugcagacacauuauguauagguuaucaugcgaacaauucaacagacacuguagacacaguacuagaaaagaauguaacaguaacacacucuguuaaucuucuagaagacaaacauaacgggaaacuaugcaaacuaagagggguagccccauugcauuuggguaaauguaacauugcuggcuggauccugggaaauccagagugugaaucacucuccacagcaagcucaugguccuacauuguggaaacaucugguucagacaauggaacguguuacccaggagauuucaucgauuaugaagagcuaagagagcaauugagcucagugucaucauuugaaagguuugagauauuccccaaaacaaguucauggcccaaucaugacucgaacaaagguguaacggcagcauguccucaagcuggagcaaaaggcuucuacaaaaauuuaauauggcuaguuaaaaaaggaaauucauacccaaagcucagcaaauccuacauuaaugauaaagggaaagaaguccucgugcuauggggcauucaccauccaucuacuacugccgaccaacaaagucucuaucagaaugcagauacauauguuuuuguggggacaucaagauacagcaagaaauucaagccggaaauagcaauaagacccaaaguaagggaucaagaagggagaaugaacuauuacuggacacuaguagagccgggagacaaaauaacauucgaagcaacuggaaaucuagugguaccgagauaugcauuugcaauggaaagaaaugcuggaucugguauuaucauuucagauacaccaguccacgauugcaauacaacuugucagacacccaagggugcuauaaacaccagccucccauuucagaauauacauccgaucacaauuggaaaauguccaaaauauguaaaaagcacaaaauugagacuggccacaggauugaggaaugucccgucuauucaaucuaggggccuauuuggggccauugcuggcuucauugaagggggguggacagggaugguagauggaugguacgguuaucaccaucaaaaugagcaggggucaggauaugcagccgaccugaagagcacacagaaugccauugacaagauuacuaacaaaguaaauucuguuauugaaaagaugaauacacaguucacagcaguagguaaagaguucaaccaccuggaaaaaagaauagagaauuuaaauaaaaaaguugaugaugguuuccuggacauuuggacuuacaaugccgaacuguugguucuauuggaaaaugaaagaacuuuggacuaccacgauucaaaugugaagaacuuauaugaaaagguaagaaaccaguuaaaaaauaaugccaaggaaauuggaaauggcugcuuugaauuuuaccacaaaugcgauaacacgugcauggaaagugucaaaaaugggacuuaugacuacccaaaauacucagaggaagcaaaauuaaacagagaagaaauagaugggguaaagcuggaaucaacaaggauuuaccaaauuuuggcgaucuauucaacugucgcuaguucauugguacugguagucucccugggggcaaucaguuuuuggaugugcucuaaugggucuuuacaguguagaauauguauuuaa

SEQ ID NO: 42449 - RNA, 1701 nt, Artificial Sequence
  derived and/or modified CDS sequence (wt) from hemagglutinin__InfluenzaA__AGU92645
augaaggcaauacuaguaguucugcuauauacauuugcaaccgcaaaugcagacacauuauguauagguuaccaugcgaacaauucaacagacacuguagacacaguacuagaaaagaauguaacaguaacacacucuguuaaucuucuagaagacaagcauaacgggaaacuaugcaaacuaagagggguagccccauugcauuuggguaaauguaacauugcuggcuggauccugggaaauccagagugugaaacacucuccacagcaagcucaugguccuacauuguggaaacaucuaguucagacaauggaacguguuacccaggagauuucaucgauuaugaggagcuaagagagcaauugagcucagugucaucauuugaaagguuugagauauuccccaagacaaguucauggcccaaucaugacucgaacaaagguguaacggcagcauguccucaugcuggagcaaaaggcuucuacaaaaauuuaauauggcuaguuaaaaaaggaaauucauacccaaagcucagcaaauccuacauuaaugauaaagggaaagaaguccucgugcuauggggcauucaccauccauccaccacugcugaccaacaaagucucuaucagaaugcagauacauauguuuuuguggggacaucaagauacagcaagaaguucaagccggaaauagaaacaagacccaaagugagggaucaagaagggagaaugaacuauuacuggacacuaguagagccgggagacaaaauaacauucgaagcaacuggaaaucuagugguaccgagauaugcauucgcaauggaaagagaugcuggaucugguauuaucauuucagauacaccaguccacgauugcaauacaacuugucagacacccaagggugcuauaaacaccagccucccauuucaaaauauacauccgaucacaauuggaaaauguccaaaauauguaaaaagcacaaaauugagacuggccacaggauugaggaaugucccaucuauucaaucuagaggccuauuuggggccauugccggcuucauugaagggggguggacagggaugguagauggaugguacgguuaucaccaucaaaaugagcaggggucaggauaugcagccgaccugaagagcacacagaaugccauugacaagauuacuaacaaaguaaauucuguuauugaaaaaaugaauacacaguucacagcaguagguaaagaguucaaccaccuggaaaaaagaauagagaauuuaaauaaaaaaguugaugauggguuccuggacauuuggacuuacaaugccgaacuguugguucuauuggaaaaugaaagaacuuuggacuaccacgauucaaaugugaagaacuuauaugaaaagguaagaaaccaguuaaaaaacaaugccaaggaaauuggaaauggcugcuuugaauuuuaccacaaaugcgauaacacguguauggaaagugucaaaaaugggacuuaugacuacccaaaauacucagaggaagcaaaauuaaacagagaagaaauagaugggguaaagcuggaaucaacaaggauuuaccagauuuuggcgaucuauucaacugccgccaguucauugguacugguagucucccugggggcaaucaguuuuuggaugugcucuaaugggucucuacaguguagaauauguauuuaa

SEQ ID NO: 42450 - RNA, 1701 nt, Artificial Sequence
  derived and/or modified CDS sequence (wt) from hemagglutinin__InfluenzaA__AGU92667
augaaggcaauacuaguaguucugcuauauacauuugcaaccgcaaaugcagacacauuauguauagguuaccaugcgaacaauucaacagacacuguagacacaguacuagaaaagaauguaacaguaacacacucuguuaaucuucuagaagacaagcauaacgggaaacuaugcaaacuaagagggguagccccauugcauuuggguaaauguaacauugcuggcuggauccugggaaauccagagugugaaacacucuccacagcaagcucaugguccuacauuguggaaacaucuaguucagacaauggaacguguuacccaggagauuucaucgauuaugaggagcuaagagagcaauugagcucagugucaucauuugaaagguuugagauauuccccaagacaaguucauggcccaaucaugacucgaacaaagguguaacggcagcauguccucaugcuggagcaaaaggcuucuacaaaaauuuaauauggcuaguuaaaaaaggaaauucauacccaaagcucagcaaauccuacauuaaugauaaagggaaagaaguccucgugcuauggggcauucaccauccauccaccacugcugaccaacaaagucucuaucagaaugcagauacauauguuuuuguggggacaucaagauacagcaagaaguucaagccggaaauagcaacaagacccaaagugagggaucaagaagggagaaugaacuauuacuggacacuaguagagccgggagacaaaauaacauucgaagcaacuggaaaucuagugguaccgagauaugcauucgcaauggaaagagaugcuggaucugguauuaucauuucagauacaccaguccacgauugcaauacaacuugucagacacccaagggugcuauaaacaccagccucccauuucaaaauauacauccgaucacaauuggaaaauguccaaaauauguaaaaagcacaaaauugagacuggccacaggauugaggaaugucccaucuauucaaucuagaggccuauuuggggccauugccggcuucauugaagggggguggacagggaugguagauggaugguacgguuaucaccaucaaaaugagcaggggucaggauaugcagccgaccugaagagcacacagaaugccauugacaagauuacuaacaaaguaaauucuguuauugaaaaaaugaauacacaguucacagcaguagguaaagaguucaaccaccuggaaaaaagaauagagaauuuaaauaaaaaaguugaugauggguuccuggacauuuggacuuacaaugccgaacuguugguucuauuggaaaaugaaagagcuuuggacuaccacgauucaaaugugaagaacuuauaugaaaagguaagaaaccaguuaaaaaacaaugccaaggaaauuggaaauggcugcuuugaauuuuaccacaaaugcgauaacacguguauggaaagugucaaaaaugggacuuaugacuacccaaaauacucagaggaagcaaaauuaaacagagaagaaauagaugggguaaagcuggaaucaacaaggauuuaccagauuuuggcgaucuauucaacugccgccaguucauugguacugguagucucccugggggcaaucaguuuuuggaugugcucuaaugggucucuacaguguagaauauguauuuaa

SEQ ID NO: 42451 - RNA, 1701 nt, Artificial Sequence
  derived and/or modified CDS sequence (wt) from hemagglutinin__InfluenzaA__AGU92678
augaaggcaauacuaguaguucugcuauauacauuugcaaccgcaaaugcagacacauuauguauaggucaccaugcgaacaauucaacagacacuguagacacaguacuagaaaagaauguaacaguaacacacucuguuaaucuucuagaagacaagcauaacgggaaacuaugcaaacuaagagggguagccccauugcauuuggguaaauguaacauugcuggcuggauccugggaaauccagagugugaaacacucuccacagcaagcucaugguccuacauuguggaaacaucuaguucagacaauggaacguguuacccaggagauuucaucgauuaugaggagcuaagagagcaauugagcucagugucaucauuugaaagguuugagauauuccccaagacaaguucauggcccaaucaugacucgaacaaagguguaacggcagcauguccucaugcuggagcaaaaggcuucuacaaaaauuuaauauggcuaguuaaaaaaggaaauucauacccaaagcucagcaaauccuacauuaaugauaaagggaaagaaguccucgugcuauggggcauucaccauccauccaccacugcugaccaacaaagucucuaucagaaugcagauacauauguuuuuguggggacaucaagauacagcaagaaguucaagccggaaauagcaacaagacccaaagugagggaucaagaagggagaaugaacuauuacuggacacuaguagagccgggagacaaaauaacauucgaagcaacuggaaaucuagugguaccgagauaugcauucgcaauggaaagagaugcuggaucugguauuaucauuucagauacaccaguccacgauugcaauacaacuugucagacacccaagggugcuauaaacaccagccucccauuucaaaauauacauccgaucacaauuggaaaauguccaaaauauguaaaaagcacaaaauugagacuggccacaggauugaggaaugucccaucuauucaaucuagaggccuauuuggggccauugccggcuucauugaagggggguggacagggaugguagauggaugguacgguuaucaccaucaaaaugagcaggggucaggauaugcagccgaccugaagagcacacagaaugccauugacaagauuacuaacaaaguaaauucuguuauugaaaaaaugaauacacaguucacagcaguagguaaagaguucaaccaccuggaaaaaagaauagagaauuuaaauaaaaaaguugaugauggguuccuggacauuuggacuuacaaugccgaacuguugguucuauuggaaaaugaaagaacuuuggacuaccacgauucaaaugugaagaacuuauaugaaaagguaagaaaccaguuaaaaaacaaugccaaggaaauuggaaauggcugcuuugaauuuuaccacaaaugcgauaacacguguauggaaagugucaaaaaugggacuuaugacuacccaaaauacucagaggaagcaaaauuaaacagagaagaaauagaugggguaaagcuggaaucaacaaggauuuaccagauuuuggcgaucuauucaacugccgccaguucauugguacugguagucucccugggggcaaucaguuuuuggaugugcucuaaugggucucuacaguguagaauauguauuuaa

SEQ ID NO: 42452 - RNA, 1701 nt, Artificial Sequence
  derived and/or modified CDS sequence (wt) from hemagglutinin__InfluenzaA__AGU92711
augaaggcaauacuaguaguucugcuauauacauuugcaaccgcaaaugcagacacauuauguauagguuaucaugcgaacaauucaacagacacuguagacacaguacuagaaaagaauguaacaguaacacacucuguuaaccuucuagaagacaagcauaacgggaaacuaugcaaacuaagagggguagccccauugcauuuggguaaauguaacauugcuggcuggauccugggaaauccagagugugaaucacucuccacagcaagcucaugguccuacauuguggaaacaucuaguucagacaauggaacguguuacccaggagauuucaucgauuaugaggagcuaagagagcaauugagcucagugucaucauuugaaagguuugagauauuccccaagacaaguucauggcccaaucaugacucgaacaaagguguaacggcagcauguccucaugcuggagcaaaaagcuucuacaaaaauuuaauauggcuaguuaaacaaggaaauucauacccaaagcucagcaaauccuacauuaaugauaaagggaaagaaguccucgugcuauggggcauucaccauccaucuacuagugcugaccaacaaagucucuaucagaaugcagaugcauauguuuuuguggggucaucaagauacagcaagaaguucaagccggaaauagcaauaagacccaaagugagggaucaagaagggagaaugaacuauuacuggacacuaguagagccgggagacaaaauaacauucgaagcaacuggaaaucuagugguaccgagauaugcauucgcaauggaaagaaaugcuggaucugguauuaucauuucagauacaccaguccacgauugcaauacaacuugucagacacccaagggugcuauaaacaccagccucccauuucagaauauacauccgaucacaauuggaaaauguccaaaauauguaaaaagcacaaaauugagacuggccacaggauugaggaaugucccgucuauucaaucuagaggccuauuuggggccauugccgguuucauugaagggggguggacagggaugguagauggaugguacgguuaucaccaucaaaaugagcaggggucaggauaugcagccgaccugaagagcacacagaaugccauugacgagauuacuaacaaaguaaauucuguuauugaaaagaugaauacacaguucacagcaguagguaaagaguucaaccaccuggaaaaaagaauagagaauuuaaauaaaaaaguugaugaugguuuccuggacauuuggacuuacaaugccgaacuguugguucuauuggaaaaugaaagaacuuuggacuaccacgauucaaaugugaagaacuuauaugaaaagguaagaagccagcuaaaaaacaaugccaaggaaauuggaaacggcugcuuugaauuuuaccacaaaugcgauaacacgugcauggaaagugucaaaaaugggacuuaugacuacccaaaauacuccgaggaagcaaaauuaaacagagaagaaauagaugggguaaagcuggaaucaacaaggauuuaccagauuuuggcgaucuauucaacugucgccaguucauugguacugguagucucccugggggcaaucaguuucuggaugugcucuaaugggucucuacaguguagaauauguauuuaa

SEQ ID NO: 42453 - RNA, 1701 nt, Artificial Sequence
  derived and/or modified CDS sequence (wt) from hemagglutinin__InfluenzaA__AGU92722
augaaggcaauacuaguaguucugcuauauacauuugcaaccgcaaaugcagacacauuauguauagguuaucaugcgaacaauucaacagacacuguagacacaguacuagaaaagaauguaacaguaacacacucuguuaaccuucuagaagacaagcauaacgggaaacuaugcaaacuaagagggguagccccauugcauuuggguaaauguaacauugcuggcuggauccugggaaauccagagugugaaucacucuccacagcaagcucaugguccuacauuguggaaacaucuaguucagacaauggaacguguuacccaggagauuucaucgauuaugaggagcuaagagagcaauugagcucagugucaucauuugaaagguuugagauauuccccaagacaaguucauggcccaaucaugacucggacaaagguguaacggcagcauguccucaugcuggagcaaaaagcuucuacaaaaauuuaauauggcuaguuaaaaaaggaaauucauacccaaagcucagcaaauccuacauuaaugauaaagggaaagaaguccucgugcuauggggcauucaccauccaucuacuagugcugaccaacaaagucucuaucagaaugcagaugcauauguuuuuguggggucaucaagauacagcaagaaguucaagccggaaauagcaauaagacccaaagugagggaucaagaagggagaaugaacuauuacuggacacuaguagagccgggagacaaaauaacauucgaagcaacuggaaaucuagugguaccgagauaugcauucgcaauggaaagaaaugcuggaucugguauuaucauuucagauacaccaguccacgauugcaauacaacuugucagacacccaagggugcuauaaacaccagccucccauuucagaauauacauccgaucacaauuggaaaauguccaaaauauguaaaaagcacaaaauugagacuggccacaggauugaggaaugucccgucuauucaaucuagaggccuauuuggggccauugccgguuucauugaagggggguggacagggaugguagauggaugguacgguuaucaccaucaaaaugagcaggggucaggauaugcagccgaccugaagagcacacagaaugccauugacgagauuacuaacaaaguaaauucuguuauugaaaagaugaauacacaguucacagcaguagguaaagaguucaaccaccuggaaaaaagaauagaaaauuuaaauaaaaaaguugaugaugguuuccuggacauuuggacuuacaaugccgaacuguugguucuauuggaaaaugaaagaacuuuggacuaccacgauucaaaugugaagaacuuauaugaaaagguaagaagccagcuaaaaaacaaugccaaggaaauuggaaacggcugcuuugaauuuuaccacaaaugcgauaacacgugcauggaaagugucaaaaaugggacuuaugacuacccaaaauacucagaggaagcaaaauuaaacagagaagaaauagaugggguaaagcuggaaucaacaaggauuuaccagauuuuggcgaucuauucaacugucgccaguucauugguacugguagucucccugggggcaaucaguuucuggaugugcucuaaugggucucuacaguguagaauauguauuuaa

SEQ ID NO: 42454 - RNA, 1701 nt, Artificial Sequence; identical to SEQ ID NO: 42453
  derived and/or modified CDS sequence (wt) from hemagglutinin__InfluenzaA__AGU92733

SEQ ID NO: 42455 - RNA, 1701 nt, Artificial Sequence
  derived and/or modified CDS sequence (wt) from hemagglutinin__InfluenzaA__AGU92744
augaaggcaauacuaguaguucugcuauauacauuugcaaccgcaaaugcagacacauuauguauagguuaucaugcgaacaauucaacagacacuguagacacaguacuagaaaagaauguaacaguaacacacucuguuaaccuucuagaagacaagcauaacgggaaacuaugcaaacuaagagggguagccccauugcauuuggguaaauguaacauugcuggcuggauccugggaaauccagagugugaaucacucuccacagcaagcucaugguccuacauuguggaaacaucuaguucagacaauggaacguguuacccaggagauuucaucgauuaugaggagcuaagagagcaauugagcucagugucaucauuugaaagguuugagauauuccccaagacaaguucauggcccaaucaugacucggacaaagguguaacggcagcauguccucaugcuggagcaaaaagcuucuacaaaaauuuaauauggcuaguuaaaaaaggaaauucauacccaaagcucagcaaauccuacauuaaugauaaagggaaagaaguccucgugcuauggggcauucaccauccaucuacuagugcugaccaacaaagucucuaucagaaugcagaugcauauguuuuuguggggucaucaagauacagcaagaaguucaagccggaaauagcaauaagacccaaagugagggaucaagaagggagaaugaacuauuacuggacacuaguagagccgggagacaaaauaacauucgaagcaacuggaaaucuagugguaccgagauaugcauucgcaauggaaagaaaugcuggaucugguauuaucauuucagauacaccaguccacgauugcaauacaacuugucagacacccaagggugcuauaaacaccagccucccauuucagaauauacauccgaucacaauuggaaaauguccaaaauauguaaaaagcacaaaauugagacuggccacaggauugaggaaugucccgucuauucaaucuagaggccuauuuggggccauugccgguuucauugaagggggguggacagggaugguagauggaugguacgguuaucaccaucaaaaugagcaggggucaggauaugcagccgaccugaagagcacacagaaugccauugacgagauuacuaacaaaguaaauucuguuauugaaaagaugaauacacaguucacagcaguagguaaagaguucaaccaccuggaaaaaagaauagaaaauuuaaauaaaaaaguugaugaugguuuccuggacauuuggacuuacaaugccgaacuguugguucuauuggaaaaugaaagaacuuuggacuaccacgauucaaaugugaagaacuuauaugaaaagguaagaagccagcuaaaaaacaaugccaaggaaauuggaaacggcugcuuugaauuuuaccacaaaugcgauaacacgugcauggaaagugucaaaaauggggcuuaugacuacccaaaauacucagaggaagcaaaauuaaacagagaagaaauagaugggguaaagcuggaaucaacaaggauuuaccagauuuuggcgaucuauucaacugucgccaguucauugguacugguagucucccugggggcaaucaguuucuggaugugcucuaaugggucucuacaguguagaauauguauuuaa

SEQ ID NO: 42456 - RNA, 1701 nt, Artificial Sequence
  derived and/or modified CDS sequence (wt) from hemagglutinin__InfluenzaA__AGU92755
augaaggcaauacuaguaguucugcuauauacauuugcaaccgcaaaugcagacacauuauguauagguuaucaugcgaacaauucaacagacacuguagacacaguacuagaaaagaauguaacaguaacacacucuguuaaccuucuagaagacaagcauaacgggaaacuaugcaaacuaagagggguagccccauugcauuuggguaaauguaacauugcuggcuggauccugggaaauccagagugugaaucacucuccacagcaagcucaugguccuacauuguggaaacaucuaguucagacaauggaacguguuacccaggagauuucaucgauuaugaggagcuaagagagcaauugagcucagugucaucauuugaaagguuugagauauuccccaagacaaguucauggcccaaucaugacucgaacaaagguguaacggcagcauguccucaugcuggagcaaaaagcuucuacaaaaauuuaauauggcuaguuaaaaaaggaaauucauacccaaagcucagcaaauccuacauuaaugauaaagggaaagaaguccucgugcuauggggcauucaccauccaucuacuagugcugaccaacaaagucucuaucagaaugcagaugcauauguuuuuguggggucaucaagauacagcaaggaguucaagccggaaauagcaauaagacccaaagugagggaucaagaagggagaaugaacuauuacuggacacuaguagagccgggagacaaaauaacauucgaagcaacuggaaaucuagugguaccgagauaugcauucgcaauggaaagaaaugcuggaucugguauuaucauuucagauacaccaguccacgauugcaauacaacuugucagacacccaagggugcuauaaacaccagccucccauuucagaauauacauccgaucacaauuggaaaauguccaaaauauguaaaaagcacaaaauugagacuggccacaggauugaggaaugucccgucuauucaaucuagaggccuauuuggggccauugccgguuucauugaagggggguggacagggaugguagauggaugguacgguuaucaccaucaaaaugagcaggggucaggauaugcagccgaccugaagagcacacagaaugccauugacgagauuacuaacaaaguaaauucuguuauugaaaagaugaauacacaguucacagcaguagguaaagaguucaaccaccuggaaaaaagaauagagaauuuaaauaaaaaaguugaugaugguuuccuggacauuuggacuuacaaugccgaacuguugguucuauuggaaaaugaaagaacuuuggacuaccacgauucaaaugugaagaacuuauaugaaaagguaagaagccagcuaaaaaacaaugccaaggaaauuggaaacggcugcuuugaauuuuaccacaaaugcgauaacacgugcauggaaagugucaaaaaugggacuuaugacuacccaaaauacucagaggaagcaaaauuaaacagagaagaaauagaugggguaaagcuggaaucaacaaggauuuaccagauuuuggcgaucuauucaacugucgccaguucauugguacugguagucucccugggggcaaucaguuucuggaugugcucuaaugggucucuacaguguagaauauguauuuaa

SEQ ID NO: 42457 - RNA, 1701 nt, Artificial Sequence
  derived and/or modified CDS sequence (wt) from hemagglutinin__InfluenzaA__AGU92766
augaaggcaauacuaguaguucugcuauauacauuugcaaccgcaaaugcagacacauuauguauagguuaccaugcgaacaauucaacagacacuguagacacaguacuagaaaagaauguaacaguaacacacucuguuaaucuucuagaagacaagcauaacgggaaacuaugcaaacuaagagggguagccccauugcauuuggguaaauguaacauugcuggcuggauccugggaaauccagagugugaaacacucuccacagcaagcucaugguccuacauuguggaaacaucuaguucagacaauggaacguguuacccaggagauuucaucgauuaugaggagcuaagagagcaauugagcucagugucaucauuugaaagguuugagauauuccccaagacaaguucauggcccaaucaugaaucgaacaaagguguaacggcagcauguccucaugcuggagcaaaaggcuucuacaaaaauuuaauauggcuaguuaaaaaaggaaauucauacccaaagcucagcaaauccuacauuaaugauaaagggaaagaaguccucgugcuauggggcauucaccauccauccaccacugcugaccaacaaagucucuaucagaaugcagaugcauauguuuuuguggggacaucaagauacagcaagaaguucaagccggaaauagcaacaagacccaaagugagggaucaagaagggagaaugaacuauuacuggacacuaguagagccgggagacaaaauaacauucgaagcaacuggaaaucuagugguaccgagauaugcauucgcaauggaaagagaugcuggaucugguauuaucauuucagauacaccaguccacgauugcaauacaacuugucagacacccaagggugcuauaaacaccagccucccauuucaaaauauacauccgaucacaauuggaaaauguccaaaauauguaaaaagcacaaaauugagacuggccacaggauugaggaaugucccaucuauucaaucuagaggccuauuuggggccauugccggcuucauugaagggggguggacagggaugguagauggaugguacgguuaucaccaucaaaaugagcaggggucaggauaugcagccgaccugaagagcacacagaaugccauugacaagauuacuaacaaaguaaauucuguuauugaaaaaaugaauacacaguucacagcaguagguaaagaguucaaccaccuggaaaaaagaauagagaauuuaaauaaaaaaguugaugauggguuccuggacauuuggacuuacaaugccgaacuguugguucuauuggaaaaugaaagaacuuuggacuaccacgauucaaaugugaagaacuuauaugaaaagguaagaaaccaguuaaaaaacaaugccaaggaaauuggaaauggcugcuuugaauuuuaccacaaaugcgauaacacguguauggaaagugucaaaaaugggacuuaugacuacccaaaauacucagaggaagcaaaauuaaacagagaagaaauagaugggguaaagcuggaaucaacaaggauuuaccagauuuuggcgaucuauucaacugccgccaguucauugguacugguagucucccugggggcaaucaguuuuuggaugugcucuaaugggucucuacaguguagaauauguauuuaa

SEQ ID NO: 42458 - RNA, 1701 nt, Artificial Sequence
  derived and/or modified CDS sequence (wt) from hemagglutinin__InfluenzaA__AGU92777
augaaggcaauacuaguaguucugcuauauacauuugcaaccgcaaaugcagacacauuauguauagguuaccaugcgaacaauucaacagacacuguagacacaguacuagaaaagaauguaacaguaacacacucuguuaaucuucuagaagacaagcauaacgggaaacuaugcaaacuaagagggguagccccauugcauuuggguaaauguaacauugcuggcuggauccugggaaauccagagugugaaacacucuccacagcaagcucaugguccuacauuguggaaacaucuaguucagacaauggaacguguuacccaggagauuucaucgauuaugaggagcuaagagagcaauugagcucagugucaucauuugaaagguuugagauauuccccaagacaaguucauggcccaaucaugaaucgaacaaagguguaacggcagcauguccucaugcuggagcaaaaggcuucuacaaaaauuuaauauggcuaguuaaaaaaggaaauucauacccaaagcucagcaaauccuacauuaaugauaaagggaaagaaguccucgugcuauggggcauucaccauccauccaccacugcugaccaacaaaguaucuaucagaaugcagauacauauguuuuuguggggacaucaagauacagcaagaaguucaagccggaaauagcaacaagacccaaagugagggaucaagaagggagaaugaacuauuacuggacacuaguagagccgggagacaaaauaacauucgaagcaacuggaaaucuagugguaccgagauaugcauucgcaauggaaagagaugcuggaucugguauuaucauuucagauacaccaguccacgauugcaauacaacuugucagacacccaagggugcuauaaacaccagccucccauuucaaaauauacauccgaucacaauuggaaaauguccaaaauauguaaaaagcacaaaauugagacuggccacaggauugaggaaugucccaucuauucaaucuagaggccuauuuggggccauugccggcuucauugaagggggguggacagggaugguagauggaugguacgguuaucaccaucaaaaugagcaggggucaggauaugcagccgaccugaagagcacacagaaugccauugacaagauuacuaacaaaguaaauucuguuauugaaaaaaugaauacacaguucacagcaguagguaaagaguucaaccaccuggaaaaaagaauagagaauuuaaauaaaaaaguugaugauggguuccuggacauuuggacuuacaaugccgaacuguugguucuauuggaaaaugaaagaacuuuggacuaccacgauucaaaugugaagaacuuauaugaaaagguaagaaaccaguuaaaaaacaaugccaaggaaauuggaaauggcugcuuugaauuuuaccacaaaugcgauaacacguguauggaaagugucaaaaaugggacuuaugacuacccaaaauacucagaggaagcaaaauuaaacagagaagaaauagaugggguaaagcuggaaucaacaaggauuuaccagauuuuggcgaucuauucaacugccgccaguucauugguacugguagucucccugggggcaaucaguuuuuggaugugcucuaaugggucucuacaguguagaauauguauuuaa

SEQ ID NO: 42459 - RNA, 1701 nt, Artificial Sequence
  derived and/or modified CDS sequence (wt) from hemagglutinin__InfluenzaA__AGU92788
augaaggcaauacuaguaguucugcuauauacauuugcaaccgcaaaugcagacacauuauguauagguuaccaugcgaacaauucaacagacacuguagacacaguacuagaaaagaauguaacaguaacacacucuguuaaucuucuagaagacaagcauaacgggaaacuaugcaaacuaagagggguagccccauugcauuuggguaaauguaacauugcuggcuggauccugggaaauccagagugugaaacacucuccacagcaagcucaugguccuacauuguggaaacaucuaguucagacaauggaacguguuacccaggagauuucaucgauuaugaggagcuaagagagcaauugagcucagugucaucauuugaaagguuugagauauuccccaagacaaguucauggcccaaucaugacucggacaaagguguaacggcagcauguccucaugcuggagcaaaaggcuucuacaaaaauuuaauauggcuaguuaaaaaaggaaauucauacccaaagcucagcaaauccuacauuaaugauaaagggaaagaaguccucgugcuauggggcauucaccauccauccaccacugcugaccaacaaagucucuaucagaaugcagaugcauauguuuuuguggggacaucaagauacagcaagaaguucaagccggaaauagcaacaagacccaaagugagggaucgagaagggagaaugaacuauuacuggacacuaguagagccgggagacaaaauaacauucgaagcaacuggaaaucuagugguaccgagauaugcauucgcaauggaaagagaugcuggaucugguauuaucauuucagauacaccaguccacgauugcaauacaacuugucagacacccaagggugcuauaaacaccagccucccauuucaaaauauacauccgaucacaauuggaaaauguccaaaauauguaaaaagcacaaaauugagacuggccacaggauugaggaaugucccaucuauucaaucuagaggccuauuuggggccauugccggcuucauugaagggggguggacagggauguuagauggaugguacgguuaucaccaucaaaaugagcaggggucaggauaugcagccgaccugaagagcacacagaaugccauugacaagauuacuaacaaaguaaauucuguuauugaaaaaaugaauacacaguucacagcaguagguaaagaguucaaccaccuggaaaaaagaauagagaauuuaaauaaaaaaguugaugauggguuccuggacauuuggacuuacaaugccgaacuguugguucuauuggaaaaugaaagaacuuuggacuaccacgauucaaaugugaagaacuuauaugaaaagguaagaaaccaguuaaaaaacaaugccaaggaaauuggaaauggcugcuuugaauuuuaccacaaaugcgauaacacguguauggaaagugucaaaaaugggacuuaugacuacccaaaauacucagaggaagcaaaauuaaacagagaagaaauagaugggguaaagcuggaaucaacaaggauuuaccagauuuuggcgaucuauucaacugccgccaguucauugguacugguagucucccugggggcaaucaguuuuuggaugugcucuaaugggucucuacaguguagaauauguauuuaa

SEQ ID NO: 42460 - RNA, 1701 nt, Artificial Sequence
  derived and/or modified CDS sequence (wt) from hemagglutinin__InfluenzaA__AGU92799
augaaggcaauacuaguaguucugcuauauacauuugcaaccgcaaaugcagacacauuauguauagguuaccaugcgaacaauucaacagacacuguagacacaguacuagaaaagaauguaacaguaacacacucuguuaaucuucuagaagacaagcauaacgggaaacuaugcaaacuaagagggguagccccauugcauuuggguaaauguaacauugcuggcuggauccugggaaauccagagugugaaacacucuccacagcaagcucaugguccuacauuguggaaacaucuaguucagacaauggaacguguuacccaggagauuucaucgauuaugaggagcuaagagagcaauugagcucagugucaucauuugaaagguuugagauauuccccaagacaaguucauggcccgaucaugacucgaacaaagguguaacggcagcauguccucaugcuggagcaaaaggcuucuacaaaaauuuaauauggcuaguuaaaaaaggaaauucauacccaaagcucagcaaauccuacauuaaugauaaagggaaagaaguccucgugcuauggggcauucaccauccauccaccacugcugaccaacaaagucucuaucagaaugcagaugcauauguuuuuguggggacaucaagauacagcaagaaguucaagccggaaauagcaacaagacccaaagugagggaucgagaagggagaaugaacuauuacuggacacuaguagagccgggagacaaaauaacauucgaagcaacuggaaaucuagugguaccgagauaugcauucgcaauggaaagagaugcuggaucugguauuaucauuucagauacaccaguccacgauugcaauacaacuugucagacacccaagggugcuauaaacaccagccucccauuucaaaauauacauccgaucacaauuggaaaauguccaaaauauguaaaaagcacaaaauugagacuggccacaggauugaggaaugucccaucuauucaaucuagaggccuauuuggggccauugccggcuucauugaagggggguggacagggaugguagauggaugguacgguuaucaccaucaaaaugagcaggggucaggauaugcagccgaccugaagagcacacagaaugccauugacaagauuacuaacaaaguaaauucuguuauugaaaaaaugaauacacaguucacagcaguagguaaagaguucaaccaccuggaaaaaagaauagagaauuuaaauaaaaaaguugaugauggguuccuggacauuuggacuuacaaugccgaacuguugguucuauuggaaaaugaaagaacuuuggacuaccacgauucaaaugugaagaacuuauaugaaaagguaagaaaccaguuaaaaaacaaugccaaggaaauuggaaauggcugcuuugaauuuuaccacaaaugcgauaacacguguauggaaagugucaaaaaugggacuuaugacuacccaaaauacucagaggaagcaaaauuaaacagagaagaaauagaugggguaaagcuggaaucaacaaggauuuaccagauuuuggcgaucuauucaacugccgccaguucauugguacugguagucucccugggggcaaucaguuuuuggaugugcucuaaugggucucuacaguguagaauauguauuuaa

SEQ ID NO: 42461 - RNA, 1701 nt, Artificial Sequence
  derived and/or modified CDS sequence (wt) from hemagglutinin__InfluenzaA__AGU92821
augaaggcaauacuaguaguucugcuauauacauuugcaaccgcaaaugcagacacauuauguauagguuaccaugcgaacaauucaacagacacuguagacacaguacuagaaaagaauguaacaguaacacacucuguuaaucuucuagaagacaagcauaacgggaaacuaugcaaacuaagagggguagccccauugcauuuggguaaauguaacauugcuggcuggauccugggaaauccagagugugaaacacucuccacagcaagcucaugguccuacauuguggaaacaucuaguucagacaauggaacguguuacccaggagauuucaucgauuaugaggagcuaagagagcaauugagcucagugucaucauuugaaagguuugagauauuccccaagacaaguucauggcccaaucaugacucgaacaaagguguaacggcagcauguccucaugcuggagcaaaaggcuucuacaaaaauuuaauauggcuaguuaaaaaaggaaauucauacccaaagcucagcaaauccuacauuaaugauaaagggaaagaaguccucgugcuauggggcauucaccauccauccaccacugcugaccaacaaagucucuaucagaaugcagauacauauguuuuuguggggacaucaagauacagcaagauguucaagccggaaauagcaacaagacccaaagugagggaucgagaagggagaaugaacuauuacuggacacuaguagagccgggagacaaaauaacauucgaagcaacuggaaaucuagugguaccgagauaugcauucgcaauggaaagagaugcuggaucugguauuaucauuucagauacaccaguccacgauugcaauacaacuugucagacacccaagggugcuauaaacaccagccucccauuucaaaauauacauccgaucacaauuggaaaauguccaaaauauguaaaaagcacaaaauugagacuggccacaggauugaggaaugucccaucuauucaaucuagaggccuauuuggggccauugccggcuucauugaagggggguggacagggaugguagauggaugguacgguuaucaccaucaaaaugagcaggggucaggauaugcagccgaccugaagagcacacagaaugccauugacaagauuacuaacaaaguaaauucuguuauugaaaaaaugaauacacaguucacagcaguagguaaagaguucaaccaccuggaaaaaagaauagagaauuuaaauaaaaaaguugaugauggguuccuggacauuuggacuuacaaugccgaacuguugguucuauuggaaaaugaaagaacuuuggacuaccacgauucaaaugugaagaacuuauaugaaaagguaagaaaccaguuaaaaaacaaugccaaggaaauuggaaauggcugcuuugaauuuuaccacaaaugcgauaacacguguauggaaagugucaaaaaugggacuuaugacuacccaaaauacucagaggaagcaaaauuaaacagagaagaaauagaugggguaaagcuggaaucaacaaggauuuaccagauuuuggcgaucuauucaacugccgccaguucauugguacugguagucucccugggggcaaucaguuuuuggaugugcucuaaugggucucuacaguguagaauauguauuuaa

SEQ ID NO: 42462 - RNA, 1701 nt, Artificial Sequence
  derived and/or modified CDS sequence (wt) from hemagglutinin__InfluenzaA__AGU92843
augaaggcaauacuaguaguucugcuauauacauuugcaaccgcaaaugcagacacauuauguauagguuaucaugcgaacaauucaacagacacuguagacacaguacuagaaaagaauguaacaguaacacacucuguuaaccuucuagaagacaagcauaacgggaaacuaugcaaacuaagagggguagccccauugcauuuggguaaauguaacauugcuggcuggauccugggaaauccagagugugaaucacucuccacagcaagcucaugguccuacauuguggaaacaucuaguucagacaauggaacguguuacccaggagauuucaucgauuaugaggagcuaagagagcaauugagcucagugucaucauuugaaagguuugagauauuccccaagacaaguucauggcccaaucaugacucgaacaaagguguaacggcagcauguccucaugcuggagcaaaaagcuucuacaaaaauuuaauauggcuaguuaaaaaaggagauucauacccaaagcucagcaaauccuacauuaaugauaaagggaaagaaguccucgugcuauggggcauucaccauccaucuacuagugcugaccaacaaagucucuaucagaaugcagaugcauauguuuuuguggggucaucaagauacagcaagaaguucaagccggaaauagcaauaagacccaaagugagggaucgagaagggagaaugaacuauuacuggacacuaguagagccgggagacaaaauaacauucgaagcaacuggaaaucuagugguaccgagauaugcauucgcaauggaaagaaaugcuggaucugguauuaucauuucagauacaccaguccacgauugcaauacaacuugucagacacccaagggugcuauaaacaccagccucccauuucagaauauacauccgaucacaauuggaaaauguccaaaauauguaaaaagcacaaaauugagacuggccacaggauugaggaaugucccgucuauucaaucuagaggccuauuuggggccauugccgguuucauugaagggggguggacagggaugguagauggaugguacgguuaucaccaucaaaaugagcaggggucaggauaugcagccgaccugaagagcacacagaaugccauugacgagauuacuaacaaaguaaauucuguuauugaaaagaugaauacacaguucacagcaguagguaaagaguucaaccaccuggaaaaaagaauagagaauuuaaauaaaaaaguugaugaugguuuccuggacauuuggacuuacaaugccgaacuauugguucuauuggaaaaugaaagaacuuuggacuaccacgauucaaaugugaagaacuuauaugaaaagguaagaagccagcuaaaaaacaaugccaaggaaauuggaaacggcugcuuugaauuuuaccacaaaugcgauaacacgugcauggaaagugucaaaaaugggacuuaugacuacccaaaauacucagaggaagcaaaauuaaacagagaagaaauagaugggguaaagcuggaaucaacaaggauuuaccagauuuuggcgaucuauucaacugucgccaguucauugguacugguagucucccugggggcaaucaguuucuggaugugcucuaaugggucucuacaguguagaauauguauuuaa

SEQ ID NO: 42463 - RNA, 1710 nt, Artificial Sequence
  derived and/or modified CDS sequence (wt) from hemagglutinin__InfluenzaA__AGU92854
augaaggcaauacuaguaguucugcuauauacauuugcaaccgcaaaugcagacacauuauguauagguuaucaugcgaacaauucaacagacacuguagacacaguacuagaaaagaauguaacaguaacacacucuguuaaccuucuagaagacaagcauaacgggaaacuaugcaaacuaagagggguagccccauugcauuuggguaaauguaacauugcuggcuggauccugggaaauccagagugugaaucacucuccacagcaagcucaugguccuacauuguggaaacaucuaguucagacaauggaacguguuacccaggagauuucaucgauuaugaggagcuaagagagcaauugagcucagugucaucauuugaaagguuugagauauuccccaagacaaguucauggcccaaucaugacucggacaaagguguaacggcagcauguccucaugcuggagcaaaaagcuucuacaaaaauuuaauauggcuaguuaaaaaaggaaauucauacccaaagcucagcaaauccuacauuaaugauaaagggaaagaaguccucgugcuauggggcauucaccauccaucuacuagugcugaccaacaaagucucuaucagaaugcagaugcauauguuuuuguggggucaucaagauacagcaagaaguucaagccggaaauagcaauaagacccaaagugagggaucgagaagggagaaugaacuauuacuggacacuaguagagccgggagacaaaauaacauucgaagcaacuggaaaucuagugguaccgagauaugcauucgcaauggaaagaaaugcuggaucugguauuaucauuucagauacaccaguccacgauugcaauacaacuugucagacacccaagggugcuauaaacaccagccucaccagccucccauuucagaauauacauccgaucacaauuggaaaauguccaaaauauguaaaaagcacaaaauugagacuggccacaggauugaggaaugucccgucuauucaaucuagaggccuauuuggggccauugccgguuucauugaagggggguggacagggaugguagauggaugguacgguuaucaccaucaaaaugagcaggggucaggauaugcagccgaccugaagagcacacagaaugccauugacgagauuacuaacaaaguaaauucuguuauugaaaagaugaauacacaguucacagcaguagguaaagaguucaaccaccuggaaaaaagaauagagaauuuaaauaaaaaaguugaugaugguuuccuggacauuuggacuuacaaugccgaacuguugguucuauuggaaaaugaaagaacuuuggacuaccacgauucaaaugugaagaacuuauaugaaaagguaagaagccagcuaaaaaacaaugccaaggaaauuggaaacggcugcuuugaauuuuaccacaaaugcgauaacacgugcauggaaagugucaaaaaugggacuuaugacuacccaaaauacucagaggaagcaaaauuaaacagagaagaaauagaugggguaaagcuggaaucaacaaggauuuaccagauuuuggcgaucuauucaacugucgccaguucauugguacugguagucucccugggggcaaucaguuucuggaugugcucuaaugggucucuacaguguagaauauguauuuaa

SEQ ID NO: 42464 - RNA, 1701 nt, Artificial Sequence
  derived and/or modified CDS sequence (wt) from hemagglutinin__InfluenzaA__AGU92887
augaaggcaauacuaguaguucugcuauauacauuugcaaccgcaaaugcagacacauuauguauagguuaucaugcgaacaauucaacagacacuguagacacaguacuagaaaagaauguaacaguaacacacucuguuaaccuucuagaagacaagcauaacgggaaacuaugcaaacuaagagggguagccccauugcauuuggguaaauguaacauugcuggcuggauccugggaaauccagagugugaaucacucuccacagcaagcucaugguccuacauuguggaaacaucuaguucagacaauggaacguguuacccaggagauuucaucgauuaugaggagcuaagagagcaauugagcucagugucaucauuugaaagguuugagauauuccccaagacaaguucauggcccaaucaugacucgaacaaagguguaacggcagcauguccucaugcuggagcaaaaagcuucuacaaaaauuuaauauggcuaguuaaaaaaggaaauucauacccaaagcucagcaaauccuacauuaaugauaaagggaaagaaguccucgugcuauggggcauucaccauccaucuacuagugaugaccaacaaagucucuaucagaaugcagaugcauauguuuuuguggggucaucaagauacagcaagaaguucaagccggaaauagcaauaagacccaaagugagggaucgagaagggagaaugaacuauuacuggacacuaguagagccgggagacaaaauaacauucgaagcaacuggaaaucuagugguaccgagauaugcauucgcaauggaaagaaaugcuggaucugguauuaucauuucagauacaccaguccacgauugcaauacaacuugucagacacccaagggugcuauaaacaccagccucccauuucagaauauacauccgaucacaauuggaaaauguccaaaauauguaaaaagcacaaaauugagacuggccacaggauugaggaaugucccgucuauucaaucuagaggccuauuuggggccauugccgguuucauugaagggggguggacagggaugguagauggaugguacgguuaucaccaucaaaaugagcaggggucaggauaugcagccgaccugaagagcacacagaaugccauugacgagauuacuaacaaaguaaauucuguuauugaaaagaugaauacacaguucacagcaguagguaaagaguucaaccaccuggaaaaaagaauagagaauuuaaauaaaaaaguugaugaugguuuccuggacauuuggacuuacaaugccgaacuguugguucuauuggaaaaugaaagaacuuuggacuaccacgauucaaaugugaagaacuuauaugaaaagguaagaagccagcuaaaaaacaaugccaaggaaauuggaaacggcugcuuugaauuuuaccacaaaugcgauaacacgugcauggaaagugucaaaaaugggacuuaugacuacccaaaauacucagaggaagcaaaauuaaacagagaagaaauagaugggguaaagcuggaaucaacaaggauuuaccagauuuuggcgaucuauucaacugucgccaguucauugguacugguagucucccugggggcaaucaguuucuggaugugcucuaaugggucucuacaguguagaauauguauuuaa

SEQ ID NO: 42465 - RNA, 1701 nt, Artificial Sequence; identical to SEQ ID NO: 42449
  derived and/or modified CDS sequence (wt) from hemagglutinin__InfluenzaA__AGU92898

SEQ ID NO: 42466 - RNA, 1701 nt, Artificial Sequence; identical to SEQ ID NO: 42450
  derived and/or modified CDS sequence (wt) from hemagglutinin__InfluenzaA__AGU92909

SEQ ID NO: 42467 - RNA, 1701 nt, Artificial Sequence
  derived and/or modified CDS sequence (wt) from hemagglutinin__InfluenzaA__AGU92931
augaaggcaauacuaguaguucugcuauauacauuugcaaccgcaaaugcagacacauuauguauagguuaucaugcgaacaauucaacagacacuguagacacaguacuagaaaagaauguaacaguaacacacucuguuaaccuucuagaagacaagcauaacgggaaacuaugcaaacuaagagggguagccccauugcauuuggguaaauguaacauugcuggcuggauccugggaaauccagagugugaaucacucuccacagcaagcucaugguccuacauuguggaaacaucuaguucagacaauggaacguguuacccaggagauuucaucgauuaugaggagcuaagagagcaauugagcucagugucaucauuugaaagguuugagauauuccccaagacaaguucauggcccaaucaugacucgaacaaagguguaacggcagcauguccucaugcuggagcaaaaagcuucuacaaaaauuuaauauggcuaguuaaacaaggaaauucauacccaaagcucagcaaauccuacauuaaugauaaagggaaagaaguccucgugcuauggggcauucaccauccaucuacuagugcugaccaacaaagucucuaucagaaugcagaugcauauguuuuuguggggucaucaagauacagcaagaaguucaagccggaaauagcaauaagacccaaagugagggaucaagaagggagaaugaacuauuacuggacacuaguagagccgggagacaaaauaacauucgaagcaacuggaaaucuagugguaccgagauaugcauucgcaauggaaagaaaugcuggaucugguauuaucauuucagauacaccaguccacgauugcaauacaacuugucagacacccaagggugcuauaaacaccagccucccauuucagaauauacauccgaucacaauuggaaaauguccaaaauauguaaaaagcacaaaauugagacuggccacaggauugaggaaugucccgucuauucaaucuagaggccuauuuggggccauugccgguuucauugaagggggguggacagggaugguagauggaugguacgguuaucaccaucaaaaugagcaggggucaggauaugcagccgaccugaagagcacacagaaugccauugacgagauuacuaacaaaguaaauucuguuauugaaaagaugaauacacaguucacagcaguagguaaagaguucaaccaccuggaaaaaagaauagagaauuuaaauaaaaaaguugaugaugguuuccuggacauuuggacuuacaaugccgaacuguugguucuauuggaaaaugaaagaacuuuggacuaccacgauucaaaugugaagaacuuauaugaaaagguaagaagccagcuaaaaaacaaugccaaggaaauuggaaacggcugcuuugaauuuuaccacaaaugcgauaacacgugcauggaaagugucaaaaaugggacuuaugacuacccaaaauacucagaggaagcaaaauuaaacagagaagaaauagaugggguaaagcuggaaucaacaaggauuuaccagauuuuggcgaucuauucaacugucgccaguucauugguacugguagucucccugggggcaaucaguuucuggaugugcucuaaugggucucuacaguguagaauauguauuuaa

SEQ ID NO: 42468 - RNA, 1701 nt, Artificial Sequence; identical to SEQ ID NO: 42453
  derived and/or modified CDS sequence (wt) from hemagglutinin__InfluenzaA__AGU92942

SEQ ID NO: 42469 - RNA, 1701 nt, Artificial Sequence; identical to SEQ ID NO: 42453
  derived and/or modified CDS sequence (wt) from hemagglutinin__InfluenzaA__AGU92953

SEQ ID NO: 42470 - RNA, 1701 nt, Artificial Sequence
  derived and/or modified CDS sequence (wt) from hemagglutinin__InfluenzaA__AGU92964
augaaggcaauacuaguaguucugcuauauacauuugcaaccgcaaaugcagacacauuauguauagguuaccaugcgaacaauucaacagacacuguagacacaguacuagaaaagaauguaacaguaacacacucuguuaaucuucuagaagacaagcauaacgggaaacuaugcaaacuaagagggguagccccauugcauuuggguaaauguaacauugcuggcuggauccugggaaauccagagugugaaacacucuccacagcaagcucaugguccuacauuguggaaacaucuaguucagacaauggaacguguuacccaggagauuucaucgauuaugaggagcuaagagagcaauugagcucagugucaucauuugaaagguuugagauauuccccaagacaaguucauggcccaaucaugacucgaacaaagguguaacggcagcauguccucaugcuggagcaaaaggcuucuacaaaaauuuaauauggcuaguuaaaaaaggaaauucauacccaaagcucagcaaauccuacauuaaugauaaagggaaagaaguccucgugcuauggggcauucaccauccauccaccacugcugaccaacaaagucucuaucagaaugcagaugcauauguuuuuguggggacaucaagauacagcaagaaguucaagccggaaauagcaacaagacccaaagugagggaucgagaagggagaaugaacuauuacuggacacuaguagagccgggagacaaaauaacauucgaagcaacuggaaaucuagugguaccgagauaugcauucgcaauggaaagagaugcuggaucugguauuaucauuucagauacaccaguccacgauugcaauacaacuugucagacacccaagggugcuauaaacaccagccucccauuucaaaauauacauccgaucacaauuggaaaauguccaaaauauguaaaaagcacaaaauugagacuggccacaggauugaggaaugucccaucuauucaaucuagaggccuauuuggggccauugccggcuucauugaagggggguggacagggauguuagauggaugguacgguuaucaccaucaaaaugagcaggggucaggauaugcagccgaccugaagagcacacagaaugccauugacaagauuacuaacaaaguaaauucuguuauugaaaaaaugaauacacaguucacagcaguagguaaagaguucaaccaccuggaaaaaagaauagagaauuuaaauaaaaaaguugaugauggguuccuggacauuuggacuuacaaugccgaacuguugguucuauuggaaaaugaaagaacuuuggacuaccacgauucaaaugugaagaacuuauaugaaaagguaagaaaccaguuaaaaaacaaugccaaggaaauuggaaauggcugcuuugaauuuuaccacaaaugcgauaacacguguauggaaagugucaaaaaugggacuuaugacuacccaaaauacucagaggaagcaaaauuaaacagagaagaaauagaugggguaaagcuggaaucaacaaggauuuaccagauuuuggcgaucuauucaacugccgccaguucauugguacugguagucucccugggggcaaucaguuuuuggaugugcucuaaugggucucuacaguguagaauauguauuuaa

SEQ ID NO: 42471 - RNA, 1701 nt, Artificial Sequence
  derived and/or modified CDS sequence (wt) from hemagglutinin__InfluenzaA__AGU92975
augaaggcaauacuaguaguucugcuauauacauuugcaaccgcaaaugcagacacauuauguauagguuaccaugcgaacaauucaacagacacuguagacacaguacuagaaaagaauguaacaguaacacacucuguuaaucuucuagaagacaagcauaacgggaaacuaugcaaacuaagagggguagccccauugcauuuggguaaauguaacauugcuggcuggauccugggaaauccagagugugaaacacucuccacagcaagcucaugguccuacauuguggaaacaucuaguucagacaauggaacguguuacccaggagauuucaucgauuaugaggagcuaagagagcaauugagcucagugucaucauuugaaagguuugagauauuccccaagacaaguucauggcccaaucaugacucgaacaaagguguaacggcagcauguccucaugcuggagcaaaaggcuucuacaaaaauuuaauauggcuaguuaaaaaagaaaauucauacccaaagcucagcaaauccuacauuaaugauaaagggaaagaaguccucgugcuauggggcauucaccauccauccaccacugcugaccaacaaagucucuaucagaaugcagauacauauguuuuuguggggacaucaagauacagcaagaaguucaagccggaaauagcaacaagacccaaagugagggaucgagaagggagaaugaacuauuacuggacacuaguagagccgggagacaaaauaacauucgaagcaacuggaaaucuagugguaccgagauaugcauucgcaauggaaagagaugcuggaucugguauuaucauuucagauacaccaguccacgauugcaauacaacuugucagacacccaagggugcuauaaacaccagccucccauuucaaaauauacauccgaucacaauuggaaaauguccaaaauauguaaaaagcacaaaauugagacuggccacaggauugaggaaugucccaucuauucaaucuagaggccuauuuggggccauugccggcuucauugaagggggguggacagggaugguagauggaugguacgguuaucaccaucaaaaugagcaggggucaggauaugcagccgaccugaagagcacacagaaugccauugacaagauuacuaacaaaguaaauucuguuauugaaaaaaugaauacacaguucacagcaguagguaaagaguucaaccaccuggaaaaaagaauagagaauuuaaauaaaaaaguugaugauggguuccuggacauuuggacuuacaaugccgaacuguugguucuauuggaaaaugaaagaacuuuggacuaccacgauucaaaugugaagaacuuauaugaaaagguaagaaaccaguuaaaaaacaaugccaaggaaauuggaaauggcugcuuugaauuuuaccacaaaugcgauaacacguguauggaaagugucaaaaaugggacuuaugacuacccaaaauacucagaggaagcaaaauuaaacagagaagaaauagaugggguaaagcuggaaucaacaaggauuuaccagauuuuggcgaucuauucaacugccgccaguucauugguacugguagucucccugggggcaaucaguuuuuggaugugcucuaaugggucucuacaguguagaauauguauuuaa

SEQ ID NO: 42472 - RNA, 1701 nt, Artificial Sequence
  derived and/or modified CDS sequence (wt) from hemagglutinin__InfluenzaA__AGU92986
augaaggcaauacuaguaguucugcuauauacauuugcaaccgcaaaugcagacacauuauguauagguuaucaugcgaacaauucaacagacacuguagacacaguacuagaaaagaauguaacaguaacacacucuguuaaccuucuagaagacaagcauaacgggaaacuaugcaaacuaagagggguagccccauugcauuuggguaaauguaacauugcuggcuggauccugggaaauccagagugugaaucacucuccacagcaagcucaugguccuacauuguggaaacaucuaguucagacaauggaacguguuacccaggagauuucaucgauuaugaggagcuaagagagcaauugagcucagugucaucauuugaaagguuugagauauuccccaagacaaguucauggcccaaucaugacucgaacaaagguguaacggcagcauguccucaugcuggagcaaaaagcuucuacaaaaauuuaauauggcuaguuaaaaaaggagauucauacccaaagcucagcaaauccuacauuaaugauaaagggaaagaaguccucgugcuauggggcauucaccauccaucuacuagugcugaccaacaaagucucuaucagaaugcagaugcauauguuuuuguggggucaucaagauacagcaagaaguucaagccggaaauagcaauaagacccaaagugagggaucgagaagggagaaugaacuauuacuggacacuaguagagccgggagacaaaauaacauucgaagcaacuggaaaucuagugguaccgagauaugcauucgcaauggaaagaaaugcuggaucugguauuaucauuucagauacaccaguccacgauugcaauacaacuugucagacacccaagggugcuauaaacaccagccucccauuucagaauauacauccgaucacaauuggaaaauguccaaaauauguaaaaagcacaaaauugagacuggccacaggauugaggaaugucccgucuauucaaucuagaggccuauuuggggccauugccgguuucauugaagggggguggacagggaugguagauggaugguacgguuaucaccaucaaaaugagcaggggucaggauaugcagccgaccugaagagcacacagaaugccauugacgagauuacuaacaaaguaaauucuguuauugaaaagaugaauacacaguucacagcaguagguaaagaguucaaccaccuggaaaaaagaauagagaauuuaaauaaaaaaguugaugaugguuuccuggacauuuggacuuacaaugccgaacuguugguucuauuggaaaaugaaagaacuuuggacuaccacgauucaaaugugaagaacuuauaugaaaagguaagaagccagcuaaaaaacaaugccaaggaaauuggaaacggcugcuuugaauuuuaccacaaaugcgauaacacgugcauggaaagugucaaaaaugggacuuaugacuacccaaaauacucagaggaagcaaaauuaaacagagaagaaauagaugggguaaagcuggaaucaacaaggauuuaccagauuuuggcgaucuauucaacugucgccaguucauugguacugguagucucccugggggcaaucaguuucuggaugugcucuaaugggucucuacaguguagaauauguauuuaa

SEQ ID NO: 42473 - RNA, 1701 nt, Artificial Sequence
  derived and/or modified CDS sequence (wt) from hemagglutinin__InfluenzaA__AGU92997
augaaggcaauacuaguaguucugcuauauacauuugcaaccgcaaaugcagacacauuauguauagguuaucaugcgaacaauucaacagacacuguagacacaguacuagaaaagaauguaacaguaacacacucuguuaaccuucuagaagacaagcauaacgggaaacuaugcaaacuaagagggguagccccauugcauuuggguaaauguaacauugcuggcuggauccugggaaauccagagugugaaucacucuccacagcaagcucaugguccuacauuguggaaacaucuaguucagacaauggaacguguuacccaggagauuucaucgauuaugaggagcuaagagagcaauugagcucagugucaucauuugaaagguuugagauauuccccaagacaaguucauggcccaaucaugacucgaacaaagguguaacggcagcauguccucaugcuggagcaaaaagcuucuacaaaaauuuaauauggcuaguuaaaaaaggaaauucauacccaaagcucagcaaauccuacauuaaugauaaagggaaagaaguccucgugcuauggggcauucaccauccaucuacuagugcugaccaacaaagucucuaucagaaugcagaugcauauguuuuuguggggucaucaagauacagcaagauguucaagccggaaauagcaauaagacccaaagugagggaucgagaagggagaaugaacuauuacuggacacuaguagagccgggagacaaaauaacauucgaagcaacuggaaaucuagugguaccgagauaugcauucgcaauggaaagaaaugcuggaucugguauuaucauuucagauacaccaguccacgauugcaauacaacuugucagacacccaagggugcuauaaacaccagccucccauuucagaauauacauccgaucacaauuggaaaauguccaaaauauguaaaaagcacaaaauugagacuggccacaggauugaggaaugucccgucuauucaaucuagaggccuauuuggggccauugccgguuucauugaagggggguggacagggaugguagauggaugguacgguuaucaccaucaaaaugagcaggggucaggauaugcagccgaccugaagagcacacagaaugccauugacgagauuacuaacaaaguaaauucuguuauugaaaagaugaauacacaguucacagcaguagguaaagaguucaaccaccuggaaaaaagaauagagaauuuaaauaaaaaaguugaugaugguuuccuggacauuuggacuuacaaugccgaacuguugguucuauuggaaaaugaaagaacuuuggacuaccacgauucaaaugugaagaacuuauaugaaaagguaagaagccagcuaaaaaacaaugccaaggaaauuggaaacggcugcuuugaauuuuaccacaaaugcgauaacacgugcauggaaagugucaaaaaugggacuuaugacuacccaaaauacucagaggaagcaaaauuaaacagagaagaaauagaugggguaaagcuggaaucaacaaggauuuaccagauuuuggcgaucuauucaacugucgccaguucauugguacugguagucucccugggggcaaucaguuucuggaugugcucuaaugggucucuacaguguagaauauguauuuaa

SEQ ID NO: 42474 - RNA, 1701 nt, Artificial Sequence; identical to SEQ ID NO: 42464
  derived and/or modified CDS sequence (wt) from hemagglutinin__InfluenzaA__AGU93008

SEQ ID NO: 42475 - RNA, 1698 nt, Artificial Sequence
  derived and/or modified CDS sequence (wt) from hemagglutinin__InfluenzaA__AGU93019
augaaggcaaaccuacugguccuguuaagugcacuugcagcugcagaugcagacacaauauguauaggcuaccaugcgaacaauucaaccgacacuguugacacaguacucgagaagaaugugacagugacacacucuguuaaccugcucgaagacagccacaacggaaaacuauguagauuaaaaggaauagccccacuacaauuggggaaauguaacaucgccggauggcucuugggaaacccagaaugcgacccacugcuuccagugagaucaugguccuacauuguagaaacaccaaacucugagaauggaauauguuauccaggagauuucaucgacuaugaggagcugagggagcaauugagcucagugucaucauucgaaagauucgaaauauuucccaaagaaagcucauggcccaaccacaacacaaacggaguaacggcagcaugcucccaugaggggaaaagcaguuuuuacagaaauuugcuauggcugacggagaaggagggcucauacccaaagcugaaaaauucuuaugugaacaaaaaagggaaagaaguccuuguacugugggguauucaucacccgccuaacaguaaggaacaacagaaucucuaucagaaugaaaaugcuuaugucucuguagugacuucaaauuauaacaggagauuuaccccggaaauagcagaaagacccaaaguaagagaucaagcugggaggaugaacuauuacuggaccuugcuaaaacccggagacacaauaauauuugaggcaaauggaaaucuaauagcaccaauguaugcuuucgcacugaguagaggcuuuggguccggcaucaucaccucaaacgcaucaaugcaugaguguaacacgaagugucaaacaccccugggagcuauaaacagcagucucccuuaccagaauauacacccagucacaauaggagagugcccaaaauacgucaggagugcuaaauugaggaugguuacaggacuaaggaacacuccguccauucaauccagaggucuauuuggagccauugccgguuuuauugaagggggauggacuggaaugauagauggaugguaugguuaucaucaucagaaugaacagggaucaggcuaugcagcggaucaaaaaagcacacaaaaugccauuaacgggauuacaaacaaggugaacacuguuaucgagaaaaugaacauucaauucacagcuguggguaaagaauucaacaaauuagaaaaaaggauggaaaauuuaaauaaaaaaguugaugauggauuucuggacauuuggacauauaaugcagaauuguuaguucuacuggaaaaugaaaggacucuggauuuccaugacucaaaugugaagaaucuguaugagaaaguaaaaagccaauuaaagaauaaugccaaagaaaucggaaauggauguuuugaguucuaccacaagugugacaaugaaugcauggaaaguguaagaaaugggacuuaugauuaucccaaauauucagaagagucaaaguugaacagggaaaagguagauggagugaaauuggaaucaauggggaucuaucagauucuggcgaucuacucaacugucgccaguucacuggugcuuuuggucucccugggggcaaucaguuucuggauguguucuaauggaucuuugcagugcagaauaugcaucuga

SEQ ID NO: 42476 - RNA, 1701 nt, Artificial Sequence
  derived and/or modified CDS sequence (wt) from hemagglutinin__InfluenzaA__AGU93031
augaaggcaauacuaguaguucugcuauauacauuugcaaccgcaaaugcagacacauuauguauagguuaucaugcgaacaauucaacagacacuguagacacaguacuagaaaagaauguaacaguaacacacucuguuaaccuucuagaagacaagcauaacgggaaacuaugcaaacugagagggguagccccauugcauuuggguaaauguaacauugcuggcuggauccugggaaauccagagugugaaucacucuccacagcaagcucaugguccuacauuguggaaacaucuaguucagacaauggaacguguuacccaggagauuucaucaauuaugaagagcuaagagagcaauugagcucagugucaucauuugaaagguuugagauauuccccaagacaaguucauggcccaaucaugacucgaacaaagguguaacggcagcauguccucaugcuggagcaaaaagcuucuacaaaaauuuaauauggcuaguuaaaaaaggaaauucauacccaaagcucagcaaauccuacauuaacgauaaagggaaagaaguccucgugcuauggggcauucaccauccaucuacuagugcugaccaacaaagucucuaucagaaugcagaugcauauguuuuuguggggacaucaaaauacagcaagaaguucaagccggaaauagcaguaagaccuaaagugagggaucaagaagggagaaugaacuauuacuggacacuaguagagccgggagacaaaauaacauucgaagcaacuggaaaucuauugguaccgagauaugcauucgcaauggaaagaaaugcuggaucugguauuaucauuucagauacaccaguccacgauugcaauacaacuugucagacacccaagggugcuauaaacaccagccucccauuucagaauauacauccgaucacaauuggaaaauguccaaaauauguaaaaagcacaaaauugagacuggccacgggauugaggaaugucccgucuauucaaucuagaggccuauuuggggccauugccgguuucauugaagggggguggacagggaugguagauggaugguacgguuaucaccaucaaaaugagcaggggucaggauaugcagccgaccugaaaagcacacagaaugccauugacaagauuacuaacaaaguaaauucuguuauugaaaagaugaauacacaguucacagcaguagguaaagaguucaaccaccuggaaaaaagaauagagaauuuaaauaaaaaaguugaugaugguuuccuggacauuuggacuuacaaugccgaacuguugguucuauuggaaaaugaaagaacuuuggacuaccacgauucaaaugugaaaaaccuauaugaaaagguaagaagccaguuaaaaaacaaugccaaggaaauuggaaauggcugcuuugaauuuuaccacaaaugcgacaacacgugcauggaaagugucaaaaaugggacuuaugacuacccaaaauacucagaggaagcaaaauuaaacagagaagaaauagaugggguaaagcuggaaucaacaaggauuuaccagauuuuggcgaucuauucaacugucgccaguucauugguacugguagucucccugggggcaaucaguuucuggaugugcucuaaugggucucuacaguguagaauauguauuuaa

SEQ ID NO: 42477 - RNA, 1701 nt, Artificial Sequence
  derived and/or modified CDS sequence (wt) from hemagglutinin__InfluenzaA__AGU93042
augaaggcaauacuaguaguucugcuauauacauuugcaaccgcaaaugcagacacauuauguauagguuaccaugcgaacaauucaacagacacuguagacacaguacuagaaaagaauguaacaguaacacacucuguuaaucuucuagaagacaagcauaacgggaaacuaugcaaacuaagagggguagccccauugcauuuggguaaauguaacauugcuggcuggauccugggaaauccagagugugaaacacucucaacagcaaacucaugguccuacauuguggaaacaucuaguucagacaauggaacguguuacccaggagauuucaucgauuaugaggagcuaagagagcaauugagcucagugucaucauuugaaagguuugagauauuccccaagacaaguucauggcccaaucaugacucgaacaaagguguaacggcagcauguccucaugcuggagcaaagggcuucuacaaaaauuuaauauggcuaguuaaaaaaggaaauucauacccaaagcucagcaaauccuacauuaaugauaaagggaaagaaguccucgugcuauggggcauucaccauccaucuacuacugcugaccaacaaagucucuaucagaaugcagauacauauguuuuuguggggacaucaagauacagcaagaaguucaagccggaaauagcaauaagacccaaagugagggaucaagaagggagaaugaacuauuacuggacacuaguagagccgggagacaaaauaacauucgaagcaacuggaaaucuagugguaccgagauaugcauucgcaauggaaagagaugcuggaucugguauuaucauuucagauacaccaguccacgauugcaauacaacuugucagacacccaagggugcuauaaacaccagccucccauuucagaauauacauccgaucacaauuggaaaauguccaaaauauguaaaaagcacaaaauugagacuggccacaggauugaggaaugucccgucuauucaaucuagaggccuauuuggggccauugccggcuucauugaagggggguggacagggaugguagauggaugguacgguuaucaccaucaaaaugagcaggggucaggauaugcagccgaccugaagagcacacagaaugccauugacaagauuacuaacaaaguaaauucuguuauugaaaaaaugaauauacaguucacagcaguagguaaagaguucaaccaccuggaaaaaagaauagagaauuuaaauaaaaaaguugaugauggguuccuggacauuuggacuuacaaugccgaacuguugguucuauuggaaaaugaaagaacuuuggacuaccacgauucaaaugugaagaacuuauaugaaaagguaagaaaccaguuaaaaaacaaugccaaggaaauuggaaauggcuguuuugaauuuuaccacaaaugcgauaacacguguauggaaagugucaaaaaugggacuuaugacuacccaaaauacucagaggaagcaaaauuaaacagagaagaaauagaugggguaaagcuggaaucaacaaggauuuaccagauuuuggcgaucuauucaacugccgccaguucauugguacugguagucucccugggggcaaucaguuuuuggaugugcucuaaugggucucuacaguguagaauauguauuuaa

SEQ ID NO: 42478 - RNA, 1701 nt, Artificial Sequence
  derived and/or modified CDS sequence (wt) from hemagglutinin__InfluenzaA__AGU93053
augaaggcaauacuaguaguucugcuauauacauuugcaaccgcaaaugcagacacauuauguauagguuaccaugcgaacaauucaacagacacuguagacacaguacuagaaaagaauguaacaguaacacacucuguuaaucuucuagaagacaagcauaacgggaaacuaugcaaacuaagagggguagccccauugcauuuggguaaauguaacauugcuggcuggauccugggaaauccagagugugaaacacucuccacagcaagcucaugguccuacauuguggaaacaucuaguucagacaauggaacguguuacccaggagauuucaucgauuaugaggagcuaagagagcaauugagcucagugucaucauuugaaagguuugagauauuccccaagacaaguucauggcccaaucaugacucgaacaaagguguaacggcagcauguccucaugcuggagcaaaaggcuucuacaaaaauuuaauauggcuaguuaaaaaaggaaauucauacccaaagcucagcaaauccuacauuaaugauaaagggaaagaaguccucgugcuauggggcauucaccauccauccaccacugcugaccaacaaagucucuaucagaaugcagauacauauguuuuuguggggacaucaagauacagcaagaaguucaagccggaaauagcaacaagacccaaagugagggaucaagaagggagaaugaacuauuacuggacacuaguagagccgggagacaaaauaacauucgaagcaacuggaaaucuagugguaccgagauaugcauucgcaauggaaagagaugcuggaucugguauuaucauuucagauacaccaguccacgauugcaauacaacuugucagacacccaagggugcuauaaacaccagccucccauuucaaaauauacauccgaucacaauuggaaaauguccaaaauauguaaaaagcacaaaauugagacuggccacaggauugaggaaugucccaucuauucaaucuagaggccuauuuggggccauugccggcuucauugaagggggguggacagggaugguagauggaugguacgguuaucaccaucaaaaugagcaggggucaggauaugcagccgaccugaagagcacacagaaugccauugacaagauuacuaacaaaguaaauucuguuauugaaaaaaugaauacacaguucacagcaguagguaaagaguucaaccaccuggaaaaaagaauagagaauuuaaauaaaaaaguugaugauggguuccuggacauuuggacuuacaaugccgaacuguugguucuauuggaaaaugaaagaacuuuggacuaccacgauucaaaugugaagaacuuauaugaaaagguaagaaaccaguuaaaaaacaaugccaaggaaauuggaaauggcugcuuugaauuuuaccacaaaugcgauaacacguguauggaaagugucaaaaaugggacuuaugacuacccaaaauacucagaggaagcaaaauuaaacagagaagaaauagaugggguaaagcuggaaucaacaaggauuuaccagauuuuggcgaucuauucaacugccgccaguucauugguacugguagucucccugggggcaaucaguuuuuggaugugcucuaaugggucucuacaguguagaauauguauuuaa

SEQ ID NO: 42479 - RNA, 1701 nt, Artificial Sequence
  derived and/or modified CDS sequence (wt) from hemagglutinin__InfluenzaA__AGV99014
augaagacuaucauugcuuugagcuacauucuaugucuaguuuucgcucaaaaacuuccuggaaaugacaauagcacggcaacgcugugccuugggcaccaugcaguaccaaacggaacgauagugaaaacaaucacgaaugaccgaauugaaguuacuaaugcuacugagcugguucagaauuccucaauaggugaaauaugcgacaguccucaucagauccuugauggagaaaacugcacacuaauagaugcucuauugggagacccucagugugauggcuuccaaaauaagaaaugggaccuuuuuguugaacgaagcaaagccuacagcaacuguuacccuuaugaugugccggauuaugccucccuuaggucacuaguugccucauccggcacacuggaguuuaacaaugaaagcuucaauuggacuggagucacucaaaacggaacaaguucugcuugcauaaggagaucuaauaauaguuucuuuaguagauuaaauugguugacccacucaaacuucaaauacccagcauugaacgugacuaugccaaacaaugaacaauuugacaaauuguacauuugggggguucaccacccggguacggacaaggaccaaaucuuccuguaugcucaaucaucaggaagaaucacaguaucuaccaaaagaagccaacaagcuguaaucccgaauaucggaucuagacccagaauaaggaauaucccuagcagaauaagcaucuauuggacaauaguaaaaccgggagacauacuuuugauuaacagcacagggaaucuaauugcuccuagggguuacuucaaaauacgaagugggaaaagcucaauaaugagaucagaugcacccauuggcaaaugcaagucugaaugcaucacuccaaacggaagcauucccaaugacaaaccauuccaaaauguaaacaggaucacauacggggccugucccagauauguuaagcaaagcacucugaaauuggcaacaggaaugcgaaauguaccagagaaacaaacuagaggcauauuuggugcaauagcggguuucauagaaaaugguugggagggaaugauggaugguugguacgguuucaggcaccaaaauucugagggaagaggacaagcagcagaucucaaaagcacucaagcagcaaucgaucaaaucaaugggaagcugaaucgauugaucgggaaaaccaacgagaaauuccaucagauugaaaaagaauuuucagaaguagaagggagaauucaggaccuugagaaauauguugaggacacuaaaauagaucucuggucauacaacgcggagcuucuuguugcccuggagaaccaacauacaauugaucuaacugacucagaaaugaacaaacuguuugaaaaaacaaagaagcaacugagggaaaaugcugaggauaugggcaaugguuguuucaaaauauaccacaaaugugacaaugccugcauaggaucaaucagaaauggaacuuaugaccacgauguauacagagaugaagcauuaaacaaccgguuccagaucaagggaguugagcugaagucaggguacaaagauuggauccuauggauuuccuuugccauaucauguuuuuugcuuuguguugcuuuguugggguucaucaugugggccugccaaaagggcaacauuaggugcaacauuugcauuuga

SEQ ID NO: 42480 - RNA, 1701 nt, Artificial Sequence
  derived and/or modified CDS sequence (wt) from hemagglutinin__InfluenzaA__AGV99037
augaagacuaucauugcuuugagcuacauucuaugucugguuuucgcucaaaaacuuccuggaaaugacaauagcacggcaacgcugugccuugggcaccaugcaguaccaaacggaacgauagugaaaacaaucacgaaugaccgaauugaaguuacuaaugcuacugagcugguucagaauuccucaauaggugaaauaugcgacaguccucaucagauccuugauggagaaaacugcacacuaauagaugcucuauugggagacccucagugugauggcuuucaaaauaagaaaugggaccuuuuuguugaacgaagcaaagccuacagcaacuguuacccuuaugaugugccggauuaugccucccuuaggucacuaguugccucauccggcacacuggaguuuaacaaugaaagcuucaauugggcuggagucacucaaaacggaacaaguucugcuugcauaaggggaucuaauaguaguuucuuuaguagauuaaauugguugacccacuuaaacuucaaauacccagcauugaacgugacuaugccaaacaaugaacaauuugacaaauuguacauuugggggguucaccacccggguacggacaaggaccaaaucuuccuguaugcucaaucaucaggaagaaucacaguaucuaccaaaagaagccaacaagcuguaaucccgaauaucggaucuagacccagaauaaggaauaucccuagcagaauaagcaucuauuggacaauaguaaaaccgggagacauacuuuugauuaacagcacagggaaucuaauugcuccuagggguuacuucaaaauacgaagugggaaaagcucaauaaugagaucagaugcacccauuggcaaaugcaagucugaaugcaucacuccaaauggaagcauucccaaugacaaaccauuccaaaauguaaacaggaucacauacggggccugucccagauauguuaagcaaagcacucugaaauuggcaacaggaaugcgaaauguaccagagaaacaaaccagaggcauauuuggcgcaauagcggguuucauagaaaaugguugggagggaaugguggaugguugguacgguuucaggcaucaaaauucugagggaagaggacaagcagcagaucucaaaagcacucaagcagcaaucgaucaaaucaaugggaagcugaaucgauugaucgggaaaaccaacgagaaauuccaucagauugaaaaagaauucucagaaguagaagggagaauucaggaccuugagaaauauguugaggacacaaaaauagaucucuggucauacaacgcggagcuucuuguugcccuggagaaccaacauacaauugaucuaacugacucagaaaugaacaaacuguuugaaaaaacaaagaagcaacugagggaaaaugcugaggauaugggcaaugguuguuucaaaauauaccacaaaugugacaaugccugcauaggaucaaucagaaauggaacuuaugaccacgauguauacagggaugaagcauuaaacaaccgguuccagaucaagggaguugagcugaagucaggguacaaagauuggauccuauggauuuccuuugccauaucauguuuuuugcuuuguguugcuuuguugggguucaucaugugggccugccaaaagggcaacauuaggugcaacauuugcauuuga

SEQ ID NO: 42481 - RNA, 1701 nt, Artificial Sequence
  derived and/or modified CDS sequence (wt) from hemagglutinin__InfluenzaA__AGV99049
augaagacuaucauugcuuugagcuacauucuaugucugguuuucgcucaaaaacuuccuggaaaugacaauagcacggcaacgcugugccuugggcaccaugcaguaccaaacggaacgguagugaaaacaaucacgaaugaccgaauugaaguuacuaaugcuacugagcugguucagaauuccucaauaggugaaauaugcgacaguccucaucagauccuugauggagaaaacugcacacuaauagaugcucuauugggagauccccagugugauggcuuccaaaauaagaaaugggaccuuuuuguugaacgaagcaaagccuacagcaacuguuacccuuaugaugugccggauuaugccucccuuaggucacuaguugccucauccggcacacuggaguuuaacaaugaaagcuucaauuggacuggagucacucaaaacggaacaaguucugcuugcauaaggagaucuaauaauaguuucuuuaguagauuaaauuggcugacccacuuaaacuucaaauacccagcauugaacgugacuaugccaaacaaugaacaauuugacaaauuguacauuugggggguucaccacccggguacggacaaggaccaaaucuuccuguaugcucaaucaucaggaagaaucacaguaucuaccaaaagaagccaacaagcuguaaucccgaauaucggaucuagacccagaauaaggaauaucccuagcaggauaagcaucuauuggacaauaguaaaaccgggagacauacuuuugauuaacagcacagggaaucuaauugcuccuagggguuacuucaaaauacgaagugggaaaagcucaauaaugagaucagaugcacccauuggcaaaugcaagucugaaugcaucacuccaaauggaagcauucccaaugacaaaccauuccaaaauguaaacaggaucacauacggggccugucccagauauguuaagcaaagcacucugaaauuggcaacaggaaugcgaaauguaccagagaaacaaacuagaggcauauuuggcgcaauagcggguuucauagaaaaugguugggagggaaugguggaugguugguacgguuucaggcaucaaaauucugagggaagaggacaagcagcagaucucaaaagcacucaagcagcaaucgaucaaaucaaugggaagcugaaucgauugaucgggaaaaccaacgggaaauuccaucagauugaaaaagaauucucagaaguagaagggagaauucaggaccuugagaaauauguugaggacacuaaaauagaucucuggucauacaaugcggagcuucuuguugcccuggagaaccaacauacaauugaucuaacugacucagaaaugaacaaacuguuugaaaaaacaaagaagcaacugagggaaaaugcugaggauaugggcaaugguuguuucaaaauauaccacaaaugugacaaugccugcauaggaucaaucagaaauggaacuuaugaccacgauguauacagagaugaagcauuaaacaaccgguuccagauuaagggaguugagcugaagucaggguacaaagauuggauccuauggauuuccuuugccauaucauguuuuuugcuuuguguuguuuuguugggguucaucaugugggccugccaaaagggcaacauuaggugcaacauuugcauuuga

SEQ ID NO: 42482 - RNA, 1701 nt, Artificial Sequence
  derived and/or modified CDS sequence (wt) from hemagglutinin__InfluenzaA__AGV99073
augaagacuaucauugcuuugagcuacauucuaugucugguuuucgcucaaaaaauuccuggaaaugacaauagcacggcaacgcugugccuugggcaccaugcaguaccaaacggaacgauagugaaaacaaucacgaaugaccgaauugaaguuacuaaugcuacugagcugguucagaauuccucaauaggugaaauaugcgacaguccucaucagauccuugauggagaaaacuguacacuaauagaugcucuauugggagacccucagugugauggcuuucaaaauaagaaaugggaccuuuuuguugaacgaagcaaagccuacagcaacuguuacccuuaugaugugccggauuaugccucccuuaggucacuaguugccucauccggcacacuggaguuuaacaaugaaagcuucaauuggacuggagucacucaaaacggaacaaguucugcuugcauaaggggaucuaauaguaguuucuuuaguagauuaaauugguugacccacuuaaacuucaaauacccagcauugaacgugacuaugccaaacaaugaacaauuugacaaauuguacauuugggggguucaccacccggguacggacaaggaccaaaucuuccuguaugcucaaucaucaggaagaaucacaguaucuaccaaaagaagccaacaagcuguaaucccgaauaucggaucuagacccagaauaaggaauaucccuagcagaauaagcaucuauuggacaauaguaaaaccaggagacauacuuuugauuaacagcacagggaaucuaauugcuccuagggguuacuucaaaauaagaagugggaaaagcucaauaaugagaucagaugcacccauuggcaaaugcaagucugaaugcaucacuccaaauggaagcauuccaaaugacaaaccauuccaaaauguaaacaggaucacauacggggccugucccagauauguuaagcaaagcacucugaaauuggcaacaggaaugcgaaauguaccagagaaacaaacuagaggcauauuuggcgcaauagcggguuucauagaaaaugguugggagggaaugguggaugguugguacgguuucaggcaucaaaauucugagggaagaggacaagcagcagaucucaaaagcacucaagcagcaaucgaucaaaucaaugggaagcugaaucgauugaucgggaaaaccaacgagaaauuccaucagauugaaaaagaauucucagaaguagaagggagaauucaggaccuugagaaauauguugaggacacuaaaauagaucucuggucauacaacgcggagcuucuuguugcccuggagaaccaacauacaauugaucuaacugacucagaaaugaacaaacuguuugaaaaaacaaagaagcaacugagggaaaaugcugaggauaugggcaaugguuguuucaaaauauaccacaaaugugacaaugccugcauaggaucaaucagaaauggaacuuaugaccacgauguauacagggaugaagcauuaaacaaccgguuccagaucaagggaguugagcugaagccaggguacaaagauuggauccuauggauuuccuuugccauaucauguuuuuugcuuuguguugcuuuguugggguucaucaugugggccugccaaaagggcaacauuaggugcaacauuugcauuuga

SEQ ID NO: 42483 - RNA, 1701 nt, Artificial Sequence
  derived and/or modified CDS sequence (wt) from hemagglutinin__InfluenzaA__AGV99085
augaagacuaucauugcuuugagcuacauucuaugucugguuuucgcucaaaaacuuccuggaaaugacaauagcacggcaacgcugugccuugggcaccaugcaguaccaaacggaacgauagugaaaacaaucacgaaugaccgaauugaaguuacuaaugcuacugagcugguucagaauuccucaauaggugaaauaugcgacaguccucaucagauccuugauggagaaaauugcacacuaauagaugcucuauugggagacccucagugugauggcuuucaaaauaagaaaugggaccuuuuuguugaacgaagcaaagccuacagcaacuguuacccuuaugaugugccggauuaugccucccuuaggucacuaguugccucauccggcacacuggaguuuaacaaugaaagcuucaauuggacuggagucacucaaaacggaacaaguucugcuugcauaaggagaucuaauaguaguuucuuuaguagauuaaauugguugacccacuuaaacuucaaauacccagcauugaacgugacuaugccaaacaaugaacaauuugacaaauuguacauuuggggaguucaccacccggguacggacaaggaccaaaucuuccuguaugcucaaucaucaggaagaaucacaguaucuaccaaaagaagccaacaagcuguaaucccaaauaucggaucuagacccagaauaaggaauaucccuagcagaauaagcaucuauuggacaauaguaaaaccgggagacauacuuuugauuaacagcacagggaaucuaauugcuccuagggguuacuucaaaauacgaagugggaaaagcucaauaaugagaucagaugcacccauuggcaaaugcaagucugaaugcaucacuccaaauggaagcauucccaaugacaaaccauuccaaaauguaaacaggaucacauacggggccugucccagauauguuaagcaaagcacucugaaauuggcaacaggaaugcgaaauguaccagagaaacaaacuagaggcauauuuggcgcaauagcggguuucauagaaaaugguugggagggaaugguggaugguugguacgguuucagacaucaaaauucugagggaagaggacaagcagcagaucucaaaagcacucaagcagcaaucgaucaaaucaaugggaagcugaaucgauugaucgggaaaaccaacgagaaauuccaucagauugaaaaagaauucucagaaguagaagggagaauucaggaccuugagaaauauguugaggacacuaaaauagaucucuggucauacaacgcggagcuucuuguugcccuggagaaucaacauacaauugaucuaacugacucagaaaugaacaaacuguuugaaaaaacaaagaagcaacugagggaaaaugcugaggauaugggcaaugguuguuucaaaauauaccacaaaugugacaaugccugcauaggaucaaucagaaauggaacuuaugaccacaauguguacagggaugaagcauuaaacaaccgguuccagaucaagggaguugagcuuaagucaggguacaaagauuggauccuauggauuuccuuugccauaucauguuuuuugcuuuguguugcuuuguugggguucaucaugugggccugccaaaagggcaacauuaggugcaacauuugcauuuga

SEQ ID NO: 42484 - RNA, 1701 nt, Artificial Sequence
  derived and/or modified CDS sequence (wt) from hemagglutinin__InfluenzaA__AGV99097
augaagacuaucauugcuuugagcuacauucuaugucugguuuucgcucaaaaacuuccuggaaaugacaauagcacggcaacgcugugccuugggcaccaugcaguaccaaacggaacgauagugaaaacaaucacgaaugaccgaauugaaguuacuaaugcuacugagcugguucagaauuccucaauaggugaaauaugcgacaguccucaucagauccuugauggagaaaacuguacacuaauagaugcucuauugggagacccucagugugauggcuuucaaaauaagaaaugggaccuuuuuguugaacgaagcaaagccuacagcaacuguuacccuuaugaugugccggauuaugccucccuuaggucacuaguugccucauccggcacacuggaguuuaacaaugaaagcuucaauuggacuggagucacucaaaacggaacaaguucugcuugcauaaggagaucuaauaguaguuucuuuaguagauuaaauugguugacccacuuaaacuucaaauacccagcauugaacgugacuaugccaaacaaugaacaauuugacaaauuguacauuugggggguucaccacccgggcacggacaaggaccaaaucuuccuguaugcucaaucaucaggaagaaucacaguaucuaccaaaagaagccaacaagcuguaaucccgaauaucgggucuagacccagaauaaggaauaucccuagcagaauaagcaucuauuggacaauaguaaaaccaggagacauacuuuugauuaacagcacagggaaucuaauugcuccuagggguuacuucaaaauacgaagugggaaaagcucaauaaugagaucagaugcacccauuggcaaaugcaagucugaaugcaucacuccaaauggaagcauuccaaaugacaaaccauuccaaaauguaaacaggaucacauacggggccugucccagauauguuaagcaaagcacucugaaauuggcaacaggaaugcgaaauguaccagagaaacaaacuagaggcauauuuggcgcaauagcggguuucauagaaaaugguugggagggaaugguggaugguugguacgguuucaggcaucaaaauucugagggaagaggacaagcagcagaucucaaaagcacucaagcagcaaucgaucaaaucaaugggaagcugaaucgauugaucgggaaaaccaacgagaaauuccaucagauugaaaaagaauucucagaaguagaagggagaauucaggaccuugagaaauauguugaggacacuaaaauagaucucuggucauacaacgcggagauucuuguugcccuggagaaccaacauacaauugaucuaacugacucagaaaugaacaaacuguuugaaaaaacaaagaagcaacugagggaaaaugcugaggauaugggcaaugguuguuucaaaauauaccacaaaugugacaaugccugcauaggaucaaucagaaauggaacuuaugaccacgauguauacagggaugaagcauuaaacaaccgguuccagaucaagggaguugagcugaagucaggguacaaagauuggauccuauggauuuccuuugccauaucauguuuuuugcuuuguguugcuuuguugggguucaucaugugggccugccaaaagggcaacauuaggugcaacauuugcauuuga

SEQ ID NO: 42485 - RNA, 1701 nt, Artificial Sequence
  derived and/or modified CDS sequence (wt) from hemagglutinin__InfluenzaA__AGV99121
augaagacuaucauugcuuugagcuacauucuaugucugguuuucgcucaaaaacuuccuggaaaugacaauagcacggcaacgcugugccuugggcaccaugcaguaccaaacggaacgauagugaaaacaaucacgaaugaccgaauugaagucacuaaugcuacugagcugguucagaauuccucaauaggugaaauaugcgacaguccucaucagauccuugauggagaaaacugcacacuaauagaugcucuauugggagacccucagugugaugacuuucaaaauaagaaaugggaccuuuuuguugaacgaagcaaagccuacagcaacuguuacccuuaugaugugccggauuaugccucccuuaggucacuaguugccucauccggcacacuggaguuuaacaaugaaagcuucaauugggcuggggucacucaaaacggaacaaguucugcuugcauaaggggaucuaauaguaguuucuuuaguagauuaaauugguugacccacuuaaacuucaaauacccagcauugaacgugacuaugccaaacaaugaacaauuugacaaauuguacauuugggggguucaccacccggguacggacaaggaccaaaucuuccuguaugcucaaucaucaggaagaaucacaguaucuaccaaaagaagccaacaagcuguaaucccgaauaucggaucuagacccagaauaaggaauaucccuagcagaauaagcaucuauuggacaauaguaaaaccgggagacauacuuuugauuaacagcacagggaaucuaauugcuccuagggguuacuucaaaauacgaagugggaaaagcucaauaaugagaucagaugcacccauuggcaaaugcaagucugaaugcaucacuccaaauggaagcauucccaaugacaaaccauuccaaaauguaaacaggaucacauacggggccugucccagauauguuaagcaaagcacucugaaauuggcaacaggaaugcgaaauguaccagagaaacaaaccagaggcauauuuggcgcaauagcggguuucauagaaaaugguugggagggaaugguggaugguugguacgguuucaggcaucaaaauucugagggaagaggacaagcagcagaucucaaaagcacucaagcagcaaucgaucaaaucaaugggaagcugaaucgauugaucgggaaaaccaacgagaaauuccaucagauugaaaaagaauucucagaaguagaagggagaauucaggaccuugagaaauauguugaggacacaaaaauagaucucuggucauacaacgcggagcuucuuguugcccuggagaaccaacauacaauugaucuaacugacucagaaaugaacaaacuguuugaaaaaacaaagaagcaacugagggaaaaugcugaggauaugggcaaugguuguuucaaaauauaccacaaaugugacaaugccugcauaggaucaaucagaaauggaacuuaugaccacgauguauacagggaugaagcauuaaacaaccgguuccagaucaagggaguugagcugaagucaggguacaaagauuggauccuauggauuuccuuugccauaucauguuuuuugcuuuguguugcuuuguugggguucaucaugugggccugccaaaagggcaacauuaggugcaacauuugcauuuga

SEQ ID NO: 42486 - RNA, 1701 nt, Artificial Sequence; identical to SEQ ID NO: 42485
  derived and/or modified CDS sequence (wt) from hemagglutinin__InfluenzaA__AGV99133

SEQ ID NO: 42487 - RNA, 1701 nt, Artificial Sequence; identical to SEQ ID NO: 42479
  derived and/or modified CDS sequence (wt) from hemagglutinin__InfluenzaA__AGV99145

SEQ ID NO: 42488 - RNA, 1701 nt, Artificial Sequence
  derived and/or modified CDS sequence (wt) from hemagglutinin__InfluenzaA__AGV99157
augaagacuaucauugcuuugagcuacauucuaugucuaguuuucgcucaaaaacuuccuggaaaugacaauagcacggcaacgcugugccuugggcaccaugcaguaccaaacggaacgauagugaaaacaaucacgaaugaccgaauugaaguuacuaaugcuacugagcugguucagaauuccucaauaggugaaauaugcgacaguccucaucagauccuugauggagaaaacugcacacuaauagaugcucuauugggagacccucagugugauggcuuccaaaauaagaaaugggaccuuuuuauugaacgaagcaaagccuacagcaacuguuacccuuaugaugugccggauuaugccucccuuaggucacuaguugccucauccggcacacuggaguuuaacaaugaaagcuucaauuggacuggagucacucaaaacggaacaaguucugcuugcauaaggagaucuaauaauaguuucuuuaguagauuaaauugguugacccacucaaacuucaaauacccagcauugaacgugacuaugccaaacaaugaacaauuugacaaauuguacauuugggggguucaccacccggguacggacaaggaccaaaucuuccuguaugcucaaucaucaggaagaaucacaguaucuaccaaaagaagccaacaagcuguaaucccgaauaucggaucuagacccagaauaaggaauaucccuagcagaauaagcaucuauuggacaauaguaaaaccgggagacauacuuuugauuaacagcacagggaaucuaauugcuccuagggguuacuucaaaauacgaagugggaaaagcucaauaaugagaucagauacacccauuggcaaaugcaagucugaaugcaucacuccaaacggaagcauucccaaugacaaaccauuccaaaauguaaacaggaucacauacggggccugucccagauauguuaagcaaagcacucugaaauuggcaacaggaaugcgaaauguaccagagaaacaaacuagaggcauauuuggugcaauagcggguuucauagaaaaugguugggagggaaugauggaugguugguacgguuucaggcaccaaaauucugagggaagaggacaagcagcagaucucaaaagcacucaagcagcaaucgaucaaaucaaugggaagcugaaucgauugaucgggaaaaccaacgagaaauuccaucagauugaaaaagaauuuucagaaguagaagggagaauucaggaccuugagaaauauguugaggacacuaaaauagaucucuggucauacaacgcggagcuucuuguugcccuggagaaccaacauacaauugaucuaacugacucagaaaugaacaaacuguuugaaaaaacaaagaagcaacugagggaaaaugcugaggauaugggcaaugguuguuucaaaauauaccacaaaugugacaaugccugcauaggaucaaucagaaauggaacuuaugaccacgauguauacagagaugaagcauuaaacaaccgguuccagaucaagggaguugagcugaagucaggguacaaagauuggauccuauggauuuccuuugccauaucauguuuuuugcuuuguguugcuuuguugggguucaucaugugggccugccaaaagggcaacauuaggugcaacauuugcauuuga

SEQ ID NO: 42489 - RNA, 1701 nt, Artificial Sequence
  derived and/or modified CDS sequence (wt) from hemagglutinin__InfluenzaA__AGV99169
augaagacuaucauugcuuugagcuacauucuaugucugguuuucgcucaaaaacuuccuggaaaugacaauagcacggcaacgcugugccuugggcaccaugcaguaccaaacggaacgauagugaaaacaaucacgaaugaccgaauugaagucacuaaugcuacugagcugguucagaauuccucaauaggugaaauaugcgacaguccucaucagauccuugauggagaaaacugcacacuaauagaugcucuauugggagacccucagugugauggcuuucaaaauaagaaaugggaccuuuuuguugaacgaagcaaagccuacagcaacuguuacccuuaugaugugccggauuaugccucccuuaggucacuaguugccucauccggcacacuggaguuuaacaaugaaagcuucaauugggcuggggucacucaaaacggaacaaguucugcuugcauaaggggaucuaauaguaguuucuuuaguagauuaaauugguugacccacuuaaacuucaaauacccagcauugaacgugacuaugccaaacaaugaacaauuugacaaauuguacauuugggggguucaccacccggguacggacaaggaccaaaucuuccuguaugcucaaucaucaggaagaaucacaguaucuaccaaaagaagccaacaagcuguaaucccgaauaucggaucuagacccagaauaaggaauaucccuagcagaauaagcaucuauuggacaauaguaaaaccgggagacauacuuuugauuaacagcacagggaaucuaauugcuccuagggguuacuucaaaauacgaagugggaaaagcucaauaaugagaucagaugcacccauuggcaaaugcaagucugaaugcaucacuccaaauggaagcauucccaaugacaaaccauuccaaaauguaaacaggaucacauacggggccugucccagauauguuaagcaaagcacucugaaauuggcaacaggaaugcgaaauguaccagagaaacaaaccagaggcauauuuggcgcaauagcggguuucauagaaaaugguugggagggaaugguggaugguugguacgguuucaggcaucaaaauucugagggaagaggacaagcagcagaucucaaaagcacucaagcagcaaucgaucaaaucaaugggaagcugaaucgauugaucgggaaaaccaacgagaaauuccaucagauugaaaaagaauucucagaaguagaagggagaauucaggaccuugagaaauauguugaggacacaaaaauagaucucuggucauacaacgcggagcuucuuguugcccuggagaaccaacauacaauugaucuaacugacucagaaaugaacaaacuguuugaaaaaacaaagaagcaacugagggaaaaugcugaggauaugggcaaugguuguuucaaaauauaccacaaaugugacaaugccugcauaggaucaaucagaaauggaacuuaugaccacgauguauacagggaugaagcauuaaacaaccgguuccagaucaagggaguugagcugaagucaggguacaaagauuggauccuauggauuuccuuugccauaucauguuuuuugcuuuguguugcuuuguugggguucaucaugugggccugccaaaagggcaacauuaggugcaacauuugcauuuga

SEQ ID NO: 42490 - RNA, 1701 nt, Artificial Sequence
  derived and/or modified CDS sequence (wt) from hemagglutinin__InfluenzaA__AGV99181
augaagacuaucauugcuuugagcuacauucuaugucuaguuuucgcucaaaaacuuccuggaaaugacaauagcacggcaacgcugugccuugggcaccaugcaguaccaaacggaacgauagugaaaacaaucacgaaugaccgaauugaaguuacuaaugcuacugagcugguucagaauuccucaauaggugaaauaugcgacaguccucaucagauccuugauggagaaaacugcacacuaauagaugcucuauugggagacccucagugugauggcuuccaaaauaagaaaugggaccuuuuuguugaacgaagcaaagccuacagcaacuguuacccuuaugaugugccggauuaugccucccuuaggucacuaguugccucauccggcacacuggaguuuaacaaugaaagcuucaauuggacuggagucacucaaaacggaacaaguucugcuugcauaaggagaucuaauaauaguuucuuuaguagauuaaauugguugacccacucaaacuucaaauacccagcauugaacgugacuaugccaaacaaugaacaauuugacaaauuguacauuugggggguucaccacccggguacggacaaggaccaaaucuuccuguaugcucaaucaucaggaagaaucacaguaucuaccaaaagaagccaacaagcuguaaucccgaauaucggaucuagacccagaauaaggaauaucccuagcagaauaagcaucuauuggacaauaguaaaaccgggagacauacuuuugauuaacagcacagggaaucuaauugcuccuagggguuacuucaaaauacgaagugggaaaagcucaauaaugagaucagaugcacccauuggcaaaugcaagucugaaugcaucacuccaaauggaagcauucccaaugacaaaccauuccaaaauguaaacaggaucacauacggggccugucccagauauguuaagcaaagcacucugaaauuggcaacaggaaugcgaaauguaccagagaaacaaacuagaggcauauuuggugcaauagcggguuucauagaaaaugguugggagggaaugauggaugguugguacgguuucaggcaccaaaauucugagggaagaggacaagcagcagaucucaaaagcacucaagcagcaaucgaucaaaucaaugggaagcugaaucgauugaucgggaaaaccaacgagaaauuccaucagauugaaaaagaauuuucagaaguagaagggagaauucaggaccuugagaaauauguugaggacacuaaaauagaucucuggucauacaacgcggagcuucuuguugcccuggagaaccaacauacaauugaucuaacugacucagaaaugaacaaacuguuugaaaaaacaaagaagcaacugagggaaaaugcugaggauaugggcaaugguuguuucaaaauauaccacaaaugugacaaugccugcauaggaucaaucagaaauggaacuuaugaccacgauguauacagagaugaagcauuaaacaaccgguuccagaucaagggaguugagcugaagucaggguacaaagauuggauccuauggauuuccuuugccauaucauguuuuuugcuuuguguugcuuuguugggguucaucaugugggccugccaaaagggcaacauuaggugcaacauuugcauuuga

SEQ ID NO: 42491 - RNA, 1701 nt, Artificial Sequence
  derived and/or modified CDS sequence (wt) from hemagglutinin__InfluenzaA__AGV99193
augaagacuaucauugcuuugagcuacauucuaugucuaguuuucgcucaaaaacuuccuggaaaugacaauagcacggcaacgcugugccuugggcaccaugcaguaccaaacggaacgauagugaaaacaaucacgaaugaccgaauugaaguuacuaaugcuacugagcugguucagaauuccucaauaggugaaauaugcgacaguccucaucagauccuugauggagaaaacugcacacuaauagaugcucuauugggagacccucagugugauggcuuccaaaauaagaaaugggaccuuuuuguugaacgaagcaaagccuacagcaacuguuacccuuaugaugugccggauuaugccucccuuaggucacuaguugccucauccggcacacuggaguuuaacaaugaaagcuucaauuggacuggagucacucaaaacggaacaaguucugcuugcauaaggagaucuaauaauaguuucuuuaguagauuaaauugguugacccacucaaacuucaaauacccagcauugaacgugacuaugccaaacaaugaacaauuugacaaauuguacauuugggggguucaccacccggguacggacaaggaccaaaucuuccuguaugcucaaucaucaggaagaaucacaguaucuaccaaaagaagccaacaagcuguaaucccgaauaucggaucuagacccagaauaaggaauaucccuagcagaauaagcaucuauuggacaauaguaaaaccgggagacauacuuuugauuaacagcacagggaaucuaauugcuccuagggguuacuucaaaauacgaagugggaaaagcucaauaaugagaucagauacacccauuggcaaaugcaagucugaaugcaucacuccaaacggaagcauucccaaugacaaaccauuccaaaauguaaacaggaucacauacggggccugucccagauauguuaagcaaagcacucugaaauuggcaacaggaaugcgaaauguaccagagaaacaaacuagaggcauauuuggugcaauagcggguuucauagaaaaugguugggagggaaugauggaugguugguacgguuucaggcaccaaaauucugagggaagaggacaagcagcagaucucaaaagcacucaagcagcaaucgaucaaaucaaugggaagcugaaucgauugaucgggaaaaccaacgagaaauuccaucagauugaaaaagaauuuucagaaguagaagggagaauucaggaccuugagaaauauguugaggacacuaaaauagaucucuggucauacaacgcggagcuucuuguugcccuggagaaccaacauacaauugaucuaacugacucagaaaugaacaaacuguuugaaaaaacaaagaagcaacugagggaaaaugcugaggauaugggcaaugguuguuucaaaauauaccacaaaugugacaaugccugcauaggaucaaucagaaauggaacuuaugaccacgauguauacagagaugaagcauuaaacaaccgguuccagaucaagggaguugagcugaagucaggguacaaagauuggauccuauggauuuccuuugccauaucauguuuuuugcuuuguguugcuuuguugggguucaucaugugggccugccaaaagggcaacauuaggugcaacauuugcauuuga

SEQ ID NO: 42492 - RNA, 1701 nt, Artificial Sequence
  derived and/or modified CDS sequence (wt) from hemagglutinin__InfluenzaA__AGV99956
augaagacuaucauugcuuugagcuacauucuaugucugguuuucgcucaaaaacuuccuggaaaugacaauagcacggcaacgcugugccuugggcaccaugcaguaccaaacggaacgauagugaaaacaaucacgaaugaccgaauugaaguuacuaaugcuacugagcugguucagaauuccucaauaggugaaauaugcgacaguccucaucagauccuugauggagaaaauugcacacuaauagaugcucuauugggagacccucagugugauggcuuucaaaauaagaaaugggaccuuuuuguugaacgaagcaaagccuacagcaacuguuacccuuaugaugugccggauuaugccucccuuaggucacuaguugccucauccggcacacuggaguuuaacaaugaaagcuucaauugggcuggagucacucaaaacggaacaaguucugcuugcauaaggggaucuaauaguaguuucuuuaguagauuaaauugguugacccacuuaaacuucaaauacccagcauugaacgugacuaugccaaacaaugaacaauuugacaaauuguacauuugggggguucaccacccggguacggacaaggaccaaaucuuccuguaugcucaaucaucaggaagaaucacaguaucuaccaaaagaagccaacaagcuguaaucccgaauaucggaucuagacccagaauaaggaauaucccuagcagaauaagcaucuauuggacaauaguaaaaccgggagacauacuuuugauuaacagcacagggaaucuaauugcuccuagggguuacuucaaaauacgaagugggaaaagcucaauaaugagaucagaugcacccauuggcaaaugcaagucugaaugcaucacuccaaauggaagcauucccaaugacaaaccauuccaaaauguaaacaggaucacauacggggccugucccagauauguuaagcaaagcacucugaaauuggcaacaggaaugcgaaauguaccagagaaacaaacuagaggcauauuuggcgcaauagcggguuucauagaaaaugguugggagggaaugauggaugguugguacgguuucaggcaucaaaauucugagggaagaggacaagcagcagaucucaaaagcacucaagcagcaaucgaucaaaucaaugggaagcugaaucgauugaucgggaaaaccaacgagaaauuccaucagauugaaaaagaauucucagaaguagaagggagaauucaggaccuugagaaauauguugaggacacaaaaauagaucucuggucauacaacgcggagcuucuuguugcccuggagaaccaacauacaauugaucuaacugacucagaaaugaacaaacuguuugaaaaaacaaagaagcaacugagggaaaaugcugaggauaugggcaaugguuguuucaaaauauaccacaaaugugacaaugccugcauaggaucaaucagaaauggaacuuaugaccacgauguauacagggaugaagcauuaaacaaccgguuccagaucaagggaguugagcugaagucaggguacaaagauuggauccuauggauuuccuuugccauaucauguuuuuugcuuuguguugcuuuguugggguucaucaugugggccugccaaaagggcaacauuaggugcaacauuugcauuuga

SEQ ID NO: 42493 - RNA, 1701 nt, Artificial Sequence
  derived and/or modified CDS sequence (wt) from hemagglutinin__InfluenzaA__AGV99986
augaagacuaucauugcuuugagcuacauucuaugucuaguuuucgcucaaaaacuuccuggaaaugacaauagcacggcaacgcugugccuugggcaccaugcaguaccaaacggaacgauagugaaaacaaucacgaaugaccgaauugaaguuacuaaugcuacugagcugguucagaauuccucaauaggugaaauaugcgacaguccucaucagauccuugauggagaaaacugcacacuaauagaugcucuauugggagacccucagugugauggcuuccaaaauaagaaaugggaccuuuuuguugaacgaagcaaagccuacagcaacuguuacccuuaugaugugccggauuaugccucccuuaggucacuaauugccucauccggcacacuggaguuuaacaaugaaagcuucaauuggacuggagucacucaaaacggaacaaguucugcuugcauaaggagaucuaauaauaguuucuuuaguagauuaaauugguugacccacucaaacuucaaauacccagcauugaacgugacuaugccaaacaaugaacaauuugacaaauuguacauuugggggguucaccacccggguacggacaaggaccaaaucuuccuguaugcucaaucaucaggaagaaucacaguaucuaccaaaagaagccaacaagcuguaaucccgaauaucggaucuagacccagaauaaggaauaucccuagcagaauaagcaucuauuggacaauaguaaaaccgggagacauacuuuugauuaacagcacagggaaucuaauugcuccuagggguuacuucaaaauacgaagugggaaaagcucaauaaugagaucagaugcacccauuggcaaaugcaagucugaaugcaucacuccaaacggaagcauucccaaugacaaaccauuccaaaauguaaacaggaucacauacggggccugucccagauauguuaagcaaagcacucugaaauuggcaacaggaaugcgaaauguaccagagaaacaaacuagaggcauauuuggugcaauagcggguuucauagaaaaugguugggagggaaugauggaugguugguacgguuucaggcaccaaaauucugagggaagaggacaagcagcagaucucaaaagcacucaagcagcaaucgaucaaaucaaugggaagcugaaucgauugaucgggaaaaccaacgagaaauuccaucagauugaaaaagaauuuucagaaguagaagggagaauucaggaccuugagaaauauguugaggacacuaaaauagaucucuggucauacaacgcggagcuucuuguugcccuggagaaccaacauacaauugaucuaacugacucagaaaugaacaaacuguuugaaaaaacaaagaagcaacugagggaaaaugcugaggauaugggcaaugguuguuucaaaauauaccacaaaugugacaaugccugcauaggaucaaucagaaauggaacuuaugaccacgauguauacagagaugaagcauuaaacaaccgguuccagaucaagggaguugagcugaagucaggguacaaagauuggauccuauggauuuccuuugccauaucauguuuuuugcuuuguguugcuuuguugggguucaucaugugggccugccaaaagggcaacauuaggugcaacauuugcauuuga

SEQ ID NO: 42494 - RNA, 1701 nt, Artificial Sequence
  derived and/or modified CDS sequence (wt) from hemagglutinin__InfluenzaA__AGW00065
augaagacuaucauugcuuugagcuacauucuaugucugguuuucgcucaaaaacuuccuggaaaugacaauagcacggcaacgcugugccuugggcaccaugcaguaccaaacggaacgauagugaaaacaaucacgaaugaccgaauugaaguuacuaaugcuacugagcugguucagaauuccucaauaggugaaauaugcgacaguccucaucagauccuugauggagaaaacuguacacuaauagaugcucuauugggagacccucagugugauggcuuucaaaauaagaaaugggaccuuuuuguugaacgaagcaaagccuacagcaacuguuacccuuaugaugugccggauuauaccucccuuaggucacuaguugccucauccggcacacuggaguuuaacaaugaaagcuucaauuggacuggagucacucaaaacggaacaaguucugcuugcauaaggagaucuaauaguaguuucuuuaguagauuaaauugguugacccacuuaaacuucaaauacccagcauugaacgugacuaugccaaacaaugaacaauuugacaaauuguacauuugggggguucaccacccggguacggacaaggaccaaaucuuccuguaugcucaaucaucaggaagaaucacaguaucuaccaaaagaagccaacaagcuguaaucccgaauaucggaucuagacccagaauaaggaauaucccuagcagaauaagcaucuauuggacaauaguaaaaccaggagacauacuuuugauuaacagcacagggaaucuaauugcuccuagggguuacuucaaaauacgaagugggaaaagcucaauaaugagaucagaugcacccauuggcaaaugcaagucugaaugcaucacuccaaauggaagcauuccaaaugacaaaccauuccaaaauguaaacaggaucacauacggggccugucccagauauguuaagcaaagcacucugaaauuggcaacaggaaugcgaaauguaccagagaaacaaacuagaggcauauuuggcgcaauagcggguuucauagaaaaugguugggagggaaugguggaugguugguacgguuucaggcaucaaaauucugagggaagaggacaagcagcagaucucaaaagcacucaagcagcaaucgaucaaaucaaugggaagcugaaucgauugaucgggaaaaccaacgagaaauuccaucagauugaaaaagaauucucagaaguagaagggagaauucaggaccuugagaaauauguugaggacacuaaaauagaucucuggucauacaacgcggagcuucuuguugcccuggagaaccaacauacaauugaucuaacugacucagaaaugaacaaacuguuugaaaaaacaaagaagcaacugagggaaaaugcugaggauaugggcaaugguuguuucaaaauauaccacaaaugugacaaugccugcauaggaucaaucagaaauggaacuuaugaccacgauguauacagggaugaagcauuaaacaaccgguuccagaucaagggaguugagcugaagucaggguacaaagauuggauccuauggauuuccuuugccauaucauguuuuuugcuuuguguugcuuuguugggguucaucaugugggccugccaaaagggcaacauuaggugcaacauuugcauuuga

SEQ ID NO: 42495 - RNA, 1701 nt, Artificial Sequence; identical to SEQ ID NO: 42059
  derived and/or modified CDS sequence (wt) from hemagglutinin__InfluenzaA__AGW00077

SEQ ID NO: 42496 - RNA, 1701 nt, Artificial Sequence
  derived and/or modified CDS sequence (wt) from hemagglutinin__InfluenzaA__AGW00089
augaagacuaucauugcuuugagcuacauucuaugucugguuuucgcucaaaaacuuccuggaaaugacaauagcacggcaacgcugugccuugggcaccaugcaguaccaaacggaacgauagugaaaacaaucacgaaugaccgaauugaaguuacuaaugcuacugagcugguucagaauuccucaauaggugaaauaugcgacaguccucaucagauccuugauggagaaaauugcacacuaauagaugcucuauugggagacccucagugugauggcuuucaaaauaagaaaugggaccuuuuuguugaacgaagcaaagccuacagcaacuguuacccuuaugaugugccggauuaugccucccuuaggucacuaguugccucauccggcacacuggaguuuaacaaugaaagcuucaauuggacuggagucacucaaaacggaacaaguucugcuugcauaaggagaucuaauaguaguuucuuuaguagauuaaauugguugacccacuuaaacuucaaauacccagcauugaacgugacuaugccaaacaaugaacaauuugacaaauuguacauuuggggaguucaccacccggguacggacaaggaccaaaucuuccuguaugcucaaucaucaggaagaaucacaguaucuaccaaaagaagccaacaagcuguaaucccaaauaucggaucuagacccagaauaaggaauaucccuagcagaauaagcaucuauuggacaauaguaaaaccgggagacauacuuuugauuaacagcacagggaaucuaauugcuccuagggguuacuucaaaauacgaagugggaaaagcucaauaaugagaucagaugcacccauuggcaaaugcaagucugaaugcaucacuccaaauggaagcauucccaaugacaaaccauuccaaaauguaaacaggaucacauacggugccugucccagauauguuaagcaaagcacucugaaauuggcaacaggaaugcgaaauguaccagagaaacaaacuagaggcauauuuggcgcaauagcggguuucauagaaaaugguugggagggaaugguggaugguugguacgguuucaggcaucaaaauucugagggaagaggacaagcagcagaucucaaaagcacucaagcagcaaucgaucaaaucaaugggaagcugaaucgauugaucgggaaaaccaacgagaaauuccaucagauugaaaaagaauucucagaaguagaagggagaauucaggaccuugagaaauauguugaggacacuaaaauagaucucuggucauacaacgcggagcuucuuguugcccuggagaaucaacauacaauugaucuaacugacucagaaaugaacaaacuguuugaaaaaacaaagaagcaacugagggaaaaugcugaggauaugggcaaugguuguuucaaaauauaccacaaaugugacaaugccugcauaggaucaaucagaaauggaacuuaugaccacaauguguacagggaugaagcauuaaacaaccgguuccagaucaagggaguugagcuuaagucaggguacaaagauuggauccuauggauuuccuuugccauaucauguuuuuugcuuuguguugcuuuguugggguucaucaugugggccugccaaaagggcaacauuaggugcaacauuugcauuuga

SEQ ID NO: 42497 - RNA, 1701 nt, Artificial Sequence; identical to SEQ ID NO: 42489
  derived and/or modified CDS sequence (wt) from hemagglutinin__InfluenzaA__AGW00101

SEQ ID NO: 42498 - RNA, 1701 nt, Artificial Sequence
  derived and/or modified CDS sequence (wt) from hemagglutinin__InfluenzaA__AGW00113
augaagacuaucauugcuuugagcuacauucuaugucugguuuucgcucaaaaacuuccuggaaaugacaauagcacggcaacgcugugccuugggcaccaugcaguaccaaacggaacgauagugaaaacaaucacgaaugaccgaauugaaguuacuaaugcuacugagcugguucagaauuccucaauaggugaaauaugcgacaguccucaucagauccuugauggagaaaacugcacacuaauagaugcucuauugggagacccucagugugauggcuuucaaaauaagaaaugggaccuuuuuguugaacgaagcaaagccuacagcaacuguuacccuuaugaugugccggauuaugccucccuuaggucacuaguugccucauccggcacacuggaguuuaacaaugaaagcuucaauugggcuggagucacucaaaacggaacaaguucugcuugcauaaggggaucuaauaguaguuucuuuaguagauuaaauugguugacccacuuaaacuucaaauacccagcauugaacgugacuaugccaaacaaugagcaauuugacaaauuguacauuugggggguucaccacccggguacggacaaggaccaaaccuuccuguaugcucaaucaucaggaagaaucacaguaucuaccaaaagaagccaacaagcuguaaucccgaauaucggaucuagacccagaauaaggaauaucccuagcagaauaagcaucuauuggacaauaguaaaaccgggagacauacuuuugauuaacagcacagggaaucuaauugcuccuagggguuacuucaaaauacgaagugggaaaagcucaauaaugagaucagaugcacccauuggcaaaugcaaaucugaauguaucacuccaaauggaagcauucccaaugacaaaccauuccaaaauguaaacaggaucacauacggggccugucccagauauguuaagcaaagcacucugaaauuggcaacaggaaugcgaaauguaccagagaaacaaacuagaggcauauuuggcgcaauagcggguuucauagaaaaugguugggagggaaugguggaugguugguacgguuucaggcaucaaaauucugagggaagaggacaagcagcagaucucaaaagcacucaagcagcaaucgaucaaaucaaugggaagcugaaucgauugaucgggaaaaccaacgagaaauuccaucagauugaaaaagaauucucagaaguagaagggagaauucaggaccuugagaaauauguugaggacacaaaaauagaucucuggucauacaacgcggagcuucuuguugcccuggagaaccaacauacaauugaucuaacugacucagaaaugaacaaacuguuugaaaaaacaaagaagcaacugagggaaaaugcugaggauaugggcaaugguuguuucaaaauauaccacaaaugugacaaugccugcauaggaucaaucagaaauggaacuuaugaccacgauguauacagggaugaagcauuaaacaaccgguuccagaucaagggaguugagcugaagucaggguacaaagauuggauccuauggauuuccuuugccauaucauguuuuuugcuuuguguugcuuuguugggguucaucaugugggccugccaaaagggcaacauuaggugcaacauuugcauuuga

SEQ ID NO: 42499 - RNA, 1701 nt, Artificial Sequence; identical to SEQ ID NO: 42059
  derived and/or modified CDS sequence (wt) from hemagglutinin__InfluenzaA__AGW00125

SEQ ID NO: 42500 - RNA, 1701 nt, Artificial Sequence
  derived and/or modified CDS sequence (wt) from hemagglutinin__InfluenzaA__AGW00137
augaagacuaucauugcuuugagcuacauucuaugucugguuuucgcucaaaaacuuccuggaaaugacaauagcacggcaacgcugugccuugggcaccaugcaguaccaaacggaacgauagugaaaacaaucacgaaugaccgaauugaagucacuaaugcuacugagcugguucagaauuccucaauaggugaaauaugcgacaguccucaucagauccuugauggagaaaacugcacacuaauagaugcucuauugggagacccucagugugauggcuuucaaaauaagaaaugggaccuuuuuguugaacgaagcaaagccuacagcaacuguuacccuuaugaugugccggauuaugccucccuuaggucacuaguugccucauccggcacacuggaguuuaacaaugaaagcuucaauugggcuggggucacucaaaacggaacaaguucugcuugcauaaggggaucuaauaguaguuucuuuaguagauuaaauugguugacccacuuaaacuucaaauacccagcauugaacgugacuaugccaaacaaugaacaauuugacaaauuguacauuugggggguucaccacccggguacggacaaggaccaaaucuuccuguaugcucaaucaucaggaagaaucacaguaucuaccaagagaagccaacaagcuguaaucccgaauaucggaucuagacccagaauaaggaauaucccuagcagaauaagcaucuauuggacaauaguaaaaccgggagacauacuuuugauuaacagcacagggaaucuaauugcuccuagggguuacuucaaaauacgaagugggaaaagcucaauaaugagaucagaugcacccauuggcaaaugcaagucugaaugcaucacuccaaauggaagcauucccaaugacaaaccauuccaaaauguaaacaggaucacauacggggccugucccagauauguuaagcaaagcacucugaaauuggcaacaggaaugcgaaauguaccagagaaacaaaccagaggcauauuuggcgcaauagcggguuucauagaaaaugguugggagggaaugguggaugguugguacgguuucaggcaucaaaauucugagggaagaggacaagcagcagaucucaaaagcacucaagcagcaaucgaucaaaucaaugggaagcugaaucgauugaucgggaaaaccaacgagaaauuccaucagauugaaaaagaauucucagaaguagaagggagaauucaggaccuugagaaauauguugaggacacaaaaauagaucucuggucauacaacgcggagcuucuuguugcccuggagaaccaacauacaauugaucuaacugacucagaaaugaacaaacuguuugaaaaaacaaagaagcaacugagggaaaaugcugaggauaugggcaaugguuguuucaaaauauaccacaaaugugacaaugccugcauaggaucaaucagaaauggaacuuaugaccacgauguauacagggaugaagcauuaaacaaccgguuccagaucaagggaguugagcugaagucaggguacaaagauuggauccuauggauuuccuuugccauaucauguuuuuugcuuuguguugcuuuguugggguucaucaugugggccugccaaaagggcaacauuaggugcaacauuugcauuuga

SEQ ID NO: 42501 - RNA, 1701 nt, Artificial Sequence
  derived and/or modified CDS sequence (wt) from hemagglutinin__InfluenzaA__AGW00149
augaagacuaucauugcuuugagcuacauucuaugucugguuuucgcucaaaaacuuccuggaaaugacaauagcacggcaacgcugugccuugggcaccaugcaguaccaaacggaacgauagugaaaacaaucacgaaugaccgaauugaaguuacuaaugcuacugagcugguucagaauuccucaauaggugaaauaugcgacaguccucaucagauccuugauggagaaaacugcacacuaauagaugcucuauugggggacccucagugugauggcuuucaaaauaagaaaugggaccuuuuuguugaacgaagcaaagccuacagcaacuguuacccuuaugaugugccggauuaugccucccuuaggucacuaguugccucauccggcacacuggaguuuaacaaugaaagcuucaauugggcuggagucacucaaaacggaacaaguucugcuugcauaaggggaucuaauaguaguuucuuuaguagauuaaauugguugacccacuuaaacuucaaauacccagcauugaacgugacuaugccaaacaaugaacaauuugacaaauuguacauuugggggguucaccacccagguacagacaaggaccaaaucuuccuguaugcucaaucaucaggaagaaucacaguaucuaccaaaagaagccaacaagcuguaaucccgaauaucggaucuagacccagaauaaggaauaucccuagcagaauaagcaucuauuggacaauaguaaaaccgggagacauacuuuugauuaacagcacagggaaucuaauugcuccuagggguuacuucaaaauacgaagugggaaaagcucaauaaugagaucagaugcacccauuggcaaaugcaagucugaaugcaucacuccaaauggaagcauucccaaugacaaaccauuccaaaauguaaacaggaucacauacggggccugucccagauauguuaagcaaagcacucugaaauuggcaacaggaaugcgaaauguaccagagaaacaaacuagaggcauauuuggcgcaauagcggguuucauagaaaaugguugggagggaaugguggaugguugguacgguuucaggcaucaaaauucugagggaagaggacaagcagcagaucucaaaagcacucaagcagcaaucgaucaaaucaaugggaagcugaaucgauugaucgggaaaaccaacgagaaauuccaucagauugaaaaagaauucucagaaguagaagggagaauucaggaccuugagaaauauguugaggacacaaaaauagaucucuggucauacaacgcggagcuucuuguugcccuggagaaccaacauacaauugaucuaacugacucagaaaugaacaagcuguuugaaaaaacaaagaagcaacugagggaaaaugcugaggauaugggcaaugguugcuucaaaauauaccacaaaugugacaaugccugcauaggaucaaucagaaauggaacuuaugaccacgauguauacagggaugaagcauuaaacaaccgguuccagaucaagggaguugagcugaagucaggguacaaagauuggauccuauggauuuccuuugccauaucauguuuuuugcuuuguguugcuuuguugggguucaucaugugggccugccaaaagggcaacauuaggugcaacauuugcauuuga

SEQ ID NO: 42502 - RNA, 1701 nt, Artificial Sequence; identical to SEQ ID NO: 42059
  derived and/or modified CDS sequence (wt) from hemagglutinin__InfluenzaA__AGW00161

SEQ ID NO: 42503 - RNA, 1701 nt, Artificial Sequence; identical to SEQ ID NO: 42489
  derived and/or modified CDS sequence (wt) from hemagglutinin__InfluenzaA__AGW00173

SEQ ID NO: 42504 - RNA, 1701 nt, Artificial Sequence
  derived and/or modified CDS sequence (wt) from hemagglutinin__InfluenzaA__AGW00185
augaagacuaucauugcuuugagcuacauucuaugucuaguuuucgcucaaaaacuuccuggaaaugacaauagcacggcaacgcugugccuugggcaccaugcaguaccaaacggaacgauagugaaaacaaucacgaaugaccgaauugaaguuacuaaugcuacugagcugguucagaauuccucaauaggugaaauaugcgacaguccucaucagauccuugauggagaaaacugcacacuaauagaugcucuauugggagacccucagugugauggcuuccaaaauaagaaaugggaccuuuuuauugaacgaagcaaagccuacagcaacuguuacccuuaugaugugccggauuaugccucccuuaggucacuaguugccucauccggcacacuggaguuuaacaaugaaagcuucaauuggacuggagucacucaaaacggaacaaguucugcuugcauaaggagaucuaauaauaguuucuuuaguagauuaaauugguugacccacucaaacuucaaauacccagcauugaacgugacuaugccaaacaaugaacaauuugacaaauuguacauuugggggguucaccacccggguacggacaaggaccaaaucuuccuguaugcucaaucaucaggaagaaucacaguaucuaccaaaagaagccaacaagcuguaaucccgaauaucggaucuagacccagaauaaggaauaucccuagcagaauaagcaucuauuggacaauaguaaaaccgggagacauacuuuugauuaacagcacagggaaucuaauugcuccuagggguuacuucaaaauacgaagugggaaaagcucaauaaugagaucagaugcacccauuggcaaaugcaagucugaaugcaucacuccaaacggaagcauucccaaugacaaaccauuccaaaauguaaacaggaucacauacggggccugucccagauauguuaagcaaagcacucugaaauuggcaacaggaaugcgaaauguaccagagaaacaaacuagaggcauauuuggugcaauagcggguuucauagaaaaugguugggagggaaugauggaugguugguacgguuucaggcaccaaaauucugagggaagaggacaagcagcagaucucaaaagcacucaagcagcaaucgaucaaaucaaugggaagcugaaucgauugaucgggaaaaccaacgagaaauuccaucagauugaaaaagaauuuucagaaguagaagggagaauucaggaccuugagaaauauguugaggacacuaaaauagaucucuggucauacaacgcggagcuucuuguugcccuggagaaccaacauacaauugaucuaacugacucagaaaugaacaaacuguuugaaaaaacaaagaagcaacugagggaaaaugcugaggauaugggcaaugguuguuucaaaauauaccacaaaugugacaaugccugcauaggaucaaucagaaauggaacuuaugaccacgauguauacagagaugaagcauuaaacaaccgguuccagaucaagggaguugagcugaagucaggguacaaagauuggauccuauggauuuccuuugccauaucauguuuuuugcuuuguguugcuuuguugggguucaucaugugggccugccaaaagggcaacauuaggugcaacauuugcauuuga

SEQ ID NO: 42505 - RNA, 1701 nt, Artificial Sequence
  derived and/or modified CDS sequence (wt) from hemagglutinin__InfluenzaA__AGW00709
augaagacuaucauugcuuugagcuacauucuaugucugguuuucgcucaaaaacuuccuggaaaugacaauagcacggcaacgcugugccuugggcaccaugcaguaccaaacggaacgauagugaaaacaaucacgaaugaccgaauugaagucacuaaugcuacugagcugguucagaauuccucaauaggugaaauaugcgacaguccucaucagauccuugauggagaaaacugcacacuaauagaugcucuauugggagacccucagugugauggcuuucaaaauaagaaaugggaccuuuuuguugaacgaagcaaagccuacagcaacuguuacccuuaugaugugccggauuaugccucccuuaggucacuaguugccucauccggcacacuggaguuuaacaaugaaagcuucaauugggcuggggucacucaaaacggaacaaguucugcuugcauaaggggaucuaauaguaguuucuuuaguagauuaaauugguugacccacuuaaacuucaaauacccagcauugaacgugacuaugccaaacaaugaacaauuugacaaauuguacauuugggggguucaccacccggguacggacaaggaccaaaucuuccuguaugcucaaucaucaggaagaaucacaguaucuaccaaaagaagccaacaagcuguaaucccgaauaucggaucuagacccagaauaaggaauaucccuagcagaauaagcaucuauuggacaauaguaaaaccgggagacauacuuuugauuaacagcacagggaaucuaauugcuccuagggguuacuucaaaauacgaagugggaaaagcucaauaaugagaucagaugcacccauuggcaaaugcaagucugaaugcaucacuccaaauggaagcauucccaaugacaaaccauuccaaaauguaaacaggaucacauacggggccugucccagauauguuaagcaaagcacucugaaauuggcaacaggaaugcgaaauguaccagagaaacaaaccagaggcauauuuggcgcaauagcggguuucauagaaaaugguugggagggaaugguggaugguugguacgguuucaggcaucaaaauucugagggaagaggacaagcagcagaucucaaaagcacucaagcagcaaucgaucaaaucaaugggaagcugaaucgauugaucgggaaaaccaacgagaaauuccaucagauugaaaaagaauucucagaaguagaagggagaauucaggaccuugagaaauauguugaggacacaaaaauagaucucuggucauacaacgcggagcuucuuguugcccuggagaaccaacauacaauugaucuaacugacucagaaaugaacaaacuguuugaaaaaacaaagaagcaacugagggaaaaugcugaggauaugggcaaugguuguuucaaaauauaccacaaaugugacaaugccugcauaggaucaaucagaaauggaacuuaugaccacgauguauacagggaugaagcauuaaacaaccgguuccagaucaagggaguugagcugaagucaggguacaaagauuggauccuauggauuuccuuugccauaucauguuuuuugcuuuguguugcuuuguugggguucaucaugugggccugccaaaaaggcaacauuaggugcaacauuugcauuuga

SEQ ID NO: 42506 - RNA, 1701 nt, Artificial Sequence; identical to SEQ ID NO: 42489
  derived and/or modified CDS sequence (wt) from hemagglutinin__InfluenzaA__AGW00721

SEQ ID NO: 42507 - RNA, 1701 nt, Artificial Sequence; identical to SEQ ID NO: 42489
  derived and/or modified CDS sequence (wt) from hemagglutinin__InfluenzaA__AGW00733

SEQ ID NO: 42508 - RNA, 1701 nt, Artificial Sequence
  derived and/or modified CDS sequence (wt) from hemagglutinin__InfluenzaA__AGW00745
augaagacuaucauugcuuugagcuacauucuaugucugguuuucgcucaaaaacuuccuggaaaugacaauagcacggcaacgcugugccuugggcaccaugcaguaccaaacggaacgauagugaaaacaaucacgaaugaccgaauugaagucacuaaugcuacugagcugguucagaauuccucaauaggugaaauaugcgacaguccucaucagauccuugauggagaaaacugcacacuaauagaugcucuauugggagacccucagugugauggcuuucaaaauaagaaaugggaccuuuuuguugaacgaagcaaagccuacagcaacuguuacccuuaugaugugccggauuaugccucccuuaggucacuaguugccucauccggcacacuggaguuuaacaaugaaagcuucaauugggcuggggucacucaaaacggaacaaguucugcuugcauaaggggaucuaauaguaguuucuuuaguagauuaaauugguugacccacuuaaacuucaaauacccagcauugaaugugacuaugccaaacaaugaacaauuugacaaauuguacauuugggggguucaccacccggguacggacaaggaccaaaucuuccuguaugcucaaucaucaggaagaaucacaguaucuaccaaaagaagccaacaagcuguaaucccgaauaucggaucuagacccagaauaaggaauaucccuagcagaauaagcaucuauuggacaauaguaaaaccgggagacauacuuuugauuaacagcacagggaaucuaauugcuccuagggguuacuucaaaauacgaagugggaaaagcucaauaaugagaucagaugcacccauuggcaaaugcaagucugaaugcaucacuccaaauggaagcauucccaaugacaaaccauuccaaaauguaaacaggaucacauacggggccugucccagauauguuaagcaaagcacucugaaauuggcaacaggaaugcgaaauguaccagagaaacaaaccagaggcauauuuggcgcaauagcggguuucauagaaaaugguugggagggaaugguggaugguugguacgguuucaggcaucaaaauucugaaggaagaggacaagcagcagaucucaaaagcacucaagcagcaaucgaucaaaucaaugggaagcugaaucgauugaucgggaaaaccaacgagaaauuccaucagauugaaaaagaauucucagaaguagaagggagaauucaggaccuugagaaauauguugaggacacaaaaauagaucucuggucauacaacgcggagcuucuuguugcccuggagaaccaacauacaauugaucuaacugacucagaaaugaacaaacuguuugaaaaaacaaagaagcaacugagggaaaaugcugaggauaugggcaaugguuguuucaaaauauaccacaaaugugacaaugccugcauaggaucaaucagaaauggaacuuaugaccacgauguauacagggaugaagcauuaaacaaccgguuccagaucaagggaguugagcugaagucaggguacaaagauuggauccuauggauuuccuuugccauaucauguuuuuugcuuuguguugcuuuguugggguucaucaugugggccugccaaaagggcaacauuaggugcaacauuugcauuuga

SEQ ID NO: 42509 - RNA, 1701 nt, Artificial Sequence
  derived and/or modified CDS sequence (wt) from hemagglutinin__InfluenzaA__AGW00757
augaagacuaucauugcuuugagcuacauucuaugucugguuuucgcucaaaaacuuccuggaaaugacaauagcacggcaacgcugugccuugggcaccaugcaguaccaaacggaacgauagugaaaacaaucacgaaugaccgaauugaagucacuaaugcuacugagcugguucagaauuccucaauaggugaaauaugcgacaguccucaucagauccuugauggagaaaacugcacacuaauagaugcucuauugggagacccucagugugauggcuuucaaaauaagaaaugggaccuuuuuguugaacgaagcaaagccuacagcaacuguuacccuuaugaugugccggauuaugccucccuuaggucacuaguugccucauccggcacacuggaguuuaacaaugaaagcuucaauugggcuggggucacucaaaacggaacaaguucugcuugcauaaggggaucuaauaguaguuucuuuaguagauuaaauugguugacccacuuaaacuucaaauacccagcauugaacgugacuaugccaaacaaugaacaauuugacaaauuguacauuugggggguucaccacccggguacggacaaggaccaaaucuuccuguaugcucaaucaucaggaagaaucacaguaucuaccaaaagaagccaacaagcuguaaucccgaauaucggaucuagacccagaauaaggaauaucccuagcagaauaagcaucuauuggacaauaguaaaaccgggagacauacuuuugauuaacagcacagggaaucuaauugcuccuagggguuacuucaaaauacgaagugggaaaagcucaauaaugagaucagaugcacccauuggcaaaugcaagucugaaugcaucacuccaaauggaagcauucccaaugacaaaccauuccaaaauuuaaacaggaucacauacggggccugucccagauauguuaagcaaagcacucugaaauuggcaacaggaaugcgaaauguaccagagaaacaaaccagaggcauauuuggcgcaauagcggguuucauagaaaaugguugggagggaaugguggaugguugguacgguuucaggcaucaaaauucugagggaagaggacaagcagcagaucucaaaagcacucaagcagcaaucgaucaaaucaaugggaagcugaaucgauugaucgggaaaaccaacgagaaauuccaucagauugaaaaagaauucucagaaguagaagggagaauucaggaccuugagaaauauguugaggacacaaaaauagaucucuggucauacaacgcggagcuucuuguugcccuggagaaccaacauacaauugaucuaacugacucagaaaugaacaaacuguuugaaaaaacaaagaagcaacugagggaaaaugcugaggauaugggcaaugguuguuucaaaauauaccacaaaugugacaaugccugcauaggaucaaucagaaauggaacuuaugaccacgauguauacagggaugaagcauuaaacaaccgguuccagaucaagggaguugagcugaagucaggguacaaagauuggauccuauggauuuccuuugccauaucauguuuuuugcuuuguguugcuuuguugggguucaucaugugggccugccaaaagggcaacauuaggugcaacauuugcauuuga

SEQ ID NO: 42510 - RNA, 1701 nt, Artificial Sequence
  derived and/or modified CDS sequence (wt) from hemagglutinin__InfluenzaA__AGW00769
augaagacuaucauugcuuugagcuacauucuaugucugguuuucgcucaaaaacuuccuggaaaugacaauagcacggcaacgcugugccuugggcaccaugcaguaccaaacggaacgauagugaaaacaaucacgaaugaccaaauugaaguuacuaaugcuacugagcugguucagaauuccucaauaggugaaauaugcgacaguccucaucagauccuugauggagaaaacugcacacuaauagaugcucuauugggagacccucagugugauggcuuucaaaauaagaaaugggaccuuuuuguugaacgaagcaaagccuacagcaacuguuacccuuaugaugugccggauuaugccucccuuaggucacuaguugccucauccggcacacuggaguuuaacaaugaaagcuucaauugggcuggagucacucaaaacggaacaaguucugcuugcauaaggggaucuaauaguagcuucuuuaguagauuaaauugguugacccacuuaaacuucaaguacccagcauugaacgugacuaugccaaacaaugaacaauuugacaaauuguacauuugggggguucaccacccggguacggacaaggaccaaaucuuccuguaugcucaaucaucaggaagaaucacaguaucuaccaaaagaagccaacaagcuguaaucccgaauaucggaucuagacccagaauaaggaauaucccuagcagaauaagcaucuauuggacaauaguaaaaccgggagacauacuuuugauuaacagcacagggaaucuaauugcuccuagggguuacuucaaaauacgaagugggaaaagcucaauaaugagaucagaugcacccauuggcaaaugcaagucugaaugcaucacuccaaauggaagcauucccaaugacaaaccauuccaaaauguaaacaggaucacauacggggccugucccagauauguuaagcaaagcacucugaaauuggcaacaggaaugcgaaauguaccagagaaacaaacuagaggcauauuuggcgcaauagcggguuucauagaaaaugguugggagggaaugguggaugguugguacgguuucaggcaucaaaauucugagggaagaggacaagcagcagaucucaaaagcacucaagcagcaaucgaucaaaucaaugggaagcugaaucgauugaucgggaaaaccaacgagaaauuccaucagauugagaaagaauucucagaaguagaagggagaauucaggaccuugagaaauauguugaggacacaaaaauagaucucuggucauacaacgcagagcuucuuguugcccuggagaaccaacauacaauugaucuaacugacucagaaaugaacaaacuguuugaaaaaacaaagaagcaacugagggaaaaugcugaggauaugggcaaugguuguuucaaaauauaccacaaaugugacaaugccugcauaggaucaaucagaaauggaacuuaugaccacgauguauacagggaugaagcauuaaacaaccgguuccagaucaagggaguugagcugaagucaggguacaaagauuggauccuauggauuuccuuugccauaucauguuuuuugcuuuguguugcuuuguugggguucaucaugugggccugccaaaagggcaacauuaggugcaacauuugcauuuga

SEQ ID NO: 42511 - RNA, 1701 nt, Artificial Sequence
  derived and/or modified CDS sequence (wt) from hemagglutinin__InfluenzaA__AGW00781
augaagacuaucauugcuuugagcuacauucuaugucugguuuucgcucaaaaacuuccuggaaaugacaauagcacggcaacgcugugccuugggcaccaugcaguaccaaacggaacgauagugaaaacaaucacgaaugaccgaauugaaguuacuaaugcuacugagcugguucagaauuccucaauaggugaaauaugcgacaguccucaucagauccuugauggagaaaacuguacacuaauagaugcucuauugggagacccucagugugauggcuuucaaaauaagaaaugggaccuuuuuguugaacgaagcaaagccuacagcaacuguuacccuuaugaugugccggauuaugccucccuuaggucacuaguugccucauccggcacacuggaguuuaacaaugaaagcuucaauuggacuggagucacucaaaacggaacaaguucugcuugcauaaggagaucuaauaguaguuucuuuaguagauuaaauugguugacccacuuaaacuucaaauacccagcauugaacgugacuaugccaaacaaugaacaauuugacaaauuguacauuugggggguucaccacccgggcacggacaaggaccaaaucuuccuguaugcucaaucaucaggaagaaucacaguaucuaccaaaagaagccaacaagcuguaaucccgaauauugggucuagacccagaauaaggaauaucccuagcagaauaagcaucuauuggacaauaguaaaaccaggagacauacuuuugauuaacagcacagggaaucuaauugcuccuagggguuacuucaaaauacgaagugggaaaagcucaauaaugagaucagaugcacccauuggcaaaugcaagucugaaugcaucacuccaaauggaagcauuccaaaugacaaaccauuccaaaauguaaacaggaucacauacggggccugucccagauauguuaagcaaagcacucugaaauuggcaacaggaaugcgaaauguaccagagaaacaaacuagaggcauauuuggcgcaauagcggguuucauagaaaaugguugggagggaaugguggaugguugguacgguuucaggcaucaaaauucugagggaagaggacaagcagcagaucucaaaagcacucaagcagcaaucgaucaaaucaaugggaagcugaaucgauugaucgggaaaaccaacgagaaauuccaucagauugaaaaagaauucucagaaguagaagggagaauucaggaccuugagaaauauguugaggacacuaaaauagaucucuggucauacaacgcggagcuucuuguugcccuggagaaccaacauacaauugaucuaacugacucagaaaugaacaaacuguuugaaaaaacaaagaagcaacugagggaaaaugcugaggauaugggcaaugguuguuucaaaauauaccacaaaugugacaaugccugcauaggaucaaucagaaauggaacuuaugaccacgauguauacagggaugaagcauuaaacaaccgguuccagaucaagggaguugagcugaagucaggguacaaagauuggauccuauggauuuccuuugccauaucauguuuuuugcuuuguguugcuuuguugggguucaucaugugggccugccaaaagggcaacauuaggugcaacauuugcauuuga

SEQ ID NO: 42512 - RNA, 1701 nt, Artificial Sequence; identical to SEQ ID NO: 42494
  derived and/or modified CDS sequence (wt) from hemagglutinin__InfluenzaA__AGW00793

SEQ ID NO: 42513 - RNA, 1701 nt, Artificial Sequence
  derived and/or modified CDS sequence (wt) from hemagglutinin__InfluenzaA__AGW00805
augaagacuaucauugcuuugagcuacauucuaugucugguuuucgcucaaaaacuuccuggaaaugacaauagcacggcaacgcugugccuugggcaccaugcaguaccaaacggaacgauagugaaaacaaucacgaaugaccgaauugaaguuacuaaugcuacugagcugguucagaauuccucaauaggugaaauaugcgacaguccucaucagauccuugauggagaaaacugcacacuaauagaugcucuauugggagacccucagugugauggcuuucaaaauaagaaaugggaccuuuuuguugaacgaagcaaagccuacagcaacuguuacccuuaugaugugccggauuaugccucccuuaggucacuaguugccucauccggcacacuggaguuuaacaaugaaagcuucaauugggcuggagucacucaaaacggaacaaguucugcuugcauaaggggaucuaauaguaguuucuuuaguagauuaaauugguugacccacuuaaacuucaaauacccagcauugaacgugacuaugccaaacaaugagcaauuugacaaauuguacauuugggggguucaccacccggguacggacaaggaccaaaucuuccuguaugcucaaucaucaggaagaaucacaguaucuaccaaaagaagccaacaagcuguaaucccgaauaucggaucuagacccagaauaaggaauaucccuagcagaauaagcaucuauuggacaauaguaaaaccgggagacauacuuuugauuaacagcacagggaaucuaauugcuccuagggguuacuucaaaauacgaagugggaaaagcucaauaaugagaucagaugcacccauuggcaaaugcaaaucugaauguaucacuccaaauggaagcauucccaaugacaaaccauuccaaaauguaaacaggaucacauacggggccugucccagauauguuaagcaaagcacucugaaauuggcaacaggaaugcgaaauguaccagagaaacaaacuagaggcauauuuggcgcaauagcggguuucauagaaaaugguugggagggaaugguggaugguugguacgguuucaggcaucaaaauucugagggaagaggacaagcagcagaucucaaaagcacucaagcagcaaucgaucaaaucaaugggaagcugaaucgauugaucgggaaaaccaacgagaaauuccaucagauugaaaaagaauucucagaaguagaagggagaauucaggaccuugagaaauauguugaggacacaaaaauagaucucuggucauacaacgcggagcuucuuguugcccuggagaaccaacauacaauugaucuaacugacucagaaaugaacaaauuguuugaaaaaacaaagaagcaacugagggaaaaugcugaggauaugggcaaugguuguuucaaaauauaccacaaaugugacaaugccugcauaggaucaaucagaaauggaacuuaugaccacgauguauacagggaugaagcauuaaacaaccgguuccagaucaagggaguugagcugaagucaggguacaaagauuggauccuauggauuuccuuugccauaucauguuuuuugcuuuguguugcuuuguugggguucaucaugugggccugccaaaagggcaacauuaggugcaacauuugcauuuga

SEQ ID NO: 42514 - RNA, 1701 nt, Artificial Sequence; identical to SEQ ID NO: 42100
  derived and/or modified CDS sequence (wt) from hemagglutinin__InfluenzaA__AGW00817

SEQ ID NO: 42515 - RNA, 1701 nt, Artificial Sequence; identical to SEQ ID NO: 42493
  derived and/or modified CDS sequence (wt) from hemagglutinin__InfluenzaA__AGW00829

SEQ ID NO: 42516 - RNA, 1701 nt, Artificial Sequence
  derived and/or modified CDS sequence (wt) from hemagglutinin__InfluenzaA__AGW00841
augaagacuaucauugcuuugagcuacauucuaugucugguuuucgcucaaaaacuuccuggaaaugacaauagcacggcaacgcugugccuugggcaccaugcaguaccaaacggaacgauagugaaaacaaucacgaauggccgaauugaagucacuaaugcuacugagcugguucagaauuccucaauaggugaaauaugcgacaguccucaucagauccuugauggagaaaacugcacacuaauagaugcucuauugggagacccucagugugauggcuuucaaaauaagaaaugggaccuuuuuguugaacgaagcaaagccuacagcaacuguuacccuuaugaugugccggauuaugccucccuuaggucacuaguugccucauccggcacacuggaguuuaacaaugaaagcuucaauugggcuggggucacucaaaacggaacaaguucugcuugcauaaggggaucuaauaguaguuucuuuaguagauuaaauugguugacccacuuaaacuucaaauacccagcauugaacgugacuaugccaaacaaugaacaauuugacaaauuguacauuugggggguucaccacccggguacggacaaggaccaaaucuuccuguaugcucaaucaucaggaagaaucacaguaucuaccaaaagaagccaacaagcuguaaucccgaauaucggaucuagacccagaauaaggaauaucccuagcagaauaagcaucuauuggacaauaguaaaaccgggagacauacuuuugauuaacagcacagggaaucuaauugcuccuagggguuacuucaaaauacgaagugggaaaagcucaauaaugagaucagaugcacccauuggcaaaugcaagucugaaugcaucacuccaaauggaagcauucccaaugacaaaccauuccaaaauguaaacaggaucacauacggggccugucccagauauguuaagcaaagcacucugaaauuggcaacaggaaugcgaaauguaccagagaaacaaaccagaggcauauuuggcgcaauagcggguuucauagaaaaugguugggagggaaugguggaugguugguacgguuucaggcaucaaaauucugagggaagaggacaagcagcagaucucaaaagcacucaagcagcaaucgaucaaaucaaugggaagcugaaucgauugaucgggaaaaccaacgagaaauuccaucagauugaaaaagaauucucagaaguagaagggagaauucaggaccuugagaaauauguugaggacacaaaaauagaucucuggucauacaacgcggagcuucuuguugcccuggagaaccaacauacaauugaucuaacugacucagaaaugaacaaacuguuugaaaaaacaaagaagcaacugagggaaaaugcugaggauaugggcaaugguuguuucaaaauauaccacaaaugugacaaugccugcauaggaucaaucagaaauggaacuuaugaccacgauguauacagggaugaagcauuaaacaaccgguuccagaucaagggaguugagcugaagucaggguacaaagauuggauccuauggauuuccuuugccauaucauguuuuuugcuuuguguugcuuuguugggguucaucaugugggccugccaaaagggcaacauuaggugcaacauuugcauuuga

SEQ ID NO: 42517 - RNA, 1701 nt, Artificial Sequence
  derived and/or modified CDS sequence (wt) from hemagglutinin__InfluenzaA__AGW00853
augaagacuaucauugcuuugagcuacauucuaugucugguuuucgcucaaaaacuuccuggaaaugacaauagcacggcaacgcugugccuugggcaccaugcaguaccaaacggaacgauagugaaaacaaucacgaaugaccgaauugaaguuacuaaugcuacugagcugguucagaauuccucaauaggugaaauaugcgacaguccucaucagauccuugauggagaaaauugcacacuaauagaugcucuauugggagacccucagugugauggcuuucaaaauaagaaaugggaccuuuuuguugaacgaagcaaagccuacagcaacuguuacccuuaugaugugccggauuaugccucccuuaggucacuaguugccucauccggcacacuggaguuuaacaaugaaagcuucaauuggacuggagucacucaaaacggaacaaguucugcuugcauaaggagaucuaauaguaguuucuuuaguagauuaaauugguugacccacuuaaacuucaaauacccagcauugaacgugacuaugccaaacaaugaacaauuugacaaauuguacauuuggggaguucaccacccggguacggacaaggaccaaaucuuccuguaugcucaaccaucaggaagaaucacaguaucuaccaaaagaagccaacaagcuguaaucccaaauaucggaucuagacccagaauaaggaauaucccuagcagaauaagcaucuauuggacaauaguaaaaccgggagacauacuuuugauuaacagcacagggaaucuaauugcuccuagggguuacuucaaaauacgaagugggaaaagcucaauaaugagaucagaugcacccauuggcaaaugcaagucugaaugcaucacuccaaauggaagcauucccaaugacaaaccauuccaaaauguaaacaggaucacauacggggccugucccagauauguuaagcaaagcacucugaaauuggcaacaggaaugcgaaauguaccagagaaacaaacuagaggcauauuuggcgcaauagcggguuucauagaaaaugguugggagggaaugguggaugguugguacgguuucaggcaucaaaauucugagggaagaggacaagcagcagaucucaaaagcacucaagcagcaaucgaucaaaucaaugggaagcugaaucgauugaucgggaaaaccaacgagaaauuccaucagauugaaaaagaauucucagaaguagaagggagaauucaggaccuugagaaauauguugaggacacuaaaauagaucucuggucauacaacgcggagcuucuuguugcccuggagaaucaacauacaauugaucuaacugacucagaaaugaacaaacuguuugaaaaaacaaagaagcaacugagggaaaaugcugaggauaugggcaaugguuguuucaaaauauaccacaaaugugacaaugccugcauaggaucaaucagaaauggaacuuaugaccacaauguguacagggaugaagcauuaaacaaccgguuccagaucaagggaguugagcuuaagucaggguacaaagauuggauccuauggauuuccuuugccauaucauguuuuuugcuuuguguugcuuuguugggguucaucaugugggccugccaaaagggcaacauuaggugcaacauuugcauuuga

SEQ ID NO: 42518 - RNA, 1701 nt, Artificial Sequence; identical to SEQ ID NO: 41879
  derived and/or modified CDS sequence (wt) from hemagglutinin__InfluenzaA__AGW00865

SEQ ID NO: 42519 - RNA, 1701 nt, Artificial Sequence
  derived and/or modified CDS sequence (wt) from hemagglutinin__InfluenzaA__AGW00877
augaagaccaucauugcuuugagcuacauucuaugucuaguuuucgcucaagaacuuccuggaaaugacgacagcacggcaacgcugugccuugggcaccaugcagugccaaacggaacgauagugaaaacaaucacgaaugaccaaauugaaguuacuaaugcuacugagcugguucagaguuccucaacaggugaaauaugcaacaguccucaucagauccuugauggagaaaacugcacacuaauagaugcucuauugggagacccucagugugauggcuuccaaaacaagaaaugggaccuuuuuguugaacgaagcaaagcccacagcaacuguuacccuuaugaugugccggauuaugccucccuuaggucacuaguugccucauccggcacacuggaguuuaacaaugaaagcuucaauuggacuggagucacucaaaacggaacaagcucugcuugcauaaggagaucuaauaauaguuucuuuaguagauugaauugguugacccacuuaaacuucaaauacccagcauugaacgugacuaugccaaacaaugaacaauuugacaaauuguacauuugggggguucaccacccggguacggacaaggaccaaaucuuccuguaugcucaagcaucaggaagaaucacaguaucuaccaaaagaagccaacaagcuguaauuccgaauaucggauuuagacccagaguaaggaauaucccuagcagaguaagcaucuauuggacaauaguaaaaccaggagacauacuuuugauuaacagcacagggaaucuaauugcuccuagggguuacuucaaaauacgaagugggaaaagcucaauaaugagaucagaugcacccauuggcaaaugcaauucugcaugcaucacuccaaauggaagcauucccaaugacaaaccauuccaaaauguaaacaggaucacauauggggccugucccagauaugucaagcaaaacacucugaaauuggcaacaggaaugagaaauguaccagagaaacaaacuagaggcauauuuggcgcaauagcggguuucauagaaaaugguugggagggaaugguggaugguugguacgguuucaggcaucaaaauucugagggaaggggacaagcagcagaucucaaaagcacucaagcagcaaucgaucaaaucaaugggaagcugaauagauugaucgggaaaaccaacgagaaauuccaucagauugaaaaagaauucucagaagucgaggggagaauucaggaccuugagaaauauguugaggacacuaaaauagaucucuggucauacaacgcggagcuucuuguugcccuggagaaccaacacacaauugaucuaacugacucagaaaugaacaaacuguuugaaaaaacaaagaagcaacugagggaaaaugcugaggauaugggcaaugguuguuucaaaauauaccacaaaugugacaaugccugcauaggaucaaucagaaauggaacuuaugaucacgauguguacagagaugaagcauuaaacaaccgauuccagaucaagggaguugagcugaagucaggguacaaagauuggauccuauggauuuccuuugccauaucauguuuuuugcuuuguguugcuuuguugggguucaucaugugggccugccaaaaaggcaacauuaggugcaacauuugcauuuga

SEQ ID NO: 42520 - RNA, 1701 nt, Artificial Sequence
  derived and/or modified CDS sequence (wt) from hemagglutinin__InfluenzaA__AGW00889
augaagacuaucauugcuuugagcuacauucuaugucugguuuucgcucaaaaacuuccuggaaaugacaauagcacggcaacgcugugccuugggcaccaugcaguaccaaacggaacgauagugaaaacaaucacgaaugaccgaauugaaguuacuaaugcuacugagcugguucagaauuccucaauaggugaaauaugcgacaguccucaucagauucuugauggagaaaacugcacacuaauagaugcucuauugggagacccucagugugauggcuuucaaaauaagaaaugggaccuuuuuguugaacgaagcaaagccuacagcaacuguuacccuuaugaugugccggauuaugccucccuuaggucacuaguugccucauccggcacacuggaguuuaacaaugaaagcuucaauuggacuggagucacucaaaacggaacaaguucugcuugcauaaggagaucuaauaguaguuucuuuaguagauuaaauugguugacccacuuaaacuucaaauacccagcauugaacgugacuaugccaaacaaugaacaauuugacaaauuguacauuugggggguucaccacccagguacggacaaggaccaaaucuuccuguaugcucaaucaucaggaagaaucacaguaucuaccaaaagaagccaacaagcuguaaucccaaauaucggaucuagacccagaauaaggaauaucccuagcagaauaagcaucuauuggacaauaguaaaaccgggagacauacuuuugauuaacagcacagggaaucuaauugcuccuagggguuacuucaaaauacgaagugggaaaagcucaauaaugagaucagaugcacccauuggcaaaugcaagucugaaugcaucacuccaaauggaagcauucccaaugacaaaccauuccaaaauguaaacaggaucacauacggggccugucccagauauguuaagcaaagcacucugaaauuggcaacaggaaugcgaaauguaccagagaaacaaacuagaggcauauuuggcgcaauagcagguuucauagaaaaugguugggagggaaugguggaugguugguacgguuucaggcaucaaaauucugagggaagaggacaagcagcagaucucaaaagcacccaagcagcaaucgaucaaaucaaugggaagcugaaucgauugaucgggaaaaccaacgagaaauuccaucagauugaaaaagaauucucagaaguagaagggagaauucaggaccuugagaaauauguugaggacacuaaaauagaucucuggucauacaacgcggagcuucuuguugcccuggagaaccaacauacaauugaucuaacugacucagaaaugaacaaacuguuugaaaaaacaaagaagcaacugagggaaaaugcugaggauaugggcaaugguuguuucaaaauauaccacaaaugugacaaugccugcauagggucaauaagaaauggaacuuaugaccacaauguguacagggaugaagcauuaaacaaccgguuccagaucaaaggaguugagcugaagucaggguacaaagauuggguccuauggauuuccuuugccauaucauguuuuuugcuuuguguugcuuuguugggguucaucaugugggccugccaaaagggcaacauuaggugcaacauuugcauuuga

SEQ ID NO: 42521 - RNA, 1701 nt, Artificial Sequence; identical to SEQ ID NO: 41879
  derived and/or modified CDS sequence (wt) from hemagglutinin__InfluenzaA__AGW00901

SEQ ID NO: 42522 - RNA, 1701 nt, Artificial Sequence; identical to SEQ ID NO: 42496
  derived and/or modified CDS sequence (wt) from hemagglutinin__InfluenzaA__AGW00913

SEQ ID NO: 42523 - RNA, 1701 nt, Artificial Sequence
  derived and/or modified CDS sequence (wt) from hemagglutinin__InfluenzaA__AGW00931
augaagacuaucauugcuuugagcuacauucuaugucugguuuucgcucaaaaacuuccuggaaaugacaauagcacggcaacgcugugccuugggcaccaugcaguaccaaacggaacgauagugaaaacaaucacgaaugaccgaauugaaguuacuaaugcuacugagcugguucagaauuccucaauaggugaaauaugcgacaguccucaucagauccuugauggagaaaacugcacacuaauagaugcucuauugggagacccucagugugauggcuuucaaaauaagaaaugggaccuuuuuguugaacgaagcaaagccuacagcaacuguuacccuuaugaugugccggauuaugccucccuuaggucacuaguugccucauccggcacacuggaguuuaacaaugaaagcuucaauugggcuggagucacucaaaacggaacaagcucugcuugcauaaggggaucuaauaguaguuucuuuaguagauuaaauugguugacccacuuaaacuucaaauacccagcauugaacgugacuaugccaaacaaugagcaauuugacaaauuguacauuugggggguucaccacccggguacggacaaggaccaaaucuuccuguaugcucaaucaucaggaagaaucacaguaucuaccaaaagaagccaacaagcuguaaucccgaauaucggaucuagacccagaauaaggaauaucccuagcagaauaagcaucuauuggacaauaguaaaaccgggagacauacuuuugauuaacagcacagggaaucuaauugcuccuagggguuacuucaaaauacgaagugggaaaagcucaauaaugagaucagaugcacccauuggcaaaugcaaaucugaauguaucacuccaaauggaagcauucccaaugacaaaccauuccaaaauguaaacaggaucacauacggggccugucccagauauguuaagcaaagcacucugaaauuggcaacaggaaugcgaaauguaccagagaaacaaacuagaggcauauuuggcgcaauagcggguuucauagaaaaugguugggagggaaugguggaugguugguacgguuucaggcaucaaaauucugagggaagaggacaagcagcagaucucaaaagcacucaagcagcaaucgaucaaaucaaugggaagcugaaucgauugaucgggaaaaccaacgagaaauuccaucagauugaaaaagaauucucagaaguagaagggagaauucaggaccuugagaaauauguugaggacacaaaaauagaucucuggucauacaacgcggagcuucuuguugcccuggagaaccaacauacaauugaucuaacugacucagaaaugaacaaacuguuugaaaaaacaaagaagcaacugagggaaaaugcugaggauaugggcaaugguuguuucaaaauauaccacaaaugugacaaugccugcauaggaucaaucagaaauggaacuuaugaccacgauguauacagggaugaagcauuaaacaaccgguuccagaucaagggaguugagcuaaagucaggguacaaagauuggauccuauggauuuccuuugccauaucauguuuuuugcuuuguguugcuuuguugggguucaucaugugggccugccaaaagggcaacauuaggugcaacauuugcauuuga

SEQ ID NO: 42524 - RNA, 1701 nt, Artificial Sequence
  derived and/or modified CDS sequence (wt) from hemagglutinin__InfluenzaA__AGW01244
augaagacuaucauugcuuugagcuacauucuaugucugguuuucgcucaaaaacuuccuggaaaugacaauagcacggcaacgcugugccuugggcaccaugcaguaccaaacggaacgauagugaaaacaaucacaaaugaccgaauugaagucacuaaugcuacugagcugguucagaauuccucaauaggugaaauaugcgacaguccucaucagauccuugauggagaaaacugcacacuaauagaugcucuauugggagacccucagugugauggcuuucaaaauaagaaaugggaccuuuuuguugaacgaagcaaagccuacagcaacuguuacccuuaugaugugccggauuaugccucccuuaggucacuaguugccucauccggcacacuggaguuuaacaaugaaagcuucaauugggcuggggucacucaaaacggaacaaguucugcuugcauaaggggaucuaauaguaguuucuuuaguagauuaaauugguugacccacuuaaacuucaaauacccagcauugaacgugacuaugccaaacaaugaacaauuugacaaauuguacauuugggggguucaccacccggguacggacaaggaccaaaucuuucuguaugcucaaucaucaggaagaaucacaguaucuaccaaaagaagccaacaagcuguaaucccgaauaucggaucuagacccagaauaaggaauaucccuagcagaauaagcaucuauuggacaauaguaaaaccgggagacauacuuuugauuaacagcacagggaaucuaauugcuccuagggguuacuucaaaauacgaagugggaaaagcucaauaaugagaucagaugcacccauuggcaaaugcaagucugaaugcaucacuccaaauggaagcauucccaaugacaaaccauuccaaaauguaaacaggaucacauacggggccugucccagauauguuaagcaaagcacucugaaauuggcaacaggaaugcgaaauguaccagagaaacaaaccagaggcauauuuggcgcaauagcggguuucauagaaaaugguugggagggaaugguggaugguugguacgguuucaggcaucaaaauucugagggaagaggacaagcagcagaucucaaaagcacucaagcagcaaucgaucaaaucaaugggaagcugaaucgauugaucgggaaaaccaacgagaaauuccaucagauugaaaaagaauucucagaaguagaagggagaauucaggaccuugagaaauauguugaggacacaaaaauagaucucuggucauacaacgcggagcuucuuguugcccuggagaaccaacauacaauugaucuaacugacucagaaaugaacaaacuguuugaaaaaacaaagaagcaacugagggaaaaugcugaggauaugggcaaugguuguuucaaaauauaccacaaaugugacaaugccugcauaggaucaaucagaaauggaacuuaugaccacgauguauacagggaugaagcauuaaacaaccgguuccagaucaagggaguugagcugaagucaggguacaaagauuggauccuauggauuuccuuugccauaucauguuuuuugcuuuguguugcuuuguugggguucaucaugugggccugccaaaagggcaacauuaggugcaacauuugcauuuga

SEQ ID NO: 42525 - RNA, 1701 nt, Artificial Sequence; identical to SEQ ID NO: 42492
  derived and/or modified CDS sequence (wt) from hemagglutinin__InfluenzaA__AGW01256

SEQ ID NO: 42526 - RNA, 1701 nt, Artificial Sequence
  derived and/or modified CDS sequence (wt) from hemagglutinin__InfluenzaA__AGW01295
augaagacuaucauugcuuugagcuacauucuaugucugguuuucgcucaaaaacuuccuggaaaugacaauagcacggcaacgcugugccuugggcaccaugcaguaccaaacggaacgauagugaaaacaaucacgaaugaccgaauugaaguuacuaaugcuacugagcugguucagaauuccucaauaggugaaauaugcgacaguccucaucagauccuugauggagaaaauugcacacuaauagaugcucuauuaggagacccucagugugauggcuuucaaaauaagaaaugggaccuuuuuguugaacgaagcaaagccuacagcaacuguuacccuuaugaugugccggauuaugccucccuuaggucacuaguugccucauccggcacacuggaguuuaacaaugaaagcuucaauuggacuggagucacucaaaacggaacaaguucugcuugcauaaggagaucuaauaguaguuucuuuaguagauuaaauugguugacccacuuaaacuucaaauacccagcauugaacgugacuaugccaaacaaugaacaauuugacaaauuguacauuuggggaguucaccacccggguacggacaaggaccaaaucuuccuguaugcucaaucaucaggaagaaucacaguaucuaccaaaagaagccaacaagcuguaaucccaaauaucggaucuagacccagaauaaggaauaucccuagcagaauaagcaucuauuggacaauaguaaaaccgggagacauacuuuugauuaacagcacagggaaucuaauugcuccuagggguuacuucaaaauacgaagugggaaaagcucaauaaugagaucagaugcacccauuggcaaaugcaagucugaaugcaucacuccaaauggaagcauucccaaugacaaaccauuccaaaauguaaacaggaucacauacggggccugucccagauauguuaagcaaagcacucugaaauuggcaacaggaaugcgaaauguaccagagaaacaaacuagaggcauauuuggcgcaauagcggguuucauagaaaaugguugggagggaaugguggaugguugguacgguuucaggcaucaaaauucugagggaagaggacaagcagcagaucucaaaagcacucaagcagcaaucgaucaaaucaaugggaagcugaaucgauugaucgggaaaaccaacgagaaauuccaucagauugaaaaagaauucucagaaguagaagggagaauucaggaccuugagaaauauguugaggacacuaaaauagaucucuggucauacaacgcggagauucuuguugcccuggagaaucaacauacaauugaucuaacugacucagaaaugaacaaacuguuugaaaaaacaaagaagcaacugagggaaaaugcugaggauaugggcaaugguuguuucaaaauauaccacaaaugugacaaugccugcauaggaucaaucagaaauggaacuuaugaccacaauguguacagggaugaagcauuaaacaaccgguuccagaucaagggaguugagcuuaagucaggguacaaagauuggauccuauggauuuccuuugccauaucauguuuuuugcuuuguguugcuuuguugggguucaucaugugggccugccaaaagggcaacauuaggugcaacauuugcauuuga

SEQ ID NO: 42527 - RNA, 1701 nt, Artificial Sequence; identical to SEQ ID NO: 41879
  derived and/or modified CDS sequence (wt) from hemagglutinin__InfluenzaA__AGW01307

SEQ ID NO: 42528 - RNA, 1701 nt, Artificial Sequence
  derived and/or modified CDS sequence (wt) from hemagglutinin__InfluenzaA__AGW01319
augaagaccaucauugcuuugagcuacauucuaugucuaguuuucgcucaagaacuuccuggaaaugacgacagcacggcaacgcugugccuugggcaccaugcagugccaaacggaacgauagugaaaacaaucacgaaugaccaaauugaaguuacuaaugcuacugagcugguucagaguuccucaacaggugaaauaugcaacaguccucaucagauccuugauggagaaaacugcacacuaauagaugcucuauugggagacccucagugugauggcuuccaaaacaagaaaugggaccuuuuuguugaacgaagcaaagcccacagcaacuguuacccuuaugaugugccggauuaugccucccuuaggucacuaguugccucauccggcacacuggaguuuaacaaugaaagcuucaauuggacuggagucacucaagacggaacaagcucugcuugcauaagaagaucuaauaauaguuucuuuaguagauugaauugguugacccacuuaaacuucaaauacccagcacugaacgugacuaugccaaacaaugaacaauuugacaaauuguacauuugggggguucaccacccggguacggacaaggaccaaaucuuccuguaugcucaagcaucaggaagaaucacaguaucuaccaaaagaagccaacaagcuguaauuccgaauaucggaucuagacccagaguaaggaauaucccuagcagaguaagcaucuauuggacaauaguaaaaccgggagacauacuuuugauuaacagcacagggaaucuaauugcuccuagggguuacuucaaaauacgaagugggaaaagcucaauaaugagaucagaugcacccauuggcaaaugcaauucugcaugcaucacuccaaauggaagcauucccaaugacaaaccauuccaaaauguaaacaggaucacauacggggccugucccagauaugucaagcaaaacacucugaaauuggcaacaggaaugagaaauguaccagagaaacaaacuagaggcauauuuggcgcaauagcggguuucauagaaaaugguugggagggaaugguggaugguugguacgguuucaggcaucaaaauucugagggaaggggacaagcagcagaucucaaaagcacucaagcagcaaucgaucaaaucaaugggaagcugaauaaauugaucgggaaaacuaacgagaaauuccaucagauugaaaaagaauucucagaagucgaagggagaauucaggaccuugagaaauauguugaggacacuaaaauagaucucuggucauacaaugcggagcuucuuguugcccuggagaaccaacacacaauugaucuaacugacucagaaaugaacaaacuguuugaaaaaacaaaaaagcaacugagggaaaaugcugaggauaugggcaaugguuguuucaaaauauaccacaaaugugacaaugccugcauaggaucaaucagaaauggaacuuaugaucacgauguguacagagaugaagcauuaaacaaccgauuccagaucaagggaguugagcugaagucaggguacaaagauuggauccuauggauuuccuuugccauaucauguuuuuugcuuuguguugcuuuguugggguucaucaugugggccugccaaaaaggcaacauuaggugcaacauuugcauuuga

SEQ ID NO: 42529 - RNA, 1701 nt, Artificial Sequence
  derived and/or modified CDS sequence (wt) from hemagglutinin__InfluenzaA__AGW01331
augaagacuaucauugcuuugagcuacauucuaugucugguuuucgcucaaaaacuuccuggaaaugacaauagcacggcaacgcugugccuugggcaccaugcaguaccaaacggaacgauagugaaaacaaucacgaaugaccgaauugaaguuacuaaugcuacugagcugguucagaauuccucaauaggugaaauaugcgacaguccucaucagauccuugauggagaaaacugcacacuaauagaugcucuauugggagacccucagugugauggcuuucaaaauaagaaaugggaccuuuuuguugaacgaagcaaagccuacagcaacuguuacccuuaugaugugccggauuaugccucccuuaggucacuaguugccucauccggcacacuggaguuuaacaaugaaagcuucaauugggcuggagucacucaaaacggaacaaguucugcuugcauaaggggaucuaauaguaguuucuuuaguagauuaaauugguugacccacuuaaacuucaaauacccagcauugaacgugacuaugccaaacaaugaacaauuugacaaauuguacauuugggggguucaccacccggguacggacaaggaccaaaucuuccuguaugcucaaucaucaggaagaaucacaguaucuaccaaaagaagccaacaagcuguaaucccgaauaucggaucuagacccagaauaaggaauaucccuagcagaauaagcaucuauuggacaauaguaaaaccgggagacauacuuuugauuaacagcacagggaaucuaauugcuccuagggguuacuucaaaauacgaagugggaaaagcucaauaaugagaucagaugcacccauuggcaaaugcaagucugaaugcaucacuccaaauggaagcauucccaaugacaaaccauuccaaaauguaaacaggaucacauacggggccugucccagauauguuaagcaaagcacucugaaauuggcaacaggaaugcgaaauguaccagagaaacaaacuagaggcauauuuggcgcaauagcggguuucauagaaaaugguugggagggaaugguggaugguugguacgguuucaggcaucaaaauucugagggaagaggacaagcagcagaucucaaaagcacucaagcagcaaucgaucaaaucaaugggaagcugaaucgauugaucgggaaaaccaacgagaaauuccaucagauugaaaaagaauucucagaaguagaagggagaauucaggaccuugagaaauauguugaggacacaaaaauagaucucuggucauacaacgcggagcuucuuguugcccuggagaaccaacauacaauugaucuaacugacucagaaaugaacaaacuguuugaaaaaacaaaaaagcaacugagggaaaaugcugaggauaugggcaaugguuguuucaaaauauaccacaaaugugacaaugccugcauaggaucaaucagaaauggaacuuaugaacacgauguauacagggaugaagcauuaaacaaccgguuccagaucaagggaguugagcugaagucaggguacaaagauuggauccuauggauuuccuuugccauaucauguuuuuugcuuuguguugcuuuguugggguucaucaugugggccugccaaaagggcaacauuaggugcaacauuugcauuuga

SEQ ID NO: 42530 - RNA, 1701 nt, Artificial Sequence
  derived and/or modified CDS sequence (wt) from hemagglutinin__InfluenzaA__AGW01343
augaagacuaucauugcuuugagcuacauucuaugucugguuuucgcucaaaaacuuccuggaaaugacaauagcacggcaacgcugugccuugggcaccaugcaguaccaaacggaacgauagugaaaacaaucacgaaugaccgaauugaagucacuaaugcuacugagcugguucagaauuccucaauaggugaaauaugcgacaguccucaucagauccuugauggagaaaacugcacacuaauagaugcucuauugggagacccucagugugauggcuuucaaaauaagaaaugggaccuuuuuguugaacgaagcaaagccuacagcaacuguuacccuuaugaugugccggauuaugccucccuuaggucacuaguugccucauccggcacacuggaguuuaacaaugaaagcuucaauugggcuggggucacucaaaacggaacaaguucugcuugcauaaggggaucuaauaguaguuucuuuaguagauuaaauugguugacccacuuaaacuucaaauacccagcauugaacgugacuaugccaaacaaugaacaauuugacaaauuguacauuugggggguucaccacccggguacggacaaggaccaaaucuuccuguaugcucaaucaucaggaagaaucacaguaucuaccaaaagaagccaacaagcuguaaucccgaauaucggaucuagacccagaauaaggaauaucccuagcagaauaagcaucuauuggacaauaguaaaaccgggagacauacuuuugauuaacagcacagggaaucuaauugcuccuagggguuacuucaaaauacgaagugggaaaagcucaauaaugagaucagaugcacccauuggcaaaugcaagucugaaugcaucacuccaaauggaagcauucccaaugacaaaccauuccaaaauguaaacaggaucacauacggggccugucccagauauguuaagcaaagcacucugaaauuggcaacaggaaugcgaaauguaccagagaaacaaaccagaggcauauuuggcgcaauagcggguuucauagaaaaugguugggagggaaugguggaugguugguacgguuucaggcaucaaaauucugagggaagaggacaagcagcagaucucaaaagcacucaagcagcaaucgaucaaaucaaugggaagcugaaucgauugaucgggaaaaccaacgagaaauuccaucagauugaaaaagaauucucagaaguagaagggagaauucaggaccuugagaaauauguugaggacacaaaaauagaucucuggucauacaacgcggagcuucuuguugcccuggagaaccaacauacaauugaucuaacugacucagaaaugaacaaacuguuugaaaaaacaaagaagcaacugagggaaaaugcugaggauaugggcaaugguuguuucaaaauauaccacaaaugugacaaugccugcauaggaucaaucagaaauggaacuuaugaccacgauguauacagggaugaagcauuaaacaaccgguuccagaucaagggaguugagcugaaaucaggguacaaagauuggauccuauggauuuccuuugccauaucauguuuuuugcuuuguguugcuuuguugggguucaucaugugggccugccaaaagggcaacauuaggugcaacauuugcauuuga

SEQ ID NO: 42531 - RNA, 1701 nt, Artificial Sequence
  derived and/or modified CDS sequence (wt) from hemagglutinin__InfluenzaA__AGW01355
augaagacuaucauugcuuugagcuacauucuaugucugguuuucgcucaaaaacuuccuggaaaugacaauagcacggcaacgcugugccuugggcaccaugcaguaccaaacggaacgauagugaaaacaaucacgaaugaccaaauugaaguuacuaaugcuacugagcugguucagaauuccucaauaggugaaauaugcgacaguccucaucagauccuugauggagaaaacugcacacuaauagaugcucuacugggagacccucagugugauggcuuucaaaauaagaaaugggaccuuuuuguugaacgaagcaaagccuacagcaacuguuacccuuaugaugugccggauuaugccucccuuaggucacuaguugccucauccggcacacuggaguuuaacaaugaaagcuucaauugggcuggagucacucaaaacggaacaaguucugcuugcauaaggggaucuaauaguagcuucuuuaguagauuaaauugguugacccacuuaaacuucaaguacccagcauugaacgugacuaugccaaacaaugaacaauuugacaaauuguacauuugggggguucaccacccggguacggacaaggaccaaaucuuccuguaugcucaaucaucaggaagaaucacaguaucuaccaaaagaagccaacaagcuguaaucccgaauaucggaucuagacccagaauaaggaauaucccuagcagaauaagcaucuauuggacaauaguaaaaccgggagacauacuuuugauuaacagcacagggaaucuaauugcuccuagggguuacuucaaaauacgaagugggaaaagcucaauaaugagaucagaugcacccauuggcaaaugcaagucugaaugcaucacuccaaauggaagcauucccaacgacaaaccauuccaaaauguaaacaggaucacauacggggccugucccagauauguuaagcaaagcacucugaaauuggcaacaggaaugcgaaauguaccagagaaacaaacuagaggcauauuuggcgcaauagcggguuucauagaaaaugguugggagggaaugguggaugguugguacgguuucaggcaucaaaauucugagggaagaggacaagcagcagaucucaaaagcacucaagcagcaaucgaucaaaucaaugggaagcugaaucgauugaucgggaaaaccaacgagaaauuccaucagauugagaaagaauucucagaaguagaagggagaauucaggaccuugagaaauauguugaggacacaaaaauagaucucuggucauacaacgcagagcuucuuguugcccuggagaaccaacauacaauugaucuaacugacucagaaaugaacaaacuguuugaaaaaacaaagaagcaacugagggaaaaugcugaggauaugggcaaugguuguuucaaaauauaccacaaaugugacaaugccugcauaggaucaaucagaaauggaacuuaugaccacgauguauacagggaugaagcauuaaacaaccgguuccagaucaaaggaguugagcugaagucaggguacaaagauuggauccuauggauuuccuuugccauaucauguuuuuugcuuuguguugcuuuguugggguucaucaugugggccugccaaaagggcaacauuaggugcaacauuugcauuuga

SEQ ID NO: 42532 - RNA, 1701 nt, Artificial Sequence; identical to SEQ ID NO: 42492
  derived and/or modified CDS sequence (wt) from hemagglutinin__InfluenzaA__AGW01367

SEQ ID NO: 42533 - RNA, 1701 nt, Artificial Sequence
  derived and/or modified CDS sequence (wt) from hemagglutinin__InfluenzaA__AGW01391
augaagacuaucauugcuuugagcuacauucuaugucugguuuucgcucaaaaacuuccuggaaaugacaauagcacggcaacgcugugccuugggcaccaugcaguaccaaacggaacgauagugaaaacaaucacgaaugaccgaauugaaguuacuaaugcuacugagcugguucagaauuccucaauaggugaaauaugcgacaguccucaucagauccuugauggagaaaacugcacacuaauagaugcucuauugggagacccucagugugauggcuuccaaaauaagaaaugggaccuuuuuguugaacgaagcaaagccuacagcaacuguuacccuuaugaugugccggauuaugccucccuuaggucacuaguugccucauccggcacacuggaguuuaacaaugaaagcuucaauugggcuggagucacucaaaacggaacaaguucugcuugcauaaggggaucuaauaguaguuucuuuaguagauuaaauugguugacccacuuaaacuucaaauacccagcauugaacgugacuaugccaaacaaugagcaauuugacaaauuguacauuugggggguucaccacccggguacggacaaggaccaaaucuuccuguaugcucaaucaucaggaagaaucacaguaucuaccaaaagaagccaacaagcuguaaucccgaauaucggaucuagacccagaauaaggaauaucccuagcagaauaagcaucuauuggacaauaguaaaaccgggagacauacuuuugauuaacagcacagggaaucuaauugcuccuagggguuacuucaaaauacgaagugggaaaagcucaauaaugagaucagaugcacccauuggcaaaugcaaaucugaauguaucacuccaaauggaagcauucccaaugacaaaccauuccaaaauguaaacaggaucacauacggggccugucccagauauguuaagcaaagcacucugaaauuggcaacaggaaugcgaaauguaccagagaaacaaacuagaggcauauuuggcgcaauagcggguuucauagaaaaugguugggagggaaugguggaugguugguacgguuucaggcaucaaaauucugagggaagaggacaagcagcagaucucaaaagcacucaagcagcaaucgaucaaaucaaugggaagcugaaucgauugaucgggaaaaccaacgagaaauuccaucagauugaaaaagaauucucagaaguagaagggagaauucaggaccuugagaaauauguugaggacacaaaaauagaucucuggucauacaacgcggagcuucuuguugcccuggagaaccaacauacaauugaucuaacugacucagaaaugaacaaacuguuugaaaaaacaaagaagcaacugagggaaaaugcugaggauaugggcaaugguuguuucaaaauauaccacaaaugugacaaugccugcauaggaucaaucagaaauggaacuuaugaccacgauguauacagggaugaagcauuaaacaaccgguuccagaucaagggaguugagcugaagucaggguacaaagauuggauccuauggauuuccuuugccauaucauguuuuuugcuuuguguugcuuuguugggguucaucaugugggccugccaaaagggcaacauuaggugcaacauuugcauuuga

SEQ ID NO: 42534 - RNA, 1701 nt, Artificial Sequence
  derived and/or modified CDS sequence (wt) from hemagglutinin__InfluenzaA__AGW01403
augaagacuaucauugcuuugagcuacauucuaugucugauuuucgcucaaaaacuuccuggaaaugacaacagcacggcaacgcugugccuugggcaccaugcagugccaaacggaacgauagugaaaacaaucacgaaugaccaaauugaaguuacuaaugcuacugagcugguucagaguuccucaacaggugaaauaugcaacaguccucaucagauccuugauggagaaaacugcacacuaauagaugcucuauugggagacccucagugugauggcuuccaaaacaagaaaugggaccuuuuuguugaacgaagcaaagcccacagcaacuguuaccccuaugaugugccggauuaugccucccuuaggucacuaguugccucauccggcacacuggaguuuaacaaugaaagcuucaauuggacuggagucacucaaaacggaacaagcucugcuugcauaaggagaucuaauaauaguuucuuuaguagauugaauugguugacccacuuaaacuucaaauacccagcauugaacgugacuaugccaaacaaugaacaauuugacaaauuguacauuuggggaguucaccacccggguacggacaaggaccaaaucuuccuguaugcucaagcagcaggaagaaucacaguaucuaccaaaagaagccaacaagcuguaauuccgaauaucggauccagacccaggguaaggaauaucccuagcagaguaagcaucuauuggacaauaguaaaaccgggagacauacuuuugauuaacagcacagggaaucuaauugcuccuagggguuacuucaaaauacgaagugggaaaagcucaauaaugagaucagaugcacccauuggcaaaugcaauucugcaugcaucacuccaaacggaagcauucccaaugacaaaccauuccaaaauguaaacaggaucacauacggggccugucccagauauguuaagcaaaacacucugaaauuggcaacaggaaugagaaauguaccagagaaacaaacuagaggcauauuuggcgcaauagcugguuucauagaaaaugguugggagggaaugguggaugguugguaugguuucaggcaucaaaauucugagggaaggggacaagcagcagaucucaaaagcacucaagcagcaaucgaucaaaucaaugggaagcugaauagauugaucgggaaaaccaacgagaaauuccaucagauugaaaaagaauucucagaagucgaagggagaauucaggaccuugagaaauauguugaggacacuaaaauagaucucuggucauacaacgcggagcuucuuguugcccuggagaaccaacacacaauugaucuaacugauucagaaaugaacaaacuguuugaaaaaacaaagaagcaacugagggaaaaugcugaggauaugggcaaugguuguuucaaaauauaccacaaaugugacaaugccugcauaggaucaaucagaaauggaacuuaugaccacuauguguacagagaugaagcauuaaacaaccgauuccagaucaagggaguugagcugaagucaggguacaaagauuggauccuauggauuuccuuugccacaucauguuuuuugcuuuguguugcuuuguugggguucaucaugugggccugccaaaaaggcaacauuaggugcaacauuugcauuuga

SEQ ID NO: 42535 - RNA, 1701 nt, Artificial Sequence
  derived and/or modified CDS sequence (wt) from hemagglutinin__InfluenzaA__AGW01415
augaagacuaucauugcuuugagcuacauucuaugucugguuuucgcucaaaaacuuccuggaaaugacaauagcacggcaacgcugugccuugggcaccaugcaguaccaaacggaacgauagugaaaacaaucacgaaugaccgaauugaaguuacuaaugcuacugagcugguucagaauuccucaauaggugaaauaugcgacaguccucaucagauccuugauggagaaaacugcacacuaauagaugcucuauugggagacccucagugugauggcuuucaaaauaagaaaugggaccuuuuuguugaacgaagcaaagccuacagcaacuguuacccuuaugaugugccggauuaugccucccuuaggucacuaguugccucauccggcacacuggaguuuaacaaugaaagcuucaauuggacuggagucacucaaaauggaacaaguucugcuugcauaaggagaucuaauaguaguuucuuuaguagauuaaauugguugacccacuuaaacuucaaauacccagcauugaacgugacuaugccaaacaaugaacaauuugacaaauuguacauuugggggguucaccacccggguacggacaaggaccaaaucuuccuguaugcucaaucaucaggaagaaucacaguaucuaccaaaagaagccaacaagcuguaaucccaaauaucggaucuagacccagaauaaggaauaucccuagcagaauaagcaucuauuggacaauaguaaaaccgggagacauacuuuugauuaacagcacagggaaucuaauugcuccuagggguuacuucaaaauacgaagugggaaaagcucaauaaugagaucagaugcacccauuggcaaaugcaagucugaaugcaucacuccaaauggaagcauucccaaugacaaaccauuccaaaauguaaacaggaucacauacggggcuugucccagauauguuaagcaaagcacucugaaauuggcaacaggaaugcgaaauguaccagagaaacaaacuagaggcauauuuggcgcaauagcggguuucauagaaaaugguugggagggaaugguggaugguugguacgguuucaggcaucaaaauucugagggaagaggacaagcagcagaucucaaaagcacucaagcagcaaucgaucaaaucaaugggaagcugaaucgauugaucgggaaaaccaacgagaaauuccaucagauugaaaaagaauucucagaaguagaagggagaauucaggaccuugagaaauauguugaggacacuaaaauagaucucuggucauacaacgcggagcuucuuguugcccuggagaaccaacauacaauugaucuaacugacucagaaaugaacaaacuguuugaaaaaacaaagaagcaacugagggaaaaugcugaggauaugggcaaugguuguuucaaaauauaccacaaaugugacaaugccugcauaggaucaaucagaaauggaacuuaugaccacaauguguacagggaugaagcauuaaacaaccgguuccagaucaagggaguugagcugaagucaggguacaaagauuggauccuauggauuuccuuugccauaucauguuuuuugcuuuguguugcuuuguugggguucaucaugugggccugccaaaagggcaacauuaggugcaacauuugcauuuga

SEQ ID NO: 42536 - RNA, 1701 nt, Artificial Sequence
  derived and/or modified CDS sequence (wt) from hemagglutinin__InfluenzaA__AGW01427
augaagacuaucauugcuuugagcuacauucuaugucugguuuucgcucaaaaacuuccuggaaaugacaauagcacggcaacgcugugccuugggcaccaugcaguaccaaacggaacgauagugaaaacaaucacgaaugaccgaauugaaguuacuaaugcuacugagcugguucagaauuccucaauaggugaaauaugcgacaguccucaucagauucuugauggagaaaacugcacacuaauagaugcucuauugggagacccucagugugauggcuuucaaaauaagaaaugggaccuuuuuguugaacgaagcaaagccuacagcaacuguuacccuuaugaugugccggauuaugccucccuuaggucacuaguugccucauccggcacacuggaguuuaacaaugaaagcuucaauuggacuggagucacucaaaacggaacaaguucugcuugcauaaggagaucuaauaguaguuucuuuaguagauuaaauugguugacccacuuaaacuucaaauacccagcauugaacgugacuaugccaaacaaugaacaauuugacaaauuguacauuugggggguucaccacccagguacggacaaggaccaaaucuuccuguaugcucaaucaucaggaagaaucacaguaucuaccaaaagaagccaacaagcuguaaucccaaauaucggaucuagacccagaauaaggaauaucccuagcagaauaagcaucuauuggacaauaguaaaaccgggagacauacuuuugauuaacagcacagggaaucuaauugcuccuagggguuacuucaaaauacgaagugggaaaagcucaauaaugagaucagaugcacccauuggcaaaugcaagucugaaugcaucacuccaaauggaagcauucccaaugacaaaccauuccaaaauguaaacaggaucacauacggggccugucccagauauguuaagcaaagcacucugaaauuggcaacaggaaugcgaaauguaccagagaaacaaacuagaggcauauuuggcgcaauagcagguuucauagaaaaugguugggagggaaugguggaugguugguacgguuucaggcaucaaaauucugagggaagaggacaagcagcagaucucaaaagcacccaagcagcaaucgaucaaaucaaugggaagcugaaucgauugaucgggaaaaccaacgagaaauuccaucagauugaaaaagaauuuucagaaguagaagggagaauucaggaccuugagaaauauguugaggacacuaaaauagaucucuggucauacaacgcggagcuucuuguugcccuggagaaccaacauacaauugaucuaacugacucagaaaugaacaaacuguuugaaaaaacaaagaagcaacugagggaaaaugcugaggauaugggcaaugguuguuucaaaauauaccacaaaugugacaaugccugcauaggaucaauaagaaauggaacuuaugaccacaauguguacagggaugaagcauuaaacaaccgguuccagaucaagggaguugagcugaagucaggguacaaagauuggauccuauggauuuccuuugccauaucauguuuuuugcuuuguguugcuuuguugggguucaucaugugggccugccaaaagggcaacauuaggugcaacauuugcauuuga

SEQ ID NO: 42537 - RNA, 1701 nt, Artificial Sequence
  derived and/or modified CDS sequence (wt) from hemagglutinin__InfluenzaA__AGW01439
augaagacuaucauugcuuugagcuacauucuaugucugguuuucgcucaaaaacuuccuggaaaugacaauagcacggcaacgcugugccuugggcaccaugcaguaccaaacggaacgauagugaaaacaaucacgaaugaccgaauugaaguuacuaaugcuacugagcugguucagaauuccucaauaggugaaauaugcgacaguccucaucagauucuugauggagaaaacugcacacuaauagaugcucuauugggagacccucagugugauggcuuucaaaauaagaaaugggaccuuuuuguugaacgaagcaaagccuacagcaacuguuacccuuaugaugugccggauuaugcaucccuuaggucacuaguugccucauccggcacacuggaguuuaacaaugaaagcuucaauuggacuggagucacucaaaacggaacaaguucugcuugcauaaggagaucuaauaguaguuucuuuaguagauuaaauugguugacccacuuaaacuucaaauacccagcauugaacgugacuaugccaaacaaugaacaauuugacaaauuguacauuugggggguucaccacccagguacggacaaggaccaaaucuuccuguaugcucaaucaucaggaagaaucacaguaucuaccaaaagaagccaacaagcuguaaucccaaauaucggaucuagacccagaauaaggaauaucccuagcagaauaagcaucuauuggacaauaguaaaaccgggagacauacuuuugauuaacagcacagggaaucuaauugcuccuagggguuacuucaaaauacgaagugggaaaagcucaauaaugagaucagaugcacccauuggcaaaugcaagucugaaugcaucacuccaaauggaagcauucccaaugacaaaccauuccaaaauguaaacaggaucacauacggggccugucccagauauguuaagcaaagcacucugaaauuggcaacaggaaugcgaaauguaccagagaaacaaacuagaggcauauuuggcgcaauagcagguuucauagaaaaugguugggagggaaugguggaugguugguacgguuucaggcaucaaaauucugagggaagaggacaagcagcagaucucaaaagcacccaagcagcaaucgaucaaaucaaugggaagcugaaucgauugaucgggaaaaccaacgagaaauuccaucagauugaaaaagaauucucagaaguagaagggagaauucaggaccuugagaaauauguugaggacacuaaaauagaucucuggucauacaacgcggagcuucuuguugcccuggagaaccaacauacaauugaucuaacugacucagaaaugaacaaacuguuugaaaaaacaaagaagcaacugagggaaaaugcugaggauaugggcaaugguuguuucaaaauauaccacaaaugugacaaugccugcauaggaucaauaagaaauggaacuuaugaccacaauguguacagggaugaagcauuaaacaaccgguuccagaucaagggaguugagcugaagucaggguacaaagauuggauccuauggauuuccuuugccauaucauguuuuuugcuuuguguugcuuuguugggguucaucaugugggccugccaaaagggcaacauuaggugcaacauuugcauuuga

SEQ ID NO: 42538 - RNA, 1701 nt, Artificial Sequence
  derived and/or modified CDS sequence (wt) from hemagglutinin__InfluenzaA__AGW01451
augaagacuaucauugcuuugagcuacauucuaugucugguuuucgcucaaaaacuuccuggaaaugacaauagcacggcaacgcugugccuugggcaccaugcaguaccaaacggaacgauagugaaaacaaucacgaaugaccgaauugaaguuacuaaugcuacugagcugguucagaauuccucaauaggugaaauaugcgacaguccucaucagauccuugauggagaaaacugcacacuaauagaugcucuauugggagacccucagugugauggcuuucaaaauaagaaaugggaccuuuuuguugaacgaagcaaagccuacagcaacuguuacccuuaugaugugccggauuaugccucccuuaggucacuaguugccucauccggcacacuggaguuuaacaaugaaagcuucaauugggcuggagucacucaaaacggaacaaguucugcuugcauaaggggaucuaauaguaguuucuuuaguagauuaaauugguugacccacuuaaacuucaaauacccagcauugaacgugacuaugccaaacaaugaacaauuugacaaauuguacauuugggggguucaccacccggguacggacaaggaccaaaucuuccuguaugcucaaucaucaggaagaaucacaguaucuaccaaaagaagccaacaagcuguaaucccgaauaucggaucuagacccagaauaaggaauaucccuagcagaauaagcaucuauuggacaauaguaaaaccgggagacauacuuuugauuaacagcacagggaaucuaauugcuccuagggguuacuucaaaauacgaagugggaaaagcucaauaaugagaucagaugcacccauuggcaaaugcaagucugaaugcaucacuccaaauggaagcauucccaaugacaaaccauuccaaaauguaaacaggaucacauacggggccugucccagauauguuaagcaaagcacucugaaauuggcaacaggaaugcgaaauguaccagagaaacaaacuagaggcauauuuggugcaauagcggguuucauagaaaaugguugggagggaaugauggaugguugguacgguuucaggcaucaaaauucugagggaagaggacaagcagcagaucucaaaagcacucaagcagcaaucgaucaaaucaaugggaagcugaaucgauugaucgggaaaaccaacgagaaauuccaucagauugaaaaagaauucucagaaguagaagggagaauucaggaccuugagaaauauguuguggacacaaaaauagaucucuggucauacaacgcggagcuucuuguugcccuggagaaccaacauacaauugaucuaacugacucagaaaugaacaaacuguuugaaaaaacaaagaagcaacugagggaaaaugcugaggauaugggcaaugguuguuucaaaauauaccacaaaugugacaaugccugcauaggaucaaucagaaauggaacuuaugaccacgauguauacagggaugaagcauuaaacaaccgguuccagaucaagggaguugagcugaagucaggguacaaagauuggauccuauggauuuccuuugccauaucauguuuuuugcuuuguguugcuuuguugggguucaucaugugggccugccaaaagggcaacauuaggugcaacauuugcauuuga

SEQ ID NO: 42539 - RNA, 1701 nt, Artificial Sequence
  derived and/or modified CDS sequence (wt) from hemagglutinin__InfluenzaA__AGW01463
augaagacuaucauugcuuugagcuacauucuaugucugguuuucgcucaaaaacuuccuggaaaugacaauagcacggcaacgcugugccuugggcaccaugcaguaccaaacggaacgauagugaaaacaaucacgaaugaccgaauugaaguuacuaaugcuacugagcugguucagaauuccucaauaggugaaauaugcgacaguccucaucagauccuugauggagaaaacugcacacuaauagaugcucuauugggagacccucagugugauggcuuucaaaauaagaaaugggaccuuuuuguugaacgaagcaaagccuacagcaacuguuacccuuaugaugugccggauuaugccucccuuaggucacuaguugccucaucuggcacacuggaguuuaacaaugaaagcuucaauugggcuggagucacucaaaacggaacaaguucugcuugcauaaggggaucuaauaguaguuucuuuaguagauuaaauugguugacccacuuaaacuucaaauacccagcauugaacgugacuaugccaaacaaugagcaauuugacaaauuguacauuugggggguucaccacccggguacggacaaggaccaaaucuuccuguaugcucaaucaucaggaagaaucacaguaucuaccaaaagaagccaacaagcuguaaucccgaauaucggaucuagacccagaauaaggaauaucccuagcagaauaagcaucuauuggacaauaguaaaaccgggagacauacuuuugauuaacagcacagggaaucuaauugcuccuagggguuacuucaaaauacgaagugggaaaagcucaauaaugagaucagaugcacccauuggcaaaugcaaaucugaauguaucacuccaaauggaagcauucccaaugacaaaccauuccaaaauguaaacaggaucacauacggggccugucccagauauguuaagcaaagcacucugaaauuggcaacaggaaugcgaaauguaccagagaaacaaacuagaggcauauuuggcgcaauagcggguuucauagaaaaugguugggagggaaugguggaugguugguacgguuucaggcaucaaaauucugagggaagaggacaagcagcagaucucaaaagcacucaagcagcaaucgaucaaaucaaugggaagcugaaucgauugaucgggaaaaccaacgagaaauuccaucagauugaaaaagaauucucagaaguagaagggagaauucaggaccuugagaaauauguugaggacacaaaaauagaucucuggucauacaacgcggagcuucuuguugcccuggagaaccaacauacaauugaucuaacugacucagaaaugaacaaacuguuugaaaaaacaaagaagcaacugagggaaaaugcugaggauaugggcaaugguuguuucaaaauauaccacaaaugugacaaugccugcauaggaucaaucagaaauggaacuuaugaccacgauguauacagggaugaagcauuaaacaaccgguuccagaucaagggaguugagcugaagucaggguacaaagauuggauccuauggauuuccuuugccauaucauguuuuuugcuuuguguugcuuuguugggguucaucaugugggccugccaaaagggcaacauuaggugcaacauuugcauuuga

SEQ ID NO: 42540 - RNA, 1701 nt, Artificial Sequence; identical to SEQ ID NO: 42489
  derived and/or modified CDS sequence (wt) from hemagglutinin__InfluenzaA__AGW01475

SEQ ID NO: 42541 - RNA, 1701 nt, Artificial Sequence
  derived and/or modified CDS sequence (wt) from hemagglutinin__InfluenzaA__AGW01487
augaagacuaucauugcuuugagcuacauucuaugucuaguuuucgcucaaaaacuuccuggaaaugacaauagcacggcaacgcugugccuugggcaccaugcaguaccaaacggaacgauagugaaaacaaucacgaaugaccgaauugaaguuacuaaugcuacugagcugguucagaauuccucaauaggugaaauaugcgacaguccucaucagauccuugauggagaaaacugcacacuaauagaugcucuauugggagacccucagugugauggcuuccaaaauaagaaaugggaccuuuuuguugaacgaagcaaagccuacagcaacuguuacccuuaugaugugccggauuaugccucccuuaggucacuaguugccucauccggcacacuggaguuuaacaaugaaagcuucaauuggacuggagucacucaaaacggaacaaguucugcuugcauaaggagaucuaauaauaguuucuuuaguagauuaaauugguugacccacucaaacuucaaauacccagcauugaacgugacuaugccaaacaaugaacaauuugacaaauuguacauuugggggguucaccacccggguacgggcaaggaccaaaucuuccuguaugcucaaucaucaggaagaaucacaguaucuaccaaaagaagccaacaagcuguaaucccgaauaucggaucuagacccagaauaaggaauaucccuagcagaauaagcaucuauuggacaauaguaaaaccgggagacauacuuuugauuaacagcacagggaaucuaauugcuccuagggguuacuucaaaauacgaagugggaaaagcucaauaaugagaucagaugcacccauuggcaaaugcaagucugaaugcaucacuccaaauggaagcauucccaaugacaaaccauuccaaaauguaaacaggaucacauacggggccugucccagauauguuaagcaaagcacucugaaauuggcaacaggaaugcgaaauguaccagagaaacaaacuagaggcauauuuggugcaauagcggguuucauagaaaaugguugggagggaaugauggaugguugguacgguuucaggcaccaaaauucugagggaagaggacaagcagcagaucucaaaagcacucaagcagcaaucgaucaaaucaaugggaagcugaaucgauugaucgggaaaaccaacgagaaauuccaucagauugaaaaagaauuuucagaaguagaagggagaauucaggaccuugagaaauauguugaggacacuaaaauagaucucuggucauacaacgcggagcuucuuguugcccuggagaaccaacauacaauugaucuaacugacucagaaaugaacaaacuguuugaaaaaacaaagaagcaacugagggaaaaugcugaggauaugggcaaugguuguuucaaaauauaccacaaaugugacaaugccugcauaggaucaaucagaaauggaacuuaugaccacgauguauacagagaugaagcauuaaacaaccgguuccagaucaagggaguugagcugaagucaggguacaaagauuggauccuauggauuuccuuugccauaucauguuuuuugcuuuguguugcuuuguugggguucaucaugugggccugccaaaagggcaacauuaggugcaacauuugcauuuga

SEQ ID NO: 42542 - RNA, 1701 nt, Artificial Sequence
  derived and/or modified CDS sequence (wt) from hemagglutinin__InfluenzaA__AGW01499
augaagacuaucauugcuuugagcuacauucuaugucugguuuucgcucaaaaacuuccuggaaaugacaauagcacggcaacgcugugccuugggcaccaugcaguaccaaacggaacgauagugaaaacaaucacgaaugaccgaauugaaguuacuaaugccacugagcugguucagaauuccucaauaggugaaauaugcgacaguccucaucagauccuugauggagaaaacugcacacuaauagaugcucuauugggagacccucagugcgauggcuuucaaaauaagaaaugggaccuuuuuguugaacgaagcaaagccuacagcaacuguuacccuuaugaugugccggauuaugccucccuuaggucacuaguugccucauccggcacacuggaguuuaacaaugaaagcuucaauuggacuggagucacucaaaacggaacaaguucugcuugcauaaggagaucuaauaguaguuucuuuaguagauuaaauugguugacccacuuaaacuucaaauacccagcauugaacgugacuaugccaaacaaugaacaauuugacaaauuguacauuugggggguucaccacccggguacggacaaggaccaaaucuuccuguaugcucaaucaucaggaagaaucacaguaucuaccaaaagaagccaacaagcuguaaucccaaauaucggaucuagacccagaauaaggaauaucccuagcagaauaagcaucuauuggacaauaguaaaaccgggagacauacuuuugauuaacagcacagggaaucuaauugcuccuagggguuacuucaaaauacgaagugggaaaagcucaauaaugagaucagaugcacccauuggcaaaugcaagucugaaugcaucacuccaaauggaagcauucccaaugacaaaccauuccaaaauguaaacaggaucacauacggggccugucccagauauguuaagcaaagcacucugaaauuggcaacaggaaugcggaauguaccagagaaacaaacuagaggcauauuuggugcaauagcggguuucauagaaaaugguugggagggaaugguggaugguugguacgguuucaggcaucaaaauucugagggaagaggacaagcagcagaucucaaaagcacucaagcagcaaucgaucaaaucaaugggaagcugaaucgauugaucgggaaaaccaacgagaaauuccaucagauugaaaaagaauucucagaaguagaagggagaauucaagaccuugagaaauauguugaggacacuaaaauagaucucuggucauacaacgcggagcuucuuguugcccuagagaaccaacauacaauugaucuaacugacucagaaaugaacaaacuguuugaaaaaacaaagaagcaacugagggaaaaugcugaggauaugggcaaugguuguuucaaaauauaccacaaaugugacaaugccugcauaggaucaaucagaaauggaacuuaugaccacaauguguacagggaugaagcauuaaacaaccgguuccagaucaagggaguugagcugaagucaggguacaaagauuggauccuauggauuuccuuugccauaucauguuuuuugcuuuguguugcuuuguugggguucaucaugugggcaugccaaaagggcaacauuaggugcaacauuugcauuuga

SEQ ID NO: 42543 - RNA, 1701 nt, Artificial Sequence
  derived and/or modified CDS sequence (wt) from hemagglutinin__InfluenzaA__AGW01511
augaagacuaucauugcuuugagcuacauucuaugucugguuuucgcucaaaaacuuccuggaaaugacaauagcacggcaacgcugugccuuggacaccaugcaguaccaaacggaacgauagugaaaacaaucacgaaugaccgaauugaaguuacuaaugcuacugagcugguucagaauuccucaauaggugaaauaugcgacaguccucaucagauccuugauggagaaaauugcacacuaauagaugcucuauugggagacccucagugugauggcuuucaaaauaagaaaugggaccuuuuuguugaacgaagcaaagccuacagcaacuguuacccuuaugaugugccggauuaugccucccuuaggucacuaguugccucauccggcacacuggaguuuaacaaugaaagcuucaauugggcuggagucacucaaaacggaacaaguucugcuugcauaaggggaucuaauaguaguuucuuuaguagauuaaauugguugacccacuuaaacuucaaauacccagcauugaacgugacuaugccaaacaaugaacaauuugacaaauuguacauuugggggguucaccacccggguacggacaaggaccaaaucuuccuguaugcucaaucaucaggaagaaucacaguaucuaccaaaagaagccaacaagcuguaaucccgaauaucggaucuagacccagaauaaggaauaucccuagcagaauaagcaucuauuggacaauaguaaaaccgggagacauacuuuugauuaacagcacagggaaucuaauugcuccuagggguuacuucaaaauacgaagugggaaaagcucaauaaugagaucagaugcacccauuggcaaaugcaagucugaaugcaucacuccaaauggaagcauucccaaugacaaaccauuccaaaauguaaacaggaucacauacggggccugucccagauauguuaagcaaagcacucugaaauuggcaacaggaaugcgaaauguaccagagaaacaaacuagaggcauauuuggcgcaauagcggguuucauagaaaaugguugggagggaaugguggaugguugguacgguuucaggcaucaaaauucugagggaagaggacaagcagcagaucucaaaagcacucaagcagcaaucgaucaaaucaaugggaagcugaaucgauugaucgggaaaaccaacgagaaauuccaucagauugaaaaagaauucucagaaguagaagggagaauucaggaccuugagaaauauguugaggacacaaaaauagaucucuggucauacaacgcggagcuucuuguugcccuggagaaccaacauacaauugaucuaacugacucagaaaugaacaaacuguuugaaaaaacaaagaagcaacugagggaaaaugcugaggauaugggcaaugguuguuucaaaauauaccacaaaugugacaaugccugcauaggaucaaucagaaauggaacuuaugaccacgauguauacagggaugaagcauuaaacaaccgguuucagaucaagggaguugagcugaagucaggguacaaagauuggauccuauggauuuccuuugccauaucauguuuuuugcucugugcugcuuuguugggguucaucaugugggccugccaaaagggcaacauuaggugcaacauuugcauuuga

SEQ ID NO: 42544 - RNA, 1701 nt, Artificial Sequence
  derived and/or modified CDS sequence (wt) from hemagglutinin__InfluenzaA__AGW01535
augaagacuaucauugcuuugagcuacauucuaugucugguuuucgcucaaaaacuuccuggaaaugacaauagcacggcaacgcugugccuugggcaccaugcagugccaaacggaacgauagugaaaacaaucacaaaugaccgaauugaagucacuaaugcuacugagcugguucagaauuccucaauaggugaaauaugcgacaguccucaucagauccuugauggagaaaacugcacacuaauagaugcucuauugggagacccucagugugauggcuuucaaaauaagaaaugggaccuuuuuguugaacgaagcaaagccuacagcaacuguuacccuuaugaugugccggauuaugccucccuuaggucacuaguugccucauccggcacacuggaguuuaacaaagaaagcuucaauugggcuggggucacucaaaacggaacaaguucugcuugcauaaggggaucuaauaguaguuucuuuaguagauuaaauugguugacccacuuaaacuucaaauacccagcauugaacgugacuaugccaaacaaugaacaauuugacaaauuguacauuugggggguucaccacccggguacggacaaggaccaaaucuuccuguaugcucaaucaucaggaagaaucacaguaucuaccaaaagaagccaacaagcuguaaucccgaauaucggaucuagacccagaauaaggaauaucccuagcagaauaagcaucuauuggacaauaguaaaaccgggagacauacuuuugauuaacagcacagggaaucuaauugcuccuagggguuacuucaaaauacgaagugggaaaagcucaauaaugagaucagaugcacccauuggcaaaugcaagucugaaugcaucacuccaaauggaagcauucccaaugacaaaccauuccaaaauguaaacaggaucacauacggggccugucccagauauguuaagcaaagcacucugaaauuggcaacaggaaugcgaaauguaccagagaaacaaaccagaggcauauuuggcgcaauagcggguuucauagaaaaugguugggagggaaugguggaugguugguacgguuucaggcaucaaaauucugagggaagaggacaagcagcagaucucaaaagcacucaagcagcaaucgaucaaaucaaugggaagcugaaucgauugaucgggaaaaccaacgagaaauuccaucagauugaaaaagaauucucagaaguagaagggagaauucaggaccuugagaaauauguugaggacacaaaaauagaucucuggucauacaacgcggagcuucuuguugcccuggagaaccaacauacaauugaucuaacugacucagaaaugaacaaacuguuugaaaaaacaaagaagcaacugagggaaaaugcugaggauaugggcaaugguuguuucaaaauauaccacaaaugugacaaugccugcauaggaucaaucagaaauggaacuuaugaccacgauguauacagggaugaagcauuaaacaaccgguuccagaucaagggaguugagcugaagucaggguacaaagauuggauccuauggauuuccuuugccauaucauguuuuuugcuuuguguugcuuuguugggguucaucaugugggccugccaaaagggcaacauuaggugcaacauuugcauuuga

SEQ ID NO: 42545 - RNA, 1701 nt, Artificial Sequence; identical to SEQ ID NO: 41879
  derived and/or modified CDS sequence (wt) from hemagglutinin__InfluenzaA__AGW01547

SEQ ID NO: 42546 - RNA, 1701 nt, Artificial Sequence; identical to SEQ ID NO: 42059
  derived and/or modified CDS sequence (wt) from hemagglutinin__InfluenzaA__AGW01559

SEQ ID NO: 42547 - RNA, 1701 nt, Artificial Sequence; identical to SEQ ID NO: 42489
  derived and/or modified CDS sequence (wt) from hemagglutinin__InfluenzaA__AGW01571

SEQ ID NO: 42548 - RNA, 1701 nt, Artificial Sequence; identical to SEQ ID NO: 42489
  derived and/or modified CDS sequence (wt) from hemagglutinin__InfluenzaA__AGW01583

SEQ ID NO: 42549 - RNA, 1701 nt, Artificial Sequence
  derived and/or modified CDS sequence (wt) from hemagglutinin__InfluenzaA__AGW01595
augaagacuaucauugcuuugagcuacauucuaugucugguuuucgcucaaaaacuuccuggaaaugacaauagcacggcaacgcugugccuugggcaccaugcaguaccaaacggaacgauagugaaaacaaucacgaaugaccgaauugaagucacuaaugcuacugagcugguucagaauuccucaauaggugaaauaugcgacaguccucaucagauccuugauggagaaaacugcacacuaauagaugcucuauugggagacccucagugugauggcuuucaaaauaagaaaugggaccuuuuuguugaacgaagcaaagccuacagcaacuguuacccuuaugaugugccggauuaugccucccuuaggucacuaguugccucauccggcacacuggaguuuaacaaugaaagcuucaauugggcuggggucacucaaaacggaacaaguucugcuugcauaaggggaucuaauaguaguuucuuuaguagauuaaauugguugacccacuuaaacuucaaauacccagcauugaacgugacuaugccaaacaaugaacaauuugacaaauuguacauuugggggguucaccacccggguacggacaaggaccaaaucuuccuguaugcucaaucaucaggaagaaucacaguaucuaccaaaagaagccaacaagcuguaaucccgaauaucggaucuagacccagaauaaggaauaucccuagcagaauaagcaucuauuggacaauaguaaaaccgggagacauacuuuugauuaacagcacagggaaucuaauugcuccuagggguuacuucaaaauacgaagugggaaaagcucaauaaugagaucagaugcacccauuggcaaaugcaagucugaaugcaucacuccaaauggaagcauucccaaugacaaaccauuccaaaauguaaacaggaucacauacggggccugucccagauauguuaagcaaagcacucugaaauuggcaacaggaaugcgaaauguaccagagaaacaaaccagaggcauauuuggcgcaauagcggguuucauagaaaaugguugggagggaaugguggaugguugguacgguuucaggcaucaaaauucugagggaagaggacaagcagcagaucucaaaagcacucaagcagcaaucgaucaaaucaaugggaagcugaaucgauugaucgggaaaaccaacgagaaauuccaucagauugaaaaagaauucucagaaguagaagggagaauucaggaccuugagaaauauguugaggacacaaaaauagaucucuggucauacaacgcggagcuccuuguugcccuggagaaccaacauacaauugaucuaacugacucagaaaugaacaaacuguuugaaaaaacaaagaagcaacugagggaaaaugcugaggauaugggcaaugguuguuucaaaauauaccacaaaugugacaaugccugcauaggaucaaucagaaauggaacuuaugaccacgauguauacagggaugaagcauuaaacaaccgguuccagaucaagggaguugagcugaagucaggguacaaagauuggauccuauggauuuccuuugccauaucauguuuuuugcuuuguguugcuuuguugggguucaucaugugggccugccaaaagggcaacauuaggugcaacauuugcauuuga

SEQ ID NO: 42550 - RNA, 1701 nt, Artificial Sequence
  derived and/or modified CDS sequence (wt) from hemagglutinin__InfluenzaA__AGW01607
augaagacuaucauugcuuugagcuacauucuaugucugguucucgcucaaaaacuuccuggaaaugacaauagcacggcaacgcugugccuugggcaccaugcaguaccaaacggaacgauagugaaaacaaucacgaaugaccgaauugaaguuacuaaugcuacugagcugguucagaauuccucaauaggugaaauaugcgacaguccucaucagauccuugauggagaaaacugcacacuaauagaugcucuauugggagacccucagugugauggcuuucaaaauaagaaaugggaccuuuucguugaacgaagcaaagccuacagcaacuguuacccuuaugaugugccggauuaugccucccuuaggucacuaguugccucauccggcacacuggaguuuaacaaugaaagcuucaauugggcuggagucacucaaaacggaacaaguucugcuugcauaaggggaucuaauaguaguuucuuuaguagauuaaauugguugacccacuuaaacuucaaauacccagcauugaacgugacuaugccaaacaaugagcaauuugacaaauuguacauuugggggguucaccacccggguacggacaaggaccaaaucuuccuguaugcucaaucaucaggaagaaucacaguaucuaccaaaagaagccaacaagcuguaaucccgaauaucggaucuagacccagaauaaggaauaucccuagcagaauaagcaucuauuggacaauaguaaaaccgggagacauacuuuugauuaacagcacagggaaucuaauugcuccuagggguuacuucaaaauacgaagugggaaaagcucaauaaugagaucagaugcacccauuggcaaaugcaaaucugaauguaucacuccaaauggaagcauucccaaugacaaaccauuccaaaauguaaacaggaucacauacggggccugucccagauauguuaagcaaagcacucugaaauuggcaacaggaaugcgaaauguaccagagaaacaaacuagaggcauauuuggcgcaauagcggguuucauagaaaaugguugggagggaaugguggaugguugguacgguuucaggcaucaaaauucugagggaagaggacaagcagcagaucucaaaagcacucaagcagcaaucgaucaaaucaaugggaagcugaaucgauugaucgggaaaaccaacgagaaauuccaucagauugaaaaagaauucucagaaguagaagggagaauucaggaccuugagaaauauguugaggacacaaaaauagaucucuggucauacaacgcggagcuucuuguugcccuggagaaccaacauacaauugaucuaacugacucagaaaugaacaaacuguuugaaaaaacaaagaagcaacugagggaaaaugcugaggauaugggcaaugguuguuucaaaauauaccacaaaugugacaaugccugcauaggaucaaucagaaauggaacuuaugaccacgauguauacagggaugaagcauuaaacaaccgguuccagaucaagggaguugagcugaagucaggguacaaagauuggauccuauggauuuccuuugccauaucauguuuuuugcuuuguguugcuuuguugggguucaucaugugggccugccaaaagggcaacauuaggugcaacauuugcauuuga

SEQ ID NO: 42551 - RNA, 1701 nt, Artificial Sequence
  derived and/or modified CDS sequence (wt) from hemagglutinin__InfluenzaA__AGW01619
augaagacuaucauugcuuugagcuacauucuaugucugguuuucgcucaaaaacuuccuggaaaugacaauagcacggcaacgcugugccuugggcaccaugcaguaccaaacggaacgauagugaaaacaaucacgaaugaccaaauugaaguuacuaaugcuacugagcuaguucagaauuccucaauaggugaaauaugcgacaguccucaucagauccuugauggagaaaacugcacacuaauagaugcucuauugggagacccucagugugauggcuuucaaaauaagaaaugggaccuuuuuguugaacgaagcaaagccuacagcaacuguuacccuuaugaugugccggauuaugccucccuuaggucacuaguugccucauccggcacacuggaguuuaacaaugaaagcuucaauugggcuggagucacucaaaacggaacaaguucugcuugcauaaggggaucuaauaguaguuucuuuaguagauuaaauugguugacccacuuaaacuucaaguacccagcauugaacgugacuaugccaaacaaugaacaauuugacaaauuguacauuugggggguucaccacccggguacggacaaggaccaaaucuuccuguaugcucaaucaucaggaagaaucacaguaucuaccaaaagaagccaacaagcuguaaucccgaauaucggaucuagacccagaauaaggaauaucccuagcagaauaagcaucuauuggacaauaguaaaaccgggagacauacuuuugauuaacagcacagggaaucuaauugcuccuagggguuacuucaaaauacgaagugggaaaagcucaauaaugagaucagaugcacccauuggcaaaugcaagucugaaugcaucacuccaaauggaagcauucccaaugacaaaccauuccaaaauguaaacaggaucacauacggggccugucccagauauguuaagcaaagcacucugaaauuggcaacaggaaugcgaaauguaccagagaaacaaacuagaggcauauuuggcgcaauagcggguuucauagaaaaugguugggagggaaugguggaugguugguacgguuucaggcaucaaaauucugagggaagaggacaagcagcagaucucaaaagcacucaagcagcaaucgaucaaaucaaugggaagcugaaucgauugaucgggaaaaccaacgagaaauuccaucagauugagaaagaauucucagaaguagaagggagaauucaggaccuugagaaauauguugaggacacaaaaauagaucucuggucauacaacgcagagcuucuuguugcccuggagaaccaacauacaauugaucuaacugacucagaaaugaacaaacuguuugaaaaaacaaagaagcaacugagggaaaaugcugaggauaugggcaaugguuguuucaaaauauaccacaaaugugacaaugccugcauaggaucaaucagaaauggaacuuaugaccacgauguauacagggaugaagcauuaaacaaccgguuccagaucaagggaguugagcugaagucaggguacaaagauuggauccuauggauuuccuuugccauaucauguuuuuugcuuuguguugcuuuguugggguucaucaugugggccugccaaaagggcaacauuaggugcaacauuugcauuuga

SEQ ID NO: 42552 - RNA, 1701 nt, Artificial Sequence; identical to SEQ ID NO: 42489
  derived and/or modified CDS sequence (wt) from hemagglutinin__InfluenzaA__AGW01631

SEQ ID NO: 42553 - RNA, 1701 nt, Artificial Sequence
  derived and/or modified CDS sequence (wt) from hemagglutinin__InfluenzaA__AGW01643
augaagacuaucauugcuuugagcuacauucuaugucugguuuucgcucaaaaacuuccuggaaaugacaauagcacggcaacgcugugccuugggcaccaugcaguaccaaacggaacgauagugaaaacaaucacgaaugaccgaauugaaguuacuaaugcuacugagcugguucagaauuccucaauaggugaaauaugcgacaguccucaucagauccuugauggagaaaacugcacacuaauagaugcucuauugggagacccucagugugauggcuuucaaaauaagaaaugggaccuuuuuguugaacgaagcaaagccuacagcaacuguuacccuuaugaugugccggauuaugccucccuuaggucacuaguugccucauccggcacacuggaguuuaacaaugaaagcuucaauuggacuggagucacucaaaacggaacaaguucugcuugcauaaggggaucuaauaguaguuucuuuaguagauuaaauugguugacccacuuaaacuucaaauacccagcauugaacgugacuaugccaaacaaugaacaauuugacaaauuguacauuugggggguucaccacccggguacggacaaggaccaaaucuuccuguaugcucaaucaucaggaagaaucacaguaucuaccaaaagaagccaacaagcuguaaucccgaauaucggaucuagacccagaauaaggaauaucccuagcagaauaagcaucuauuggacaauaguaaaaccgggagacauacuuuugauuaacagcacagggaaucuaauugcuccuagggguuacuucaaaauacgaagugggaaaagcucaauaaugagaucagaugcacccauuggcaaaugcaagucugaaugcaucacuccaaauggaagcauucccaaugacaaaccauuccaaaauguaaacaggaucacauacggggccugucccagauauguuaagcaaagcacucugaaauuggcaacaggaaugcgaaauguaccagagaaacaaacuagaggcauauuuggcgcaauagcggguuucauagaaaaugguugggagggaaugauggaugguugguacgguuucaggcaucaaaauucugagggaagaggacaagcagcagaucucaaaagcacucaagcagcaaucgaucaaaucaaugggaagcugaaucgauugaucgggaaaaccaacgagaaauuccaucagauugaaaaagaauucucagaaguagaagggagaauucaggaccuugagaaauauguugaggacacaaaaauagaucucuggucauacaacgcggagcuucuuguugcccuggagaaccaacauacaauugaucuaacugacucagaaaugaacaaacuguuugaaaaaacaaagaagcaacugagggaaaaugcugaggauaugggcaaugguuguuucaaaauauaccacaaaugugacaaugccugcauaggaucaaucagaaauggaacuuaugaccacgauguauacagggaugaagcauuaaacaaccgguuccagaucaagggaguugagcugaagucaggguacaaagauuggauccuauggauuuccuuugccauaucauguuuuuugcuuuguguugcuuuguugggguucaucaugugggccugccaaaagggcaacauuaggugcaacauuugcauuuga

SEQ ID NO: 42554 - RNA, 1701 nt, Artificial Sequence
  derived and/or modified CDS sequence (wt) from hemagglutinin__InfluenzaA__AGW01655
augaagacuaucauugcuuugagcuacauucuaugucugguuuucgcucaaaaacuuccuggaaaugacaauagcacggcaacgcugugccuugggcaccaugcaguaccaaacggaacgauagugaaaacaaucacgaaugaccgaauugaaguuacuaaugcuacugagcugguucagaauuccucaauaggugaaauaugcgacaguccucaucagauccuugauggagaaaacugcacacuaauagaugcucuauugggagacccucagugugauggcuuucaaaauaagaaaugggaccuuuuuguugaacgaagcaaagccuacagcaacuguuacccuuaugaugugccggauuaugccucccuuaggucacuaguugccucauccggcacacuggaguuuaacaaugaaagcuucaauugggcuggagucacucaaaacggaacaaguucugcuugcauaaggggaucuaauaguaguuucuuuaguagauuaaauugguugacccacuuaaacuucaaauacccagcauugaacgugacuaugccaaacaaugagcaauuugacaaauuguacauuugggggguccaccacccggguacggacaaggaccaaaucuuccuguaugcucaaucaucaggaagaaucacaguaucuaccaaaagaagccaacaagcuguaaucccgaauaucggaucuagacccagaauaaggaauaucccuagcagaauaagcaucuauuggacaauaguaaaaccgggagacauacuuuugauuaacagcacagggaaucuaauugcuccuagagguuacuucaaaauacgaagugggaaaagcucaauaaugagaucagaugcacccauuggcaaaugcaaaucugaauguaucacuccaaauggaagcauucccaaugacaaaccauuccaaaauguaaacaggaucacauacggggccugucccagauauguuaagcaaagcacucugaaauuggcaacaggaaugcgaaauguaccagagaaacaaacuagaggcauauuuggcgcaauagcggguuucauagaaaaugguugggagggaaugguggaugguugguacgguuucaggcaucaaaauucugagggaagaggacaagcagcagaucucaaaagcacucaagcagcaaucgaucaaaucaaugggaagcugaaucgauugaucgggaaaaccaacgagaaauuccaucagauugaaaaagaauucucagaaguagaagggagaauucaggaccuugagaaauauguugaggacacaaaaauagaucucuggucauacaacgcggagcuucuuguugcccuggagaaccaacauacaauugaucuaacugacucagaaaugaacaaacuguuugaaaaaacaaagaagcaacugagggaaaaugcugaggauaugggcaaugguuguuucaaaauauaccacaaaugugacaaugccugcauaggaucaaucagaaauggaacuuaugaccacgauguauacagggaugaagcauuaaacaaccgguuccagaucaagggaguugagcugaagucaggguacaaagauuggauccuauggauuuccuuugccauaucauguuuuuugcuuuguguugcuuuguugggguucaucaugugggccugccaaaagggcaacauuaggugcaacauuugcauuuga

SEQ ID NO: 42555 - RNA, 1701 nt, Artificial Sequence
  derived and/or modified CDS sequence (wt) from hemagglutinin__InfluenzaA__AGW01667
augaagacuaucauugcuuugagcuacauucuaugucugguuuucgcucaaaaacuuccuggaaaugacaauagcacggcaacgcugugccuugggcaccaugcaguaccaaacggaacgauagugaaaacaaucacgaaugaccgaauugaagucacuaaugcuacugagcugguucagaauuccucaauaggugaaauaugcgacaguccucaucagauccuugauggagaaaacugcacacuaauagaugcucuauugggagacccucagugugauggcuuucaaaauaagaaaugggaccuuuuuguugaacgaagcaaagccuacagcaacuguuacccuuaugaugugccggauuaugccucccuuaggucacuaguugccucauccggcacacuggaguuuaacaaugaaagcuucaauugggcuggggucacucaaaacggaacaaguucugcuugcauaaggggaucuaauaguaguuucuuuaguagauuaaauugguugacccacuuaaacuucaaauacccagcauugaacgugacuaugccaaacaaugaacaauuugacaaauuguacauuugggggguucaccacccggguacggacaaggaccaaaucuuccuguaugcucaaucaucaggaagaaucacaguaucuaccaaaagaagccaacaagcuguaaucccgaauaucggaucuagacccagaauaaggaauaucccuagcagaauaagcaucuauuggacaauaguaaaaccgggagacauacuuuugauuaacagcacagggaaucuaauugcuccuagggguuacuucaaaauacgaagugggaaaagcucaauaaugagaucagaugcacccauuggcaaaugcaagucugaaugcaucacuccaaauggaagcauucccaaugacaaaccauuccaaaauguaaacaggaucacauacggggccugucccagauauguuaagcaaagcacucugaaauuggcaacaggaaugcgaaauguaccagagaaacaaaccagaggcauauuuggcgcaauagcggguuucauagaaaaugguugggagggaaugguggaugguugguacgguuucaggcaucaaaauucugagggaagaggacaagcagcagaucucaaaagcacucaagcagcaaucgaucaaaucaaugggaagcugaaucgauugaucgggaaaaccaacgagaaauuccaucagauugaaaaagaauucucagaaguagaagggagaauucaggaccuugagaaauauguugaggacacaaaaauagaucucuggucauacaacgcggagcuucuuguugcccuggagaaccaacauacaauugaucuaacugacucagaaaugaacaaacuguuugaaaaaacaaagaagcaacugagggaaaaugcugaggauaugggcaaugguuguuucaaaauauaccacaaaugugacaaugccugcauaggaucaaucagaaaugaaacuuaugaccacgauguauacagggaugaagcauuaaacaaccgguuccagaucaagggaguugagcugaagucaggguacaaagauuggauccuauggauuuccuuugccauaucauguuuuuugcuuuguguugcuuuguugggguucaucaugugggccugccaaaagggcaacauuaggugcaacauuugcauuuga

SEQ ID NO: 42556 - RNA, 1701 nt, Artificial Sequence; identical to SEQ ID NO: 42489
  derived and/or modified CDS sequence (wt) from hemagglutinin__InfluenzaA__AGW01679

SEQ ID NO: 42557 - RNA, 1701 nt, Artificial Sequence
  derived and/or modified CDS sequence (wt) from hemagglutinin__InfluenzaA__AGW01691
augaagacuaucauugcuuugagcuacauucuaugucugguuuucgcucaaaaacuuccuggaaaugacaauagcacggcaacgcugugccuugggcaccaugcaguaccaaacggaacgauagugaaaacaaucacgaaugaccgaauugaaguuacuaaugcuacugagcugguucagaauuccucaauaggugaaauaugcgacaguccucaucagauccuugauggagaaaacugcacacuaauagaugcucuauugggagacccucagugugauggcuuucaaaauaagaaaugggaccuuuuuguugaacgaagcaaagccuacagcaacuguuacccuuaugaugugccggauuaugccucccuuaggucacuaguugccucauccggcacacuggaguuuaacaaugaaagcuucaauuggacuggagucacucaaaacggaacaaguucugcuugcauaaggagaucuaauaguaguuucuuuaguagauuaaauugguugacccacuuaaacuucaaauacccagcauugaacgugacuaugccaaacaaugaacaauuugacaaauuguacauuugggggguucaccacccggguacggacaaggaccaaaucuuccuguaugcucaaucaucaggaagaaucacaguaucuaccaaaagaagccaacaagcuguaaucccgaauaucggaucuagacccagaauaaggaauaucccuagcagaauaagcaucuauuggacaauagugaaaccgggagacauacuuuugauuaacagcacaggaaaucuaauugcuccuagggguuacuucaaaauacgaagugggaaaagcucaauaaugagaucagaugcacccauuggcaaaugcaagucugaaugcaucacuccaaauggaagcauucccaaugacaaaccauuccaaaauguaaacaggaucacauacggggccugucccagauauguuaagcaaagcacucugaaauuggcaacaggaaugcgaaauguaccagagaaacaaacuagaggcauauuuggcgcaauagcggguuucauagaaaaugguugggagggaaugguggaugguugguacgguuucaggcaucaaaauucugaaggaagaggacaagcagcagaucucaaaagcacucaagcagcaaucgaucaaaucaaugggaagcugaaucgguugaucgggaaaaccaacgagaaauuccaucagauugaaaaagaauucucagaaguagaagggagaauucaggaccuugagaaauauguugaggacacuaaaauagaucucuggucauacaacgcggagcuucuuguugcccuggagaaccaacauacaauugaucuaacugacucagaaaugaacaaacuguuugaaaaaacaaagaagcaacugagggaaaaugcugaggauaugggcaaugguuguuucaaaauauaccauaaaugugacaaugccugcauaggaucaaucagaaauggaacuuaugaccacgauguguacagggaugaagcauuaaacaaccgguuccagaucaagggaguugagcugaagucaggguacaaagacuggauccuauggauuuccuuugccauaucauguuuuuugcuuuguguugcuuuguugggguucgucaugugggccugccaaaagggcaacauuaggugcaacauuugcauuuga

SEQ ID NO: 42558 - RNA, 1701 nt, Artificial Sequence
  derived and/or modified CDS sequence (wt) from hemagglutinin__InfluenzaA__AGW01701
augaagacuaucauugcuuugagcuacauucuaugucugguuuucgcucaaaaacuuccuggaaaugacaauagcacggcaacgcugugccuugggcaccaugcaguaccaaacggaacgauagugaaaacaaucacgaaugaccgaauugaaguuacuaaugcuacugagcugguucagaauuccucaauaggugaaauaugcgacaguccucaucagauccuugauggagaaaauugcacacuaauagaugcucuauugggagacccucagugugauggcuuucaaaauaagaaaugggaccuuuuuguugaacgaagcaaagccuacagcaacuguuacccuuaugaugugccggauuaugccucccuuaggucacuaguugccucauccggcacacuggaguuuaacaaugaaagcuucaauuggacuggagucacucaaaacggaacaaguucugcuugcauaaggagaucuaauaguaguuucuuuaguagauuaaauugguugacccacuuaaacuucaaauacccagcauugaacgugacuaugccaaacaaugaacaauuugacaaauuguacauuuggggaguucaccacccggguacggacaaggaccaaaucuuccuguaugcucaaucaucaggaagaaucacaguaucuaccaaaagaagccaacaagcuguaaucccaaauaucggaucuagacccagaauaaggaauaucccuagcagaauaagcaucuauuggacaauaguaaaaccgggagacauacuuuugauuaacagcacagggaaucuaauugcuccuagggguuacuucaaaauacgaagugggaaaagcucaauaaugagaucagaugcacccauuggcaaaugcaagucugaaugcaucacuccaaauggaagcauucccaaugacaaaccauuccaaaauguaaacaggaucacauacggggccugucccagauauguuaagcaaagcacucugaaauuggcaacaggaaugcgaaauguaccagagaaacaaacuagaggcauauuuggcgcaauagcggguuucauagaaaauggcugggagggaaugguggaugguugguacgguuucaggcaucaaaauucugagggaagaggacaagcagcagaucucaaaagcacucaagcagcaaucgaucaaaucaaugggaagcugaaucgauugaucgggaaaaccaacgagaaauuccaucagauugaaaaagaauucucagaaguagaagggagaauucaggaccuugagaaauauguugaggacacuaaaauagaucucuggucauacaacgcggagcuucuuguugcccuggagaaucaacauacaauugaucuaacugacucagaaaugaacaaacuguuugaaaaaacaaagaagcaacugagggaaaaugcugaggauaugggcaaugguuguuucaaaauauaccacaaaugugacaaugccugcauaggaucaaucagaaauggaacuuaugaccacaauguguacagggaugaagcauuaaacaaccgguuccagaucaagggaguugagcuuaagucaggguacaaagauuggauccuauggauuuccuuugccauaucauguuuuuugcuuuguguugcuuuguugggguucaucaugugggccugccaaaagggcaacauuaggugcaacauuugcauuuga

SEQ ID NO: 42559 - RNA, 1701 nt, Artificial Sequence; identical to SEQ ID NO: 41879
  derived and/or modified CDS sequence (wt) from hemagglutinin__InfluenzaA__AGW01713

SEQ ID NO: 42560 - RNA, 1701 nt, Artificial Sequence
  derived and/or modified CDS sequence (wt) from hemagglutinin__InfluenzaA__AGW01725
augaagacuaucauugcuuugagcuacauucuaugucugguuuucgcucaaaaacuuccuggaaaugacaauagcacggcaacgcugugccuugggcaccaugcaguaccaaacggaacgauagugaaaacaaucacgaaugaccgaauugaaguuacuaaugcuacugagcugguucagaauuccucaauaggugaaauaugcgacaguccucaucagauccuugauggagaaaauugcacacuaauagaugcucuauugggagacccucagugugauggcuuucaaaauaagaaaugggaccuuuuuguugaacgaagcaaagccuacagcaacuguuacccuuaugaugugccggauuaugccucccuuaggucacuaguugccucauccggcacacuggaguuuaacaaugaaagcuucaauuggacuggagucacucaaaacggaacaaguucugcuugcauaaggagaucuaauaguaguuucuuuaguagauuaaauugguugacccacuuaaacuucaaauacccagcauugaacgugacuaugccaaacaaugaacaauuugacaaauuguacauuuggggaguucaccacccggguacggacaaggaccaaaucuuccuguaugcucaaucaucaggaagaaucacaguaucuaccaaaagaagccaacaagcuguaaucccaaauaucggaucuagacccagaauaaggaauaucccuagcagaauaagcaucuauuggacaauaguaaaaccgggagacauacuuuugauuaacagcacagggaaucuaauugcuccuagggguuacuucaaaauacgaagugggaaaagcucaauaaugagaucagaugcacccauuggcaaaugcaagucugaaugcaucacuccaaauggaagcauucccaaugacaaaccauuccaaaauguaaacaggaucacauacggggccugucccagauauguuaagcaaagcacucugaaauuggcaacaggaaugcgaaauguaccagagaaacaaacuagaggcauauuuggcgcaauagcggguuucauagaaaaugguugggagggaaugguggaugguugguacgguuucaggcaucaaaauucugagggaagaggacaagcagcagaucucaaaagcacucaagcagcaaucgaucaaaucaaugggaagcugaaucgauugaucgggaaaaccaacgagaaauuccaucagauugaaaaagaauucucagaaguagaagggagaauucaggaccuugagaaauauguugaggacacuaaaauagaucucuggucauacaacgcggagcuucuuguugcccuggagaaucaacauacaauugaucuaacugacucagaaaugaacaaacuguuugaaaaaacaaagaagcaacugagggaaaaugcugaggauaugggcaaugguuguuucaaaauauaccacaaaugugacaaugccugcauaggaucaaucagaaauggaacuuaugaccacaauguguacagggaugaagcauuaaacaaccgguuccagaucaagggaguugagcuuaagucaggguacaaagauuggauccuauggauuuccuuugccauaucauguuuuuugauuuguguugcuuuguugggguucaucaugugggccugccaaaagggcaacauuaggugcaacauuugcauuuga

SEQ ID NO: 42561 - RNA, 1701 nt, Artificial Sequence; identical to SEQ ID NO: 41870
  derived and/or modified CDS sequence (wt) from hemagglutinin__InfluenzaA__AGW01737

SEQ ID NO: 42562 - RNA, 1701 nt, Artificial Sequence
  derived and/or modified CDS sequence (wt) from hemagglutinin__InfluenzaA__AGW01749
augaagacuaucauugcuuugagcuacauucuaugucugguuuucgcucaaaaacuuccuggaaaugacaauagcacggcaacgcugugccuugggcaccaugcaguaccaaacggaacgauagugaaaacaaucacgaaugaccgaauugaaguuacuaaugcuacugagcugguucagaauuccucaauaggugaaauaugcgacaguccucaucagauccuugauggagaaaacugcacacuaauagaugcucuauugggagacccucagugugauggcuuucaaaauaagaaaugggaccuuuuuguugaacgaagcaaagccuacagcaacuguuacccuuaugaugugccggauuaugccucccuuaggucacuaguugccucauccggcacacuggaguuuaacaaugaaagcuucaauugggcuggagucacucaaaacggaacaaguucugcuugcauaaggggaucuaauaguaguuucuuuaguagauuaaauugguugacccacuuaaacuucaaauacccagcauugaacgugacuaugccaaacaaugaacaauuugacaaauuguacauuugggggguucaccacccggguacggacaaggaccaaaucuuccuguaugcucaaucaucaggaagaaucacaguaucuaccaaaagaagccaacaagcuguaaucccgaauaucggaucuagacccagaauaaggaauaucccuagcagaauaagcaucuauuggacaauaguaaaaccgggagacauacuuuugauuaacagcacagggaaucuaauugcuccuagggguuacuucaaaauacgaagugggaaaagcucaauaaugagaucagaugcacccaucggcaaaugcaagucugaaugcaucacuccaaauggaagcauucccaaugacaaaccauuccaaaauguaaacaggaucacauacggggccugucccagauauguuaagcaaagcacucugaaguuggcaacaggaaugcgaaauguaccagagaaacaaacuagaggcauauuuggcgcaauagcggguuucauagaaaaugguugggagggaaugguggaugguugguacgguuucaggcaucaaaauucugagggaagaggacaagcagcagaucucaaaagcacucaagcagcaaucgaucaaaucaaugggaagcugaaucgauugaucgggaaaaccaacgagaaauuccaucagauugaaaaagaauucucagaaguagaagggagaauucaggaccuugagaaauauguugaggacacaaaaauagaucucuggucauacaacgcggagcuucuuguugcccuggagaaccaacauacaauugaucuaacugacucagaaaugaacaaacuguuugaaaaaacaaagaagcaacugagggaaaaugcugaggauaugggcaaugguuguuucaaaauauaccacaaaugugacaaugccugcauaggaucaaucagaaauggaacuuaugaccacgauguauacagggaugaagcauuaaacaaccgguuccagaucaagggaguugagcugaagucaggguacaaagauuggauccuauggauuuccuuugccauaucauguuuuuugcuuuguguugcuuuguugggguucaucaugugggccugccaaaagggcaacauuaggugcaacauuugcauuuga

SEQ ID NO: 42563 - RNA, 1701 nt, Artificial Sequence
  derived and/or modified CDS sequence (wt) from hemagglutinin__InfluenzaA__AGW01761
augaagacuaucauugcuuugagcuacauucuaugucugguuuucgcucaaaaacuuccuggaaaugacaauagcacggcaacgcugugccuugggcaccaugcaguaccaaacggaacgauagugaaaacaaucacgaaugaccgaauugaagucacuaaugcuacugagcugguucagaauuccucaauaggugaaauaugcgacaguccucaucagauccuugauggagaaaacugcacacuaauagaugcucuauugggagacccucagugugauggcuuucaaaauaagaaaugggaccuuuuuguugaacgaagcaaagccuacagcaacuguuacccuuaugaugugccggauuaugccucccuuaggucacuaguugccucauccggcacacuggaguuuaacaaugaaaguuucaauugggcuggggucacucaaaacggaacaaguucugcuugcauaaggggaucuaauaguaguuucuuuaguagauuaaauugguugacccacuuaaacuucaaauacccagcauugaacgugacuaugccaaacaaugaacaauuugacaaauuguacauuugggggguucaccacccggguacggacaaggaccaaaucuuccuguaugcucaaucaucaggaagaaucacaguaucuaccaaaagaagccaacaagcuguaaucccgaauaucggaucuagacccagaauaaggaauaucccuagcagaauaagcaucuauuggacaauaguaaaaccgggagacauacuuuugauuaacagcacagggaaucuaauugcuccuagggguuacuucaaaauacgaagugggaaaagcucaauaaugagaucagaugcacccauuggcaaaugcaagucugaaugcaucacuccaaauggaagcauucccaaugacaaaccauuccaaaauguaaacaggaucacauacggggccugucccagauauguuaagcaaagcacucugaaauuggcaacaggaaugcgaaauguaccagagaaacaaaccagaggcauauuuggcgcaauagcggguuucauagaaaaugguugggagggaaugguggaugguugguacgguuucaggcaucaaaauucugagggaagaggacaagcagcagaucucaaaagcacucaagcagcaaucgaucaaaucaaugggaagcugaaucgauugaucgggaaaaccaacgagaaauuccaucagauugaaaaagaauucucagaaguagaagggagaauucaggaccuugagaaauauguugaggacacaaaaauagaucucuggucauacaacgcggagcuucuuguugcccuggagaaccaacauacaauugaucuaacugacucagaaaugaacaaacuguuugaaaaaacaaagaagcaacugagggaaaaugcugaggauaugggcaaugguuguuucaagauauaccacaaaugugacaaugccugcauaggaucaaucagaaauggaacuuaugaccacgauguauacagggaugaagcauuaaacaaccgguuccagaucaagggaguugagcugaagucaggguacaaagauuggauccuauggauuuccuuugccauaucauguuuuuugcuuuguguugcuuuguugggguucaucaugugggccugccaaaagggcaacauuaggugcaacauuugcauuuga

SEQ ID NO: 42564 - RNA, 1701 nt, Artificial Sequence
  derived and/or modified CDS sequence (wt) from hemagglutinin__InfluenzaA__AGW01773
augaagacuaucauugcuuugagcuacauucuaugucugguuuucgcucaaaaacuuccuggaaaugacaauagcacugcaacgcugugccuugggcaccaugcaguaccaaacggaacgauagugaaaacaaucacgaaugaccgaauugaaguuacuaaugcuacugagcugguucagaauuccucaauaggugaaauaugcgacaguccucaucagauccuugauggagaaaauugcacacuaauagaugcucuauugggagacccucagugugauggcuuucaaaauaagaaaugggaccuuuuuguugaacgaagcaaagccuacagcaacuguuacccuuaugaugugccggauuaugccucccuuaggucacuaguugccucauccggcacacuggaguuuaacaaugaaagcuucaauuggacuggagucacucaaaacggaacaaguucugcuugcauaaggagaucuaauaguaguuucuuuaguagauuaaauugguugacccacuuaaacuucaaauacccagcauugaacgugacuaugccaaacaaugaacaauuugacaaauuguacauuuggggaguucaccacccggguacggacaaggaccaaaucuuccuguaugcucaaucaucaggaagaaucacaguaucuaccaaaagaagccaacaagcuguaaucccaaauaucggaucuagacccagaauaaggaauaucccuagcagaauaagcaucuauuggacaauaguaaaaccgggagacauacuuuugauuaacagcacagggaaucuaauugcuccuagggguuacuucaaaauacgaagugggaaaagcucaauaaugagaucagaugcacccauuggcaaaugcaagucugaaugcaucacuccaaauggaagcauucccaaugacaaaccauuccaaaauguaaacaggaucacauacggugccugucccagauauguuaagcaaagcacucugaaauuggcaacaggaaugcgaaauguaccagagaaacaaacuagaggcauauuuggcgcaauagcggguuucauagaaaaugguugggagggaaugguggaugguugguacgguuucaggcaucaaaauucugagggaagaggacaagcagcagaucucaaaagcacucaagcagcaaucgaucaaaucaaugggaagcugaaucgauugaucgggaaaaccaacgagaaauuccaucagauugaaaaagaauucucagaaguagaagggagaauucaggaccuugagaaauauguugaggacacuaaaauagaucucuggucauacaacgcggagcuucuuguugcccuggagaaucaacauacaauugaucuaacugacucagaaaugaacaaacuguuugaaaaaacaaagaagcaacugagggaaaaugcugaggauaugggcaaugguuguuucaaaauauaccacaaaugugacaaugccugcauaggaucaaucagaaauggaacuuaugaccacaauguguacagggaugaagcauuaaacaaccgguuccagaucaagggaguugagcuuaagucaggguacaaagauuggauccuauggauuuccuuugccauaucauguuuuuugcuuuguguugcuuuguugggguucaucaugugggccugccaaaagggcaacauuaggugcaacauuugcauuuga

SEQ ID NO: 42565 - RNA, 1701 nt, Artificial Sequence; identical to SEQ ID NO: 42059
  derived and/or modified CDS sequence (wt) from hemagglutinin__InfluenzaA__AGW01785

SEQ ID NO: 42566 - RNA, 1701 nt, Artificial Sequence; identical to SEQ ID NO: 41879
  derived and/or modified CDS sequence (wt) from hemagglutinin__InfluenzaA__AGW01797

SEQ ID NO: 42567 - RNA, 1701 nt, Artificial Sequence; identical to SEQ ID NO: 42059
  derived and/or modified CDS sequence (wt) from hemagglutinin__InfluenzaA__AGW01809

SEQ ID NO: 42568 - RNA, 1701 nt, Artificial Sequence
  derived and/or modified CDS sequence (wt) from hemagglutinin__InfluenzaA__AGW01821
augaagacuaucauugcuuugagcuacauucuaugucugguuuucgcucaaaaacuuccuggaaaugacaauagcacggcaacgcugugccuugggcaccaugcaguaccaaacggaacgauagugaaaacaaucacgaaugaccgaauugaaguuacuaaugcuacugagcugguucagaauuccucaauaggugaaauaugcgacaguccucaucagauccuugauggagaaaacugcacacuaauagaugcucuauugggagacccucagugugauggcuuucaaaauaagaaaugggaccuuuuuguugaacgaagcaaagccuacagcaacuguuacccuuaugaugugccggauuaugccucccuuaggucacuaguugccucauccggcacacuggaguuuaacaaugaaagcuucaauugggcuggagucacucaaaacggaacaaguucugcuugcauaaggggaucuaauaguaguuucuuuaguagauuaaauugguugacccacuuaaacuucaaauacccagcauugaacgugacuaugccaaacaaugagcaauuugacaaauuguacauuugggggguccaccacccggguacggacaaggaccaaaucuuccuguaugcucaaucaucaggaagaaucacaguaucuaccaaaagaagccaacaagcuguaaucccgaauaucggaucuagacccagaauaaggaauaucccuagcagaauaagcaucuauuggacaauaguaaaaccgggagacauacuuuugauuaacagcacagggaaucuaauugcuccuagggguuacuucaaaauacgaagugggaaaagcucaauaaugagaucagaugcacccauuggcaaaugcaaaucugaauguaucacuccaaauggaagcauucccaaugacaaaccauuccaaaauguaaacaggaucacauacggggccugucccagauauguuaagcaaagcacucugaaauuggcaacaggaaugcgaaauguaccagagaaacaaacuagaggcauauuuggcgcaauagcggguuucauagaaaaugguugggagggaaugguggaugguugguacgguuucaggcaucaaaauucugagggaagaggacaagcagcagaucucaaaagcacucaagcagcaaucgaucaaaucaaugggaagcugaaucgauugaucgggaaaaccaacgagaaauuccaucagauugaaaaagaauucucagaaguagaagggagaauucaggaccuugagaaauauguugaggacacaaaaauagaucucuggucauacaacgcagagcuucuuguugcccuggagaaccaacauacaauugaucuaacugacucagaaaugaacaaacuguuugaaaaaacaaagaagcaacugagggaaaaugcugaggauaugggcaaugguuguuucaaaauauaccacaaaugugacaaugccugcauaggaucaaucagaaauggaacuuaugaccacgauguauacagggaugaagcauuaaacaaccgguuccagaucaagggaguugagcugaagucaggguacaaagauuggaucuuauggauuuccuuugccauaucauguuuuuugcuuuguguugcuuuguugggguucaucaugugggccugccaaaagggcaacauuaggugcaacauuugcauuuga

SEQ ID NO: 42569 - RNA, 1701 nt, Artificial Sequence
  derived and/or modified CDS sequence (wt) from hemagglutinin__InfluenzaA__AGW01833
augaagacuaucauugcuuugagcuacauucuaugucugguuuucgcucaaaaaauuccuggaaaugacaauagcacggcaacgcugugccuugggcaccaugcaguaccaaacggaacgauagugaaaacaaucacgaaugaccgaauugaaguuacuaaugcuacugagcugguucagaauuccucaauaggugaaauaugcgacaguccucaucagauccuugauggagaaaacuguacacuaauagaugcucuauugggagacccucagugugauggcuuucagaauaagaaaugggaccuuuuuguugaacggagcaaagccuacagcaacuguuacccuuaugaugugccggauuaugccucccuuaggucacuaguugccucauccggcacacuggaguuuaacaaugaaagcuucaauuggacuggagucacucaaaacggaacaaguucugcuugcauaaggagaucuaauaguaguuucuuuaguagauuaaauugguugacccacuuaaacuucaaauacccagcauugaacgugacuaugccaaacaaugaacaauuugacaaauuguacauuugggggguucaccacccggguacggacaaggaccaaaucuuccuguaugcucaaucaucaggaagaaucacaguaucuaccaaaagaagccaacaagcuguaaucccgaauaucggaucuagacccagaauaaggaauaucccuagcagaauaagcaucuauuggacaauaguaaaaccaggagacauacuuuugauuaacagcacagggaaucuaauugcuccuagggguuacuucaaaauaagaagugggaaaagcucaauaaugagaucagaugcacccauuggcaaaugcaagucugaaugcaucacuccaaauggaagcauuccaaaugacaaaccauuccaaaauguaaacaggaucacauacggggccugucccagauauguuaagcaaagcacucugaaauuggcaacaggaaugcgaaauguaccagagaaacaaacuagaggcauauuuggcgcaauagcggguuucauagaaaaugguugggagggaaugguggaugguugguacgguuucaggcaucaaaauucugagggaagaggacaagcagcagaucucaaaagcacucaagcagcaaucgaucaaaucaaugggaagcugaaucgauugaucgggaaaaccaacgagaaauuccaucagauugaaaaagaauucucagaaguagaagggagaauucaggaccuugagaaauauguugaggacacuaaaauagaucucuggucauacaacgcggagcuucuuguugcccuggagaaccaacauacaauugaucuaacugacucagaaaugaacaaacuguuugaaaaaacaaagaagcaacugagggaaaaugcugaggauaugggcaaugguuguuucaaaauauaccacaaaugugacaaugccugcauaggaucaaucagaaauggaacuuaugaccacgauguauacagggaugaagcauuaaacaaccgguuccagaucaagggaguugagcugaagucaggguacaaagauuggauccuauggauuuccuuugccauaucauguuuuuugcuuuguguugcuuuguugggguucaucaugugggccugccaaaagggcaacauuaggugcaacauuugcauuuga

SEQ ID NO: 42570 - RNA, 1701 nt, Artificial Sequence
  derived and/or modified CDS sequence (wt) from hemagglutinin__InfluenzaA__AGW01845
augaagacuaucauugcuuugagcuacauucuaugucugguuuucgcucaaaaacuuccuggaaaugacaauagcacggcaacgcugugccuugggcaccaugcaguaccaaacggaacgauagugaaaacaaucacgaaugaccgaauugaaguuacuaaugcuacugagcugguucagaauuccucaauaggugaaauaugcgacaguccucaucagauccuugauggagaaaauugcacacuaauagaugcucuauugggagacccucagugugauggcuuucaaaauaagaaaugggaccuuuuuguugaacgaagcaaagccuacagcaacuguuacccuuaugaugugccggauuaugccucccuuaggucacuaguugccucauccggcacacuggaguuuaccaaugaaagcuucaauuggacuggagucacucaaaacggaacaaguucugcuugcauaaggagaucuaauaguaguuucuuuaguagauuaaauugguugacccacuuaaacuucaaauacccagcauugaacgugacuaugccaaacaaugaacaauuugacaaauuguacauuuggggaguucaccacccggguacggacaaggaccaaaucuuccuguaugcucaaucaucaggaagaaucacaguaucuaccaaaagaagccaacaagcuguaaucccaaauaucggaucuagacccagaauaaggaauaucccuagcagaauaagcaucuauuggacaauaguaaaaccgggagacauacuuuugauuaacagcacagggaaucuaauugcuccuagggguuacuucaaaauacgaagugggaaaagcucaauaaugagaucagaugcacccauuggcaaaugcaagucugaaugcaucacuccaaauggaagcauucccaaugacaaaccauuccaaaauguaaacaggaucacauacggggccugucccagauauguuaagcaaagcacucugaaauuggcaacaggaaugcgaaauguaccagagaaacaaacuagaggcauauuuggcgcaauagcggguuucauagaaaaugguugggagggaaugguggaugguugguacgguuucaggcaucaaaauucugagggaagaggacaagcagcagaucucaaaagcacucaagcagcaaucgaucaaaucaaugggaagcugaaucgauugaucgggaaaaccaacgagaaauuccaucagauugaaaaagaauucucagaaguagaagggagaauucaggaccuugagaaauauguugaggacacuaaaauagaucucuggucauacaacgcggagcuucuuguugcccuggagaaucaacauacaauugaucuaacugacucagaaaugaacaaacuguuugaaaaaacaaagaagcaacugagggaaaaugcugaggauaugggcaaugguuguuucaaaauauaccacaaaugugacaaugccugcauaggaucaaucagaaauggaacuuaugaccacaauguguacagggaugaagcauuaaacaaccgguuccagaucaagggaguugagcuuaagucaggguacaaagauuggauccuauggauuuccuuugccauaucauguuuuuugcuuuguguugcuuuguugggguucaucaugugggccugccaaaagggcaacauuaggugcaacauuugcauuuga

SEQ ID NO: 42571 - RNA, 1701 nt, Artificial Sequence
  derived and/or modified CDS sequence (wt) from hemagglutinin__InfluenzaA__AGW01857
augaagacuaucauugcuuugagcuacauucuaugucugguuuucgcucaaaaacuuccuggaaaugacaauagcacggcaacgcugugccuugggcaccaugcaguaccaaacggaacgauagugaaaacaaucacgaaugaccgaauugaaguuacuaaugcuacugagcugguucagaauuccucaauaggugaaauaugcgacaguccucaucagauccuugauggagaaaacugcacacuaauagaugcucuauugggagacccucagugugauggcuuucaaaauaagaaaugggaccuuuuuguugaacgaagcaaagccuacagcaacuguuacccuuaugaugugccggauuaugccucccuuaggucacuaguugccucauccggcacacuggaguuuaacaaugaaagcuucaauugggcuggagucacucaaaacggaacaaguucugcuugcauaaggggaucuaauaguaguuucuuuaguagauuaaauugguugacccacuuaaacuucaaauacccagcauugaacgugacuaugccaaacaaugaacaauuugacaaauuguacauuugggggguucaccacccggguacggacaaggaccaaaucuuccuguaugcucaaucaucaggaagaaucacaguaucuaccaaaagaagccaacaagcuguaaucccgaauaucggaucuagacccagaauaaggaauaucccuagcagaauaagcaucuauuggacaauaguaaaaccgggagacauacuuuugauuaacagcacagggaaucuaauugcuccuagggguuacuucaaaauacgaagugggaaaagcucaauaaugagaucagaugcacccaucggcaaaugcaagucugaaugcaucacuccaaauggaagcauucccaaugacaaaccauuccaaaauguaaacaggaucacauacggggccugucccagauauguuaagcaaagcacucugaaauuggcaacaggaaugcgaaauguaccagagaaacaaacuagaggcauauuuggcgcaauagcggguuucauagaaaaugguugggagggaaugguggaugguugguacgguuucaggcaucaaaauucugagggaagaggacaagcagcagaucucaaaagcacucaagcagcaaucgaucaaaucaaugggaagcugaaucgauugaucgggaaaaccaacgagaaauuccaucagauugaaaaagaauucucagaaguagaagggagaauucaggaccuugagaaauauguugaggacacaaaaauagaucucuggucauacaacgcggagcuucuuguugcccuggagaaccaacauacaauugaucuaacugacucagaaaugaacaaacuguuugaaaaaacaaagaagcaacugagggaaaaugcugaggauaugggcaaugguuguuucaaaauauaccacaaaugugacaaugccugcauaggaucaaucagaaauggaacuuaugaccacgauguauacagggaugaagcauuaaacaaccgguuccagaucaagggaguugagcugaagucaggguacaaagauuggauccuauggauuuccuuugccauaucauguuuuuugcuuuguguugcuuuguugggguucaucaugugggccugccaaaagggcaacauuaggugcaacauuugcauuuga

SEQ ID NO: 42572 - RNA, 1701 nt, Artificial Sequence
  derived and/or modified CDS sequence (wt) from hemagglutinin__InfluenzaA__AGW01869
augaagacuaucauugcuuugagcuacauucuaugucugguuuucgcucaaaaacuuccuggaaaugacaauagcacggcaacgcugugccuugggcaccaugcaguaccaaacggaacgauagugaaaacaaucacgaaugaccgaauugaagucacuaaugcuacugagcugguucagaauuccucaauaggugaaauaugcgacaguccucaucagauccuugauggagaaaacugcacacuaauagaugcucuauugggagacccucagugugauggcuuucaaaauaagaaaugggaccuuuuuguugaacgaagcaaagccuacagcaacuguuacccuuaugaugugccggauuaugccucccuuaggucacuaguugccucauccggcacacuggaguuuaacaaugaaagcuucaauugggcuggggucacucaaaacggaacaaguucugcuugcauaaggggaucuaauaguaguuucuuuaguagauuaaauugguugacccacuuaaacuucaaauacccagcauugaacgugacuaugccaaacaaugaacaauuugacaaauuguacauuugggggguucaccacccggguacggacaaggaccaaaucuuccuguaugcucaaucaucaggaagaaucacaguaucuaccaaaagaagccaacaagcuguaaucccgaauaucggaucuagacccagaauaaggaauaucccuagcagaauaagcaucuauuggacaauaguaaaaccgggagacauacuuuugauuaacagcacagggaaucuaauugcuccuagggguuacuucaaaauacgaagugggaaaagcucaauaaugagaucagaugcacccauuggcaaaugcaagucugaaugcaucacuccaaauggaagcauucccaaugacaaaccauuccaaaauguaaacaggaucacauacggggccugucccagauauguuaagcaaagcacucugaaauuggcaacaggaaugcgaaauguaccagagaaacaaaccagaggcauauuuggcgcaauagcggguuucauagaaaaugguugggagggaaugguggaugguugguacgguuucaggcaucaaaauucugagggaagaggacaagcagcagaucucaaaagcacucaagcagcaaucgaucaaaucaaugggaagcugaaucgauugaucgggaaaaccaacgagaaauuccaucagauugaaaaagaauucucagaaguagaagggagaauucaggaccuugagaaauauguugaggacacaaaaauagaucucuggucauacaacgcggagcuucuuguugcccuggagaaccaacauacaauugaucuaacugacucagaaaugaacaaacuguuugaaaaaacaaagaagcaacugagggaaaaugcugaggauaugggcaaugguuguuucaagauauaccacaaaugugacaaugccugcauaggaucaaucagaaauggaacuuaugaccacgauguauacagggaugaagcauuaaacaaccgguuccagaucaagggaguugagcugaagucaggguacaaagauuggauccuauggauuuccuuugccauaucauguuuuuugcuuuguguugcuuuguugggguucaucaugugggccugccaaaagggcaacauuaggugcaacauuugcauuuga

SEQ ID NO: 42573 - RNA, 1701 nt, Artificial Sequence; identical to SEQ ID NO: 42557
  derived and/or modified CDS sequence (wt) from hemagglutinin__InfluenzaA__AGW01881

SEQ ID NO: 42574 - RNA, 1701 nt, Artificial Sequence; identical to SEQ ID NO: 41880
  derived and/or modified CDS sequence (wt) from hemagglutinin__InfluenzaA__AGW01893

SEQ ID NO: 42575 - RNA, 1701 nt, Artificial Sequence; identical to SEQ ID NO: 42511
  derived and/or modified CDS sequence (wt) from hemagglutinin__InfluenzaA__AGW01905

SEQ ID NO: 42576 - RNA, 1701 nt, Artificial Sequence; identical to SEQ ID NO: 42489
  derived and/or modified CDS sequence (wt) from hemagglutinin__InfluenzaA__AGW01917

SEQ ID NO: 42577 - RNA, 1701 nt, Artificial Sequence; identical to SEQ ID NO: 41870
  derived and/or modified CDS sequence (wt) from hemagglutinin__InfluenzaA__AGW01929

SEQ ID NO: 42578 - RNA, 1701 nt, Artificial Sequence; identical to SEQ ID NO: 42489
  derived and/or modified CDS sequence (wt) from hemagglutinin__InfluenzaA__AGW01941

SEQ ID NO: 42579 - RNA, 1701 nt, Artificial Sequence; identical to SEQ ID NO: 41870
  derived and/or modified CDS sequence (wt) from hemagglutinin__InfluenzaA__AGW01953

SEQ ID NO: 42580 - RNA, 1701 nt, Artificial Sequence
  derived and/or modified CDS sequence (wt) from hemagglutinin__InfluenzaA__AGW01965
augaagaccaucauugcuuugagcuacauucuaugucuaguuuucgcucaagaacuuccuggaaaugaugacagcauggcaacgcugugccuugggcaccaugcagugccaaacggaacgauagugaaaacaaucacgaaugaccaaauugaaguuacuaaugcuacugagcugguucagaguuccucaacaggugaaauaugcaacaguccucaucagauccuugauggagaaaacugcacacuaauagaugcucuauugggagacccucagugugauggcuuccaaaacaagaaaugggaccuuuuuguugaacgaagcaaagcccacagcaacuguuacccuuaugaugugccggauuaugccucccuuaggucauuaguugccucauccggcacacuggaguuuaacaaugaaagcuucaauuggacuggagucacucaaaacggaacaagcucugcuugcauaaggagaucuaauaauaguuucuuuaguagauugaauugguugacccacuuaaacuucaaauacccagcauugaacgugacuaugccaaacaaugaacaauuugacaaauuguacauuugggggguucaccacccggguacggacaaggaccaaaucuuccuguaugcucaagcaucaggaagaaucacaguaucuaccaaaagaagccaacaagcuguaauuccgaauaucggaucuagacccagaguaaggaauaucccuagcagaguaagcaucuauuggacaauaguaaaaccgggagacauacuuuugauuaacagcacagggaaucuaauugcuccuagggguuacuucaaaauacgaaguggaaaaagcucaauaaugagaucagaugcacccauuggcaaaugcaauucugcaugcaucacuccaaauggaagcauucccaaugacaaaccauuccaaaauguaaacaggaucacauacggggccugucccagauaugucaagcaaaacacucugaaauuggcaacaggaaugagaaauguaccagagaaacaaacuagaggcauauuuggcgcaauagcggguuucauagaaaaugguugggagggaaugguggaugguugguacgguuucaggcaucaaaauucugagggaaggggacaagcagcagaucucaaaagcacucaagcagcaaucgaucaaaucaaugggaagcugaauagauugaucgggaaaaccaacgagaaauuccaucagauugaaaaagaauucucagaagucgaagggagaauucaggaccuugagaaauauguugaggacacuaaaauagaucucuggucauacaacgcggagcuucuuguugcccuggagaaccaacacacaauugaucuaacugacucagaaaugaacaaacuguuugaaaaaacaaagaagcaacugagggaaaaugcugaggauaugggcaaugguuguuucaaaauauaccacaaaugugacaaugacugcauaggaucaaucagaaauggaacuuaugaucacaauguguacagagaugaagcauuaaacaaccgauuccagaucaagggaauugagcugaagucaggguacaaagauuggauccuauggauuuccuuugccauaucauguuuuuugcuuuguguugcuuuguugggguucaucaugugggccugccaaaaaggcaacauuaggugcaacauuugcauuuga

SEQ ID NO: 42581 - RNA, 1701 nt, Artificial Sequence
  derived and/or modified CDS sequence (wt) from hemagglutinin__InfluenzaA__AGW01977
augaagacuaucauugcuuugagcuacauucuaugucugguuuucgcucaaaaacuuccuggaaaugacaauagcacggcaacgcugugccuugggcaccaugcaguaccaaacggaacgauagugaaaacaaucacgaaugaccgaauugaaguuacuaaugcuacugagcugguucagaauuccucaauaggugaaauaugcgacaguccucaucagauccuugauggagaaaacugcacacuaauagaugcucuauugggagacccucagugugauggcuuucaaaauaagaaaugggaccuuuuuguugaacgaagcaaagccuacagcaacuguuacccuuaugaugugccggauuaugccucccuuaggucacuaguugccucauccggcacacuggaguuuaacaaugaaagcuucaauugggcuggagucacucaaaacggaacaaguucugcuugcauaagaggaucuaauaguaguuucuuuaguagauuaaauugguugacccacuuaaacuucaaauacccagcauugaacgugacuaugccaaacaaugagcaauuugacaaauuguacauuugggggguucaccacccggguacggacaaggaccaaaucuuccuguaugcucaaucaucaggaagaaucacaguaucuaccaaaagaagccaacaagcuguaaucccgaauaucggaucuagacccagaauaaggaauaucccuagcagaauaagcaucuauuggacaauaguaaaaccgggagacauacuuuugauuaacagcacagggaaucuaauugcuccuagggguuacuucaaaauacgaagugggaaaagcucaauaaugagaucagaugcacccauuggcaaaugcaaaucugaauguaucacuccaaauggaagcauucccaaugacaaaccauuccaaaauguaaacaggaucacauacggggccugucccagauauguuaagcaaagcacucugaaauuggcaacaggaaugcgaaauguaccagagaaacaaacuagaggcauauuuggcgcaauagcggguuucauagaaaaugguugggagggaaugguggaugguugguacgguuucaggcaucaaaauucugagggaagaggacaagcagcagaucucaaaagcacucaagcagcaaucgaucaaaucaaugggaagcugaaucgauugaucgggaaaaccaacgagaaauuccaucagauugaaaaagaauucucagaaguagaagggagaauucaggaccuugagaaauauguugaggacacaaaaauagaucucuggucauacaacgcggagcuucuuguugcccuggagaaccaacauacaauugaucuaacugacucagaaaugaacaaacuguuugaaaaaacaaagaagcaacugagggaaaaugcugaggauaugggcaaugguuguuucaaaauauaccacaaaugugacaaugccugcauaggaucaaucagaaauggaacuuaugaccacgauguauacagggaugaagcauuaaacaaccgguuccagaucaagggaguugagcugaagucaggguacaaagauuggauccuauggauuuccuuugccauaucauguuuuuugcuuuguguugcuuuguugggguucaucaugugggccugccaaaagggcaacauuaggugcaacauuugcauuuga

SEQ ID NO: 42582 - RNA, 1701 nt, Artificial Sequence; identical to SEQ ID NO: 42489
  derived and/or modified CDS sequence (wt) from hemagglutinin__InfluenzaA__AGW01989

SEQ ID NO: 42583 - RNA, 1701 nt, Artificial Sequence
  derived and/or modified CDS sequence (wt) from hemagglutinin__InfluenzaA__AGW02001
augaagacuaucauugcuuugagcuacauucuaugucugguuuucgcucaaaaacuuccuggaaaugacaauagcacggcaacgcugugccuugggcaccaugcaguaccaaacggaacgauagugaaaacaaucacgaaugaccgaauugaaguuacuaaugcuacugagcugguucagaauuccucaauaggugaaauaugcgacaguccucaucagauccuugauggagaaaacugcacacuaauagaugcucuauugggagacccucagugugauggcuuucaaaauaagaaaugggaccuuuuuguugaacgaagcaaagccuacagcaacuguuacccuuaugaugugccggauuaugccucccuuaggucacuaguugccucauccggcacacuggaguuuaacaaugaaagcuucaauugggcuggagucacucaaaacggaacaaguucugcuugcauaaggggaucuaauaguaguuucuuuaguagauuaaauugguugacccacuuaaacuucaaauacccagcauugaacgugacuaugccaaacaaugaacaauuugacaaauuguacauuugggggguucaccacccggguacggacaaggaccaaaucuuccuguaugcucaaucaucaggaagaaucacaguaucuaccaaaagaagccaacaagcuguaaucccgaauaucggaucuagacccagaauaaggaauaucccuagcagaauaagcaucuauuggacaauaguaaaaccgggagacauacuuuugauuaacagcacagggaaucuaauugcuccuagggguuacuucaaaauacgaagugggaaaagcucaauaaugagaucagaugcacccauuggcaaaugcaagucugaaugcaucacuccaaauggaagcauucccaaugacaaaccauuccaaaauguaaacaggaucacauacggggccugucccagauauguuaagcaaagcacucugaaauuggcaacaggaaugcgaaauguaccagagaaacaaaccagaggcauauuuggcgcaauagcggguuucauagaaaaugguugggagggaaugguggaugguugguacgguuucaggcaucaaaauucugagggaagaggacaagcagcagaucucaaaagcacucaagcagcaaucgaucaaaucaaugggaagcugaaucgauugaucgggaaaaccaacgagaaauuccaucagauugaaaaagaauucucagaaguagaagggagaauucaggaccuugagaaauauguugaggacacaaaaauagaucucuggucauacaacgcggagcuucuuguugcccuggagaaccaacauacaauugaucuaacugacucagaaaugaacaaacuguuugaaaaaacaaagaagcaacugagggaaaaugcugaggauauggguaaugguuguuucaaaauauaccacaaaugugacaaugccugcauaggaucaaucagaaauggaacuuaugaccacgauguauacagggaugaagcauuaaacaaccgguuccagaucaagggaguugagcugaagucaggguacaaagauuggauccuauggauuuccuuugccauaucauguuuuuugcuuuguguugcuuuguugggguucaucaugugggccugccaaaagggcaacauuaggugcaacauuugcauuuga

SEQ ID NO: 42584 - RNA, 1701 nt, Artificial Sequence; identical to SEQ ID NO: 42489
  derived and/or modified CDS sequence (wt) from hemagglutinin__InfluenzaA__AGW02013

SEQ ID NO: 42585 - RNA, 1701 nt, Artificial Sequence
  derived and/or modified CDS sequence (wt) from hemagglutinin__InfluenzaA__AGW02025
augaagacuaucauugcuuugagcuacauucuaugucugguuuucgcucaaaaacuuccuggaaaugacaauagcacggcaacgcugugccuugggcaccaugcaguaccaaacggaacgauagugaaaacaaucacgaaugaccgaauugaaguuacuaaugcuacugagcugguucagaauuccucaauaggugaaauaugcgacaguccucaucagauccuugauggagaaaauugcacacuaauagaugcucuauugggagacccucagugugauggcuuucaaaauaagaaaugggaccuuuuuguugaacgaagcaaagccuacagcaacuguuacccuuaugaugugccggauuaugccucccuuaggucacuaguugccucauccggcacacuggaguuuaacaaugaaagcuucaauuggacuggagucacucaaaacggaacaaguucugcuugcauaaggagaucuaauaguaguuucuuuaguagauuaaauugguugacccacuuaaacuucaaauacccagcauugaacgugacuaugccaaacaaugaacaauuugacaaauuguacauuuggggaguucaccacccggguacggacaaggaccaaaucuuccuguaugcucaaucaucaggaagaaucacaguaucuaccaaaagaagccaacaagcuguaaucccaaauaucggaucuagacccagaauaaggaauaucccuagcagaauaagcaucuauuggacaauaguaaaaccgggagacauacuuuugauuaacagcacagggaaucuaauugcuccuagggguuacuucaaaauacgaagugggaaaagcucaauaaugagaucagaugcacccauuggcaaaugcaagucugaaugcaucacuccaaauggaagcauucccaaugacaaaccauuccaaaauguaaacaggaucacauacggggccugucccagauauguuaagcaaagcacucugaaauuggcaacaggaaugcgaaauguaccagagaaacaaacuagaggcauauuuggcgcaauagcggguuucauagaaaaugguugggagggaaugguggaugguugguacgguuucaggcaucaaaauucugagggaagaggacaagcagcagaucucaaaagcacucaagcagcaaucgaucaaaucaaugggaagcugaaucgauugaucgggaaaaccaacgagaaauuccaucagauugaaaaagaauucucagaaguagaagggagaauucaggaccuugagaaauauguugaggacacuaaaauagaucucuggucauacaacgcggagcuucuuguugcccuggagaaucaacauacaauugaucuaacugacucagaaaugaacaaacuguuugaaaaaacaaagaagcaacugagggagaaugcugaggauaugggcaaugguuguuucaaaauauaccacaaaugugacaaugccugcauaggaucaaucagaaauggaacuuaugaccacaauguguacagggaugaagcauuaaacaaccgguuccagaucaagggaguugagcuuaagucaggguacaaagauuggauccuauggauuuccuuugccauaucauguuuuuugcuuuguguugcuuuguugggguucaucaugugggccugccaaaagggcaacauuaggugcaacauuugcauuuga

SEQ ID NO: 42586 - RNA, 1701 nt, Artificial Sequence
  derived and/or modified CDS sequence (wt) from hemagglutinin__InfluenzaA__AGW02037
augaagacuaucauugcuuugagcuacauucuaugucugguuuucgcucaaaaacuuccuggaaaugacaauagcacggcaacgcugugccuugggcaccaugcaguaccaaacggaacgauagugaaaacaaucacgaaugaccgaauugaagucacuaaugcuacugagcugguucagaauuccucaauaggugaaauaugcgacaguccucaucagauccuugauggagaaaacugcacacuaauagaugcucuauugggagacccucagugugauggcuuucaaaauaagaaaugggaccuuuuuguugaacgaagcaaagccuacagcaacuguuacccuuaugaugugccggauuaugccucccuuaggucacuaguugccucauccggcacacuggaguuuaacaaugaaagcuucaauugggcuggggucacucaaaacggaacaaguucugcuugcauaaggggaucuaauaguaguuucuuuaguagauuaaauugguugacccacuuaaacuucaaauacccagcauugaacgugacuaugccaaacaaugaacaauuugacaaauuguacauuugggggguucaccacccggguacggacaaggaccaaaucuuccuguaugcucaaucaucaggaagaaucacaguaucuaccaaaagaagccaacaagcuguaaucccgaauaucggaucuagacccagaauaaggaauaucccuagcagaauaagcaucuauuggacaauaguaaaaccgggagacauacuuuugauuaacagcacagggaaucuaauugcuccuagggguuacuucaaaauacgaagugggaaaagcucaauaaugagaucagaugcacccauuggcaaaugcaagucugaaugcaucacuccaaauggaagcauucccaaugacaaaccauuccaaaauguaaacaggaucacauacggggccugucccagauauguuaagcaaagcacucugaaauuggcaacaggaaugcgaaauguaccagagaaacaaaccagaggcauauuuggcgcaauagcggguuucauagaaaaugguugggagggaaugguggaugguugguacgguuucaggcaucaaaauucugaggggagaggacaagcagcagaucucaaaagcacucaagcagcaaucgaucaaaucaaugggaagcugaaucgauugaucgggaaaaccaacgagaaauuccaucagauugaaaaagaauucucagaaguagaagggagaauucaggaccuugagaaauauguugaggacacaaaaauagaucucuggucauacaacgcggagcuucuuguugcccuggagaaccaacauacaauugaucuaacugacucagaaaugaacaaacuguuugaaaaaacaaagaagcaacugagggaaaaugcugaggauaugggcaaugguuguuucaaaauauaucacaaaugugacaaugccugcauaggaucaaucagaaauggaacuuaugaccacgauguauacagggaugaagcauuaaacaaccgguuccagaucaagggaguugagcugaagucaggguacaaagauuggauccuauggauuuccuuugccauaucauguuuuuugcuuuguguugcuuuguugggguucaucaugugggccugccaaaagggcaacauuaggugcaacauuugcauuuga

SEQ ID NO: 42587 - RNA, 1701 nt, Artificial Sequence; identical to SEQ ID NO: 42055
  derived and/or modified CDS sequence (wt) from hemagglutinin__InfluenzaA__AGW02061

SEQ ID NO: 42588 - RNA, 1701 nt, Artificial Sequence; identical to SEQ ID NO: 42489
  derived and/or modified CDS sequence (wt) from hemagglutinin__InfluenzaA__AGW02073

SEQ ID NO: 42589 - RNA, 1701 nt, Artificial Sequence
  derived and/or modified CDS sequence (wt) from hemagglutinin__InfluenzaA__AGW02085
augaagacuaucauugcuuugagcuacauucuaugucugguuuucgcucaaaaacuuccuggaaaugacaauagcacggcaacgcugugccuugggcaccaugcaguaccaaacggaacgauagugaaaacaaucacgaaugaccgaauugaagucacuaaugcuacugagcugguucagaauuccucaauaggugaaauaugcgacaguccucaucagauccuugauggagaaaacugcacacuaauagaugcucuauugggagacccucagugugauggcuuucaaaauaagaaaugggaccuuuuuguugaacgaagcaaagccuacagcaacuguuacccuuaugaugugccggauuaugccucccuuaggucacuaguugccucauccggcacacuggaguuuaacaaugaaagcuucaauugggcuggggucacucaaaacggaacaaguucugcuugcauaaggggaucuaauaguaguuucuuuaguagauuaaauugguugacccacuuaaacuucaaauacccagcauugaacgugacuaugccaaacaaugaacaauuugacaaauuguacauuugggggguucaccacccggguacggacaaggaccaaaucuuccuguaugcucaaucaucaggaagaaucacaguaucuaccaaaagaagccaacaagcuguaaucccgaauaucggaucuagacccagaauaaggaauaucccuagcagaauaagcaucuauuggacaauaguaaaaccgggagacauacuuuugauuaacagcacagggaaucuaauugcuccuagggguuacuucaaaauacgaagugggaaaagcucaauaaugagaucagaugcacccauuggcaaaugcaagucugaaugcaucacuccaaauggaagcauucccaaugacaaaccauuccaaaauguaaacaggaucacauacggggccugucccagauauguuaagcaaagcacucugaaauuggcaacaggaaugcgaaauguaccagagaaacaaaccagaggcauauuuggcgcaauagcggguuucauagaaaaugguugggagggaaugguggaugguugguacgguuucaggcaucaaaauucugagggaagaggacaagcagcagaucucaaaagcacucaagcagcaaucgaucaaaucaaugggaagcugaaucgauugaucgggaaaaccaacgagaaauuccaucagauugaaaaagaauucucagaaguagaagggagaauucaggaccuugagaaauauguugaggacacaaaaauagaucucuggucauacaacgcggagcuucuuguugcccuggagaaccaacauacaauugaucuaacugacucagaaaugaacaaacuauuugaaaaaacaaagaagcaacugagggaaaaugcugaggauaugggcaaugguuguuucaaaauauaccacaaaugugacaaugccugcauaggaucaaucagaaauggaacuuaugaccacgauguauacagggaugaagcauuaaacaaccgguuccagaucaagggaguugagcugaagucaggguacaaagauuggauccuauggauuuccuuugccauaucauguuuuuugcuuuguguugcuuuguugggguucaucaugugggccugccaaaagggcaacauuaggugcaacauuugcauuuga

SEQ ID NO: 42590 - RNA, 1701 nt, Artificial Sequence
  derived and/or modified CDS sequence (wt) from hemagglutinin__InfluenzaA__AGW02097
augaagacuaucauugcuuugagcuacauucuaugucugguuuucgcucaaaaacuuccuggaaaugacaauagcacggcaacgcugugccuugggcaccaugcaguaccaaacggaacgauagugaaaacaaucacgaaugaccgaauugaaguuacuaaugcuacugagcugguucagaauuccucaauaggugaaauaugcgacaguccucaucagauccuugauggagaaaacuguacacuaauagaugcucuauugggagacccucagugugauggcuuucaaaauaagaaaugggaccuuuuuguugaacgaagcaaagccuacagcaacuguuacccuuaugaugugccggauuaugccucccuuaggucacuaguugccucauccggcacacuggaguuuaacaaugaaagcuucaauuggacuggagucacucaaaacggaacaaguucugcuugcauaaggagaucuaauaguaguuucuuuaguagauuaaauugguugacccacuuaaacuucaaauacccagcauugaacgugacuaugccaaacaaugaacaauuugacaaauuguacauuugggggguucaccacccggguacggacaaggaccaaaucuuccuauaugcucaaucaucaggaagaaucacaguaucuaccaaaagaagccaacaagcuguaaucccgaauaucggaucuagacccagaauaaggaauaucccuagcagaauaagcaucuauuggacaauaguaaaaccaggagacauacuuuugauuaacagcacagggaaucuaauugcuccuagggguuacuucaaaauacgaagugggaaaagcucaauaaugagaucagaugcacccauuggcaaaugcaagucugaaugcaucacuccaaauggaagcauuccaaaugacaaaccauuccaaaauguaaacaggaucacauacggggccugucccagauauguuaagcaaagcacucugaaauuggcaacaggaaugcgaaauguaccagagaaacaaacuagaggcauauuuggcgcaauagcggguuucauagaaaaugguugggagggaaugguggaugguugguacgguuucaggcaucaaaauucugagggaagaggacaagcagcagaucucaaaagcacucaagcagcaaucgaucaaaucaaugggaagcugaaucgauugaucgggaaaaccaacgagaaauuccaucagauugaaaaagaauucucagaaguagaagggagaauucaggaccuugagaaauauguugaggacacuaaaauagaucucuggucauacaacgcggagcuucuuguugcccuggagaaccaacauacaauugaucuaacugacucagaaaugaacaaacuguuugaaaaaacaaagaagcaacugagggaaaaugcugaggauaugggcaaugguuguuucaaaauauaccacaaaugugacaaugccugcauaggaucaaucagaaauggaacuuaugaccacgauguauacagggaugaagcauuaaacaaccgguuccagaucaagggaguugagcugaagucaggguacaaagauuggauccuauggauuuccuuugccauaucauguuuuuugcuuuguguugcuuuguugggguucaucaugugggccugccaaaagggcaacauuaggugcaacauuugcauuuga

SEQ ID NO: 42591 - RNA, 1701 nt, Artificial Sequence
  derived and/or modified CDS sequence (wt) from hemagglutinin__InfluenzaA__AGW02109
augaagacuaucauugcuuugagcuacauucuaugucugguuuucgcucaaaaacuuccuggaaaugacaauagcacggcaacgcugugccuugggcaccaugcaguaccaaacggaacgauagugaaaacaaucacgaaugaccgaauugaaguuacuaaugcuacugagcugguucagaauuccucaauaggugaaauaugcgacaguccucaucagauccuugauggagaaaauugcacacuaauagaugcucuauugggagacccucagugugauggcuuucaaaauaagaaaugggaccuuuuuguugaacgaagcaaagccuacagcaacuguuacccuuaugaugugccggauuaugccucccuuaggucacuaguugccucauccggcacacuggaguuuaacaaugaaagcuucaauuggacuggagucacucaaaacggaacaaguucugcuugcauaaggagaucuaauaguaguuucuuuaguagauuaaauugguugacccacuuaaacuucaaauacccagcauugaacgugacuaugccaaacaaugaacaauuugacaaauuguacauuuggggaguucaccacccggguacggacaaggaccaaaucuuccuguaugcucaaucaucaggaagaaucacaguaucuaccaaaagaagccaacaagcuguaaucccaaauaucggaucuagacccagaauaaggaauaucccuagcagaauaagcaucuauuggacaauaguaaaaccgggagacauacuuuugauuaacagcacagggaaucuaauugcuccuagggguuacuucaaaauacgaagugggaaaagcucaauaaugagaucagaugcacccauuggcaaaugcaagucugaaugcaucacuccaaauggaagcauucccaaugacaaaccauuccaaaauguaaacaggaucacauacggggccugucccagauauguuaagcaaagcacucugaaauuggcaacaggaaugcgaaauguaccagagaaacaaacuagagguauauuuggcgcaauagcggguuucauagaaaaugguugggagggaaugguggaugguugguacgguuucaggcaucaaaauucugagggaagaggacaagcagcagaucucaaaagcacucaagcagcaaucgaucaaaucaaugggaagcugaaucgauugaucgggaaaaccaacgagaaauuccaucagauugaaaaagaauucucagaaguagaagggagaauucaggaccuugagaaauauguugaggacacuaaaauagaucucuggucauacaacgcggagcuucuuguugcccuggagaaucaacauacaauugaucuaacugacucagaaaugaacaaacuguuugaaaaaacaaagaagcaacugagggaaaaugcugaggauaugggcaaugguuguuucaaaauauaccacaaaugugacaaugccugcauaggaucaaucagaaauggaacuuaugaccacaauguguacagggaugaagcauuaaacaaccgguuccagaucaagggaguugagcuuaagucaggguacaaagauuggauccuauggauuuccuuugccauaucauguuuuuugcuuuguguugcuuuguugggguucaucaugugggccugccaaaagggcaacauuaggugcaacauuugcauuuga

SEQ ID NO: 42592 - RNA, 1701 nt, Artificial Sequence; identical to SEQ ID NO: 42059
  derived and/or modified CDS sequence (wt) from hemagglutinin__InfluenzaA__AGW02133

SEQ ID NO: 42593 - RNA, 1701 nt, Artificial Sequence; identical to SEQ ID NO: 42581
  derived and/or modified CDS sequence (wt) from hemagglutinin__InfluenzaA__AGW02157

SEQ ID NO: 42594 - RNA, 1701 nt, Artificial Sequence
  derived and/or modified CDS sequence (wt) from hemagglutinin__InfluenzaA__AGW02169
augaagacuaucauugcuuugagcuacauucuaugucugguuuucgcucaaaaacuuccuggaaaugacaauagcacggcaacgcugugccuugggcaccaugcaguaccaaacggaacgauagugaaaacaaucacgaaugaccgaauugaaguuacuaaugcuacugagcugguucagaauuccucaauaggugaaauaugcgacaguccucaucagauucuugauggagaaaacugcacacuaauagaugcucuauugggagacccucagugugauggcuuucaaaauaagaaaugggaccuuuuuguugaacgaagcaaagccuacagcaacuguuacccuuaugaugugccggauuaugccucccuuaggucacuaguugccucauccggcacacuggaguuuaacaaugaaagcuucaauuggacuggagucacucaaaacggaacaaguucugcuugcauaaggagaucuaauaguaguuucuuuaguagauuaaauugguugacccacuuaaacuucaaauacccagcauugaacgugacuaugccaaacaaugaacaauuugacaaauuguacauuugggggguucaccacccagguacggacaaggaccaaaucuuccuguaugcucaaucaucaggaagaaucacaguaucuaccaaaagaagccaacaagcuguaaucccaaauaucggaucuagacccagaauaaggaauaucccuagcagaauaagcaucuacuggacaauaguaaaaccgggagacauacuuuugauuaacagcacagggaaucuaauugcuccuagggguuacuucaaaauacgaagugggaaaagcucaauaaugagaucagaugcacccauuggcaaaugcaagucugaaugcaucacuccaaauggaagcauucccaaugacaaaccauuccaaaaugugaacaggaucacauacggggccugucccagauauguuaagcaaagcacucugaaauuggcaacaggaaugcgaaauguaccagagaaacaaacuagaggcauauuuggcgcaauagcagguuucauagaaaaugguugggagggaaugguggaugguugguacgguuucaggcaucaaaauucugagggaagaggacaagcagcagaucucaaaagcacccaagcagcaaucgaucaaaucaaugggaagcugaaucgauugaucgggaaaaccaacgagaaauuccaucagauugaaaaagaauuuucagaaguagaagggagaauucaggaccuugagaaauauguugaggacacuaaaauagaucucuggucauacaacgcggagcuucuuguugcccuggagaaccaacauacaauugaucuaacugacucagaaaugaacaaacuguuugaaaaaacaaagaagcaacugagggaaaaugcugaggauaugggcaaugguuguuucaaaauauaccacaaaugugacaaugccugcauaggaucaauaagaaauggaacuuaugaccacaauguguacagggaugaagcauuaaacaaccgguuccagaucaagggaguugagcugaagucaggguacaaagauuggauccuauggauuuccuuugccauaucauguuuuuugcuuuguguugcuuuguugggguucaucaugugggccugccaaaagggcaacauuaggugcaacauuugcauuuga

SEQ ID NO: 42595 - RNA, 1701 nt, Artificial Sequence
  derived and/or modified CDS sequence (wt) from hemagglutinin__InfluenzaA__AGW02181
augaagacuaucauugcuuugagcuacauucuaugucugguuuucgcucaaaaacuuccuggaaaugacaauagcacggcaacgcugugccuugggcaccaugcaguaccaaacggaacgauagugaaaacaaucacgaaugaccgaauugaaguuacuaaugcuacugagcugguucagaauuccucaauaggugaaauaugcgacaguccucaucagauccuugauggagaaaacugcacacuaauagaugcucuauugggagacccucagugugauggcuuucaaaauaagaaaugggaccuuuuuguugaacgaagcaaagccuacagcaacuguuacccuuaugaugugccggauuaugccucccuuaggucacuaguugccucauccggcacacuggaguuuaacaaugaaagcuucaauugggcuggagucacucaaaacggaacaaguucugcuugcauaaggggaucuaauaguaguuucuuuaguagauuaaauugguugacccacuuaaacuucaaauacccagcauugaacgugacuaugccaaacaaugaacaauuugacaaauuguacauuugggggguucaccacccggguacggacaaggaccaaaucuuccuguaugcucaaucaucaggaagaaucacaguaucuaccaaaagaagccaacaagcuguaaucccgaauaucggaucuagacccagaauaaggaauaucccuagcagaauaagcaucuauuggacaauaguaaaaccgggagacauacuuuugauuaacagcacagggaaucuaauugcuccuagggguuacuucaaaauacgaagugggaaaagcucaauaaugagaucagaugcacccauuggcaaaugcaagucugaaugcaucacuccaaauggaagcauucccaaugacaaaccauuccaaaauguaaacaggaucacauacggggccugucccagguauguuaagcaaagcacucugaaauuggcaacaggaaugcgaaauguaccagagaaacaaaccagaggcauauuuggcgcaauagcggguuucauagaaaaugguugggagggaaugguggaugguugguacgguuucaggcaucaaaauucugagggaagaggacaagcagcagaucucaaaagcacucaagcagcaaucgaucaaaucaaugggaagcugaaucgauugaucgggaaaaccaacgagaaauuccaucagauugaaaaagaauucucagaaguagaagggagaauucaggaccuugagaaauauguugaggacacaaaaauagaucucuggucauacaacgcggagcuucuuguugcccuggagaaccaacauacaauugaucuaacugacucagaaaugaacaaacuguuugaaaaaacaaagaagcaacugagggaaaaugcugaggauauggguaaugguuguuucaaaauauaccacaaaugugacaaugccugcauaggaucaaucagaaauggaacuuaugaccacgauguauacagggaugaagcauuaaacaaccgguuccagaucaagggaguugagcugaagucaggguacaaagauuggauccuauggauuuccuuugccauaucauguuuuuugcuuuguguugcuuuguugggguucaucaugugggccugccaaaagggcaacauuaggugcaacauuugcauuuga

SEQ ID NO: 42596 - RNA, 1701 nt, Artificial Sequence; identical to SEQ ID NO: 41880
  derived and/or modified CDS sequence (wt) from hemagglutinin__InfluenzaA__AGW02193

SEQ ID NO: 42597 - RNA, 1701 nt, Artificial Sequence
  derived and/or modified CDS sequence (wt) from hemagglutinin__InfluenzaA__AGW04171
augaagaccaucauugcuuugagcuacauucuaugucuaguuuuugcucaagaacuuccuggaaaugacgacagcacggcaacgcugugccuugggcaccaugcagugccaaacggaacaauagugaaaacaaucacgaaugaccaaauugaaguuacuaaugcuacugaacugguucagaguuccucaacaggugaaauaugcaacaguccucaucagauccuugauggagaaaacugcacacuaauagaugcucuauugggagacccucagugugauggcuuccaaaacaagaaaugggaccuuuuuguugaacgaagcaaagcccacagcaacuguuacccuuaugaugugccggauuaugccucccuuaggucacuaguugccucauccggcacacuggaguuuaacaaugaaagcuucaauuggacuggagucacucaaaacggaacaagcucugcuugcauaaggagaucuaauaauaguuucuuuaguagauugaauugguugacccacuuaaacuucaaauacccagcauugaacgugacuaugccaaacaaugaacaauuugacaaauuguacauuugggggguucaccacccggguacggacaaggaccaaaucuuccuguaugcucaagcaucaggaagaaucacaguaucuaccaaaagaagccaacaagcuguaauuccgaauaucggaucuagacccagaguaaggaauaucccuagcagaguaagcaucuauuggacaauaguaaaaccgggagacauacuuuugauuaacagcacagggaaucuaauugcuccuagggguuacuucaaaauacgaagugggaaaagcucaauaaugagaucagaugcacccauuggcaaaugcaauucugcaugcaucacuccaaauggaagcauucccaaugacaaaccauuccaaaauguaaacaggaucacauacggggccugucccagauaugucaagcaaaacacucugaaauuggcaacaggaaugagaaauguaccagagaaacaaacuagaggcauauuuggcgcaauagcggguuucauagaaaaugguugggagggaaugguggaugguugguacgguuucaggcaucaaaauucugagggaaggggacaagcagcagaucucaaaagcacucaagcagcaaucgaucaaaucaaugggaagcugaauagauugaucgggaaaaccaacgagaaauuccaucagauugaaaaagaauucucagaagucgaagggagaauucaggaccuugagaaauauguugaggacacuaaaauagaucucuggucauacaacgcggagcuucuuguugcccuggagaaccaacacacaauugaucuaacugacucagaaaugaacaaacuguuugaaaaaacaaagaagcaacugagggaaaaugcugaggauaugggcaaugguuguuucaaaauauaccacaaaugugacaaugccugcauaggaucaaucagaaauggaacuuaugaucacgauguguacagagaugaagcauuaaacaaccgauuccagaucaagggaguugagcugaagucaggguacaaagauuggauccuauggauuuccuuugccauaucauguuuuuugcuuuguguugcuuuguugggguucaucaugugggccugccaaaaaggcaacauuaggugcaacauuugcauuuga

SEQ ID NO: 42598 - RNA, 1707 nt, Artificial Sequence
  derived and/or modified CDS sequence (wt) from hemagglutinin__InfluenzaA__AGW27061
auggagaaaauagugcuucuuuuugcaauagucaaccuuguuaaaagcgaccauauuugcauugguuaccaugcaaacaacucgacagagcagguugacacaauaauggaaaagaacguuacuguuacacaugcucaagacauacuggagaagacgcacaaugggaagcucugcgaucuaaauggagugaagccucugauuuuaaaagauuguaguguagcaggauggcuccucgggaacccaaugugugacgaauucaucgaugugccagaauggucuuacauaguagagaaggccaauccagccaaugaccucuguuacccagggaauuucaacgauuaugaagaauuaaaacaccuauugagcagaauaaaccacuucgagaaaauacggaucauucccaaagauucuuggccagaucaugaagccucauugggggugagcgcagcauguucauaccagggaaauuccucauuuuucagaaaugugguauggcuucucaaaaagaacgaugcauacccaauaauaaagaaaagcuacaauaauaccaauaaagaagaucucuugguacuguggggaauccaccauccuaaugaugaagcagagcagauaaggcucuaucaaaacccaaccaccuauguuuccacugggacaucaacacuaaaccagagauugguaccaagaauagcuacuagauccaaaguaaacgggcaaaguggaaggauagacuucuucuggacaauuuuaaaaccgaaugaugcaaucaacuucgagaguaauggaaauuucauugcuccagaauaugcauacaaaauugucaagaaaggagacucaacaauuaugaggagugaaguggaauaugguaacugcagcaccaggugucagacuccgaugggggcgauaaauucuaguaugccauuccacaacauacacccucucaccaucggagaaugucccaaauaugugaaaucaaacaaauuaguccuugcgacugggcucagaaauaguccucaaauagagaggagaagaagaaaaaggggacuguuuggagcuauagcagguuuuauagagggaggauggcagggaaugguagaugguugguauggguaccaucacagcaaugagcaggggaguggguaugcugcagacaaagaauccacucaaaaggcaauagauggggucaccaauaaagucaacucgaucauugacaaaaugaacacucaguuugaggcaguaggaagggaauuuaauaacuuagagaggaggauagagaauuuaaacaagaaaauggaagacggauuccuagaugucuggacuuauaaugcugaacuccugguucuaauggaaaaugagagaacucuagacuuccaugacucaaaugucaagaaccuuuacgacaaggucagacuacagcuuagggauaaugcaaaagagcugggcaacgguuguuucgaguucuaucacaaaugugauaaugaauguauggaaaguguaagaaacggaacguaugacuacccgcaguacucagaagaagcaagauuaaaaagagaggaaauaaguggaguaaaauuggaaucgauaggaacuuaccaaauacugucaauuuauucaacaguggcgaguucccuaguacugucaaucaugguggcuggucuaucuuuauggauguguuccaacgguucguuacaaugcagaaugugcauuuaa

SEQ ID NO: 42599 - RNA, 1698 nt, Artificial Sequence
  derived and/or modified CDS sequence (wt) from hemagglutinin__InfluenzaA__AGY14471
augaaaguaaaacuacugauccuguuauguacauuuacagcuacauaugcagacacaauauguauaggcuaccaugccaacaacucaacugacacuguugacacaauacuugaaaagaaugugacagugacacacucugucaacuuacuugaggacagccacaauggaaaacuaugucuacuaaaaggaauagccccccuacaauuggguaauugcagcguugccggauggaucuuaggaaauccagagugcggauuacugauucccaaggaaucaugguccuacauuguagagacaccaaauccugagaauggaacauguuacccaggauauuuugacgacuaugaggagcuaagagagcaauugaguucaguaucuucauuugagagauucgaaauauuccccaaagaaagcucauggcccaaccacaccguaaccggaguaucagcaucaugcucccauaaugggaaaagcaguuuuuacagaaauuugcuauggcugacggggaagaauggucuguacccaaaccugagcaaguccuaugcaaacaacaaagagaaagaaguccucauacuaugggguguucaucacccgucaaacauagggaaccaaaggacucucuaucauacagaaaauacuuaugucucuguagugucuucacauuacagcagaagauucaccccagaaauaaccaaaaggcccaaaguaagagaucaggaaggaagaaucaacuauuacuggacucugcuggaacccggggauacaauaauauuugaggcaaauggaaaucuaauagcgccaugguaugcuuucgcacugaguaaagguuuuggaucaggaaucaucaccucaaaugcaccaauggaugaaugugaugcgaaaugucaaacaccucagggagcuauaaacagcaaucuuccuuuccagaauguacacccagucacaauaggagaguguccaaaguauguuaggaguacaaaauuaaggaugguuacagggcuaaggaacaucccguccauucaauccagagguuuguuuggagccauugccgguuucauugaaggaggauggacuggaaugguagaugggugguacgguuaucaucaucagaaugagcaaggaucuggcuaugcugcagaucaagaaagcacacaaaacgccauuaacgggauuacaaacaaggugaauucuguaauugagaaaaugaacacucaauucacaguugugggcaaagaauucaacaaauuggaaagaagaauggaaaacuuaaauaaaaaagucgaugauggauuucuagacauuuggacauauaaugcagaguuguugguucuacuggaaaaugaaaggacuuuggauuuccacgacuccaaugugaugaauuuguaugagaaaguaaaaggccaauuaaagaauaaugccaaagaaauaggaaauggguguuuugaauucuaucacaaguguaacaacgaaugcauggagagugugaaaaauggaacuuaugacuauccaaaauauuccgaagaaucaaaguuaaacagggaaaaaauugauggagugaaauuggagucaaugggagucuaucagauucuggcgaucuauucaacugucgcuaguucccugguucuuuuagucucccugggggcaaucagcuucuggauguguuccaaugggucuuugcaguguagaauaugcaucuga

SEQ ID NO: 42600 - RNA, 1698 nt, Artificial Sequence
  derived and/or modified CDS sequence (wt) from hemagglutinin__InfluenzaA__AGY14477
augaaaguaaaacuacugauccuguuauguacauuuacagcuacauaugcagacacaauauguauaggcuaccaugccaacaacucaacugacacuguugacacaauacuugaaaagaaugugacagugacacacucugucaacuuacuugaggacagccacaauggaaaacuauguuuacuaaaaggaauagccccccuacaauuggguaauugcagcguugccggauggaucuuaggaaauccagagugcggauuacugauucccaaggaaucaugguccuacauuguagagacaccaaauccugagaauggaacauguuacccaggauauuuugacgacuaugaggagcuaagagagcaauugaguucaguaucuucauuugagagauucgaaauauuccccaaagaaagcucauggcccaaccacaccguaaccggaguaucagcaucaugcucccauaaugggaaaagcaguuuuuacagaaauuugcuauggcugacggggaagaauggucuguacccaaaccugagcaaguccuaugcaaacaacaaagagaaagaaguccucauacuaugggguguucaucacccgucaaacauagggaaccaaaggacucucuaucauacagaaaauacuuaugucucuguagugucuucacauuacagcagaagauucaccccagaaauaaccaaaaggcccaaaguaagagaucaggaaggaagaaucaacuauuacuggacucugcuggaacccggggauacaauaauauuugaggcaaauggaaaucuaauagcgccaugguaugcuuucgcacugaguaaagguuuuggaucaggaaucaucaccucaaaugcaccaauggaugaaugugaugcgaaaugucaaacaccucagggagcuauaaacagcaaucuuccuuuccagaauguacacccagucacaauaggagaguguccaaaguauguuaggaguacaaaauuaaggaugguuacagggcuaaggaacaucccguccauucaauccagagguuuguuuggagccauugccgguuucauugaaggaggauggacuggaaugguagaugggugguacgguuaucaucaucagaaugagcaaggaucuggcuaugcugcagaucaagaaagcacacaaaacgccauuaacgggauuacaaacaaggugaauucuguaauugagaaaaugaacacucaauucacaguugugggcaaagaauucaacaaauuggaaagaagaauggaaaacuuaaauaaaaaagucgaugauggauuucuagacauuuggacauauaaugcagaguuguugguucuacuggaaaaugaaaggacuuuggauuuccacgacuccaaugugaugaauuuguaugagaaaguaaaaggccaauuaaagaauaaugccaaagaaauaggaaauggguguuuugaauucuaucacaaguguaacaacgaaugcauggagagugugaaaaauggaacuuaugacuauccaaaauauuccgaagaaucaaaguuaaacagggaaaaaauugauggagugaaauuggagucaaugggagucuaucagauucuggcgaucuauucaacugucgcuaguucccugguucuuuuagucucccugggggcaaucagcuucuggauguguuccaaugggucuuugcaguguagaauaugcaucuga

SEQ ID NO: 42601 - RNA, 1701 nt, Artificial Sequence
  derived and/or modified CDS sequence (wt) from hemagglutinin__InfluenzaA__AHC57459
augaagacuaucauugcuuugagcuacauucuaugucugguuuucgcucaaaaacuuccuggaaaugacaacagcacggcaacgcugugccuugggcaccaugcagugccaaacggaacgauagugaaaacaaucacgaaugaccaaauugaaguuacuaaugcuacugagcugguucagaguuccucaacaggugaaauaugcaacaguccucaucagauccuugauggagaaaacugcacacuaauagaugcucuauugggagacccucagugugauggcuuccaaaacaagaaaugggaccuuuuuguugaacgaagcaaagcccacagcaacuguuaccccuaugaugugccggauuaugccucccuuaggucacuaguugccucauccggcacacuggaguuuaacaaugaaagcuucaauuggacuggagucacucaaaacggaacaagcucugcuugcauaaggagaucuaauaauaguuucuuuaguagauugaauugguugacccacuuaaacuucaaauacccagcauugaacgugacuaugccaaacaaugaacaauuugacaaauuguacauuugggggguucaccacccggguacggacaaggaccaaaucuuccuguaugcucaagcagcaggaagaaucacaguaucuaccaaaagaagccaacaagcuguaauuccgaauaucggaucuagacccagaauaaggaauaucccuagcagaguaagcaucuauuggacaauaguaaaaccgggagacauacuuuugauuaacagcacagggaaucuaauugcuccuagggguuacuucaaaauacgaagugggaaaagcucaauaaugagaucagaugcacccauuggcaaaugcaauucugcaugcaucacuccaaauggaagcauucccaaugacaaaccauuccaaaauguaaacaggaucacauacggggccugucccagauauguuaagcaaaacacucugaaauuggcaacaggaaugagaaauguaccagagaaacaaacuagaggcauauuuggcgcaauagcugguuucauagaaaaugguugggagggaaugguggaugguugguacgguuucaggcaucaaaauucugagggaaggggacaagcagcagaucucaaaagcacucaagcagcaaucgaucaaaucaaugggaagcugaauagauugaucgggaaaaccaacgagaaauuccaucaaauugaaaaagaauucucagaagucgaagggagaauucaggaccuugagaaauauguugaggacacuaaaauagaucucuggucauacaacgcggagcuucuuguugcccuggagaaccaacacacaauugaucuaacugauucagaaaugaacaaacuguuugaaaaaacaaagaagcaacugagggaaaaugcugaggauaugggcaaugguuguuucaaaauauaccacaaaugugacaaugccugcauaggaucaaucagaaauggaacuuaugaccacgauguguacagagaugaagcauuaaacaaccgauuccagaucaagggaguugagcugaagucaggguacaaagauuggauccuauggauuuccuuugccauaucauguuuuuugcuuuguguugcuuuguugggguucaucaugugggccugccaaaaaggcaacauuaggugcaacauuugcauuuga

SEQ ID NO: 42602 - RNA, 1701 nt, Artificial Sequence
  derived and/or modified CDS sequence (wt) from hemagglutinin__InfluenzaA__AHC57465
augaagacuaucauugcuuugagcuacauucuaugucugguuuucgcucaaaaacuuccuggaaaugacaacagcacggcaacgcugugccuugggcaccaugcagugccaaacggaacgauagugaaaacaaucacgaaugaccaaauugaaguuacuaaugcuacugagcugguucagaguuccucaacaggugaaauaugcaacaguccucaucagauccuugauggagaaaacugcacacuaauagaugcucuauugggagacccucagugugauggcuuccaaaacaagaaaugggaccuuuuuguugaacgaagcaaagcccacagcaacuguuacccuuaugaugugccggauuaugccucccuuaggucacuaguugccucauccggcacacuggaguuuaacaaugaaagcuucaauuggacuggagucacucaaaacggaacaagcucugcuugcauaaggagaucuaauaauaguuucuuuaguagauugaauugguugacccacuuaaacuucaaauacccagcauugaacgugacuaugccaaacaaugaacaauuugacaaauuguacauuugggggguucaccacccggguacggacaaggaccaaaucuuccuguaugcucaagcaucaggaagaaucacaguaucuaccaaaagaagccaacaagcuguaauuccgaauaucggaucuagacccagaguaaggaauaucccuagcagaguaagcaucuauuggacaauaguaaaaccgggagacauacuuuugauuaacagcacagggaaucuaauugcuccuagggguuacuucaaaauacgaagugggaaaagcucaauaaugagaucagaugcacccauuggcaaaugcaauucugcaugcaucacuccaaauggaagcauucccaaugacaaaccauuccaaaauguaaacaggaucacauacggggccugucccagauauguuaagcaaaacacucugaaauuggcaacaggaaugagaaauguaccagagaaacaaacuagaggcauauuuggcgcaauagcggguuucauagaaaaugguugggagggaaugguggaugguugguacgguuucaggcaucaaaauucugagggaagaggacaagcagcagaucucaaaagcacucaagcagcaaucgaucaaaucaaugggaagcugaauagauugaucgggaaaaccaacgagaaauuccaucagauugaaaaagaauucucagaagucgaagggagaauucaggaccuugagaaauauguugaggacacuaaaauagaucucuggucauacaacgcggagcuucuuguugcccuggagaaccaacacacaauugaucuaacugacucagaaaugaacaaacuguuugaaaaaacaaagaagcaacugagggaaaaugcugaggauaugggcaaugguuguuucaaaauauaccacaaaugugacaaugccugcauaggaucaaucagaaauggaacuuaugaccacgauguguacagagaugaagcauuaaacaaccgauuccagaucaagggaguugagcugaagucaggguacaaagauuggauccuauggauuuccuuugccauaucauguuuuuugcuuuguguugcuuuguugggguucaucaugugggccugccaaaaaggcaacauuaggugcaacauuugcauuuga

SEQ ID NO: 42603 - RNA, 1701 nt, Artificial Sequence
  derived and/or modified CDS sequence (wt) from hemagglutinin__InfluenzaA__AHC57487
augaagacuaucauugcuuugagcuacauucuaugucugguuuucgcucaaaaacuuccuggaaaugacaacagcacggcaacgcugugccuugggcaccaugcagugccaaacggaacgauagugaaaacaaucacgaaugaccaaauugaaguuacuaaugcuacugagcugguucagaguuccucaacaggugaaauaugcaacaguccucaucagauccuugauggagaaaacugcacacuaauagaugcucuauugggagacccucagugugauggcuuccaaaacaagaaaugggaccuuuuuguugaacgaagcaaagcccacagcaacuguuacccuuaugaugugccggauuaugccucccuuaggucacuaguugccucauccggcacacuggaguuuaacaaugaaagcuucaauuggacuggagucacucaaaacggaacaagcucugcuugcauaaggagaucuaauaauaguuucuuuaguagauugaauugguugacccacuuaaacuucaaauacccagcauugaacgugacuaugccaaacaaugaacaauuugacaaauuguacauuugggggguucaucacccggguacggacaaggaccaaaucuuccuguaugcucaagcagcaggaagaaucacaguaucuaccaaaagaagccaacaagcuguaauuccgaauaucggaucuagacccagaguaaggaauaucccuagcagaguaagcaucuauuggacaauaguaaaaccgggagacauacuuuugauuaacagcacagggaaucuaauugcuccuagggguuacuucaaaauacgaagugggaaaagcucaauaaugagaucagaugcacccauuggcaaaugcaauucugcaugcaucacuccaaauggaagcauucccaaugacaaaccauuccaaaauguaaacaggaucacauacggggccugucccagauauguuaagcaaaacacucugaaauuggcaacaggaaugagaaauguaccagagaaacaaacuagaggcauauuuggcgcaauagcugguuucauagaaaaugguugggagggaaugguggaugguugguacgguuucaggcaucaaaauucugagggaaggggacaagcagcagaucucaaaagcacucaagcagcaaucgaucaaaucaaugggaagcugaauagauugaucgggaaaaccaacgagaaauuccaucagauugaaaaagaauucucagaagucgaagggagaauucaggaccuugagaaauauguugaggacacuaaaauagaucucuggucauacaacgcggagcuucuuguugcccuggagaaccaacacacaauugaucuaacugacucagaaaugaacaaacuguuugaaaaaacaaagaagcaacugagggaaaaugcugaggauaugggcaaugguuguuucaaaauauaccacaaaugugacaaugccugcauaggaucaaucagaaauggaacuuaugaccacgauguguacagagaugaagcauuaaacaaccgauuccagaucaagggaguugagcugaagucaggguacaaagauuggauccuauggauuuccuuugccauaucauguuuuuugcuuuguguugcuuuguugggguucaucaugugggccugccaaaaaggcaacauuaggugcaacauuugcauuuga

SEQ ID NO: 42604 - RNA, 1701 nt, Artificial Sequence; identical to SEQ ID NO: 40264
  derived and/or modified CDS sequence (wt) from hemagglutinin__InfluenzaA__AHC57499

SEQ ID NO: 42605 - RNA, 1701 nt, Artificial Sequence
  derived and/or modified CDS sequence (wt) from hemagglutinin__InfluenzaA__AHC57511
augaagacuaucauugcuuugagcuacauucuaugucugguuuucgcucaaaaacuuccuggaaaugacaacagcacggcaacgcugugccuugggcaccaugcaguaccaaacggaacgauagugaaaacaaucacgaaugaccaaauugaaguuacuaaugcuacugagcugguucagaauuccucaacaggugaaauaugcgacaguccucaucagauccuugauggagaaaacugcacacuaauagaugcucuauugggagacccucagugugauggcuuccaaaauaagaaaugggaccuuuuuguugaacgaagcaaagccuacagcaacuguuacccuuaugaugugccggauuaugccucccuuaggucacuaguugccucauccggcacacuggaguuuaacaaugaaagcuucaauuggacuggagucacucaaaacggaacaagcucugcuugcauaaggagaucuaauaauaguuucuuuaguagauugaauugguugacccacuuaaacuucaaauacccagcauugaacgugacuaugccaaacaaugaacaauuugacaaauuguacauuugggggguucaccacccggguacggacaaggaccaaaucuuccuguaugcucaagcaucaggaagaaucacaguaucuaccaaaagaagccaacaagcuguaaucccgaauaucggaucuagacccagaguaaggaauaucccuagcagaauaagcaucuauuggacaauaguaaaaccgggagacauacuuuugauuaacagcacagggaaucuaauugcuccuagggguuacuucaaaauacgaagugggaaaagcucaauaaugagaucagaugcacccauuggcaaaugcaauucugaaugcaucacuccaaauggaagcauucccaaugacaaaccauuccaaaauguaaacaggaucacauacggggccugucccagauauguuaagcaaaacacucugaaauuggcaacaggaaugcgaaauguaccagagaaacaaacuagaggcauauuuggcgcaauagcggguuucauagaaaaugguugggagggaaugguggaugguugguacgguuucaggcaucaaaauucugagggaagaggacaagcagcagaucucaaaagcacucaagcagcaaucgaucaaaucaaugggaagcugaauagauugaucggaaaaaccaacgagaaauuccaucagauugaaaaagaauucucagaagucgaagggagaauucaggaccuugagaaauauguugaggacacuaaaauagaucucuggucauacaacgcggagcuucuuguugcccuggagaaccaacauacaauugaucuaacugacucagaaaugaacaaacuguuugaaaaaacaaagaagcaacugagggaaaaugcugaggauaugggcaaugguuguuucaaaauauaccacaaaugugacaaugccugcauaggaucaaucagaaauggaacuuaugaccacgauguauacagagaugaagcauuaaacaaccgguuccagaucaagggaguugagcugaagucaggguacaaagauuggauccuauggauuuccuuugccauaucauguuuuuugcuuuguguugcuuuguugggguucaucaugugggccugccaaaaaggcaacauuaggugcaacauuugcauuuga

SEQ ID NO: 42606 - RNA, 1701 nt, Artificial Sequence
  derived and/or modified CDS sequence (wt) from hemagglutinin__InfluenzaA__AHC57523
augaagacuaucauugcuuugagcuacauucuaugucugguuuucgcucaaaaacuuccuggaaaugacaacagcacggcaacgcugugccuugggcaccaugcaguaccaaacggaacgauagugaaaacaaucacgaaugaccaaauugaaguuacuaaugcuacugagcugguucagaauuccucaacaggugaaauaugcgacaguccucaucagauccuugauggagaaaacugcacacuaauagaugcucuauugggagacccucagugugauggcuuccaaaauaagaaaugggaccuuuuuguugaacgaagcaaagccuacagcaacuguuacccuuaugaugugccggauuaugccucccuuaggucacuaguugccucauccggcacacuggaguuuaacaaugaaagcuucaauuggacuggagucacucaaaacggaacaagcucugcuugcauaaggagaucuaauaauaguuucuuuaguagauugaauugguugacccacuuaaacuucaaauacccagcauugaacgugacuaugccaaacaaugaacaauuugacaaauuguacauuugggggguucaccacccagguacggacaaggaccaaaucuuccuguaugcucaagcaucaggaagaaucacaguaucuaccaaaagaagccaacaagcuguaaucccgaauaucggaucuagacccagaguaaggaauaucccuagcagaauaagcaucuauuggacaauaguaaaaccgggagacauacuuuugauuaacagcacagggaaucuaauugcuccuagggguuacuucaaaauacgaagugggaaaagcucaauaaugagaucagaugcacccauuggcaaaugcaauucugaaugcaucacuccaaauggaagcauucccaaugacaaaccauuccaaaauguaaacaggaucacauacggggccugucccagauauguuaagcaaaacacucugaaauuggcaacaggaaugcgaaauguaccagagaaacaaacuagaggcauauuuggcgcaauagcggguuucauagaaaaugguugggagggaaugguggaugguugguacgguuucaggcaucaaaauucugagggaagaggacaagcagcagaucucaaaagcacucaagcagcaaucgaucaaaucaaugggaagcugaauagauugaucgggaaaaccaacgagaaauuccaucagauugaaaaagaauucucagaagucgaagggagaauucaggaccuugagaaauauguugaggacacuaaaauagaucucuggucauacaacgcggagcuucuuguugcccuggagaaccaacauacaauugaucuaacugacucagaaaugaacaaacuguuugaaaaaacaaagaagcaacugagggaaaaugcugaggauaugggcaaugguuguuucaaaauauaccacaaaugugacaaugccugcauaggaucaaucagaaauggaacuuaugaccacgauguauacagagaugaagcauuaaacaaccgguuccagaucaagggaguugagcugaagucaggguacaaagauuggauccuauggauuuccuuugccauaucauguuuuuugcuuuguguugcuuuguugggguucaucaugugggccugccaaaaaggcaacauuaggugcaacauuugcauuuga

SEQ ID NO: 42607 - RNA, 1701 nt, Artificial Sequence
  derived and/or modified CDS sequence (wt) from hemagglutinin__InfluenzaA__AHC57675
augaagacuaucauugcuuugagcuacauucuaugucugguuuucgcucaaaaacuuccuggaaaugacaacagcacggcaacgcugugccuugggcaccaugcagugccaaacggaacgauagugaaaacaaucacgaaugaccaaauugaaguuacuaaugcuacugagcugguucagaguuccucaacaggugaaauaugcaacaguccucaucagauccuugauggagaaaacugcacacuaauagaugcucuauugggagacccucagugugauggcuuccaaaacaagaaaugggaccuuuuuguugaacgaagcaaagcccacagcaacuguuacccuuaugaugugccggauuaugccucccuuaggucacuaguugccucauccggcacacuggaguuuaacaaugaaagcuucaauuggacuggagucacucaaaacggaacaagcucugcuugcauaaggagaucuaauaauaguuucuuuaguagauugaauugguugacccacuuaaacuucaaauacccagcauugaacgugacuaugccaaacaaugaacaauuugacaaauuguacauuugggggguucaccacccggguacggacaaggaccaaaucuuccuguaugcucaagcaucaggaagaaucacaguaucuaccaaaagaagccaacaagcuguaauuccgaauaucggaucuagacccagaguaaggaauaucccuagcagaguaagcaucuauuggacaauaguaaaaccgggagacauacuuuugauuaacagcacagggaaucuaauugcuccuagggguuacuucaaaauacgaagugggaaaagcucaauaaugagaucagaugcacccauuggcaaaugcaauucugcaugcaucacuccaaauggaagcauucccaaugacaaaccauuccaaaauguaaacaggaucacauacggggccugucccagauauguuaagcaaaacacucugaaauuggcaacaggaaugagaaauguaccagagaaacaaacuagaggcauauuuggcgcaauagcggguuucauagaaaauggcugggagggaaugguggaugguugguacgguuucaggcaucaaaauucugagggaaggggacaagcagcagaucucaaaagcacucaagcagcaaucgaucaaaucaaugggaagcugaauagauugaucgggaaaaccaacgagaaauuccaucagauugaaaaagaauucucagaagucgaagggagaauucaggaccuugagaaauauguugaggacacuaaaauagaucucuggucauacaacgcggagcuucuuguugcccuggagaaccaacacacaauugaucuaacugacucagaaaugaacaaacuguuugaaaaaacaaagaagcaacugagggaaaaugcugaggauaugggcaaugguuguuucaaaauauaucacaaaugugacaaugccugcauaggaucaaucagaaauggaacuuaugaccacgauguguacagagaugaagcauuaaacaaccgauuccagaucaagggaguugagcugaagucaggguacaaagauuggauccuauggauuuccuuugccauaucauguuuuuugcuuuguguugcuuuguugggguucaucaugugggccugccaaaaaggcaacauuaggugcaacauuugcauuuga

SEQ ID NO: 42608 - RNA, 1701 nt, Artificial Sequence
  derived and/or modified CDS sequence (wt) from hemagglutinin__InfluenzaA__AHC57827
augaagacuaucauugcuuugagcuacauucuaugucugguuuucgcucaaaaacuuccuggaaaugacaacagcacggcaacgcugugccuugggcaccaugcagugccaaacggaacgauagugaaaacaaucacgaaugaccaaauugaaguuacuaaugcuacugagcugguucagaguuccucaacaggugaaauaugcaacaguccucaucagauccuugauggagaaaacugcacacuaauagaugcucuauugggagacccucagugugauggcuuccaaaacaagaaaugggaccuuuuuguugaacgaagcaaagcccacagcaacuguuacccuuaugaugugccggauuaugccucccuuaggucacuaguugccucauccggcacacuggaguuuaacaaugaaagcuucaauuggacuggagucacucaaaacggaacaagcucugcuugcauaaggagaucuaauaauaguuucuuuaguagauugaauugguugacccacuuaaacuucaaauacccagcauugaacgugacuaugccaaacaaugaacaauuugacaaauuguacauuugggggguucaccacccggguacggacaaggaccaaaucuuccuguaugcucaagcaucaggaagaaucacaguaucuaccaaaagaagccaacaagcuguaauuccgaauaucggaucuagacccagaguaaggaauaucccuagcagaguaagcaucuauuggacaauaguaaaaccgggagacauacuuuugauuaacagcacagggaaucuaauugcuccuagggguuacuucaaaauacgaagugggaaaagcucaauaaugagaucagaugcacccauuggcaaaugcaauucugcaugcaucacuccaaauggaagcauucccaaugacaaaccauuccaaaauguaaacaggaucacauacggggccugucccagauauguuaagcaaaacacucugaaauuggcaacaggaaugagaaauguaccagagaaacaaacuagaggcauauuuggcgcaauagcggguuucauagaaaaugguugggagggaaugguggaugguugguacgguuucaggcaucaaaauucugagggaaggggacaagcagcagaucucaaaagcacucaagcagcaaucgaucaaaucaaugggaagcugaauagauugaucgggaaaaccaacgagaaauuccaucagauugaaaaagaauucucagaagucgaagggagaauucaggaccuugagaaauauguugaggacacuaaaauagaucucuggucauacaacgcggagcuucuuguugcccuggagaaccaacacacaauugaucuaacugacucagaaaugaacaaacuguuugaaaaaacaaagaagcaacugagggaaaaugcugaggauaugggcaaugguuguuucaaaauauaccacaaaugugacaaugccugcauaggaucaaucagaaauggaacuuaugaccacgauguguacagagaugaagcauuaaacaaccgauuccagaucaagggaguugagcugaagucaggguacaaagauuggauccuauggauuuccuuugccauaucauguuuuuugcuuuguguugcuuuguugggguucaucaugugggccugccaaaaaggcaacauuaggugcaacauuugcauuuga

SEQ ID NO: 42609 - RNA, 1701 nt, Artificial Sequence
  derived and/or modified CDS sequence (wt) from hemagglutinin__InfluenzaA__AHC57956
augaagacuaucauugcuuugagcuacauucuaugucugguuuucgcucaaaaacuuccuggaaaugacaacagcacggcaacgcugugccuugggcaccaugcagugccaaacggaacgauagugaaaacaaucacgaaugaccaaauugaaguuacuaaugcuacugagcugguucagaguuccucaacaggugaaauaugcaacaguccucaucagauccuugauggagaaaacugcacacuaauagaugcucuauugggagacccucagugugauggcuuccaaaacaagaaaugggaccuuuuuguugaacgaagcaaagcccacagcaacuguuacccuuaugaugugccggauuaugccucccuuaggucacuaguugccucauccggcacacuggaguuuaacaaugaaagcuucaauuggacuggagucacucaaaacggaacaagcucugcuugcauaaggagaucuaauaauaguuucuuuaguagauugaauugguuaacccacuuaaacuucaaauacccagcauugaacgugacuaugccaaacaaugaacaauuugacaaauuguacauuugggggguucaccacccggguacggacaaggaccaaaucuuccuguaugcucaagcagcaggaagaaucacaguaucuaccaaaagaagccaacaagcuguaauuccgaauaucggaucuagacccagaguaaggaauaucccuagcagaguaagcaucuauuggacaauaguaaaaccgggagacauacuuuugauuaacagcacagggaaucuaauugcuccuagggguuacuucaaaauacgaagugggaaaagcucaauaaugagaucagaugcacccauuggcaaaugcaauucugcaugcaucacuccaaauggaagcauucccaaugacaaaccauuccaaaauguaaacaggaucacauacggggcuugucccagauauguuaagcaaaacacucugaaauuggcaacaggaaugagaaauguaccagagaaacaaacuagaggcauauuuggcgcaauagcugguuucauagaaaaugguugggagggaaugguggaugguugguacgguuucaggcaucaaaauucugagggaaggggacaagcagcagaucucaaaagcacucaagcagcaaucgaucaaaucaaugggaagcugaauagauugaucgggaaaaccaacgagaaauuccaucagauugaaaaagaauucucagaagucgaagggagaauucaggaccuugagaaauauguugaggacacuaaaauagaucucuggucauacaacgcggagcuucuuguugcccuggagaaccaacacacaauugaucuaacugacucagaaaugaacaaacuguuugaaaaaacaaagaagcaacugagggaaaaugcugaggauaugggcaaugguuguuucaaaauauaccacaaaugugacaaugccugcauaggaucaaucagaaauggaacuuaugaccacgauguguacagagaugaagcauuaaacaaccgauuccagaucaagggaguugagcugaagucaggguacaaagauuggauccuauggauuuccuuugccauaucauguuuuuugcuuuguguugcuuuguugggguucaucaugugggccugccaaaaaggcaacauuaggugcaacauuugcauuuga

SEQ ID NO: 42610 - RNA, 1701 nt, Artificial Sequence
  derived and/or modified CDS sequence (wt) from hemagglutinin__InfluenzaA__AHC57981
augaagacuaucauugcuuugagcuacauucuaugucugguuuucgcucaaaaaauuccuggaaaugacaacagcacggcaacgcugugccuugggcaccaugcaguaccaaacggaacgauagugaaaacaaucacgaaugaccaaauugaaguuacuaaugcuacugagcugguucagaauuccucaacaggugaaauaugcgacaguccucaucagauccuugauggagaaaacugcacacuaauagaugcucuauugggagacccucagugugauggcuuccaaaauaagaaaugggaccuuuuuguugaacgaagcaaagccuacagcaacuguuacccuuaugaugugccggauuaugccucccuuaggucacuaauugccucauccggcacacuggaguuuaacaaugaaagcuucaauuggacuggagucacucaaaacggaacaagcucugcuugcauaaggagaucuaauaauaguuucuuuaguagauugaauugguugacccacuuaaacuucaaauacccagcauugaacgugacuaugccaaacaaugaacaauuugacaaauuguacauuugggggguucaccacccggguacggacaaggaccaaaucuuccuguaugcucaagcaucaggaagaaucacaguaucuaccaaaagaagccaacaagcuguaaucccgaauaucggaucuagacccagaguaaggaauaucccuagcagaauaagcaucuauuggacaauaguaaaaccgggagacauacuuuugauuaacagcacagggaaucuaauugcuccuagggguuacuucaaaauacgaagugggaaaagcucaauaaugagaucagaugcacccauuggcaaaugcaauucugaaugcaucacuccaaauggaagcauucccaaugacaaaccauuccaaaauguaaacaggaucacauacggggccugucccagauauguuaagcaaaacacucugaaauuggcaacaggaaugcgaaauguaccagagaaacaaacuagaggcauauuuggcgcaauagcggguuucauagaaaaugguugggagggaaugguggaugguugguacgguuucaggcaucaaaauucugagggaagaggacaagcagcagaucucaaaagcacucaagcagcaaucgaucaaaucaaugggaaucugaauagauugaucggaaaaaccaacgagaaauuccaucagauugaaaaagaauucucagaagucgaagggagaauucaggaccuugagaaauauguugaggacacuaaaauagaucucuggucauacaacgcggagcuucuuguugcccuggagaaccaacauacaauugaucuaacugacucagaaaugaacaaacuguuugaaaaaacaaagaagcaacugagggaaaaugcugaggauaugggcaaugguuguuucaaaauauaccacaaaugugacaaugccugcauaggaucaaucagaaauggaacuuaugaccacgauguauacagagaugaagcauuaaacaaccgguuccagaucaagggaguugagcugaagucaggguacaaagauuggauccuauggauuuccuuugccauaucauguuuuuugcuuuguguugcuuuguugggguucaucaugugggccugccaaaaaggcaacauuaggugcaacauuugcauuuga

SEQ ID NO: 42611 - RNA, 1701 nt, Artificial Sequence
  derived and/or modified CDS sequence (wt) from hemagglutinin__InfluenzaA__AHC57993
augaagacuaucauugcuuugagcuacauucuaugucugguuuucgcucaaaaacuuccuggaaaugacaacagcacggcaacgcugugccuugggcaccaugcaguaccaaacggaacgauagugaaaacaaucacgaaugaccaaauugaaguuacuaaugcuacugagcugguucagaauuccucaacaggugaaauaugcgacaguccucaucagauccuugauggagaaaacugcacacuaauagaugcucuauugggagacccucagugugauggcuuccaaaauaagaaaugggaccuuuuuguugaacgaagcaaagccuacagcaacuguuacccuuaugaugugccggauuaugccucccuuaggucacuaguugccucauccggcacacuggaguuuaacaaugaaagcuucaauuggacuggagucacucaaaacggaacaagcucugcuugcauaaggagaucuaauaauaguuucuuuaguagauugaauugguugacccacuuaaacuucaaauacccagcauugaacgugacuaugccaaacaaugaacaauuugacaaauuguacauuugggggguucaccacccggguacggacaaggaccaaaucuuccuguaugcucaagcaucaggaagaaucacaguaucuaccaaaagaagccaacaagcuguaaucccgaauaucggaucuagacccagaguaaggaauaucccuagcagaauaagcaucuauuggacaauaguaaaaccgggagacauacuuuugauuaacagcacagggaaucuaauugcuccuagggguuacuucaaaauacgaagugggaaaagcucaauaaugagaucagaugcacccauuggcaaaugcaauucugaaugcaucacuccaaauggaagcauucccaaugacaaaccauuccaaaauguaaacaggaucacauacggggccugucccagauauguuaagcaaaacacucugaaauuggcaacaggaaugcgaaauguaccagagaaacaaacuagaggcauauuuggcgcaauagcggguuucauagaaaaugguugggagggaaugguggaugguugguacgguuucaggcaucaaaauucugagggaagaggacaagcagcagaucucaaaagcacucaagcagcaaucgaucaaaucaaugggaagcugaauagauugaucgggaaaaccaacgagaaauuccaucagauugaaaaagaauucucagaagucgaagggagaauucaggaccuugagaaauauguugaggacacuaaaauagaucucuggucauacaacgcggagcuucuuguugcccuggagaaccaacauacaauugaucuaacugacucagaaaugaacaaacuguuugaaaaaacaaagaagcaacugagggaaaaugcugaggauaugggaaaugguuguuucaaaauauaccacaaaugugacaaugccugcauaggaucaaucagaaauggaacuuaugaccacgauguauacagagaugaagcauuaaacaaccgguuccagaucaagggaguugagcugaagucaggguacaaagauuggauccuauggauuuccuuugccauaucauguuuuuugcuuuguguugcuuuguugggguucaucaugugggccugccaaaaaggcaacauuaggugcaacauuugcauuuga

SEQ ID NO: 42612 - RNA, 1701 nt, Artificial Sequence; identical to SEQ ID NO: 41436
  derived and/or modified CDS sequence (wt) from hemagglutinin__InfluenzaA__AHC58005

SEQ ID NO: 42613 - RNA, 1701 nt, Artificial Sequence
  derived and/or modified CDS sequence (wt) from hemagglutinin__InfluenzaA__AHC58017
augaagacuaucauugcuuugagcuacauucuaugucugguuuucgcucaaaaacuuccuggaaaugacaacagcacggcaacgcugugccuugggcaccaugcagugccaaacggaacgauagugaaaacaaucacgaaugaccaaauugaaguuacuaaugcuacugagcugguucagaguuccucaacaggugaaauaugcaacaguccucaucagauccuugauggagaaaacugcacacuaauagaugcucuauugggagacccucagugugauggcuuccaaaacaagaaaugggaccuuuuuguugaacgaagcaaagcccacagcaacuguuacccuuaugaugugccggauuaugccucccuuaggucacuaguugccucauccggcacacuggaguuuaacaaugaaagcuucaauuggacuggagucacucaaaacggaacaagcucugcuugcauaaggagaucuaauaauaguuucuuuaguagauugaauugguugacccacuuaaacuucaaauacccagcauugaacgugacuaugccaaacaaugaacaauuugacaaauuguacauuugggggguucaccacccggguacggacaaggaccaaaucuuccuguaugcucaagcagcaggaagaaucacaguaucuaccaaaagaagccaacaagcuguaauuccgaauaucggaucuagacccagaguaaggaauaucccuagcagaguaagcaucuauuggacaauaguaaaaccgggagacauacuuuugauuaacagcacagggaaucuaauugcuccuagggguuacuucaaaauacgaagugggaaaagcucaauaaugagaucagaugcacccauuggcaaaugcaauucugcaugcaucacuccaaauggaagcauucccaaugacaaaccauuccaaaauguaaacaggaucacauacggggccugucccagauauguuaagcaaaacacucugaaauuggcaacaggaaugagaaauguaccagagaaacaaacuagaggcauauuuggcgcaauagcugguuucauagaaaaugguugggagggaaugguggaugguugguacgguuucaggcaucaaaauucugagggaaggggacaagcagcagaucucaaaagcacucaagcagcaaucgaucaaaucaaugggaagcugaauagauugaucgggaaaaccaacgagaaauuccaucagauugaaaaagaauucucagaagucgaagggagaauucaggaccuugagaaauauguugaggacacuaaaauagaucucuggucauacaacgcggagcuucuuguugcccuggagaaccaacacacaauugaucuaacugacucagaaaugaacaaacuguuugaaaaaacaaagaagcaacugagggaaaaugcugaggauaugggcaaugguuguuucaaaauauaccacaaaugugacaaugccugcauaguaucaaucagaaauggaacuuaugaccacgauguguacagagaugaagcauuaaacaaccgauuccagaucaagggaguugagcugaagucaggguacaaagauuggauccuauggauuuccuuugccauaucauguuuuuugcuuuguguugcuuuguugggguucaucaugugggccugccaaaaaggcaacauuaggugcaacauuugcauuuga

SEQ ID NO: 42614 - RNA, 1701 nt, Artificial Sequence
  derived and/or modified CDS sequence (wt) from hemagglutinin__InfluenzaA__AHC58029
augaagacuaucauugcuuugagcuacauucuaugucugguuuucgcucaaaaacuuccugggaaugacaacagcacggcaacgcugugccuugggcaccaugcagugccaaacggaacgauagugaaaacaaucacgaaugaccaaauugaaguuacuaaugcuacugaacugguucagaguuccucaacaggugaaauaugcaacaguccucaucagauccuugauggagaaaacugcacacuaauagaugcucuauugggagacccucagugugauggcuuccaaaacaagaaaugggaccuuuuuguugaacgaagcaaagcccacagcaacuguuacccuuaugaugugccggauuaugccucccuuaggucacuaguugccucauccggcacacuggaguuuaacaaugaaagcuucaauuggacuggagucacucaaaacggaacaagcucugcuugcauaaggggaucuaauaauaguuucuuuaguagauugaauugguugacccaauuaaacuucaaauacccagcauugaacgugacuaugccaaacaaugaacaauuugacaaauuguacauuugggggguucaccacccggguacggacaaggaccaaaucuuccuguaugcucaagcaucaggaagaaucacaguaucuaccaaaagaagccaacaagcuguaauuccgaauaucggaucuagacccagaguaaggaauaucccuagcagaguaagcaucuauuggacaauaguaaaaccgggagacauacuuuugauuaacagcacagggaaucuaauugcuccuagggguuacuucaaaauacgaagugggaaaagcucaauaaugagaucagaugcacccauuggcaaaugcaauucugcaugcaucacuccaaauggaagcauucccaaugacaaaccauuccaaaauguaaacaggaucacauacggggccugucccagauauguuaagcaaaacacucugaaauuggcaacaggaaugagaaauguaccagagaaacaaacuagaggcauauuuggcgcaauagcggguuucauagaaaaugguugggagggaaugguggaugguugguacgguuucaggcaucaaaauucugagggaaggggacaagcagcagaucucaaaagcacucaagcagcaaucgaucaaaucaaugggaagcugaauagauugaucgggaaaaccaacgagaaauuccaucagauugaaaaagaauucucagaagucgaagggagaauucaggaccuugagaaauauguugaggacacuaaaauagaucucuggucauacaacgcggagcuucuuguugcccuggagaaccaacacacaauugaucuaacugacucagaaaugaacaaacuguuugaaaaaacaaagaagcaacugagggaaaaugcugaggauaugggcaaugguuguuucaaaauauaccacaaaugugacaaugccugcauaggaucaaucagaaauggaacuuaugaccacgauguguacagagaugaagcauuaaacaaccgauuccagaucaagggaguugagcugaagucaggguacaaagauuggauccuauggauuuccuuugccauaucauguuuuuugcuuuguguugcuuuguugggguucaucaugugggccugccaaaaaggcaacauuaggugcaacauuugcauuuga

SEQ ID NO: 42615 - RNA, 1701 nt, Artificial Sequence
  derived and/or modified CDS sequence (wt) from hemagglutinin__InfluenzaA__AHC58050
augaagacuaucauugcuuugagcuacauucuaugucugguuuucgcucaaaaacuuccuggaaaugacaacagcacggcaacgcugugccuugggcaccaugcaguaccaaacggaacgauagugaaaacaaucacgaaugaccaaauugaaguuacuaaugcuacugagcugguucagaguuccucaacaggugaaauaugcgacaguccucaucagauccuugauggagaaaacugcacacuaauagaugcucuauugggagacccucagugugauggcuuccaaaauaagaagugggaccuuuuuguugaacgaagcaaagccuacagcaacuguuacccuuaugaugugccggauuaugccucccuuaggucacuaguugccucauccggcacacuggaguuuaacaaugaaagcuucaauuggacuggagucacucaaaacggaacaagcucugcuugcauaaggagaucuaauaguaguuucuuuaguagauugaauugguugacccacuuaaacuucaaauacccagcauugaacgugacuaugccaaacaaugaacaauuugacaaauuguacauuugggggguucaccacccggguacggacaaggaccaaaucuuccuguaugcucaaucaucaggaagaaucacaguaucuaccagaagaagccaacaagcuguaaucccgaauaucggaucuagacccagaauaaggaauaucccuagcagaauaagcaucuauuggacaauaguaaaaccgggagacauacuuuugauuaacagcacagggaaucuaauugcuccuagggguuacuucaaaauacgaagugggaaaagcucaauaaugagaucagaugcacccauuggcaaaugcaauucugaaugcaucacuccaaauggaagcauucccaaugacaaaccauuccaaaauguaaacaggaucacauacggggccugucccagauauguuaagcaaagcacucugaaauuggcaacaggaaugcgaaauguaccagagaaacaaacuagaggcauauuuggcgcaauagcggguuucauagaaaaugguugggagggaaugguggaugguugguacgguuucaggcaucaaaauucugagggaagaggacaagcagcagaucucaaaagcacucaagcagcaaucgaucaaaucaaugggaagcugaaucgauugaucgggaaaaccaacgagaaauuccaucagauugaaaaagaauucucagaagucgaagggagaauucaggaccuugagaaauauguugaggacacuaaaauagaucucuggucauacaacgcggagcuucuuguugcccuggagaaccaacauacaauugaucuaacugacucagaaaugaacaaacuguuugaaaaaacaaagaagcaacugagggaaaaugcugaggauaugggcaaugguuguuucaaaauauaccacaaaugugacaaugccugcauaggaucaaucagaaauggaacuuauaaccacgauguauacagagaugaagcauuaaacaaccgguuccagaucaagggaguugagcugaagucaggguacaaagauuggauccuauggauuuccuuugccauaucauguuuuuugcuuuguguugcuuuguugggguucaucaugugggccugccaaaagggcaacauuaggugcaacauuugcauuuga

SEQ ID NO: 42616 - RNA, 1701 nt, Artificial Sequence; identical to SEQ ID NO: 40264
  derived and/or modified CDS sequence (wt) from hemagglutinin__InfluenzaA__AHC58074

SEQ ID NO: 42617 - RNA, 1701 nt, Artificial Sequence; identical to SEQ ID NO: 40264
  derived and/or modified CDS sequence (wt) from hemagglutinin__InfluenzaA__AHC58098

SEQ ID NO: 42618 - RNA, 1701 nt, Artificial Sequence
  derived and/or modified CDS sequence (wt) from hemagglutinin__InfluenzaA__AHC58110
augaagacuaucauugcuuugagcuacauucuaugucugguuuucgcucaaaaacuuccuggaaaugacaacagcacggcaacgcugugccuugggcaccaugcaguaccaaacggaacaauagugaaaacaaucacgaaugaccaaauugaaguuacuaaugcuacugagcugguucagaauuccucaacaggugaaauaugcgacaguccucaucagauccuugauggagaaaacugcacacuaauagaugcucuauugggagacccucagugugauggcuuccaaaauaagaaaugggaccuuuuuguugaacgaagcaaagccuacagcaacuguuacccuuaugaugugccggauuaugccucccuuaggucacuaguugccucauccggcacacuggaguuuaacaaugaaagcuucaauuggacuggagucacucaaaacggaacaagcucugcuugcauaaggagaucuaauaauaguuucuuuaguagauugaauugguugacccacuuaaacuucaaauacccagcauugaacgugacuaugccaaacaaugaacaauuugacaaauuguacauuugggggguucaccacccggguacggacaaggaccaaaucuuccuguaugcucaagcaucaggaagaaucacaguaucuaccaaaagaagccaacaagcuguaaucccgaauaucggaucuagacccagaguaaggaauaucccuagcagaauaagcaucuauuggacaauaguaaaaccgggagacauacuuuugauuaacagcacagggaaucuaauugcuccuagggguuacuucaaaauacgaagugggaaaagcucaauaaugagaucagaugcacccauuggcaaaugcaauucugaaugcaucacuccaaauggaagcauucccaaugacaaaccauuccaaaauguaaacaggaucacauacggggccugucccagauauguuaagcaaaacacucugaaauuggcaacaggaaugcgaaauguaccagagaaacaaacuagaggcauauuuggcgcaauagcggguuucauagaaaaugguugggagggaaugguggaugguugguacgguuucaggcaucaaaauucugagggaagaggacaagcagcagaucucaaaagcacucaagcagcaaucgaucaaaucaaugggaagcugaauagauugaucgggaaaaccaacgagaaauuccaucagauugaaaaagaauucucagaagucgaagggagaauucaggaccuugagaaauauguugaggacacuaaaauagaucucuggucauacaacgcggagcuucuuguugcccuggagaaccaacauacaauugaucuaacugacucagaaaugaacaaacuguuugaaaaaacaaagaagcaacugagggaaaaugcugaggauaugggcaaugguuguuucaaaauauaccacaaaugugacaaugccugcauaggaucaaucagaaauggaacuuaugaucacgauguauacagagaugaagcauuaaacaaccgguuccagaucaagggaguugagcugaagucaggguacaaagauuggauccuauggauuuccuuugccauaucauguuuuuugcuuuguguugcuuuguugggguucaucaugugggccugccaaaaaggcaacauuaggugcaacauuugcauuuga

SEQ ID NO: 42619 - RNA, 1701 nt, Artificial Sequence; identical to SEQ ID NO: 42605
  derived and/or modified CDS sequence (wt) from hemagglutinin__InfluenzaA__AHC58126

SEQ ID NO: 42620 - RNA, 1701 nt, Artificial Sequence
  derived and/or modified CDS sequence (wt) from hemagglutinin__InfluenzaA__AHC58138
augaagacuaucauugcuuugagcuacauucuaugucugguuuucgcucaaaaacuuccuggaaaugacaacagcacggcaacgcugugccuugggcaccaugcaguaccaaacggaacgauagugaaaacaaucacgaaugaccaaauugaaguuacuaaugcuacugagcugguucagaauuccucaacaggugaaauaugcgacaguccucaucagauccuugauggagaaaacugcacacuaauagaugcucuauugggagacccucagugugauggcuuccaaaauaagaaaugggaccuuuuuguugaacgaagcaaagccuacagcaacuguuacccuuaugaugugccggauuaugccucccuuaggucacuaguugccucauccggcacacuggaguuuaacaaugaaagcuucaauuggacuggagucacucaaaacggaacaagcucugcuugcauaaggagaucuaauaauaguuucuuuaguagauugaauugguugacccacuuaaacuucaaauacccagcauugaacgugacuaugccaaacaaugaacaauucgacaaauuguacauuugggggguucaccacccggguacggacaaggaccaaaucuuccuguaugcucaagcaucaggaagaaucacaguaucuaccaaaagaagccaacaagcuguaaucccgaauaucggaucuagacccagaguaaggaauaucccuagcagaauaagcaucuauuggacaauaguaaaaccgggagacauacuuuugauuaacagcacagggaaucuaauugcuccuagggguuacuucaaaauacgaagugggaaaagcucaauaaugagaucagaugcacccauuggcaaaugcaauucugaaugcaucacuccaaauggaagcauucccaaugacaaaccauuccaaaauguaaacaggaucacauacggggccugucccagauauguuaagcaaaacacucugaaauuggcaacaggaaugcgaaauguaccagagaaacaaacuagaggcauauuuggcgcaauagcggguuucauagaaaaugguugggagggaaugguggaugguugguacgguuucaggcaucaaaauucugagggaagaggacaagcagcagaucucaaaagcacucaagcagcaaucgaucaaaucaaugggaagcugaauagauugaucgggaaaaccaacgagaaauuccaucagauugaaaaagaauucucagaagucgaagggagaauucaggaccuugagaaauauguugaggacacuaaaauagaucucuggucauacaacgcggagcuucuuguugcccuggagaaccaacauacaauugaucuaacugacucagaaaugaacaaacuguuugaaaaaacaaagaagcaacugagggaaaaugcugaggauaugggcaaugguuguuucaaaauauaccacaaaugugacaaugccugcauaggaucaaucagaaauggaacuuaugaccacgauguauacagagaugaagcauuaaacaaccgguuccagaucaagggaguugagcugaagucaggguacaaagauuggauccuauggauuuccuuugccauaucauguuuuuugcuuuguguugcuuuguugggguucaucaugugggccugccaaaaaggcaacauuaggugcaacauuugcauuuga

SEQ ID NO: 42621 - RNA, 1701 nt, Artificial Sequence; identical to SEQ ID NO: 40264
  derived and/or modified CDS sequence (wt) from hemagglutinin__InfluenzaA__AHC58162

SEQ ID NO: 42622 - RNA, 1701 nt, Artificial Sequence
  derived and/or modified CDS sequence (wt) from hemagglutinin__InfluenzaA__AHC58186
augaagacuaucauugcuuugagcuacauucuaugucugguuuucgcucaaaaacuuccuggaaaugacaacagcacggcaacgcugugccuugggcaccaugcaguaccaaacggaacgauagugaaaacaaucacgaaugaccaaauugaaguuacuaaugcuacugagcugguucagaguuccucaacaggugaaauaugcgacaguccucaucagauccuugauggagaaaacugcacacuaauagaugcucuauugggagacccucagugugauggcuuccaaaauaagaagugggaccuuuuuguugaacgaagcaaagccuacagcaacuguuacccuuaugaugugccggauuaugccucccuuaggucacuaguugccucauccggcacacuggaguuuaacaaugaaagcuucaauuggacuggagucacucaaaacggaacaagcucugcuugcauaaggagaucuaauaguaguuucuuuaguagauugaauugguugacccacuuaaacuucaaauacccagcauugaacgugacuaugccaaacaaugaacaauuugacaaauuguacauuugggggguucaccacccggguacggacaaggaccaaaucuuccuguaugcucaaucaucaggaagaaucacaguaucuaccaaaagaagccaacaagcuguaaucccgaauaucggaucuagacccagaauaaggaauaucccuagcagaauaagcaucuauuggacaauaguaaaaccgggagacauacuuuugauuaacagcacagggaaucuaauugcuccuagggguuacuucaaaauacgaagugggaaaagcucaauaaugagaucagaugcacccauuggcaaaugcaauucugaaugcaucacuccaaauggaagcauucccaaugacaaaccauuccaaaauguaaacaggaucacauacggggccugucccagauauguuaagcaaagcacucugaaauuggcaacaggaaugcgaaauguaccagagaaacaaacuagaggcauauuuggcgcaauagcggguuucauagaaaaugguugggagggaaugguggaugguugguacgguuucaggcaucaaaauucugagggaagaggacaagcagcagaucucaaaagcacucaagcagcaaucgaucaaaucaaugggaagcugaaucgauugaucgggaaaaccaacgagaaauuccaucagauugaaaaagaauucucagaagucgaagggagaauucaggaccucgagaaauauguugaggacacuaaaauagaucucuggucauacaacgcggagcuucuuguugcccuggagaaccaacauacaauugaucuaacugacucagaaaugaacaaacuguuugaaaaaacaaagaagcaacugagggaaaaugcugaggauaugggcaaugguuguuucaaaauauaccacaaaugugacaaugccugcauaggaucaaucagaaauggaacuuauaaccacgauguauacagagaugaagcauuaaacaaccgguuccagaucaagggaguugagcugaagucaggguacaaagauuggauccuauggauuuccuuugccauaucauguuuuuugcuuuguguugcuuuguugggguucaucaugugggccugccaaaagggcaacauuaggugcaacauuugcauuuga

SEQ ID NO: 42623 - RNA, 1701 nt, Artificial Sequence
  derived and/or modified CDS sequence (wt) from hemagglutinin__InfluenzaA__AHC58198
augaagacuaucauugcuuugagcuacauucuaugucugguuuucgcucaaaaacuuccuggaaaugacaacagcacggcaacgcugugccuugggcaccaugcaguaccaaacggaacgauagugaaaacaaucacgaaugaccaaauugaaguuacuaaugcuacugagcugguucagaauuccucaacaggugaaauaugcgacagcccucaucagauccuugauggagaaaacugcacacuaauagaugcucuauugggagacccucagugugauggcuuccaaaauaagaaaugggaccuuuuuguugaacgaagcaaagccuacagcaacuguuacccuuaugaugugccggauuaugccucccuuaggucacuaguugccucauccggcacacuggaguuuaacaaugaaagcuucaauuggacuggagucacucaaaacggaacaagcucugcuugcauaaggagaucuaauaauaguuucuuuaguagauugaauugguugacccacuuaaacuucaaauacccagcauugaacgugacuaugccaaacaaugaacaauuugacaaauuguacauuugggggguucaccacccggguacggacaaggaccaaaucuuccuguaugcucaagcaucaggaagaaucacaguaucuaccaaaagaagccaacaagcuguaaucccgaauaucggaucuagacccagaguaaggaauaucccuagcagaauaagcaucuauuggacaauaguaaaaccgggagacauacuuuugauuaacagcacagggaaucuaauugcuccuagggguuacuucaaaauacgaagugggaaaagcucaauaaugagaucagaugcacccauuggcaaaugcaauucugaaugcaucacuccaaauggaagcauucccaaugacaaaccauuccaaaauguaaacaggaucacauacggggccugucccagauauguuaagcaaaacacucugaaauuggcaacaggaaugcgaaauguaccagagaaacaaacuagaggcauauuuggcgcaauagcggguuucauagaaaaugguugggagggaaugguggaugguugguacgguuucaggcaucaaaauucugagggaagaggacaagcagcagaucucaaaagcacucaagcagcaaucgaucaaaucaaugggaagcugaauagauugaucgggaaaaccaacgagaaauuccaucagauugaaaaagaauucucagaagucgaagggagaauucagaaccuugagaaauauguugaggacacuaaaauagaucucuggucauacaacgcggagcuucuuguugcccuggagaaccaacauacaauugaucuaacugacucagaaaugaacaaacuguuugaaaaaacaaagaagcaacugagggaaaaugcugaggauaugggcaaugguuguuucaaaauauaccacaaaugugacaaugccugcauaggaucaaucagaaauggaacuuaugaccacgauguauacagagaugaagcauuaaacaaccgguuccagaucaagggaguugagcugaagucaggguacaaagauuggauccuauggauuuccuuugccauaucauguuuuuugcuuuguguugcuuuguugggguucaucaugugggacugccaaaaaggcaacauuaggugcaacauuugcauuuga

SEQ ID NO: 42624 - RNA, 1701 nt, Artificial Sequence
  derived and/or modified CDS sequence (wt) from hemagglutinin__InfluenzaA__AHC58210
augaagacuaucauugcuuugagcuacauucuaugucugguuuucgcucaaaaacuuccuggaaaugacaacagcacggcaacgcugugccuugggcaccaugcaguaccaaacggaacgauagugaaaacaaucacgaaugaccaaauugaaguuacuaaugcuacugagcugguucagaauuccucaacaggugaaauaugcgacaguccucaucagauccuugauggagaaaacugcacacuaauagaugcucuauugggagacccucagugugauggcuuccaaaauaagaaaugggaccuuuuuguugaacgaagcaaagccuacagcaacuguuacccuuaugaugugccggauuaugccucccuuaggucacuaguugccucauccggcacacuggaguuuaacaaugaaagcuucaauugggcuggagucacucaaaacggaacaagcucugcuugcauaaggagaucuaauaauaguuucuuuaguagauugaauugguugacccacuuaaacuucaaauacccagcauugaacgugacuaugccaaacaaugaacaauuugacaaauuguacauuugggggguucaccacccggguacggacaaggaccaaaucuuccuguaugcucaagcaucaggaagaaucacaguaucuaccaaaagaagccaacaagcuguaaucccgaauaucggaucuagacccagaguaaggaauaucccuagcagaauaagcaucuauuggacaauaguaaaaccgggagacauacuuuugauuaacagcacagggaaucuaauugcuccuagggguuacuucaaaauacgaagugggaaaagcucaauaaugagaucagaugcacccauuggcaaaugcaauucugaaugcaucacuccaaauggaagcauucccaaugacaaaccauuccaaaauguaaacaggaucacauacggggccugucccagauauguuaagcaaaacacucugaaauuggcaacaggaaugcgaaauguaccagagaaacaaacuagaggcauauuuggcgcaauagcggguuucauagaaaacgguugggagggaaugguggaugguugguacgguuucaggcaucaaaauucugagggaagaggacaagcagcagaucucaaaagcacucaagcagcaaucgaucaaaucaaugggaagcugaauagauugaucgggaaaaccaacgagaaauuccaucagauugaaaaagaauucucagaagucgaagggagaauucaggaccuugagaaauauguugaggacacuaaaauagaucucuggucauacaacgcggagcuucuuguugcccuggagaaccaacauacaauugaucuaacugacucagaaaugaacaaacuguuugaaaaaacaaagaagcaacugagggaaaaugcugaggauaugggcaaugguuguuucaaaauauaccacaaaugugacaaugccugcauaggaucaaucagaaauggaacuuaugaccacgauguauacagagaugaagcauuaaacaaccgguuccagaucaagggaguugagcugaagucaggguacaaagauuggauccuauggauuuccuuugccauaucauguuuuuugcuuuguguugcuuuguugggguucaucaugugggccugccaaaaaggcaacauuaggugcaacauuugcauuuga

SEQ ID NO: 42625 - RNA, 1701 nt, Artificial Sequence; identical to SEQ ID NO: 42608
  derived and/or modified CDS sequence (wt) from hemagglutinin__InfluenzaA__AHC58234

SEQ ID NO: 42626 - RNA, 1701 nt, Artificial Sequence; identical to SEQ ID NO: 42605
  derived and/or modified CDS sequence (wt) from hemagglutinin__InfluenzaA__AHC58246

SEQ ID NO: 42627 - RNA, 1701 nt, Artificial Sequence
  derived and/or modified CDS sequence (wt) from hemagglutinin__InfluenzaA__AHC58258
augaagacuaucauugcuuugagcuacauucuaugucugguuuucgcucaaaaacuuccuggaaaugacaacagcacggcaacgcugugccuugggcaccaugcagugccaaacggaacgauagugaaaacaaucacgaaugaccaaauugaaguuaccaaugcuacugagcugguucagaguuccucaacaggugaaauaugcaacaguccucaucagauccuugauggagaaaacugcacacuaauagaugcucuauugggagacccucagugugauggcuuccaaaacaagaaaugggaccuuuuuguugaacgaagcaaagcccacagcaacuguuacccuuaugaugugccggauuaugccucccuuaggucacuaguugccucauccggcacacuggaguuuaacaaugaaagcuucaauuggacuggagucacucaaaacggaacaagcucugcuugcauaaggagaucuaauaauaguuucuuuaguagauugaauugguugacccacuuaaacuucaaauacccagcauugaacgugacuaugccaaacaaugaacaauuugacaaauuguacauuugggggguucaccacccggguacggacaaggaccaaaucuuccuguaugcucaagcaucaggaagaaucacaguaucuaccaaaagaagccaacaagcuguaauuccgaauaucggaucuagacccagaguaaggaauaucccuagcagaguaagcaucuauuggacaauaguaaaaccgggagacauacuuuugauuaacagcacagggaaucuaauugcuccuagggguuacuucaaaauacgaagugggaaaagcucaauaaugagaucagaugcacccauuggcaaaugcaauucugcaugcaucacuccaaauggaagcauucccaaugacaaaccauuccaaaauguaaacaggaucacauacggggccugucccagauauguuaagcaaaacacucugaaauuggcaacaggaaugagaaauguaccagagaaacaaacuagaggcauauuuggcgcaauagcggguuucauagaaaauggcugggagggaaugguggaugguugguacgguuucaggcaucaaaauucugagggaaggggacaagcagcagaucucaaaagcacucaagcagcaaucgaucaaaucaaugggaagcugaauagauugaucgggaaaaccaacgagaaauuccaucagauugaaaaagaauucucagaagucgaagggagaauucaggaccuugagaaauauguugaggacacuaaaauagaucucuggucauacaacgcggagcuucuuguugcccuggagaaccaacacacaauugaucuaacugacucagaaaugaacaaacuguuugaaaaaacaaagaagcaacugagggaaaaugcugaggauaugggcaaugguuguuucaaaauauaucacaaaugugacaaugccugcauaggaucaaucagaaauggaacuuaugaccacgauguguacagagaugaagcauuaaacaaccgauuccagaucaagggaguugagcugaagucaggguacaaagauuggauccuauggauuuccuuugccauaucauguuuuuugcuuuguguugcuuuguugggguucaucaugugggccugccaaaaaggcaacauuaggugcaacauuugcauuuga

SEQ ID NO: 42628 - RNA, 1701 nt, Artificial Sequence
  derived and/or modified CDS sequence (wt) from hemagglutinin__InfluenzaA__AHC58270
augaagacuaucauugcuuugagcuacauucuaugucugguuuucgcucaaaaacuuccuggaaaugacaacagcacggcaacgcugugccuugggcaccaugcagugccaaacggaacgauagugaaaacaaucacgaaugaccaaauugaaguuacuaaugcuacugagcugguucagaguuccucaacaggugaaauaugcaacaguccucaucagauucuugauggagaaaacugcacacuaauagaugcucuauugggagacccucagugugauggcuuccaaaacaagaaaugggaccuuuuuguugaacgaagcaaagcccacagcaacuguuacccuuaugaugugccggauuaugccucccuuaggucacuaguugccucauccggcacacuggaguuuaacaaugaaagcuucaauuggacuggagucacucaaaacggaacaagcucugcuugcauaaggagaucuaauaauaguuucuuuaguagauugaauugguugacccacuuaaacuucaaauacccagcauugaacgugacuaugccaaacaaugaacaauuugacaaauuguacauuugggggguucaccacccggguacggacaaggaccaaaucuuccuguaugcucaagcagcaggaagaaucacaguaucuaccaaaagaagccaacaagcuguaauuccgaauaucggaucuagacccagaguaaggaauaucccuagcagaguaagcaucuauuggacaauaguaaaaccgggagacauacuuuugauuaacagcacagggaaucuaauugcuccuagggguuacuucaaaauacgaagugggaaaagcucaauaaugagaucagaugcacccauuggcaaaugcaauucugcaugcaucacuccaaauggaagcauucccaaugacaaaccauuccaaaauguaaacaggaucacauacggggccugucccagauauguuaagcaaaacacucugaaauuggcaacaggaaugagaaauguaccagagaaacaaacuagaggcauauuuggcgcaauagcugguuucauagaaaaugguugggagggaaugguggaugguugguacgguuucaggcaucaaaauucugagggaaggggacaagcagcagaucucaaaagcacucaagcagcaaucgaucaaaucaaugggaagcugaauagauugaucgggaaaaccaacgagaaauuccaucagauugaaaaagaauucucagaagucgaagggagaauucaggaccuugagaaauauguugaggacacuaaaauagaucucuggucauacaacgcggagcuucuuguugcccuggagaaccaacacacaauugaucuaacugacucagaaaugaacaaacuguuugaaaaaacaaagaagcaacugagggaaaaugcugaggauaugggcaaugguuguuucaaaauauaccacaaaugugacaaugccugcauaggaucaaucagaaauggaacuuaugaccacgauguguacagagaugaagcauuaaacaaccgauuccagaucaagggaguugagcugaagucaggguacaaagauuggauccuauggauuuccuuugccauaucauguuuuuugcuuuguguugcuuuguugggguucaucaugugggccugccaaaaaggcaacauuaggugcaacauuugcauuuga

SEQ ID NO: 42629 - RNA, 1701 nt, Artificial Sequence
  derived and/or modified CDS sequence (wt) from hemagglutinin__InfluenzaA__AHC58372
augaagacuaucauugcuuugagcuacauucuaugucugguuuucgcucaaaaacuuccuggaaaugacaacagcacggcaacgcugugccuugggcaccaugcaguaccaaacggaacgauagugaaaacaaucacgaaugaccaaauugaaguuacuaaugcuacugagcugguucagaguuccucaacaggugaaauaugcgacaguccucaucagauccuugauggagaaaacugcacacuaauagaugcucuauugggagacccucagugugauggcuuccaaaauaagaagugggaccuuuuuguugaacgaagcaaagccuacagcaacuguuacccuuaugaugugccggauuaugccucccuuaggucacuaguugccucauccggcacacuggaguuuaacaaugaaagcuucaauuggacuggagucacucaaaacggaacaagcucugcuugcauaaggagaucuaauaguaguuucuuuaguagauugaauugguugacccacuuaaacuucaaauacccagcauugaacgugacuaugccaaacaaugaacaauuugacaaauuguacauuugggggguucaccacccggguacggacaaggaccaaaucuuccuguaugcucaaucuucaggaagaaucacaguaucuaccaaaagaagccaacaagcuguaaccccgaauaucggaucuagacccagaauaaggaauaucccuagcagaauaagcaucuauuggacaauaguaaaaccgggagacauacuuuugauuaacagcacagggaaucuaauugcuccuagggguuacuucaaaauacgaagugggaaaagcucaauaaugagaucagaugcacccauuggcaaaugcaauucugaaugcaucacuccaaaugggagcauucccaaugacaaaccauuccaaaauguaaacaggaucacauacggggccugucccagauauguuaagcaaagcacucugaaauuggcaacaggaaugcgaaauguaccagagaaacaaacuagaggcauauuuggcgcaauagcggguuucauagaaaaugguugggagggaaugguggaugguugguacgguuucaggcaucaaaauucugagggaagaggacaagcagcagaucucaaaagcacucaagcagcaaucgaucaaaucaaugggaagcugaaucgauugaucgggaaaaccaacgagaaauuccaucagauugaaaaagaauucucagaagucgaagggagaauucaggaccuugagaaauauguugaggacacuaaaauagaucucuggucauacaacgcggagcuucuuguugcccuggagaaccaacauacaauugaucuaacugacucagaaaugaacaaacuguuugaaaaaacgaagaagcaacugagggaaaaugcugaggauaugggcaaugguuguuucaaaauauaccacaaaugugacaaugccugcauaggaucaaucagaaauggaacuuauaaccacgauguauacagagaugaagcauuaaacaaccgguuccagaucaagggaguugagcugaagucaggguacaaagauuggauccuauggauuuccuuugccauaucauguuuuuugcuuuguguugcuuuguugggguucaucaugugggccugccaaaagggcaacauuaggugcaacauuugcauuuga

SEQ ID NO: 42630 - RNA, 1701 nt, Artificial Sequence
  derived and/or modified CDS sequence (wt) from hemagglutinin__InfluenzaA__AHC58396
augaagacuaucauugcuuugagcuacauucuaugucugguuuucgcucaaaaacuuccugggaaugacaacagcacggcaacgcugugccuugggcaccaugcagugccaaacggaacgauagugaaaacaaucacgaaugaccaaauugaaguuacuaaugcuacugaacugguucagaguuccucaacaggugaaauaugcaacaguccucaucagauccuugauggagaaaacugcacacuaauagaugcucuauugggagacccucagugugauggcuuccaaaacaagaaaugggaccuuuuuguugaacgaagcaaagcccacagcaacuguuacccuuaugaugugccggauuaugccucccuuaggucacuaguugccucauccggcacacuggaguuuaacaaugaaagcuucaauuggacuggagucacucaaaacggaacaagcucugcuugcauaaggggaucuaauaauaguuucuuuaguagauugaauugguugacccacuuaaacuucaaauacccagcauugaacgugacuaugccaaacaaugaacaauuugacaaauuguacauuugggggguucaccacccggguacggacaaggaccaaaucuuccuguaugcucaagcaucaggaagaaucacaguaucuaccaaaagaagccaacaagcuguaauuccgaauaucggaucuagacccagaguaaggaauaucccuagcagaguaagcaucuauuggacaauaguaaaaccgggagacauacuuuugauuaacagcacagggaaucuaauugcuccuagggguuacuucaaaauacgaagugggaaaagcucaauaaugagaucagaugcacccauuggcaaaugcaauucugcaugcaucaccccaaauggaagcauucccaaugacaaaccauuccaaaauguaaacaggaucacauacggggccugucccagauauguuaagcaaaacacucugaaauuggcaacaggaaugagaaauguaccagagaaacaaacuagaggcauauuuggcgcaauagcggguuucauagaaaaugguugggagggaaugguggaugguugguacgguuucaggcaucaaaauucugagggaaggggacaagcagcagaucucaaaagcacucaagcagcaaucgaucaaaucaaugggaagcugaauagauugaucgggaaaaccaacgagaaauuccaucagauugaaaaagaauucucagaagucgaagggagaauucaggaccuugagaaauauguugaggacacuaaaauagaucucuggucauacaacgcggagcuucuuguugcccuggagaaccaacacacaauugaucuaacugacucagaaaugaacaaacuguuugaaaaaacaaagaagcaacugagggaaaaugcugaggauaugggcaaugguuguuucaaaauauaccacaaaugugacaaugccugcauaggaucaaucagaaauggaacuuaugaccacgauguguacagagaugaagcauuaaacaaccgauuccagaucaagggaguugagcugaagucaggguacaaagauuggauccuauggauuuccuuugccauaucauguuuuuugcuuuguguugcuuuguugggguucaucaugugggccugccaaaaaggcaacauuaggugcaacauuugcauuuga

SEQ ID NO: 42631 - RNA, 1701 nt, Artificial Sequence; identical to SEQ ID NO: 40264
  derived and/or modified CDS sequence (wt) from hemagglutinin__InfluenzaA__AHC58408

SEQ ID NO: 42632 - RNA, 1701 nt, Artificial Sequence
  derived and/or modified CDS sequence (wt) from hemagglutinin__InfluenzaA__AHC58420
augaagacuaucauugcuuugagcuacauucuaugucugguuuucgcucaaaaacuuccuggaaaugacaacagcacggcaacgcugugccuugggcaccaugcaguaccaaacggaacgauagugaaaacaaucacgaaugaccaaauugaaguuacuaaugcuacugagcugguucagaguuccucaacaggugaaauaugcgacaguccucaucagauccuugauggagaaaacugcacacuaauagaugcucuauugggagacccucagugugauggcuuccaaaauaagaagugggaccuuuuuguugaacgaagcaaagccuacagcaacuguuacccuuaugaugugccggauuaugccucccuuaggucacuaguugccucauccggcacacuggaguuuaacaaugaaagcuucaauuggacuggagucacucaaaacggaacaagcucugcuugcauaaggagaucuaauaguaguuucuuuaguagauugaauugguugacccacuuaaacuucaaauacccagcauugaacgugacuaugccaaacaaugaacaauuugacaaauuguacauuugggggguucaccacccggguacggacaaggaccaaaucuuccuguaugcucaaucaucaggaagaaucacaguaucuaccaaaagaagccaacaagcuguaaucccgaauaucggaucuagacccagaauaaggaauaucccuagcagaauaagcaucuauuggacaauaguaaaaccgggagacauacuuuugauuaacagcacagggaaucuaauugcuccuagggguuacuucaaaauacgaagugggaaaagcucaauaaugagaucagaugcacccauuggcaaaugcaauucugaaugcaucacuccaaauggaagcauucccaaugacaaaccauuccaaaauguaaacaggaucacauacggggccugucccagauauguuaagcaaagcacucugaaauuggcaacaggaaugcgaaauguaccagagaaacaaacuagaggcauauuuggcgcaauagcggguuucauagaaaaugguugggagggaaugguggaugguugguaugguuucaggcaucaaaauucugagggaagaggacaagcagcagaucucaaaagcacucaagcagcaaucgaucaaaucaaugggaagcugaaucgauugaucgggaaaaccaacgagaaauuccaucagauugaaaaagaauucucagaagucgaagggagaauucaggaccuugagaaauauguugaggacacuaaaauagaucucuggucauacaacgcggagcuucuuguugcccuggagaaccaacauacaauugaucuaacugacucagaaaugaacaaacuguuugaaaaaacaaagaagcaacugagggaaaaugcugaggauaugggcaaugguuguuucaaaauauaccacaaaugugacaaugccugcauaggaucaaucagaaauggaacuuauaaccacgauguauacagagaugaagcuuuaaacaaccgguuccagaucaagggaguugagcugaagucaggguacaaagauuggauccuauggauuuccuuugccauaucauguuuuuugcuuuguguugcuuuguugggguucaucaugugggccugccaaaagggcaacauuaggugcaacauuugcauuuga

SEQ ID NO: 42633 - RNA, 1701 nt, Artificial Sequence; identical to SEQ ID NO: 42632
  derived and/or modified CDS sequence (wt) from hemagglutinin__InfluenzaA__AHC58432

SEQ ID NO: 42634 - RNA, 1701 nt, Artificial Sequence
  derived and/or modified CDS sequence (wt) from hemagglutinin__InfluenzaA__AHC58444
augaagacuaucauugcuuugagcuacauucuaugucugguuuucgcucaaaaacuuccuggaaaugacaacagcacggcaacgcugugccuugggcaccaugcagugccaaacggaacgauagugaaaacaaucacgaaugaccaaauugaaguuacuaaugcuacugagcugguucagaguuccucaacaggugaaauaugcaacaguccucaucagauccuugauggagaaaacugcacacuaauagaugcucuauugggagacccucagugugauggcuuccaaaacaagaaaugggaccuuuuuguugaacgaagcaaagcccacagcaacuguuacccuuaugaugugccggauuaugccucccuuaggucacuaguugccucauccggcacacuggaguuuaacaaugaaagcuucaauuggacuggagucacucaaaacggaacaagcucugcuugcauaaggagaucuaauaauaguuucuuuaguagauugaauugguugacccacuuaaacuucaaauacccagcauugaacgugacuaugccaaacaaugaacaauuugacaaauuguacauuuggggaguucaccacccggguacggacaaggaccaaaucuuccuguaugcucaagcaucaggaagaaucacaguaucuaccaaaagaagccaacaagcuguaauuccgaauaucggaucuagacccagaguaaggaauaucccuagcagaguaagcaucuauuggacaauaguaaaaccgggagacauacuuuugauuaacagcacagggaaucuaauugcuccuagggguuacuucaaaauacgaagugggaaaagcucaauaaugagaucagaugcacccauuggcaaaugcaauucugcaugcaucacuccaaauggaagcauucccaaugacaaaccauuccaaaauguaaacaggaucacauacggggccugucccagauauguuaagcaaaacacucugaaauuggcaacaggaaugagaaauguaccagagaaacaaacuagaggcauauuuggcgcaauagcggguuucauagaaaauggcugggagggaaugguggaugguugguacgguuucaggcaucaaaauucugagggaaggggacaagcagcagaucucaaaagcacucaagcagcaaucgaucaaaucaaugggaagcugaauagauugaucgggaaaaccaacgagaaauuccaucagauugaaaaagaauucucagaagucgaagggagaauucaggaccuugagaaauauguugaggacacuaaaauagaucucuggucauacaacgcggagcuucuuguugcccuggagaaccaacacacaauugaucuaacugacucagaaaugaacaaacuguuugaaaaaacaaagaagcaacugagggaaaaugcugaggauaugggcaaugguuguuucaaaauauaucacaaaugugacaaugccugcauaggaucaaucagaaauggaacuuaugaccacgauguguacagagaugaagcauuaaacaaccgauuccagaucaagggaguugagcugaagucaggguacaaagauuggauccuauggauuuccuuugccauaucauguuuuuugcuuuguguugcuuuguugggguucaucaugugggccugccaaaaaggcaacauuaggugcaacauuugcauuuga

SEQ ID NO: 42635 - RNA, 1701 nt, Artificial Sequence; identical to SEQ ID NO: 42630
  derived and/or modified CDS sequence (wt) from hemagglutinin__InfluenzaA__AHC58456

SEQ ID NO: 42636 - RNA, 1701 nt, Artificial Sequence
  derived and/or modified CDS sequence (wt) from hemagglutinin__InfluenzaA__AHC58468
augaaggcaauacuaguaguucugcuauauacauuugcaaccgcaaaugcagacacauuauguauagguuaucaugcgaacaauucaacagacacuguagacacaguacuagaaaagaauguaacaguaacacacucuguuaaccuucuagaggacaagcauaacgggaaacuaugcaaacugagagggguagccccauugcauuuggguaaauguaacauugcuggcuggauccugggaaauccagagugugaaucacucuccacagcaagcucaugguccuacaucguggaaacaucuaguucagacaauggaacgugcuacccaggagauuucaucaauuaugaggagcuaagagagcaauugagcucagugucaucauuugaaagguuugagauauucccuaagacaaguucauggcccaaucaugacucgaacaaaggugugacggcagcauguccucaagcuggagcaaaaagcuucuacaaaaauuuaauauggcuaguuaaaaaagggaauucauacccaaagcucagcaaauccuacauuaacgauaaagggaaagaaguccucgugcuauggggcauucaccauccaucuacuagugcugaccaacaaagucucuaucagaaugcagaugcauauguuuuuguggggacaucaaaauacagcaagaaguucaagccggaaauagcaguaagacccaaagugagggaucaagaagggagaaugaacuauuacuggacacuaguagagccgggagacaaaauaacauucgaagcaacuggaaaucuauugguaccaagauaugcauucgcaauggaaagaaaugcuggaucugguauuaucauuucagauacaccaguccacgauugcaauacaacuugucagacacccaagggugcuauaaacaccagccucccauuucagaauauacauccgaucacaauuggaaaaugucccaaauauguaaaaagcacaaaauugagacuggccacaggauugaggaaugucccgucuauucaaucuagaggccuauuuggggccauugccgguuucauugaagggggguggacagggaugguagauggaugguacgguuaucaccaucaaaaugcgcaggggucaggauaugcagccgaccugaagagcacacagaaugccauugacaagauuacuaacaaaguaaauucuguuauugaaaagaugaauacacaguucacagcaguagguaaagaguucaaccaccuggaaagaagaauagagaauuuaaauaaaaaaguugaugaugguuuccuggacauuuggacuuacaaugccgaacuguugguucuauuggaaaaugaaagaacuuuggacuaccacgauucaaaugugaaaaacuuauaugaaaagguaagaagccaguuaaaaaacaaugccaaggaaauuggaaacggcugcuuugaauuuuaccacaaaugcgauaacacgugcauggaaagugucaaaaaugggacuuaugacuaccccaaauacucagaggaagcaaaauuaaacagagaggaaauagaugggguaaagcuggaaucaacaaggauuuaccagauuuuggcgaucuauucaacugucgccaguucauugguacugguagucucccugggggcaaucaguuucuggaugugcucuaaugggucucuacaguguagaauauguauuuaa

SEQ ID NO: 42637 - RNA, 1701 nt, Artificial Sequence
  derived and/or modified CDS sequence (wt) from hemagglutinin__InfluenzaA__AHC58479
augaagacuaucauugcuuugagcuacauucuaugucugguuuucgcucaaaaacuuccuggaaaugacaacagcacggcaacgcugugccuugggcaccaugcaguaccaaacggaacgauagugaaaacaaucacgaaugaccaaauugaaguuacuaaugcuacugagcugguucagaauuccucaacaggugaaauaugcgacaguccucaucagaucauugauggagaaaacugcacacuaauagaugcucuauugggagacccucagugugauggcuuccaaaauaagaaaugggaccuuuuuguugaacgaagcaaagccuacagcaacuguuacccuuaugaugugccggauuaugccucccuuaggucacuaguugccucauccggcacacuggaguuuaacaaugaaagcuucaauuggacuggagucacucaaaacggaacaagcucugcuugcauaaggagaucuaauaauaguuucuuuaguagauugaauugguugacccacuuaaacuucaaauacccagcauugaacgugacuaugccaaacaaugaacaauuugacaaguuguacauuugggggguucaccacccggguacggacaaggaccaaaucuuccuguaugcucaagcaucaggaagaaucacaguaucuaccaaaagaagccaacaagcuguaaucccgaauaucggaucuagacccagaguaaggaauaucccuagcagaauaagcaucuauuggacaauaguaaaaccgggagacauacuuuugauuaacagcacagggaaucuaauugcuccuagggguuacuucaaaauacgaagugggaaaagcucaauaaugagaucagaugcacccauuggcaaaugcaauucugaaugcaucacuccaaauggaagcauucccaaugacaaaccauuccaaaauguaaacaggaucacauacggggccugucccagauauguuaagcaaaacacucugaaauuggcaacaggaaugcgaaauguaccagagaaacaaacuagaggcauauuuggcgcaauagcggguuucauagaaaaugguugggagggaaugguggaugguugguacgguuucaggcaucaaaauucugagggaagaggacaagcagcagaucucaaaagcacucaagcagcaaucaaucaaaucaaugggaagcugaauagauugaucgggaaaaccaacgagaaauuccaucagauugaaaaagaauucucagaagucgaagggagaauucaggaccuugagaaauauguugaggacacuaaaauagaucucuggucauacaacgcggagcuucuuguugcccuggagaaccaacauacaauugaucuaacugacucagaaaugaacaaacuguuugaaaaaacaaagaagcaacugagggaaaaugcugaggauaugggcaaugguuguuucaaaauauaccacaaaugugacaaugccugcauaggaucaaucagaaauggaacuuaugaccacgauguauacagagaugaagcauuaaacaaccgguucaagaucaagggaguugagcugaagucaggguacaaagauuggauccuauggauuuccuuugccauaucauguuuuuugcuuuguguugcuuuguugggguucaucaugugggccugccaaaaaggcaacauuaggugcaacauuugcauuuga

SEQ ID NO: 42638 - RNA, 1701 nt, Artificial Sequence
  derived and/or modified CDS sequence (wt) from hemagglutinin__InfluenzaA__AHC58491
augaagacuaucauugcuuugagcuacauucuaugucugguuuucgcucaaaaacuuccugggaaugacaacagcacggcaacgcugugccuugggcaccaugcagugccaaacggaacgauagugaaaacaaucacgaaugaccaaauugaaguuacuaaugcuacugaacugguucagaguuccucaacaggugaaauaugcaacaguccucaucagauccuugauggagaaaacugcacacuaauagaugcucuauugggagacccucagugugauggcuuccaaaacaagaaaugggaccuuuuuguugaacgaagcaaagcccacagcaacuguuacccuuaugaugugccggauuaugccucccuuaggucacuaguugccucauccggcacacuggaguuuaacaaugaaagcuucaauuggacuggagucacucaaaacggaacaagcucugcuugcauaaggggaucuaauaauaguuucuuuaguagauugaauugguugacccacuuaaacuucaaauacccagcauugaacgugacuaugccaaacaaugaacaauuugacaaauuguacauuugggggguucaccacccggguacggacaaggaccaaaucuuccuguaugcucaagcaucaggaagaaucacaguaucuaccaaaagaagccaacaagcuguaauuccgaauaucggaucuagacccagaguaaggaauaucccuagcagaguaagcaucuauuggacaauaguaaaaccgggagacauacuuuugauuaacagcacagggaaucuaauugcuccuagggguuacuucaaaauacgaagugggaaaagcucaauaaugagaucagaugcacccauuggcaaaugcaauucugcaugcaucacuccaaauggaagcauucccaaugacaaaccauuccaaaauguaaacaggaucacauacggggccugucccagauauguuaagcaaaacacucugaaauuggcaacaggaaugagaaauguaccagagaaacaaacuagaggcauauuuggcgcaauagcggguuucauagaaaaugguugggagggaaugguggaugguugguacgguuucaggcaucaaaauucugagggaaggggacaagcagcagaucucaaaagcacucaagcagcaaucgaucaaaucaaugggaagcugaauagauugaucgggaaaaccaacgagaaauuccaucagauugaaaaagaauucucagaagucgaagggagaauucaggaccuugagaaauauguugaggacacuaaaauagaucucuggucauacaacgcggagcuucuuguugcccuggagaaccaacacacaauugaucuaacugacucagaaaugaacaaacuguuugaaaaaacaaagaagcaacugagggaaaaugcugaggauaugggcaaugguuguuucaaaauauaccacaaaugugacaaugccugcauaggaucaaucagaaauggaacuuaugaccacgauguguacagagaugaagcauuaaacaaccgauuccagaucaagggaguugagcugaagucaggguacaaagauuggauccuauggauuuccuuugccauaucauguuuuuugcuuuguguugcuuuguugggguucaucaugugggccugccaaaaaggcaacauuaggugcaacauuugcauuuga

SEQ ID NO: 42639 - RNA, 1701 nt, Artificial Sequence
  derived and/or modified CDS sequence (wt) from hemagglutinin__InfluenzaA__AHC58515
augaagacuaucauugcuuugagcuacauucuaugucugguuuucgcucaaaaacuuccuggaaaugacaacagcacggcaacgcugugccuugggcaccaugcagugccaaacggaacgauagugaaaacaaucacgaaugaccaaauugaaguuacuaaugcuacugagcugguucagaguuccucaacaggugaaauaugcaacaguccucaucagauccuugauggagaaaacugcacacuaauagaugcucuauugggagacccucagugugauggcuuccaaaacaagaaaugggaccuuuuugucgaacgaagcaaagcccacagcaacuguuacccuuaugaugugccggauuaugccucccuuaggucacuaguugccucauccggcacacuggaguuuaacaaugaaagcuucaauuggacuggagucacucaaaacggaacaagcucugcuugcauaaggagaucuaauaauaguuucuuuaguagauugaauugguugacccacuuaaacuucaaauacccagcauugaacgugacuaugccaaacaaugaacaauuugacaaauuguacauuugggggguucaccacccggguacggacaaggaccaaaucuuccuguaugcucaagcaucaggaagaaucacaguaucuaccaaaagaagccaacaagcuguaauuccgaauaucggaucuagacccagaguaaggaauaucccuagcagaguaagcauuuauuggacaauaguaaaaccgggagacauacuuuugauuaacagcacagggaaucuaauugcuccuagggguuacuucaaaauacgaagugggaaaagcucaauaaugagaucagaugcacccauuggcaaaugcaauucugcaugcaucacuccaaauggaagcauucccaaugacaaaccauuccaaaauguaaacaggaucacauacggggccugucccagauauguuaagcaaaacacucugaaauuggcaacaggaaugagaaauguaccagagaaacaaacuagaggcauauuuggcgcaauagcggguuucauagaaaauggcugggagggaaugguggaugguugguacgguuucaggcaucaaaauucugagggaaggggacaagcagcagaucucaaaagcacucaagcagcaaucgaucaaaucaaugggaagcugaauagauugaucgggaaaaccaacgagaaauuccaucagauugaaaaagaauucucagaagucgaagggagaauucaggaccuugagaaauauguugaggacacuaaaauagaucucuggucauacaacgcggagcuucuuguugcccuggagaaccaacacacaauugaucuaacugacucagaaaugaacaaacuguuugaaaaaacaaagaagcaacugagggaaaaugcugaggauaugggcaaugguuguuucaaaauauaucacaaaugugacaaugccugcauaggaucaaucagaaauggaacuuaugaccacgauguguacagagaugaagcauuaaacaaccgauuccagaucaagggaguugagcugaagucaggguacaaagauuggauccuauggauuuccuuugccauaucauguuuuuugcuuuguguugcuuuguugggguucaucaugugggccugccaaaaaggcaacauuaggugcaacauuugcauuuga

SEQ ID NO: 42640 - RNA, 1701 nt, Artificial Sequence; identical to SEQ ID NO: 40264
  derived and/or modified CDS sequence (wt) from hemagglutinin__InfluenzaA__AHC58527

SEQ ID NO: 42641 - RNA, 1701 nt, Artificial Sequence
  derived and/or modified CDS sequence (wt) from hemagglutinin__InfluenzaA__AHC58563
augaagacuaucauugcuuugagcuacauucuaugucugguuuucgcucaaaaacuuccuggaaaugacaacagcacggcaacgcugugccuugggcaccaugcaguaccaaacggaacgauagugaaaacaaucacgaaugaccaaauugaaguuacuaaugcuacugagcugguucagaauuccucaacaggugaaauaugcgacaguccucaucagaucauugauggagaaaacugcacacuaauagaugcucuauugggagacccucagugugauggcuuccaaaauaagaaaugggaccuuuuuguugaacgaagcaaagccuacagcaacuguuacccuuaugaugugccggauuaugccucccuuaggucacuaguugccucauccggcacacuggaguuuaacaaugaaagcuucaauuggacuggagucacucaaaacggaacaagcucugcuugcauaaggagaucuaauaauaguuucuuuaguagauugaauugguugacccacuuaaacuucaaauacccagcauugaacgugacuaugccaaacaaugaacaauuugacaaguuguacauuugggggguucaccacccggguacggacaaggaccaaaucuuccuguaugcucaagcaucaggaagaaucacaguaucuaccaaaagaagccaacaagcuguaaucccgaauaucggaucuagacccagaguaaggaauaucccuagcagaauaagcaucuauuggacaauaguaaaaccgggagacauacuuuugauuaacagcacagggaaucuaauugcuccuagggguuacuucaaaauacgaagugggaaaagcucaauaaugagaucagaugcacccauuggcaaaugcaauucugaaugcaucacuccaaauggaagcauucccaaugacaaaccauuccaaaauguaaacaggaucacauacggggccugucccagauauguuaagcaaaacacucugaaauuggcaacaggaaugcgaaauguaccagagaaacaaacuagaggcauauuuggcgcaauagcggguuucauagaaaaugguugggagggaaugguggaugguugguacgguuucaggcaucaaaauucugagggaagaggacaagcagcagaucucaaaagcacucaagcagcaaucgaucaaaucaaugggaagcugaauagauugaucgggaaaaccaacgagaaauuccaucagauugaaaaagaauucucagaagucgaagggagaauucaggaccuugagaaauauguugaggacacuaaaauagaucucuggucauacaacgcggagcuucuuguugcccuggagaaccaacauacaauugaucuaacugacucagaaaugaacaaacuguuugaaaaaacaaagaagcaacugagggaaaaugcugaggauaugggcaaugguuguuucaaaauauaccacaaaugugacaaugccugcauaggaucaaucagaaauggaacuuaugaccacgauguauacagagaugaagcauuaaacaaccgguuccagaucaagggaguugagcugaagucaggguacaaagauuggauccuauggauuuccuuugccauaucauguuuuuugcuuuguguugcuuuguugggguucaucaugugggccugccaaaaaggcaacauuaggugcaacauuugcauuuga

SEQ ID NO: 42642 - RNA, 1701 nt, Artificial Sequence
  derived and/or modified CDS sequence (wt) from hemagglutinin__InfluenzaA__AHC58575
augaagacuaucauugcuuugagcuacauucuaugucugguuuucgcucaaaaacuuccuggaaaugacaacagcacggcaacgcugugccuugggcaccaugcaguaccaaacggaacaauagugaaaacaaucacgaaugaccaaauugaaguuacuaaugcuacugagcugguucagaauuccucaacaggugaaauaugcgacaguccucaucagauccuugauggagaaaacugcacacuaauagaugcucuauugggagacccucagugugauggcuuccaaaauaagaaaugggaccuuuuuguugaacgaagcaaagccuacagcaacuguuacccuuaugaugugccggauuaugccucccuuagaucacuaguugccucauccggcacacuggaguuuaacaaugaaagcuucaauuggacuggagucacucaaaacggaacaagcucugcuugcauaaggagaucuaauaauaguuucuuuaguagauugaauugguugacccacuuaaacuucaaauacccagcauugaacgugacuaugccaaacaaugaacaauuugacaaauuguacauuugggggguucaccacccggguacggacaaggaccaaaucuuccuguaugcucaagcaucaggaagaaucacaguaucuaccaaaagaagccaacaagcuguaaucccgaauaucggaucuagacccagaguaaggaauaucccuagcagaauaagcaucuauuggacaauaguaaaaccgggagacauacuuuugauuaacagcacagggaaucuaauugcuccuagggguuacuucaaaauacgaagugggaaaagcucaauaaugagaucagaugcacccauuggcaaaugcaauucugaaugcaucacuccaaauggaagcauucccaaugacaaaccauuccaaaauguaaacaggaucacauacggggccugucccagauauguuaagcaaaacacucugaaauuggcaacaggaaugcgaaauguaccagagaaacaaacuagaggcauauuuggcgcaauagcggguuucauagaaaaugguugggagggaaugguggaugguugguacgguuucaggcaucaaaauucugagggaagaggacaagcagcagaucucaaaagcacucaagcagcaaucgaucaaaucaaugggaagcuaaauagauugaucgggaaaaccaacgagaaauuccaucagauugaaaaagaauucucagaagucgaagggagaauucaggaccuugagaaauauguugaggacacuaaaauagaucucuggucauacaacgcggagcuucuuguugcccuggagaaccaacauacaauugaucuaacugacucagaaaugaacaaacuguuugaaaaaacaaagaagcaacugagggaaaaugcugaggauaugggcaaugguuguuucaaaauauaccacaaaugugacaaugccugcauaggaucaaucagaaauggaacuuaugaucacgauguauacagagaugaagcauuaaacaaccgguuccagaucaagggaguugagcugaagucaggguacaaagauuggauccuauggauuuccuuugccauaucauguuuuuugcuuuguguugcuuuguugggguucaucaugugggccugccaaaaaggcaacauuaggugcaacauuugcauuuga

SEQ ID NO: 42643 - RNA, 1701 nt, Artificial Sequence; identical to SEQ ID NO: 42603
  derived and/or modified CDS sequence (wt) from hemagglutinin__InfluenzaA__AHC58587

SEQ ID NO: 42644 - RNA, 1701 nt, Artificial Sequence; identical to SEQ ID NO: 42607
  derived and/or modified CDS sequence (wt) from hemagglutinin__InfluenzaA__AHC58599

SEQ ID NO: 42645 - RNA, 1701 nt, Artificial Sequence; identical to SEQ ID NO: 42605
  derived and/or modified CDS sequence (wt) from hemagglutinin__InfluenzaA__AHC58611

SEQ ID NO: 42646 - RNA, 1701 nt, Artificial Sequence; identical to SEQ ID NO: 40264
  derived and/or modified CDS sequence (wt) from hemagglutinin__InfluenzaA__AHC58623

SEQ ID NO: 42647 - RNA, 1701 nt, Artificial Sequence; identical to SEQ ID NO: 42606
  derived and/or modified CDS sequence (wt) from hemagglutinin__InfluenzaA__AHC58647

SEQ ID NO: 42648 - RNA, 1701 nt, Artificial Sequence; identical to SEQ ID NO: 42634
  derived and/or modified CDS sequence (wt) from hemagglutinin__InfluenzaA__AHC58659

SEQ ID NO: 42649 - RNA, 1701 nt, Artificial Sequence
  derived and/or modified CDS sequence (wt) from hemagglutinin__InfluenzaA__AHC58671
augaagacuaucauugcuuugagcuacauucuaugucugguuuucgcucaaaaacuuccuggaaaugacaacagcacggcaacgcugugccuugggcaccaugcagugccaaacggaacgauagugaaaacaaucacgaaugaccaaauugaaguuacuaaugcuacugagcugguucagaguuccucaacaggugaaauaugcaacaguccucaucagauccuugauggagaaaauugcacacuaauagaugcucuauugggagacccucagugugauggcuuccaaaacaagaaaugggaccuuuuuguugaacgaagcaaagcccacagcaacuguuacccuuaugaugugccggauuaugccucccuuaggucacuaguugccucauccggcacacuggaguuuaacaaugaaagcuucaauuggacuggagucacucaaaacggaacaagcucugcuugcauaaggagaucuaauaauaguuucuuuaguagauugaauugguuaacccacuuaaacuucaaauacccagcauugaacgugacuaugccaaacaaugaacaauuugacaaauuguacauuugggggguucaccacccggguacggacaaggaccaaaucuuccuguaugcucaagcagcaggaagaaucacaguaucuaccaaaagaagccaacaagcuguaauuccgaauaucggaucuagacccagaguaaggaauaucccuagcagaguaagcaucuauuggacaauaguaaaaccgggagacauacuuuugauuaacagcacagggaaucuaauugcuccuagggguuacuucaaaauacgaagugggaaaagcucaauaaugagaucagaugcacccauuggcaaaugcaauucugcaugcaucacuccaaauggaagcauucccaaugacaaaccauuccaaaauguaaacaggaucacauacggggccugucccagauauguuaagcaaaacacucugaaauuggcaacaggaaugagaaauguaccagagaaacaaacuagaggcauauuuggcgcaauagcugguuucauagaaaaugguugggagggaaugguggaugguugguacgguuucaggcaucaaaauucugagggaaggggacaagcagcagaucucaaaagcacucaagcagcaaucgaucaaaucaaugggaagcugaauagauugaucgggaaaaccaacgagaaauuccaucagauugaaaaagaauucucagaagucgaagggagaauucaggaccuugagaaauauguugaggacacuaaaauagaucucuggucauacaacgcggagcuucuuguugcccuggagaaccaacacacaauugaucuaacugacucagaaaugaacaaacuguuugaaaaaacaaagaagcaacugagggaaaaugcugaggauaugggcaaugguuguuucaaaauauaccacaaaugugacaaugccugcauaggaucaaucagaaauggaacuuaugaccacgauguguacagagaugaagcauuaaacaaccgauuccagaucaagggaguugagcugaagucaggguacaaagauuggauccuauggauuuccuuugccauaucauguuuuuugcuuuguguugcuuuguugggguucaucaugugggccugccaaaaaggcaacauuaggugcaacauuugcauuuga

SEQ ID NO: 42650 - RNA, 1701 nt, Artificial Sequence; identical to SEQ ID NO: 42632
  derived and/or modified CDS sequence (wt) from hemagglutinin__InfluenzaA__AHC58683

SEQ ID NO: 42651 - RNA, 1701 nt, Artificial Sequence
  derived and/or modified CDS sequence (wt) from hemagglutinin__InfluenzaA__AHC58695
augaagacuaucauugcuuugagcuacauucuaugucugguuuucgcucaaaaacuuccuggaaaugacaacagcacggcaacgcugugccuugggcaccaugcagugccaaacggaacgauagugaaaacaaucacgaaugaccaaauugaaguuacuaaugcuacugagcugguucagaguuccucaacaggugaaauaugcaacaguccucaucagauccuugauggagaaaacugcacacuaauagaugcucuauugggagacccucagugugauggcuuccaaaacaagaaaugggaccuuuuuguugaacgaagcaaagcccacagcaacuguuacccuuaugaugugccggauuaugccucccuuaggucacuaguugccucauccggcacacuggaguuuaacaaugaaagcuucaauuggacuggagucacucaaaacggaacaagcucugcuugcauaaggagaucuaauaauaguuucuuuaguagauugaauugguuaacccacuuaaacuucaaauacccagcauuaaacgugacuaugccaaacaaugaacaauuugacaaauuguacauuugggggguucaccacccggguacggacaaggaccaaaucuuccuguaugcucaagcagcaggaagaaucacaguaucuaccaaaagaagccaacaagcuguaauuccgaauaucggaucuagacccagaguaaggaauaucccuagcagaguaagcaucuauuggacaauaguaaaaccgggagacauacuuuugauuaacagcacagggaaucuaauugcuccuagggguuacuucaaaauacgaagugggaaaagcucaauaaugagaucagaugcacccauuggcaaaugcaauucugcaugcaucacuccaaauggaagcauucccaaugacaaaccauuccaaaauguaaacaggaucacauacggggccugucccagauauguuaagcaaaacacucugaaauuggcaacaggaaugagaaauguaccagagaaacaaacuagaggcauauuuggcgcaauagcugguuucauagaaaaugguugggagggaaugguggaugguugguacgguuucaggcaucaaaauucugagggaaggggacaagcagcagaucucaaaagcacucaagcagcaaucgaucaaaucaaugggaagcugaauagauugaucgggaaaaccaacgagaaauuccaucagauugaaaaagaauucucagaagucgaagggagaauucaggaccuugagaaauauguugaggacacuaaaauagaucucuggucauacaacgcggagcuucuuguugcccuggagaaccaacacacaauugaucuaacugacucagaaaugaacaaacuguuugaaaaaacaaagaagcaacugagggaaaaugcugaggauaugggcaaugguuguuucaaaauauaccacaaaugugacaaugccugcauaggaucaaucagaaauggaacuuaugaccacgauguguacagagaugaagcauuaaacaaccgauuccagaucaagggaguugagcugaagucaggguacaaagauuggauccuauggauuuccuuugccauaucauguuuuuugcuuuguguugcuuuguugggguucaucaugugggccugccaaaaaggcaacauuaggugcaacauuugcauuuga

SEQ ID NO: 42652 - RNA, 1701 nt, Artificial Sequence
  derived and/or modified CDS sequence (wt) from hemagglutinin__InfluenzaA__AHC58707
augaagacuaucauugcuuugagcuacauucuaugucugguuuucgcucaaaaacuuccuggaaaugacaacagcacggcaacgcugugccuugggcaccaugcaguaccaaacggaacgauagugaaaacaaucacgaaugaccaaauugaaguuacuaaugcuacugagcugguucagaguuccucaacaggugaaauaugcgacaguccucaucagauccuugauggagaaaacugcacacuaauagaugcucuauugggagacccucagugugauggcuuccaaaauaagaagugggaccuuuuuguugaacgaagcaaagccuacagcaacuguuacccuuaugaugugccggauuaugccucccuuaggucacuaguugccucaucuggcacacuggaguuuaacaaugaaagcuucaauuggacuggagucacucaaaacggaacaagcucugcuugcauaaggagaucuaauaguaguuucuuuaguagauugaauugguugacccacuuaaacuucaaauacccagcauugaacgugacuaugccaaacaaugaacaauuugacaaauuguacauuugggggguucaccacccggguacggacaaggaccaaaucuuccuguaugcucaaucaucaggaagaaucacaguaucuaccaaaagaagccaacaagcuguaaucccgaauaucggaucuagacccagaauaaggaauaucccuagcagaauaagcaucuauuggacaauaguaaaaccgggagacauacuuuugaucaacagcacagggaaucugauugcuccuagggguuacuucaaaauacgaagugggaaaagcucaauaaugagaucagaugcacccauuggcaaaugcaauucugaaugcaucacuccaaauggaagcauucccaaugacaaaccauuccaaaauguaaacaggaucacauacggggccugucccagauauguuaagcaaagcacucugaaauuggcaacaggaaugcgaaauguaccagagaaacaaacuagaggcauauuuggcgcaauagcugguuucauagaaaaugguugggagggaaugguggaugguugguacgguuucaggcaucaaaauucugagggaagaggacaagcagcagaucucaaaagcacucaagcagcaauagaucaaaucaaugggaagcugaaucgauugaucgggaaaaccaacgagaaauuccaucagauugaaaaagaauucucagaagucgaagggagaauucaggaccuugagaaauauguugaggacacuaaaauagaucucuggucauacaacgcggagcuucuuguugcccuggagaaccaacauacaauugaucuaacugacucagaaaugaacaaacuguuugaaaaaacaaagaagcaacugagggaaaaugcugaggauaugggcaaugguuguuucaaaauauaccacaaaugugacaaugccugcauaggaucaaucagaaauggaacuuauaaccacgauguauacagagaugaagcauuaaacaaccgguuccagaucaagggaguugagcugaagucaggguacaaagauuggauccuauggauuuccuuugccauaucauguuuuuugcuuuguguugcuuuguugggguucaucaugugggccugccaaaagggcaacauuaggugcaacauuugcauuuga

SEQ ID NO: 42653 - RNA, 1701 nt, Artificial Sequence
  derived and/or modified CDS sequence (wt) from hemagglutinin__InfluenzaA__AHC58719
augaagacuaucauugcuuugagcuacauucuaugucugguuuucgcucaaaaacuuccuggaaaugacaacagcacggcaacgcugugccuugggcaccaugcaguaccaaacggaacgauagugaaaacaaucacgaaugaccaaauugaaguuacuaaugcuacugagcugguucagaguuccucaacaggugaaauaugcgacaguccucaucagauccuugauggagaaaacugcacacuaauagaugcucuauugggagacccucagugugauggcuuccaaaauaagaagugggaccuuuuuguugaacgaagcaaagccuacagcaacuguuacccuuaugaugugccggauuaugccucccuuaggucacuaguugccucaucuggcacacuggaguuuaacaaugaaagcuucaauuggacuggagucacucaaaacggaacaagcucugcuugcauaaggagaucuaauaguaguuucuuuaguagauugaauugguugacccacuuaaacuucaaauacccagcauugaacgugacuaugccaaacaaugaacaauuugacaaauuguacauuugggggguucaccacccggguacggacaaggaccaaaucuuccuguaugcucaaucaucaggaagaaucacaguaucuaccaaaagaagccaacaagcuguaaucccgaauaucggaucuagacccagaauaaggaauaucccuagcagaauaagcaucuauuggacaauaguaaaaccgggagacauacuuuugaucaacagcacagggaaucugauugcuccuagggguuacuucaaaauacgaagugggaaaagcucaauaaugagaucagaugcacccauuggcaaaugcaauucugaaugcaucacuccaaauggaagcauucccaaugacaaaccauuccaaaauguaaacaggaucacauacggggccugucccagauauguuaagcaaagcacucugaaauuggcaacaggaaugcgaaauguaccagagaaacaaacuagaggcauauuuggcgcaauagcggguuucauagaaaaugguugggagggaaugguggaugguugguacgguuucaggcaucaaaauucugagggaagaggacaagcagcagaucucaaaagcacucaagcagcaauagaucaaaucaaugggaagcugaaucgauugaucgggaaaaccaacgagaaauuccaucagauugaaaaagaauucucagaagucgaagggagaauucaggaccuugagaaauauguugaggacacuaaaauagaucucuggucauacaacgcggagcuucuuguugcccuggagaaccaacauacaauugaucuaacugacucagaaaugaacaaacuguuugaaaaaacaaagaagcaacugagggaaaaugcugaggauaugggcaaugguuguuucaaaauauaccacaaaugugacaaugccugcauaggaucaaucagaaauggaacuuauaaccacgauguauacagagaugaagcauuaaacaaccgguuccagaucaagggaguugagcugaagucaggguacaaagauuggauccuauggauuuccuuugccauaucauguuuuuugcuuuguguugcuuuguugggguucaucaugugggccugccaaaagggcaacauuaggugcaacauuugcauuuga

SEQ ID NO: 42654 - RNA, 1701 nt, Artificial Sequence
  derived and/or modified CDS sequence (wt) from hemagglutinin__InfluenzaA__AHC58731
augaagacuaucauugcuuugagcuacauucuaugucugguuuucgcucaaaaacuuccugggaaugacaacagcacggcaacgcugugccuugggcaccaugcagugccaaacggaacgauagugaaaacaaucacuaaugaccaaauugaaguuacuaaugcuacugaacugguucagaguuccucaacaggugaaauaugcaacaguccucaucagauccuugauggagaaaacugcacacuaauagaugcucuauugggagacccucagugugauggcuuccaaaacaagaaaugggaccuuuuuguugaacgaaguaaagcccacagcaacuguuacccuuaugaugugccggauuaugccucccuuaggucacuaguugccucauccggcacacuggaguuuaacaaugaaagcuucaauuggacuggagucacucaaaacggaacaagcucugcuugcauaaggggaucuaauaauaguuucuuuaguagauugaauugguugacucacuuaaacuucaaauacccagcauugaacgugacuaugccaaacaaugaacaauuugacaaauuguacauuugggggguucaccacccggguacggacaaggaccaaaucuuccuguaugcucaagcaucaggaagaaucacaguaucuaccaaaagaagccaacaagcuguaauuccgaauaucggaucuagacccagaguaaggaauaucccuagcagaguaagcaucuauuggacaauaguaaaaccgggagacauacuuuugauuaacagcacagggaaucuaauugcuccuagggguuacuucaaaauacgaagugggaaaagcucaauaaugagaucagaugcacccauuggcaaaugcaauucugcaugcaucaccccaaauggaagcauucccaaugacaaaccauuccaaaauguaaacaggaucacauacggggccugucccagauauguuaagcaaaacacucugaaauuggcaacaggaaugagaaauguaccagagaaacaaacuagaggcauauuuggcgcaauagcggguuucauagaaaaugguugggagggaaugguggaugguugguacgguuucaggcaucaaaauucugagggaaggggacaagcagcagaucucaaaagcacucaagcagcaaucgaucaaaucaaugggaagcugaauagauugaucgggaaaaccaacgagaaauuccaucagauugaaaaagaauucucagaagucgaagggagaauucaggaccuugagaaauauguugaggacacuaaaauagaucucuggucauacaacgcggagcuucuuguugcccuggagaaccaacacacaauugaucuaacugacucagaaaugaacaaacuguuugaaaaaacaaagaagcaacugagggaaaaugcugaggauaugggcaaugguuguuucaaaauauaccacaaaugugacaaugccugcauaggaucaaucagaaauggaacuuaugaccacgauguguacagagaugaagcauuaaacaaccgauuccagaucaagggaguugagcugaagucaggguacaaagauuggauccuauggauuuccuuugccauaucauguuuuuugcuuuguguugcuuuguugggguucaucaugugggccugccaaaaaggcaacauuaggugcaacauuugcauuuga

SEQ ID NO: 42655 - RNA, 1701 nt, Artificial Sequence
  derived and/or modified CDS sequence (wt) from hemagglutinin__InfluenzaA__AHC58743
augaagacuaucauugcuuggagcuacauucuaugucugguuuucgcucaaaaacuuccuggaaaugacaacagcacggcaacgcugugccuugggcaccaugcaguaccaaacggaacgauagugaaaacaaucacgaaugaccaaauugaaguuacuaaugcuacugagcugguucagaauuccucaacaggugaaauaugcgacaguccucaucagauccuugauggagaaaacugcacacuaauagaugcucuauugggagacccucagugugauggcuuccaaaauaagaaaugggaccuuuuuguugaacgaagcaaagccuacagcaacuguuacccuuaugaugugccggauuaugccucccuuaggucacuaguugccucauccggcacacuggaguuuaacaaugaaagcuucaauuggacuggagucacucaaaacggaacaagcucugcuugcauaaggagaucuaauaauaguuucuuuaguagauugaauugguugacccacuuaaacuucaaauacccagcauugaacgugacuaugccaaacaaugaacaauuugacaaauuguacauuugggggguucaccacccggguacggacaaggaccaaaucuuccuguaugcucaagcaucaggaagaaucacaguaucuaccaaaagaagccaacaagcuguaaucccgaauaucggaucuagacccagaguaaggaauaucccuagcagaauaagcaucuauuggacaauaguaaaaccgggagacauacuuuugauuaacagcacagggaaucuaauugcuccuagggguuacuucaaaauacgaagugggaaaagcucaauaaugagaucagaugcacccauuggcaaaugcaauucugaaugcaucacuccaaauggaagcauucccaaugacaaaccauuccaaaauguaaacaggaucacauacggggccugucccagauauguuaagcaaaacacucugaaauuggcaacaggaaugcgaaauguaccagagaaacaaacuagaggcauauuuggcgcaauagcggguuucauagaaaaugguugggagggaaugguggaugguugguacgguuucaggcaucaaaauucugagggaagaggacaagcagcagaucucaaaagcacucaagcagcaaucgaucaaaucaaugggaagcugaauagauugaucggaaaaaccaacgagaaauuccaucagauugaaaaagaauucucagaagucgaagggagaauucaggaccuugagaaauauguugaggacacuaaaauagaucucuggucauacaacgcggagcuucuuguugcccuggagaaccaacauacaauugaucuaacugacucagaaaugaacaaacuguuugaaaaaacaaagaagcaacugagggaaaaugcugaggauaugggcaaugguuguuucaaaauauaccacaaaugugacaaugccugcauaggaucaaucagaaauggaacuuaugaccacgauguauacagagaugaagcauuaaacaaccgguuccagaucaagggaguugagcugaagucaggguacaaagauuggauccuauggauuuccuuugccauaucauguuuuuugcuuuguguugcuuuguugggguucaucaugugggccugccaaaaaggcaacauuaggugcaacauuugcauuuga

SEQ ID NO: 42656 - RNA, 1701 nt, Artificial Sequence; identical to SEQ ID NO: 42638
  derived and/or modified CDS sequence (wt) from hemagglutinin__InfluenzaA__AHC58755

SEQ ID NO: 42657 - RNA, 1701 nt, Artificial Sequence
  derived and/or modified CDS sequence (wt) from hemagglutinin__InfluenzaA__AHC58779
augaagacuaucauugcuuugagcuacauucuaugucugguuuucgcucaaaaacuuccuggaaaugacaacagcacggcaacgcugugccuugggcaccaugcagugccaaacggaacgauagugaaaacaaucacgaaugaccaaauugaaguuacuaaugcuacugagcugguucagaguuccucaacaggugaaauaugcaacaguccucaucagauccuugauggagaaaacugcacacuaauagaugcucuauugggagacccucagugugauggcuuccaaaacaagaaaugggaccuuuuuguugaacgaagcaaagcccacagcaacuguuacccuuaugaugugccggauuaugccucccuuaggucacuaguugccucauccggcacacuggaguuuaacaaugaaagcuucaauuggacuggagucacucaaaacggaacaagcucugcuugcauaaggagaucuaauaauaguuucuuuaguagauugaauugguugacccacuuaaacuucaaauacccagcauugaacgugacuaugccaaacaaugaacaauuugacaaauuguacauuugggggguucaccacccggguacggacaaggaccaaaucuuccuguaugcucaagcagcaggaagaaucacaguaucuaccaaaagaagccaacaagcuguaauuccgaauaucggaucuagacccagaguaaggaauaucccuagcagaguaagcaucuauuggacaauaguaaaaccgggagacauacuuuugauuaacagcacagggaaucuaauugcuccuagggguuacuucaaaauacgaagugggaaaagcucaauaaugagaucagaugcacccauuggcaaaugcaauucugcaugcaucacuccaaauggaagcauucccaaugacaaaccauuccaaaauguaaacaggaucacauacggggccugucccagauauguuaagcaaaacacucugaaauuggcaacaggaaugagaaauguaccagagaaacaaacuagaggcauauuuggcgcaauagcugguuucauagaaaaugguugggagggaaugguggaugguugguacgguuucaggcaucaaaauucugagggaagggggcaagcagcagaucucaaaagcacucaagcagcaaucgaucaaaucaaugggaagcugaauagauugaucgggaaaaccaacgagaaauuccaucagauugaaaaagaauucucagaagucgaagggagaauucaggaccuugagaaauauguugaggacacuaaaauagaucucuggucauacaacgcggagcuucuuguugcccuggagaaccaacacacaauugaucuaacugacucagaaaugaacaaacuguuugaaaaaacaaagaagcaacugagggaaaaugcugaggauaugggcaaugguuguuucaaaauauaccacaaaugugacaaugccugcauaggaucaaucagaaauggaacuuaugaccacgauguguacagagaugaagcauuaaacaaccgauuccagaucaagggaguugagcugaagucaggguacaaagauuggauccuauggauuuccuuugccauaucauguuuuuugcuuuguguugcuuuguugggguucaucaugugggccugccaaaaaggcaacauuaggugcaacauuugcauuuga

SEQ ID NO: 42658 - RNA, 1701 nt, Artificial Sequence
  derived and/or modified CDS sequence (wt) from hemagglutinin__InfluenzaA__AHC58791
augaagacuaucauugcuuugagcuacauucuaugucugguuuucgcucaaaaacuuccuggaaaugacaacagcacggcaacgcugugccuugggcaccaugcaguaccaaacggaacgauagugaaaacaaucacgaaugaccaaauugaaguuacuaaugcuacugagcugguucagaguuccucaacaggugaaauaugcgacaguccucaucagauccuugauggagaaaacugcacacuaauagaugcucuauugggagacccucagugugauggcuuccaaaauaagaagugggaccuuuuuguugaacgaagcaaagccuacagcaacuguuacccuuaugaugugccggauuaugccucccuuaggucacuaguugccucauccggcacacuggaguuuaacaaugaaagcuucaauuggacuggagucacucaaaacggaacaagcucugcuugcauaaggagaucuaauaguaguuucuuuaguagauugaauugguugacccacuuaaacuucaaauacccagcauugaacgugacuaugccaaacaaugaacaauuugacaaauuguacauuugggggguucaccacccggguacggacaaggaccaaaucuuccuguaugcucaaucuucaggaagaaucacaguaucuaccaaaagaagccaacaagcuguaaccccgaauaucggaucuagacccagaauaaggaacaucccuagcagaauaagcaucuauuggacaauaguaaaaccgggagacauacuuuugauuaacagcacagggaaucuaauugcuccuagggguuacuucaaaauacgaagugggaaaagcucaauaaugagaucagaugcacccauuggcaaaugcaauucugaaugcaucacuccaaaugggagcauucccaaugacaaaccauuccaaaauguaaacaggaucacauacggggccugucccagauauguuaagcaaagcacucugaaauuggcaacaggaaugcgaaauguaccagagaaacaaacuagaggcauauuuggcgcaauagcggguuucauagaaaaugguugggagggaaugguggaugguugguacgguuucaggcaucaaaauucugagggaagaggacaagcagcagaucucaaaagcacucaagcagcaaucgaucaaaucaaugggaagcugaaucgauugaucgggaaaaccaacgagaaauuccaucagauugaaaaagaauucucagaagucgaagggagaauucaggaccuugagaaauauguugaggacacuaaaauagaucucuggucauacaacgcggagcuucuuguugcccuggagaaccaacauacaauugaucuaacugacucagaaaugaacaaacuguuugaaaaaacaaagaagcaacugagggaaaaugcugaggauaugggcaaugguuguuucaaaauauaccacaaaugugacaaugccugcauaggaucaaucagaaauggaacuuauaaccacgauguauacagagaugaagcauuaaacaaccgguuccagaucaagggaguugagcugaagucaggguacaaagauuggauccuauggauuuccuuugccauaucauguuuuuugcuuuguguugcuuuguugggguucaucaugugggccugccaaaagggcaacauuaggugcaacauuugcauuuga

SEQ ID NO: 42659 - RNA, 1701 nt, Artificial Sequence
  derived and/or modified CDS sequence (wt) from hemagglutinin__InfluenzaA__AHC58803
augaagacuaucauugcuuugagcuacauucuaugucugguuuucgcucaaaaacuuccuggaaaugacaacagcacggcaacgcugugccuugggcaccaugcaguaccaaacggaacgauagugaaaacaaucacgaaugaccaaauugaaguuacuaaugcuacugagcugguucagaauuccucaacaggugaaauaugcgacaguccucaucagaucauugauggagaaaacugcacacuaauagaugcucuauugggagacccucagugugauggcuuccaaaauaagaaaugggaccuuuuuguugaacgaagcaaagccuacagcaacuguuacccuuaugaugugccggauuaugccucccuuaggucacuaguugccucauccggcacacuggaguuuaacaaugaaagcuucaauuggacuggagucacucaaaacggaacaagcucugcuugcauaaggagaucuaauaauaguuucuuuaguagauugaauugguugacccacuuaaacuucaaauacccagcauugaacgugacuaugccaaacaaugaacaauuugacaaguuguacauuugggggguucaccacccggguacggacaaggaccaaaucuuccuguaugcucaagcaucaggaagaaucacaguaucuaccaaaagaagccaacaagcuguaaucccgaauaucggaucuagacccagaguaaggaauaucccuagcagaauaagcaucuauuggacaauaguaaaaccgggagacauacuuuugauuaacagcacagggaaucuaauugcuccuagggguuacuucaaaauacgaagugggaaaagcucaauaaugaaaucagaugcacccauuggcaaaugcaauucugaaugcaucacuccaaauggaagcauucccaaugacaaaccauuccaaaauguaaacaggaucacauacggggccugucccagauauguuaagcaaaacacucugaaauuggcaacaggaaugcgaaauguaccagagaaacaaacuagaggcauauuuggcgcaauagcggguuucauagaaaaugguugggagggaaugguggaugguugguacgguuucaggcaucaaaauucugagggaagaggacaagcagcagaucucaaaagcacucaagcagcaaucgaucaaaucaaugggaagcugaauagauugaucgggaaaaccaacgagaaauuccaucagauugaaaaagaauucucagaagucgaagggagaauucaggaccuugagaaauauguugaggacacuaaaauagaucucuggucauacaacgcggagcuucuuguugcccuggagaaccaacauacaauugaucuaacugacucagaaaugaacaaacuguuugaaaaaacaaagaagcaacugagggaaaaugcugaggauaugggcaaugguuguuucaaaauauaccacaaaugugacaaugccugcauaggaucaaucagaaauggaacuuaugaccacgauguauacagagaugaagcauuaaacaaccgguucaagaucaagggaguugagcugaagucaggguacaaagauuggauccuauggauuuccuuugccauaucauguuuuuugcuuuguguugcuuuguugggguucaucaugugggccugccaaaaaggcaacauuaggugcaacauuugcauuuga

SEQ ID NO: 42660 - RNA, 1701 nt, Artificial Sequence
  derived and/or modified CDS sequence (wt) from hemagglutinin__InfluenzaA__AHC58815
augaagacuaucauugcuuugagcuacauucuaugucugguuuucgcucaaaaacuuccuggaaaugacaacagcacggcaacgcugugccuugggcaccaugcaguaccaaacggaacgauagugaaaacaaucacgaaugaccaaauugaaguuacuaaugcuacugagcugguucagaguuccucaacaggugaaauaugcaacaguccucaucagauccuugauggaggaaacugcacacuaauagaugcucuauugggagacccucagugugauggcuuccaaaauaagaaaugggaccuuuuuguugaacgaagcaaagccuacagcaacuguuacccuuaugaugugccggauuaugccucccuuaggucacuaguugccucauccggcacacuggaguuuaacaaugaaagcuucaauuggacuggagucacucaaaacggaacaagcucugcuugcauaaggagaucuaauaauaguuucuuuaguagauugaauugguugacccacuuaaacuucaaauacccagcauugaacgugacuaugccaaacaaugaacaauuugacaaauuguacauuugggggguucaccacccggguacugacaaggaccaaaucuuccuguaugcucaagcaucaggaagaaucacaguaucuaccaaaagaagccaacaagcuguaaucccgaauaucggaucuagacccagaguaaggaauaucccuagcagaauaagcaucuauuggacaauaguaaaaccgggagacauacuuuugauuaacagcacagggaaucuaauugcuccuagggguuacuucaaaauacgaagugggaaaagcucaauaaugagaucagaugcacccauuggcaaaugcaauucugaaugcaucacuccaaauggaagcauucccaaugacaaaccauuccaaaauguaaacaggaucacauacggggccugucccagauauguuaagcaaaacacucugaaauuggcaacaggaaugcgaaauguaccagagaaacaaacuagaggcauauuuggcgcaauagcggguuucauagaaaaugguugggagggaaugguggaugguugguacgguuucaggcaucaaaauucugagggaagaggacaagcagcagaucucaaaagcacucaagcagcaaucgaucaaaucaaugggaaguugaauagauugauagggaaaaccaacgagaaauuccaucagauugaaaaagaauucucagaagucgaagggagaauucaggaccuugagaaauauguugaggacacuaaaauagaucucuggucauacaacgcggagcuucuuguugcccuggagaaccaacauacaauugaucuaacugacucagaaaugaacaaacuguuugaaaaaacaaagaagcaacugagggaaaaugcugaggauaugggcaaugguuguuucaaaauauaccacaaaugugacaaugccugcauaggaucaaucagaaauggaacuuaugaccacaauguauacagagaugaagcauuaaacaaccgguuccagaucaagggaguugagcugaagucaggguacaaagauuggauccuauggauuuccuuugccauaucauguuuuuugcuuuguguugcuuuguugggguucaucaugugggccugccaaaaaggcaacauuaggugcaacauuugcauuuga

SEQ ID NO: 42661 - RNA, 1701 nt, Artificial Sequence
  derived and/or modified CDS sequence (wt) from hemagglutinin__InfluenzaA__AHC58827
augaagacuaucauugcuuugagcuacauucuaugucugguuuucgcucaaaaacuuccuggaaaugacaacagcacggcaacgcugugccuugggcaccaugcagugccaaacggaacgauagugaaaacaaucacgaaugaccaaauugaaguuacuaaugcuacugagcugguucagaguuccucaacaggugaaauaugcaacaguccucaucagauccuugauggagaaaacugcacacuaauagaugcucuauugggagacccucagugugauggcuuccaaaacaagaaaugggaccuuuuuguugaacgaagcaaagcccacagcaacuguuacccuuaugaugugccggauuaugccucccuuaggucacuaguugccucauccggcacacuggaguuuaacaaugaaagcuucaauuggacuggagucacucaaaacggaacaagcucugcuugcauaaggagaucuaauaauaguuucuuuaguagauugaauugguuaacccacuuaaacuucaaauacccagcauugaacgugacuaugccaaacaaugaacaauuugacaaauuguacauuugggggguucaccacccggguacggacaaggaccaaaucuuccuguaugcucaagcagcaggaagaaucacaguaucuaccaaaagaagccaacaagcuguaauuccgaauaucggaucuagacccagaguaaggaauaucccuagcagaguaagcaucuauuggacaauaguaaaaccgggagacauacuuuugauuaacagcacagggaaucuaauugcuccuagggguuacuucaaaauacgaagugggaaaagcucaauaaugagaucagaugcacccauuggcaaaugcaauucugcaugcaucacuccaaauggaagcauucccaaugacaaaccauuccaaaauguaaacaggaucacauacggggccugucccagauauguuaagcaaaacacucugaaauuggcaacaggaaugagaaauguaccagagaaacaaacuagaggcauauuuggcgcaauagcugguuucauagaaaaugguugggagggaaugguggaugguugguacgguuucaggcaucaaaauucugagggaaggggacaagcagcagaucucaaaagcacucaagcagcaaucgaucaaaucaaugggaagcugaauagauugaucgggaaaaccaacgagaaauuccaucagauugaaaaagaauucucagaagucgaagggagaauucaggaccuugagaaauauguugaggacacuaaaauagaucucuggucauacaacgcggagcuucuuguugcccuggagaaccaacacacaauugaucuaacugacucagaaaugaacaaacuguuugaaaaaacaaagaagcaacugagggaaaaugcugaggauaugggcaaugguuguuucaaaauauaccacaaaugugacaacgccugcauaggaucaaucagaaauggaacuuaugaccacgauguguacagagaugaagcauuaaacaaccgauuccagaucaagggaguugagcugaagucaggguacaaagauuggauccuauggauuuccuuugccauaucauguuuuuugcuuuguguugcuuuguugggguucaucaugugggccugccaaaaaggcaacauuaggugcaacauuugcauuuga

SEQ ID NO: 42662 - RNA, 1701 nt, Artificial Sequence; identical to SEQ ID NO: 40264
  derived and/or modified CDS sequence (wt) from hemagglutinin__InfluenzaA__AHC58839

SEQ ID NO: 42663 - RNA, 1701 nt, Artificial Sequence
  derived and/or modified CDS sequence (wt) from hemagglutinin__InfluenzaA__AHC58863
augaagacuaucauugcuuugagcuacauucuaugucugguuuucgcucaaaaacuuccugggaaugacaacagcacggcaacgcugugccuugggcaccaugcagugucaaacggaacgauagugaaaacaaucacgaaugaccaaauugaaguuacuaaugcuacugaacugguucagaguuccucaacaggugaaauaugcaacaguccucaucagauccuugauggagaaaacugcacacuaauagaugcucuauugggagacccucagugugauggcuuccaaaacaagaaaugggaccuuuuuguugaacgaagcaaagcccacagcaacuguuacccuuaugaugugccggauuaugccucccuuaggucacuaguugccucauccggcacacuggaguuuaacaaugaaagcuucaauuggacuggagucacucaaaacggaacaagcucugcuugcauaaggggaucuaauaauaguuucuuuaguagauugaauugguugacccacuuaaacuucaaauacccagcauugaacgugacuaugccaaacaaugaacaauuugacaaauuguacauuugggggguucaccacccggguacggacaaggaccaaaucuuccuguaugcucaagcaucaggaagaaucacaguaucuaccaaaagaagccaacaagcuguaauuccgaauaucggaucuagacccagaguaaggaauaucccuagcagaguaagcaucuauuggacaauaguaaaaccgggagacauacuuuugauuaacagcacagggaaucuaauugcuccuagggguuacuucaaaauacgaagugggaaaagcucaauaaugagaucagaugcacccauuggcaaaugcaauucugcaugcaucacuccaaauggaagcauucccaaugacaaaccauuccaaaauguaaacaggaucacauacggggccugucccagauauguuaagcaaaacacucugaaauuggcaacaggaaugagaaauguaccagagaaacaaacuagaggcauauuuggcgcaauagcggguuucauagaaaaugguugggagggaaugauggaugguugguacgguuucaggcaucaaaacucugagggaaggggacaagcagcagaucucaaaagcacucaagcagcaaucgaucaaaucaaugggaagcugaauagauugaucggaaaaaccaacgagaaauuccaucagauugaaaaagaauucucagaagucgaagggaggauucaggaccuugagaaauauguugaggacacuaaaauagaucucuggucauacaacgcggagcuucuuguugcccuggagaaccaacacacaauugaucuaacugacucagaaaugaacaaacuguuugaaaaaacaaagaagcaacugagggaaaaugcugaggauaugggcaaugguuguuucaaaauauaccacaaaugugacaaugccugcauaggaucaaucagaaauggaacuuaugaccacgauguguacagagaugaagcauuaaacaaccgauuccagaucaagggaguugagcugaagucaggguacaaagauuggauccuauggauuuccuuugccauaucauguuuuuugcuuuguguugcuuuguugggguucaucaugugggccugccaaaaaggcaacauuaggugcaacauuugcauuuga

SEQ ID NO: 42664 - RNA, 1701 nt, Artificial Sequence; identical to SEQ ID NO: 42661
  derived and/or modified CDS sequence (wt) from hemagglutinin__InfluenzaA__AHC58875

SEQ ID NO: 42665 - RNA, 1701 nt, Artificial Sequence; identical to SEQ ID NO: 40264
  derived and/or modified CDS sequence (wt) from hemagglutinin__InfluenzaA__AHC58887

SEQ ID NO: 42666 - RNA, 1701 nt, Artificial Sequence
  derived and/or modified CDS sequence (wt) from hemagglutinin__InfluenzaA__AHC58899
augaagacuaucauugcuuugagcuacauucuaugucugguuuucgcucaaaaacuuccugggaaugacaacagcacggcaacgcugugccuugggcaccaugcagugccaaacggaacgauagugaaaacaaucacgaaugaccaaauugaaguuacuaaugcuacugaacugguucagaguuccucaacaggugaaauaugcaacaguccucaucagauccuugauggagaaaacugcacacuaauagaugcucuauugggagacccucagugugauggcuuccaaaacaagaaaugggaccuuuuuguugaacgaagcaaagcccacagcaacuguuacccuuaugaugugccggauuaugccucccuuaggucacuaguugccucauccggcacacuggaguuuaacaaugaaagcuucaauuggacuggagucacucaaaacggaacaagcucugcuugcauaaggggaucuaauaauaguuucuuuaguagauugaauugguugacccacuuaaacuucaaauacccagcauugaacgugacuaugccaaacaaugaacaauuugacaaauuguacauuugggggguucaccacccggguacggacaaggaccaaaucuuccuguaugcucaagcaucaggaagaaucacaguaucuaccaaaagaagccaacaagcuguaauuccgaauaucgggucuagacccagaguaaggaauaucccuagcagaguaagcaucuauuggacaauaguaaaaccgggagacauacuuuugauuaacagcacagggaaucuaauugcuccuagggguuacuucaaaauacgaagugggaaaagcucaauaaugagaucagaugcacccauuggcaaaugcaauucugcaugcaucaccccaaauggaagcauucccaaugacaaaccauuccaaaauguaaacaggaucacauacggggccugucccagauauguuaagcaaaacacucugaaauuggcaacaggaaugagaaauguaccagagaaacaaacuagaggcauauuuggcgcaauagcggguuucauagaaaaugguugggagggaaugguggaugguugguacgguuucaggcaucaaaauucugagggaaggggacaagcagcagaucucaaaagcacucaagcagcaaucgaucaaaucaaugggaagcugaauagauugaucgggaaaaccaacgagaaauuccaucagauugaaaaagaauucucagaagucgaagggagaauucaggaccuugagaaauauguugaggacacuaaaauagaucucuggucauacaacgcggagcuucuuguugcccuggagaaccaacacacaauugaucuaacugacucagaaaugaacaaacuguuugaaaaaacaaagaagcaacugagggaaaaugcugaagauaugggcaaugguuguuucaaaauauaccacaaaugugacaaugccugcauaggaucaaucagaaauggaacuuaugaccacgauguguacagagaugaagcauuaaacaaccgauuccagaucaagggaguugagcugaagucaggguacaaagauuggauccuauggauuuccuuugccauaucauguuuuuugcuuuguguugcuuuguugggguucaucaugugggccugccaaaaaggcaacauuaggugcaacauuugcauuuga

SEQ ID NO: 42667 - RNA, 1701 nt, Artificial Sequence; identical to SEQ ID NO: 40264
  derived and/or modified CDS sequence (wt) from hemagglutinin__InfluenzaA__AHC58981

SEQ ID NO: 42668 - RNA, 1701 nt, Artificial Sequence; identical to SEQ ID NO: 40264
  derived and/or modified CDS sequence (wt) from hemagglutinin__InfluenzaA__AHC58993

SEQ ID NO: 42669 - RNA, 1701 nt, Artificial Sequence
  derived and/or modified CDS sequence (wt) from hemagglutinin__InfluenzaA__AHC59005
augaagacuaucauugcuuugagcuacauucuaugucugguuuucgcucaaaaacuuccuggaaaugacaacagcacggcaacgcugugccuugggcaccaugcaguaccaaacggaacaauagugaaaacaaucacgaaugaccaaauugaaguuacuaaugcuacugagcugguucagaauuccucaacaggugaaauaugcgacaguccucaucagauccuugauggagaaaacugcacacuaauagaugcucuauugggagacccucagugugauggcuuccaaaauaagaaaugggaccuuuuuguugaacgaagcaaagccuacagcaacuguuacccuuaugaugugccggauuaugccucccuuaggucacuaguugccucauccggcacacuggaguuuaacaaugaaagcuucaauuggacuggagucacucaaaacggaacaagcucugcuugcauaaggagaucuaauaauaguuucuuuaguagauugaauugguugacccacuuaaacuucaaauacccagcauugaacgugacuaugccaaacaaugaacaauuugacaaauuguacauuugggggguucaccacccggguacggacaaggaccaaaucuuccuguaugcucaagcaucaggaagaaucacaguaucuaccaaaagaagccaacaagcuguaaucccgaauaucggaucuagacccagaguaaggaauaucccuagcagaauaagcaucuauuggacaauaguaaaaccgggagacauacuuuugauuaacagcacagggaaucuaauugcuccuagggguuacuucaaaauacgaagugggaaaagcucaauaaugagaucagaugcacccauuggcaaaugcaauucugaaugcaucacuccaaauggaagcauucccaaugacaaaccauuccaaaauguaaacaggaucacauacggggccugucccagauauguuaagcaaaacacucugaaauuggcaacaggaaugcgaaauguaccagagaaacaaacuagaggcauauuuggcgcaauagcggguuucauagaaaaugguugggagggaaugguggaugguugguacgguuucaggcaucaaaauucugagggaagaggacaagcagcagaucucaaaagcacucaagcagcaaucgaucaaaucaaugggaagcugaauagauugaucgggaaaaccaacgagaaauuccaucagauugaaaaagaauucucagaagucgaagggagaauucaggaccuugagaaauauguugaggacacuaaaauagaucucuggucauacaacgcggagcuucuuguugcccuggagaaccaacauacaauugaccuaacugacucagaaaugaacaaacuguuugaaaaaacaaagaagcaacugagggaaaaugcugaggauaugggcaaugguuguuucaaaauauaccacaaaugugacaaugccugcauaggaucaaucagaaauggaacuuaugaucacgauguauacagagaugaagcauuaaacaaccgguuccagaucaagggaguugagcugaagucaggguacaaagauuggauccuauggauuuccuuugccauaucauguuuuuugcuuuguguugcuuuguugggguucaucaugugggccugccaaaaaggcaacauuaggugcaacauuugcauuuga

SEQ ID NO: 42670 - RNA, 1701 nt, Artificial Sequence
  derived and/or modified CDS sequence (wt) from hemagglutinin__InfluenzaA__AHC59017
augaagacuaucauugcuuugagcuacauucuaugucugguuuucgcucaaaaacuuccugggaaugacaacagcacggcaacgcugugccuugggcaccaugcagugccaaacggaacgauagugaaaacaaucacgaaugaccaaauugaaguuacuaaugcuacugaacugguucagaguuccucaacaggugaaauaugcaacaguccucaucagauccuugauggagaaaacugcacacuaauagaugcucuauugggagacccucagugugauggcuuccaaaacaagaaaugggaccuuuuuguugaacgaagcaaagcccacagcaacuguuacccuuaugaugugccggauuaugccucccuuaggucacuaguugccucauccggcacacuggaguuuaacaaugaaagcuucaauuggacuggagucacucaaaacggaacaagcucugcuugcauaaggggaucuaauaauaguuucuuuaguagauugaauugguugacccacuuaaacuucaaauacccagcauugaacgugacuaugccaaacaaugaacaauuugacaaauuguacauuugggggguucaccacccggguacggacaaggaccaaaucuuccuguaugcucaagcaucaggaagaaucacaguaucuaccaaaagaagccaacaagcuguaauuccgaauaucggaucuagacccagaguaaggaauaucccuagcaggguaagcaucuauuggacaauaguaaaaccgggagacauacuuuugauuaacagcacagggaaucuaauugcuccuagggguuacuucaaaauacgaagugggaaaagcucaauaaugagaucagaugcacccauuggcaaaugcaauucugcaugcaucacuccaaauggaagcauucccaaugacaaaccauuccaaaauguaaacaggaucacauacggggccugucccagauauguuaagcaaaacacucugaaauuggcaacaggaaugagaaauguaccagagaaacaaacuagaggcauauuuggcgcaauagcggguuucauagaaaaugguugggagggaaugguggaugguugguacgguuucaggcaucaaaauucugagggaaggggacaagcagcagaucucaaaagcacucaagcagcaaucgaucaaaucaaugggaagcugaauagauugaucgggaaaaccaacgagaaauuccaucagauugaaaaagaauucucagaagucgaagggagaauucaggaccuugagaaauauguugaggacacuaaaauagaucucuggucauacaacgcggagcuucuuguugcccuggagaaccaacacacaauugaucuaacugacucagaaaugagcaaacuguuugaaaaaacaaagaagcaacugagggaaaaugcugaggauaugggcaaugguuguuucaaaauauaccacaaaugugacaaugccugcauaggaucaaucagaaauggaacuuaugaccacgauguguacagagaugaagcauuaaacaaccgauuccagaucaagggaguugagcugaagucaggguacaaagauuggauccuauggauuuccuuugccauaucauguuuuuugcuuuguguugcuuuguugggguucaucaugugggccugccaaaaaggcaacauuaggugcaacauuugcauuuga

SEQ ID NO: 42671 - RNA, 1701 nt, Artificial Sequence
  derived and/or modified CDS sequence (wt) from hemagglutinin__InfluenzaA__AHC59029
augaagacuaucauugcuuugagcuacauucuaugucugguuuucgcucaaaaacuuccugggaaugacaacagcacggcaacgcugugccuugggcaccaugcagugccaaacggaacgauagugaaaacaaucacgaaugaccaaauugaaguuacuaaugcuacugaacugguucagaguuccucaacaggugaaauaugcaacaguccucaucagauucuugauggagaaaacugcacacuaauagaugcucuauugggagacccucagugugauggcuuucaaaacaagaaaugggaccuuuuuguugaacgaagcaaagcccacagcaacuguuacccuuaugaugugccggauuaugccucccuuaggucacuaguugccucauccggcacacuggaguuuaacaaugaaagcuucaauuggacuggagucacucaaaacggaacaagcucugcuugcauaaggggaucuaauaauaguuucuuuaguagauugaauugguugacccacuuaaacuucaaauacccagcauugaacgugacuaugccaaacaaugaacaauuugacaaauuguacauuugggggguucaccacccggguacggacaaggaccaaaucuuccuguaugcucaagcaucaggaagaaucacaguaucuaccaaaagaagccaacaagcuguaauuccgaauaucggaucuagacccagaguaaggaauaucccuagcagaguaagcaucuauuggacaauaguaaaaccgggagacauacuuuugauuaacagcacagggaaucuaauugcuccuagggguuacuucaaaauacgaagugggaaaagcucaauaaugagaucagaugcacccauuggcaaaugcaauucugcaugcaucaccccaaauggaagcauucccaaugacaaaccauuccaaaauguaaacaggaucacauacggggccugucccagauauguuaagcaaaacacucugaaauuggcaacaggaaugagaaauguaccagagaaacaaacuagaggcauauuuggcgcaauagcggguuucauagaaaaugguugggagggaaugguggaugguugguacgguuucaggcaucaaaauucugagggaaggggacaagcagcagaucucaaaagcacucaagcagcaaucgaucaaaucaaugggaagcugaauagauugaucgggaaaaccaacgagaaauuccaucagauugaaaaagaauucucagaagucgaagggagaauucaggaccuugagaaauauguugaggacacuaaaauagaucucuggucauacaacgcggagcuucuuguugcccuggagaaccaacacacaauugaucuaacugacucagaaaugaacaaacuguuugaaaaaacaaagaagcaacugagggaaaaugcugaggauaugggcaaugguuguuucaaaauauaccacaaaugugacaaugccugcauaggaucaaucagaaauggaacuuaugaccacgauguguacagagaugaagcauuaaacaaccgauuccagaucaagggaguugagcugaagucaggguacaaagauuggauccuauggauuuccuuugccauaucauguuuuuugcuuuguguugcuuuguugggguucaucaugugggccugccaaaaaggcaacauuaggugcaacauuugcauuuga

SEQ ID NO: 42672 - RNA, 1701 nt, Artificial Sequence
  derived and/or modified CDS sequence (wt) from hemagglutinin__InfluenzaA__AHC59041
augaagacuaucauugcuuugagcuacauucuaugucugguuuucgcucaaaaacuuccuggaaaugacaacagcacggcaacgcugugccuugggcaccaugcagugccaaacggaacgauagugaaaacaaucacgaaugaccaaauugaaguuacuaaugcuacugagcugguucagaguuccucaacaggugaaauaugcaacaguccucaucagauccuugauggagaaaacugcacacuaauagaugcucuauugggagacccucagugugauggcuuccaaaacaagaaaugggaccuuuuuguugaacgaagcaaagcccacagcaacuguuacccuuaugaugugccggauuaugccucccuuaggucacuaguugccucauccggcacacuggaguuuaacaaugaaagcuucaauuggacuggagucacucaaaacggaacaagcucugcuugcauaaggagauccaauaauaguuucuuuaguagauugaauugguugacccacuuaaacuucaaauacccagcauugaacgugacuaugccaaacaaugaacaauuugacaaauuguacauuugggggguucaccacccggguacggacaaggaccaaaucuuccuguaugcucaagcaucaggaagaaucacaguaucuaccaaaagaagccaacaagcuguaauuccgaauaucggaucuagacccagaguaaggaauaucccuagcagaguaagcaucuauuggacaauaguaaaaccgggagacauacuuuugauuaacagcacagggaaucuaauugcuccuagggguuacuucaaaauacgaagugggaaaagcucaauaaugagaucagaugcacccauuggcaaaugcaauucugcaugcaucacuccaaauggaagcauucccaaugacaaaccauuccaaaauguaaacaggaucacauacggggccugucccagauauguuaagcaaaacacucugaaauuggcaacaggaaugagaaauguaccagagaaacaaacuagaggcauauuuggcgcaauagcggguuucauagaaaauggcugggagggaaugguggaugguugguacgguuucaggcaucaaaauucugagggaaggggacaagcagcagaucucaaaagcacucaagcagcaaucgaucaaaucaaugggaagcugaauagauugaucgggaaaaccaacgagaaauuccaucagauugaaaaagaauucucagaagucgaagggagaauucaggaccuugagaaauauguugaggacacuaaaauagaucucuggucauacaacgcggagcuucuuguugcccuggagaaccaacacacaauugaucuaacugacucagaaaugaacaaacuguuugaaaaaacaaagaagcaacugagggaaaaugcugaggauaugggcaaugguuguuucaaaauauaucacaaaugugacaaugccugcauaggaucaaucagaaauggaaccuaugaccacgauguguacagagaugaagcauuaaacaaccgauuccagaucaagggaguugagcugaagucaggguacaaagauuggauccuauggauuuccuuugccauaucauguuuuuugcuuuguguugcuuuguugggguucaucaugugggccugccaaaaaggcaacauuaggugcaacauuugcauuuga

SEQ ID NO: 42673 - RNA, 1701 nt, Artificial Sequence
  derived and/or modified CDS sequence (wt) from hemagglutinin__InfluenzaA__AHC59053
augaagacuaucauugcuuugagcuacauucuaugucugguuuucgcucaaaaacuuccuggaaaugacaacagcacggcaacgcugugccuugggcaccaugcagugccaaacggaacgauagugaaaacaaucacgaaugaccaaauugaaguuacuaaugcuacugagcugguucagaguuccucaacaggugaaauaugcaacaguccucaucagauccuugauggagaaaacugcacacuaauagaugcucuauugggagacccucagugugauggcuuccaaaacaagaaaugggaccuuuuuguugaacgaagcaaagcccacagcaacuguuacccuuaugaugugccggauuaugccucccuuaggucacuaguugccucauccggcacacuggaguuuaacaaugaaagcuucaauuggacuggagucacucaaaacggaacaagcucugcuugcauaaggagaucuaauaauaguuucuuuaguagauugaauugguugacccacuuaaacuucaaauacccagcauugaacgugacuaugccaaacaaugaacaauuugacaaauuguacauuugggggguucaccacccggguacggacaaggaccaaaucuuccuguaugcucaagcagcaggaagaaucacaguaucuaccaaaagaagccaacaagcuguaauuccgaauaucggaucuagacccagaguaaggaauaucccuagcagaguaagcaucuauuggacaauaguaaaaccgggagacauacuuuugauuaacagcacagggaaucuaauugcuccuagggguuacuucaaaauacaaagugggaaaagcucaauaaugagaucagaugcacccauuggcaaaugcaauucugcaugcaucacuccaaauggaagcauucccaaugacaaaccauuccaaaauguaaacaggaucacauacggggccugucccagauauguuaagcaaaacacucugaaauuggcaacaggaaugagaaauguaccagagaaacaaacuagaggcauauuuggcgcaauagcugguuucauagaaaaugguugggagggaaugguggaugguugguacgguuucaggcaucaaaauucugagggaaggggacaagcagcagaucucaaaagcacucaagcagcaaucgaucaaaucaaugggaagcugaauagauugaucgggaaaaccaacgagaaauuccaucagauugaaaaagaauucucagaagucgaagggagaauucaggaccuugagaaauauguugaggacacuaaaauagaucucuggucauacaacgcggagcuucuuguugcccuggagaaccaacacacaauugaucuaacugacucagaaaugaacaaacuguuugaaaaaacaaagaagcaacugagggaaaaugcugaggauaugggcaaugguuguuucaaaauauaccacaaaugugacaaugccugcauaggaucaaucagaaauggaacuuaugaccacgauguguacagagaugaagcauuaaacaaccgauuccagaucaagggaguugagcugaagucaggguacaaagauuggauccuauggauuuccuuugccauaucauguuuuuugcuuuguguugcuuuguugggguucaucauguggaccugccaaaaaggcaacauuaggugcaacauuugcauuuga

SEQ ID NO: 42674 - RNA, 1701 nt, Artificial Sequence
  derived and/or modified CDS sequence (wt) from hemagglutinin__InfluenzaA__AHC59077
augaagacuaucauugcuuugagcuacauucuaugucugguuuucgcucaaaaacuuccuggaaaugacaacagcacggcaacgcugugccuugggcaccaugcaguaccaaacggaacgauagugaaaacaaucacgaaugaccaaauugaaguuacuaaugcuacugagcugguucagaauuccucaacaggugaaauaugcgacaguccucaucagauccuugauggagaaaacugcacacuaauagaugcucuauugggagacccucagugugauggcuuccaaaauaagaaaugggaccuuuuuguugaacgaagcaaagccuacagcaacuguuacccuuaugaugugccggauuaugccucccuuaggucacuaguugccucauccggcacacuggaguuuaacaaugaaagcuucaauuggacuggagucacucaaaacggaacaagcucugcuugcauaaggagaucuaauaauaguuucuuuaguagauugaauugguugacccacuuaaacuucaaauacccagcauugaacgugacuaugccaaacaaugaacaauuugacaaauuguacauuugggggguucaccacccggguacggacaaggaccaaaucuuccuguaugcucaagcaucaggaagaaucacaguaucuaccaaaagaagccaacaagcuguaaucccgaauaucggaucuagacccagaguaaggaauaucccuagcagaauaagcaucuauuggacaauaguaaaaccgggagacauacuuuugauuaacagcacagggaaucuaauugcuccuagggguuacuucaaaauacgaagugggaaaagcucaauaaugagaucagaugcacccauuggcaaaugcaauucugaaugcaucacuccaaauggaagcauucccaaugacaaaccauuccaaaauguaaacaggaucacauacggggccugucccagauauguuaagcaaaacacucugaaauuggcaacaggaaugcgaaauguaccagagaaacaaacuagaggcauauuuggcgcaauagcggguuucauagaaaaugguugggagggaaugguggaugguugguacgguuucaggcaucaaaauucugagggaagaggacaagcagcagaucucaaaagcacucaagcagcaaucgaucaaaucaaugggaagcugaauagauugaucgggaaaaccaacgagaaauuccaucagauugaaaaagaauucucagaagucgaagggagaauucaggaccuugagaaauauguugaggacacuaaaauagaucucuggucauacaacgcggagcuucuuguugcccuggagaaccaacauacaauugaucuaacugacucagaaaugaacaaacuguuugaaaaaacaaagaagcaacugagggaaaaugcugaggauaugggcaaugguuguuucaaaauauaccacaaaugugacaaugccugcauaggaucaaucagaaauggaacuuaugaccacgauguauacagagaugaagcauuaaacaaccgguuccagaucaagggaguugagcugaagucaggguacaaagauuggauccuauggauuuccuuugccauaucauguuuuuugcuuuguguuguuuuguugggguucaucaugugggccugccaaaaaggcaacauuaggugcaacauuugcauuuga

SEQ ID NO: 42675 - RNA, 1701 nt, Artificial Sequence
  derived and/or modified CDS sequence (wt) from hemagglutinin__InfluenzaA__AHC59089
augaagacuaucauugcuuugagcuacauucuaugucugguuuucgcucaaaaacuuccuggaaaugacaacagcacggcaacgcugugccuugggcaccaugcaguaccaaacggaacgauagugaaaacaaucacgaaugaccaaauugaaguuacuaaugcuacugagcugguucagaguuccucaacaggugaaauaugcgacaguccucaucagauccuugauggagaaaacugcacacuaauagaugcucuauugggagacccucagugugauggcuuccaaaauaagaagugggaccuuuuuguugaacgaagcaaagccuacagcaacuguuacccuuaugaugugccggauuaugccucccuuaggucacuaguugccucauccggcacacuggaguuuaacaaugaaagcuucaauuggacuggagucacucaaaacggaacaagcucugcuugcauaaggagaucuaauaguaguuucuuuaguagauugaauugguugacccacuuaaacuucaaauacccagcauugaacgugacuaugccaaacaaugaacaauuugacaaauuguacauuugggggguucaccacccggguacggacaaggaccaaaucuuccuguaugcucaaucaucaggaagaaucacaguaucuaccaaaagaagccaacaagcuguaaucccgaauaucggaucuagacccagaauaagaaauaucccuagcagaauaagcaucuauuggacaauaguaaaaccgggagacauacuuuugauuaacagcacagggaaucuaauugcuccuagggguuacuucaaaauacgaagugggaaaagcucaauaaugagaucagaugcacccauuggcaaaugcaauucugaaugcaucacuccaaauggaagcauucccaaugacaaaccauuccaaaauguaaacaggaucacauacggggccugucccagauauguuaagcaaagcacucugaaauuggcaacaggaaugagaaauguaccagagaaacaaacuagaggcauauuuggcgcaauagcggguuucauagaaaaugguugggagggaaugguggaugguugguacgguuucaggcaucaaaauucugagggaagaggacaagcagcagaucucaaaagcacucaagcagcaauagaucaaaucaaugggaagcugaaucgauugaucgggaaaaccaacgagaaauuccaucagauugaaaaagaauucucagaagucgaagggagaauucaggaccuugagaaauauguugaggacacuaaaauagaucucuggucauacaacgcggagcuucuuguugcccuggagaaccaacauacaauugaucuaacugacucagaaaugaacaaacuguuugaaaaaacaaagaagcaacugagggaaaaugcugaggauaugggcaaugguuguuucaaaauauaccacaaaugugacaaugccugcauaggaucaaucagaaauggaacuuauaaccacgauguauacagagaugaagcauuaaacaaccgguuccagaucaagggaguugagcugaagucaggguacaaagauuggauccuauggauuuccuuugccauaucauguuuuuugcuuuguguugcuuuguugggguucaucaugugggccugccaaaagggcaacauuaggugcaacauuugcauuuga

SEQ ID NO: 42676 - RNA, 1701 nt, Artificial Sequence; identical to SEQ ID NO: 40264
  derived and/or modified CDS sequence (wt) from hemagglutinin__InfluenzaA__AHC59101

SEQ ID NO: 42677 - RNA, 1701 nt, Artificial Sequence; identical to SEQ ID NO: 42608
  derived and/or modified CDS sequence (wt) from hemagglutinin__InfluenzaA__AHC59113

SEQ ID NO: 42678 - RNA, 1701 nt, Artificial Sequence
  derived and/or modified CDS sequence (wt) from hemagglutinin__InfluenzaA__AHC59125
augaagacuaucauugcuuugagcuacauucuaugucugguuuucgcucaaaaacuuccuggaaaugacaacagcacggcaacgcugugccuugggcaccaugcaguaccaaacggaacgauagugaaaacaaucacgaaugaccaaauugaaguuacuaaugcuacugagcugguucagaauuccucaacaggugaaauaugcgacaguccucaucagauccuugauggagaaaacugcacacuaauagaugcucuauugggagacccucagugugauggcuuccaaaauaagaaaugggaccuuuuuguugaacgaagcaaagccuacagcaacuguuacccuuaugaugugccggauuaugccucccuuaggucacuaguugccucauccggcacacuggaguuuaacaaugaaagcuucaauuggacuggagucacucaaaacggaacaagcucugcuugcauaaggagaucuaauaauaguuucuuuaguagauugaauugguugacccacuuaaacuucaaauacccagcauugaacgugacuaugccaaacaaugaacaauuugacaaauuguacauuugggggguucaccacccggguacggacaaggaccaaaucuuccuguaugcucaagcaucaggaagaaucacaguaucuaccaaaagaagccaacaagcuguaaucccgaauaucggaucuagacccagaguaaggaauaucccuagcagaauaagcaucuauuggacaauaguaaaaccgggagacauacuuuugauuaacagcacagggaaucuaauugcuccuagggguuacuucaaaauacgaagugggaaaagcucaauaaugagaucagaugcacccauuggcaaaugcaauucugaaugcaucacuccaaauggaagcauucccaaugacaaaccauuccaaaauguaaacaggaucacauacggggccugucccagauauguuaagcaaaacacucugaaauuggcaacaggaaugcgaaauguaccagagaaacaaacuagaggcauauuuggcgcaauagcggguuucauagaaaacgguugggagggaaugguggaugguugguacgguuucaggcaucaaaauucugagggaagaggacaagcagcagaucucaaaagcacucaagcagcaaucgaucaaaucaaugggaagcugaauagauugaucgggaaaaccaacgagaaauuccaucagauugaaaaagaauucucagaagucgaagggagaauucaggaccuugagaaauauguugaggacacuaaaauagaucucuggucauacaacgcggagcuucuuguugcccuggagaaccaacauacaauugaucuaacugacucagaaaugaacaaacuguuugaaaaaacaaagaagcaacugagggaaaaugcugaggauaugggcaaugguuguuucaaaauauaccacaaaugugacaaugccugcauaggaucaaucagaaauggaacuuaugaccacgauguauacagagaugaagcauuaaacaaccgguuccagaucaagggaguugagcugaagucaggguacaaagauuggauccuauggauuuccuuugccauaucauguuuuuugcuuuguguugcuuuguugggguucaucaugugggccugccaaaaaggcaacauuaggugcaacauuugcauuuga

SEQ ID NO: 42679 - RNA, 1701 nt, Artificial Sequence
  derived and/or modified CDS sequence (wt) from hemagglutinin__InfluenzaA__AHC59137
augaagacuaucauugcuuugagcuacauucuaugucugguuuucgcucaaaaaauuccugggaaugacaacagcacggcaacgcugugccuugggcaccaugcagugucaaacggaacgauagugaaaacaaucacgaaugaccaaauugaaguuacuaaugcuacugaacugguucagaguuccucaacaggugaaauaugcaacaguccucaucagauccuugauggagaaaacugcacacuaauagaugcucuauugggagacccucagugugauggcuuccaaaacaagaaaugggaccuuuuuguugaacgaagcaaagcccacagcaacuguuacccuuaugaugugccggauuaugccucccuuaggucacuaguugccucauccggcacacuggaguuuaacaaugaaagcuucaauuggacuggagucacucaaaacggaacaagcucugcuugcauaaggggaucuaauaauaguuucuuuaguagauugaauugguugacccacuuaaacuucaaauacccagcauugaacgugacuaugccaaacaaugaacaauuugacaaauuguacauuugggggguucaccacccggguacggacaaggaccaaaucuuccuguaugcucaagcaucaggaagaaucacaguaucuaccaaaagaagccaacaagcuguaauuccgaauaucggaucuagacccagaguaaggaauaucccuagcagaguaagcaucuauuggacaauaguaaaaccgggagacauacuuuugauuaacagcacagggaaucuaauugcuccuagggguuacuucaaaauacgaagugggaaaagcucaauaaugagaucagaugcacccauuggcaaaugcaauucugcaugcaucacuccaaauggaagcauucccaaugacaaaccauuccaaaauguaaacaggaucacauacggggccugucccagauauguuaagcaaaacacucugaaauuggcaacaggaaugagaaauguaccagagaaacaaacuagaggcauauuuggcgcaauagcggguuucauagaaaaugguugggagggaaugauggaugguugguacgguuucaggcaucaaaacucugagggaaggggacaagcagcagaucucaaaagcacucaagcagcaaucgaucaaaucaaugggaagcugaauagauugaucggaaaaaccaacgagaaauuccaucagauugaaaaagaauucucagaagucgaagggaggauucaggaccuugagaaauauguugaggacacuaaaauagaucucuggucauacaacgcggagcuucuuguugcccuggagaaccaacacacaauugaucuaacugacucagaaaugaacaaacuguuugaaaaaacaaagaagcaacugagggaaaaugcugaggauaugggcaaugguuguuucaaaauauaccacaaaugugacaaugccugcauaggaucaaucagaaauggaacuuaugaccacgauguguacagagaugaagcauuaaacaaccgauuccagaucaagggaguugagcugaagucaggguacaaagauuggauccuauggauuuccuuugccauaucauguuuuuugcuuuguguugcuuuguugggguucaucaugugggccugccaaaaaggcaacauuaggugcaacauuugcauuuga

SEQ ID NO: 42680 - RNA, 1701 nt, Artificial Sequence
  derived and/or modified CDS sequence (wt) from hemagglutinin__InfluenzaA__AHC59149
augaagacuaucauugcuuugagcuacauucuaugucugguuuucgcucaaaaacuuccuggaaaugacaacagcacggcaacgcugugccuugggcaccaugcagugccaaacggaacgauagugaaaacaaucacgaaugaccaaauugaaguuaccaaugcuacugagcugguucagaguuccucaacaggugaaauaugcaacaguccucaucagauccuugauggagaaaacugcacacuaauagaugcucuauugggagacccucagugugauggcuuccaaaacaagaaaugggaccuuuuuguugaacgaagcaaagcccacagcaacuguuacccuuaugaugugccggauuaugccucccuuaggucacuaguugccucauccggcacacuggaguuuaacaaugaaagcuucaauuggacuggagucacccaaaacggaacaagcucugcuugcauaaggagaucuaauaauaguuucuuuaguagauugaauugguugacccacuuaaacuucaaauacccagcauugaacgugacuaugccaaacaaugaacaauuugacaaauuguacauuugggggguucaccacccggguacggacaaggaccaaaucuuccuguaugcucaagcaucaggaagaaucacaguaucuaccaaaagaagccaacaagcuguaauuccgaauaucggaucuagacccagaguaaggaauaucccuagcagaguaagcaucuauuggacaauaguaaaaccgggagacauacuuuugauuaacagcacagggaaucuaauugcuccuagggguuacuucaaaauacgaagugggaaaagcucaauaaugagaucagaugcacccauuggcaaaugcaauucugcaugcaucacuccaaauggaagcauucccaaugacaaaccauuccaaaauguaaacaggaucacauacggggccugucccagauauguuaagcaaaacacucugaaauuggcaacaggaaugagaaauguaccagagaaacaaacuagaggcauauuuggcgcaauagcggguuucauagaaaauggcugggagggaaugguggaugguugguacgguuucaggcaucaaaauucugagggaaggggacaagcagcagaucucaaaagcacucaagcagcaaucgaucaaaucaaugggaagcugaauagauugaucgggaaaaccaacgagaaauuccaucagauugaaaaagaauucucagaagucgaagggagaauucaggaccuugagaaauauguugaggacacuaaaauagaucucuggucauacaacgcggagcuucuuguugcccuggagaaccaacacacaauugaucuaacugacucagaaaugaacaaacuguuugaaaaaacaaagaagcaacugagggaaaaugcugaggauaugggcaaugguuguuucaaaauauaucacaaaugugacaaugccugcauaggaucaaucagaaauggaacuuaugaccacgauguguacagagaugaagcauuaaacaaccgauuccagaucaagggaguugagcugaagucaggguacaaagauuggauccuauggauuuccuuugccauaucauguuuuuugcuuuguguugcuuuguugggguucaucaugugggccugccaaaaaggcaacauuaggugcaacauuugcauuuga

SEQ ID NO: 42681 - RNA, 1701 nt, Artificial Sequence
  derived and/or modified CDS sequence (wt) from hemagglutinin__InfluenzaA__AHC59185
augaagacuaucauugcuuugagcuacauucuaugucugguuuucgcucaaaaacuuccuggaaaugacaacagcacggcaacgcugugccuugggcaccaugcaguaccaaacggaacgauagugaaaacaaucacgaaugaccaaauugaaguuacuaaugcuacugagcugguucagaguuccucaacaggugaaauaugcgacaguccucaucagauccuugauggagaaaacugcacacuaauagaugcucuauugggagacccucagugugauggcuuccaaaauaagaagugggaccuuuuuguugaacgaagcaaagccuacagcaacuguuacccuuaugaugugccggauuaugccucccuuaggucacuaguugccucauccggcacacuggaguuuaacaaugaaagcuucaauuggacuggagucacucaaaacggaacaagcucugcuugcauaaggagaucuaauaguaguuucuuuaguagauugaauugguugacccacuuaaacuucaaauacccagcauugaacgugacuaugccaaacaaugaacaauuugacaaauuguacauuugggggguucaccacccggguacggacaaggaccaaaucuuccuguaugcucaaucaucaggaagaaucacaguaucuaccaaaagaagccaacaagcuguaaucccgaauaucggaucuagacccagaauaaggaauaucccuagcagaauaagcaucuauuggacaauaguaaaaccgggagacauacuuuugauuaacagcacagggaaucuaauugcuccuagggguuacuucaaaauacgaagugggaaaagcucaauaaugagaucagaugcacccauuggcaaaugcaauucugaaugcaucacuccaaauggaagcauucccaaugacaaaccauuccaaaauguaaacaggaucacauacggggccugucccagauauguuaagcaaagcacucugaaauuggcaacaggaaugcgaaauguaccagagaaacaaacuagaggcauauuuggcgcaauagcggguuucauagaaaaugguugggagggaaugguggaugguugguaugguuucaggcaucaaaauucugagggaagaggacaagcagcagaucucaaaagcacucaagcagcaaucgaucaaaucaaugggaagcugaaucgauugaucgggaaaaccaacgagaaauuccaucagauugaaaaagaauucucagaagucgaagggagaauucaggaccuugagaaauauguugaggacacuaaaauagaucucuggucauacaacgcggagcuucuuguugcccuggagaaccaacauacaauugaucuaacugacucagaaaugaacaaacuguuugaaaaaacaaagaagcaacugagggaaaaugcugaggauaugggcaaugguuguuucaaaauauaccacaaaugugacaaugccugcauaggaucaaucagaaauggaacuuaugaccacaauguguacagagaugaagcauuaaacaaccgguuccagaucaagggaguugagcugaagucaggguacaaagauuggauccuauggauuuccuuugccauaucauguuuuuugcuuuguguugcuuuguugggguucaucaugugggccugccaaaagggcaacauuaggugcaacauuugcauuuga

SEQ ID NO: 42682 - RNA, 1701 nt, Artificial Sequence
  derived and/or modified CDS sequence (wt) from hemagglutinin__InfluenzaA__AHC59197
augaagacuaucauugcuuugagcuacauucuaugucugguuuucgcucaaaaacuuccuggaaaugacaacagcacggcaacgcugugccuugggcaccaugcagugccaaacggaacgauagugaaaacaaucacgaaugaccaaauugaaguuacuaaugcuacugagcugguucagaguuccucaacaggugaaauaugcaacaguccucaucagauccuugauggagaaaacugcacacuaauagaugcucuauugggagacccucaaugugauggcuuccaaaacaagaaaugggaccuuuuuguugaacgaagcaaagcccacagcaacuguuacccuuaugaugugccggauuaugccucccuuaggucacuaguugccucauccggcacacuggaguuuaacaaugaaagcuucaauuggacuggagucacucaaaacggaacaagcucugcuugcauaaggagaucuaauaauaguuucuuuaguagauugaauugguuaacccacuuaaacuucaaauacccagcauugaacgugacuaugccaaacaaugaacaauuugacaaauuguacauuugggggguucaccacccggguacggacaaggaccaaaucuuccuguaugcucaagcagcaggaagaaucacaguaucuaccaaaagaagccaacaagcuguaauuccgaauaucggaucuagacccagaguaaggaauaucccuagcagaguaagcaucuauuggacaauaguaaaaccgggagacauacuuuugauuaacagcacagggaaucuaauugcuccuagggguuacuucaaaauacgaagugggaaaagcucaauaaugagaucagaugcacccauuggcaaaugcaauucugcaugcaucacuccaaauggaagcauucccaaugacaaaccauuccaaaauguaaacaggaucacauacggggccugucccagauauguuaagcaaaacacucugaaauuggcaacaggaaugagaaauguaccagagaaacaaacuagaggcauauuuggcgcaauagcugguuucauagaaaaugguugggagggaaugguggaugguugguacgguuucaggcaucaaaauucugagggaaggggacaagcagcagaucucaaaagcacucaagcagcaaucgaucaaaucaaugggaagcugaauagauugaucgggaaaaccaacgagaaauuccaucagauugaaaaagaauucucagaagucgaagggagaauucaggaccuugagaaauauguugaggacacuaaaauagaucucuggucauacaacgcggagcuucuuguugcccuggagaaccaacacacaauugaucuaacugacucagaaaugaacaaacuguuugaaaaaacaaagaagcaacugagggaaaaugcugaggauaugggcaaugguuguuucaaaauauaccacaaaugugacaaugccugcauaggaucaaucagaaauggaacuuaugaccacgauguguacagagaugaagcauuaaacaaccgauuccagaucaagggaguugagcugaagucaggguacaaagauuggauccuauggauuuccuuugccauaucauguuuuuugcuuuguguugcuuuguugggguucaucaugugggccugccaaaaaggcaacauuaggugcaacauuugcauuuga

SEQ ID NO: 42683 - RNA, 1701 nt, Artificial Sequence
  derived and/or modified CDS sequence (wt) from hemagglutinin__InfluenzaA__AHC59209
augaagacuaucauugcuuugagcuacauucuaugucugguuuucgcucaagaaauuccuggaaaugacaacagcacggcaacgcugugccuugggcaccaugcagugccaaacggaacgauagugaaaacaaucacgaaugaccaaauugaaguuacuaaugcuacugagcugguucagaguuccucaacaggugaaauaugcaacaguccucaucagauccuugauggagaaaacugcacacuaauagaugcucuauugggagacccucagugugaugacuuccaaaacaagaaaugggaccuuuuuguugaacgaagcaaagcccacagcaacuguuacccuuaugaugugccggauuaugccucccuuaggucacuaguugccucauccggcacacuggaguuuaacaaugaaagcuucaauuggacuggagucacucaaaacggaacaagcucugcuugcauaaggagaucuaauaauaguuucuuuaguagauugaauugguugacccacuuaaacuucaaauacccagcauuaaacgugacuaugccaaacaaugaacaauuugacaaauuguacauuugggggguucaccacccggguacggacaaggaccaaaucuuccuguaugcucaagcaucaggaagaaucacaguaucuaccaaaagaagccaacaggcuguaauuccgaauaucggaucuagacccagaguaaggaauaucccuagcagaguaagcaucuauuggacaauaguaaaaccgggagacauacuuuugauuaacagcacagggaaucuaauugcuccuagggguuacuucaaaauacgaagugggaaaagcucaauaaugagaucagaugcacccauuggcgaaugcaauucugcaugcaucacuccaaauggaagcauucccaaugacaaaccauuccaaaauguaaacaggaucacauacggggccugucccagauaugucaagcaaaacacucugaaauuggcaacaggaaugagaaauguaccagagaaacaaacuagagguauauuuggcgcaauagcggguuucauagaaaauggcugggagggaaugguggaugguugguacgguuucaggcaucaaaauucugagggaaggggacaggcagcagaucucaaaagcacucaagcagcaaucgaccaaaucaaugggaagcugaauagauugaucgggaaaaccaaugagaaauuccaucagauugaaaaagaauucucagaagucgaagggagaauucaggaccuugagaaauauguugaggacacuaaaauagaucucuggucauacaacgcggagcuucuuguugcccuggagaaccaacacacaauugaucugacugacucagaaaugaacaaacuguuugaaaaaacaaagaagcaacugagggaaaaugcugaggauaugggcaaugguuguuucaaaauauaccacaaaugugacaaugccugcauaggaucaaucagaaauggaacuuaugaccacgcuguguacagagaugaagcauuaaacaaccgauuccagaucaagggaguugagcugaagucaggguacaaagauuggauccuauggauuuccuuugccauaucauguuuuuugcuuuguguugcuuuguugggguucaucaugugggccugccaaaaaggcaacauuaggugcaacauuugcauuuga

SEQ ID NO: 42684 - RNA, 1701 nt, Artificial Sequence; identical to SEQ ID NO: 42608
  derived and/or modified CDS sequence (wt) from hemagglutinin__InfluenzaA__AHC59221

SEQ ID NO: 42685 - RNA, 1701 nt, Artificial Sequence
  derived and/or modified CDS sequence (wt) from hemagglutinin__InfluenzaA__AHC59245
augaagacuaucauugcuuugagcuacauucuaugucugguuuucgcucaaaaacuuccugggaaugacaacagcacggcaacgcugugccuugggcaccaugcagugucaaacggaacgauagugaaaacaaucacgaaugaccaaauugaaguuacuaaugcuacugaacugguucagaguuccucaacaggugaaauaugcaacaguccucaucagauccuugauggagaaaacugcacacuaauagaugcucuauugggagacccucagugugauggcuuccaaaacaagaaaugggaucuuuuuguugaacgaagcaaagcccacagcaacuguuacccuuaugaugugccggauuaugccucccuuaggucacuaguugccucauccggcacacuggaguuuaacaaugaaagcuucaauuggacuggagucacucaaaacggaacaagcucugcuugcauaaggggaucuaauaauaguuucuuuaguagauugaauugguugacccacuuaaacuucaaauacccagcauugaacgugacuaugccaaacaaugaacaauuugacaaauuguacauuugggggguucaccacccggguacggacaaggaccaaaucuuccuguaugcucaagcaucaggaagaaucacaguaucuaccaaaagaagccaacaagcuguaauuccgaauaucggaucuagacccagaguaaggaauaucccuagcagaguaagcaucuauuggacaauaguaaaaccgggagacauacuuuugauuaacagcacagggaaucuaauugcuccuagggguuacuucaaaauacgaagugggaaaagcucaauaaugagaucagaugcacccauuggcaaaugcaauucugcaugcaucacuccaaauggaagcauucccaaugacaaaccauuccaaaauguaaacaggaucacauacggggccugucccagauauguuaagcaaaacacucugaaauuggcaacaggaaugagaaauguaccagagaaacaaacuagaggcauauuuggcgcaauagcggguuucauagaaaaugguugggagggaaugauggaugguugguacgguuucaggcaucaaaacucugagggaaggggacaagcagcagaucucaaaagcacucaagcagcaaucgaucaaaucaaugggaagcugaauagauugaucggaaaaaccaacgagaaauuccaucagauugaaaaagaauucucagaagucgaagggaggauucaggaccuugagaaauauguugaggacacuaaaauagaucucuggucauacaacgcggagcuucuuguugcccuggagaaccaacacacaauugaucuaacugacucagaaaugaacaaacuguuugaaaaaacaaagaagcaacugagggaaaaugcugaggauaugggcaaugguuguuucaaaauauaccacaaaugugacaaugccugcauaggaucaaucagaaauggaacuuaugaccacgauguguacagagaugaagcauuaaacaaccgauuccagaucaagggaguugagcugaagucaggguacaaagauuggauccuauggauuuccuuugccauaucauguuuuuugcuuuguguugcuuuguugggguucaucaugugggccugccaaaaaggcaacauuaggugcaacauuugcauuuga

SEQ ID NO: 42686 - RNA, 1701 nt, Artificial Sequence; identical to SEQ ID NO: 42630
  derived and/or modified CDS sequence (wt) from hemagglutinin__InfluenzaA__AHC59257

SEQ ID NO: 42687 - RNA, 1701 nt, Artificial Sequence; identical to SEQ ID NO: 40264
  derived and/or modified CDS sequence (wt) from hemagglutinin__InfluenzaA__AHC59269

SEQ ID NO: 42688 - RNA, 1701 nt, Artificial Sequence
  derived and/or modified CDS sequence (wt) from hemagglutinin__InfluenzaA__AHC59281
augaagacuaucauugcuuugagcuacauucuaugucugguuuucgcucaaaaacuuccugggaaugacaacagcacggcaacgcugugccuugggcaccaugcagugccaaacggaacgauagugaaaacaaucacgaaugaccaaauugaaguuacuaaugcuacugaacugguucagaguuccucaacaggugaaauaugcaacaguccucaucagauccuugauggagaaaacugcacacuaauagaugcucuauugggagacccucagugugauggcuuccaaaacaagaaaugggaccuuuuuguugaacgaagcaaagcccacagcaacuguuacccuuaugaugugccggauuaugccucccuuaggucacuaguugccucauccggcacacuggaguuuaacaaugaaagcuucaauuggacuggagucacucaaaacggaacaagcucugcuugcauaaggggaucuaauaauaguuucuuuaguagauugaauugguugacccacuuaaacuucaaauacccagcauugaacgugacuaugccaaacaaugaacaauuugacaaauuguacauuugggggguucaccacccggguacggacaaggaccaaaucuuccuguaugcucaagcaucaggaagaaucacaguaucuaccaaaagaagccaacaagcuguaauuccgaauaucggaucuagacccagaguaaggaauaucccuagcagaguaagcaucuauuggacaauaguaaaaccgggagacauacuuuugauuaacagcacagggaaucuaauugcuccuagggguuacuucaaaauacgaagugggaaaagcucaauaaugagaucagaugcacccauuggcaaaugcaauucugcaugcaucaccccaaauggaagcauucccaaugacaaaccauuccaaaauguaaacaggaucacauacggggccugucccagauauguuaagcaaaacacucugaaauuggcaacaggaaugagaaauguaccagagaagcaaacuagaggcauauuuggcgcaauagcggguuucauagaaaaugguugggagggaaugguggaugguugguacgguuucaggcaucaaaauucugagggaaggggacaagcagcagaucucaaaagcacucaagcagcaaucgaucaaauaaaugggaagcugaauagauugaucgggaaaaccaacgagaaauuccaucagauugaaaaagaauucucagaagucgaagggagaauucaggaccuugagaaauauguugaggacacuaaaauagaucucuggucauacaaugcggagcuucuuguugcccuggagaaccaacacacaauugaucuaacugacucagaaaugaacaaacuguuugaaaaaacaaagaagcaacugagggaaaaugcugaggauaugggcaaugguuguuucaaaauauaccacaaaugugacaaugccugcauaggaucaaucagaaauggaacuuaugaccacgauguguacagagaugaagcauuaaacaaccgauuccagaucaagggaguugagcugaagucaggguacaaagauuggauccuauggauuuccuuugccauaucauguuuuuugcuuuguguugcuuuguugggguucaucaugugggccugccaaaaaggcaacauuaggugcaacauuugcauuuga

SEQ ID NO: 42689 - RNA, 1701 nt, Artificial Sequence; identical to SEQ ID NO: 42608
  derived and/or modified CDS sequence (wt) from hemagglutinin__InfluenzaA__AHC59293

SEQ ID NO: 42690 - RNA, 1701 nt, Artificial Sequence
  derived and/or modified CDS sequence (wt) from hemagglutinin__InfluenzaA__AHC59305
augaagacuaucauugcuuugagcuacauucuaugucugguuuucgcucaaaaacuuccuggaaaugacaacagcacggcaacgcugugccuugggcaccaugcagugccaaacggaacgauagugaaaacaaucacgaaugaccaaauugaaguuacuaaugcuacugagcugguucagaguuccucaacaggugaaauaugcagcaguccucaucagauccuugauggagaaaacugcacacuaauagaugcucuauugggagacccucagugugauggcuuccaaaacaagaaaugggaccuuuuuguugaacgaagcaaagcccacagcaacuguuacccuuaugaugugccggauuaugccucccuuaggucacuaguugccucauccggcacacuggaguuuaacaaugaaagcuucaauuggacuggagucacucaaaacggaacaagcucugcuugcauaaggagaucuaauaauaguuucuuuaguagauugaauugguugacccacuuaaacuucaaauacccagcauugaaugugacuaugccaaacaaugaacaauuugacaaauuguacauuugggggguucaccacccggguacggacaaggaccaaaucuuccuguaugcucaagcaucaggaagaaucacaguaucuaccaaaagaagccaacaagcuguaauuccgaauaucggaucuagacccagaguaaggaauaucccuagcagaguaagcaucuauuggacaauaguaaaaccgggagacauacuuuugauuaacagcacagggaaucuaauugcuccuagggguuacuucaaaauacgaagugggaaaagcucaauaaugagaucagaugcacccauuggcaaaugcaauucugcaugcaucacuccaaauggaagcauucccaaugacaaaccauuccaaaauguaaacaggaucacauacggggccugucccagauauguuaagcaaaacacucugaaauuggcaacaggaaugagaaauguaccagagaaacaaacuagaggcauauuuggcgcaauagcggguuucauagaaaaugguugggagggaaugguggaugguugguacgguuucaggcaucaaaauucugagggaaggggacaagcagcagaucucaaaagcacucaagcagcaaucgaucaaaucaaugggaagcugaauagauugaucgggaaaaccaacgagaaauuccaucagauugaaaaagaauucucagaagucgaagggagaauucaggaccuugagaaauauguugaggacacuaaaauagaucucuggucauacaacgcggagcuucuuguugcccuggagaaccaacacacaauugaucuaacugacucagaaaugaacaaacuguuugaaaaaacaaagaagcaacugagggaaaaugcugaggauaugggcaaugguuguuucaaaauauaccacaaaugugacaaugccugcauaggaucaaucagaaauggaacuuaugaccacgauguguacagagaugaagcauuaaacaaccgauuccagaucaagggaguugagcugaagucaggguacaaagauuggauccuauggauuuccuuugccauaucauguuuuuugcuuuguguugcuuuguugggguucaucaugugggccugccaaaaaggcaacauuaggugcaacauuugcauuuga

SEQ ID NO: 42691 - RNA, 1701 nt, Artificial Sequence
  derived and/or modified CDS sequence (wt) from hemagglutinin__InfluenzaA__AHC59329
augaagacuaucauugcuuugagcuacauucuaugucugguuuucgcucaaaaacuuccuggaaaugacaauagcacggcaacgcugugccuugggcaccaugcaguaccaaacggaacgauagugaaaacaaucacgaaugaccgaauugaaguuacuaaugcuacugagcugguucagaauuccucaauaggugaaauaugcgacaguccucaucagauccuugauggagaaaacugcacacuaauagaugcucuauugggagacccucagugugauggcuuccaaaauaagaaaugggaccuuuuuguugaacgaagcaaagccuacagcaacuguuacccuuaugaugugccggauuaugccucccuuaggucacuaguugccucauccggcacacuggaguuuaacaaugaaagcuucaauuggacuggagucacucaaaacggaacaaguucugcuugcauaaggagaucuaauaauaguuucuuuaguagauuaaauugguugacccacuuaaacuucaaauacccagcauugaacgugacuaugccaaacaaugaacaauuugacaaauuguacauuugggggguucaccacccggguacggaaaaggaccaaaucuuccuguaugcucaaucaucaggaagaaucacaguaucuaccaaaagaagccaacaagcuguaaucccgaauaucggaucuagacccagaauaaggaauaucccuagcagaauaagcaucuauuggacaauaguaaaaccgggagacauacuuuugauuaacagcacagggaaucuaauugcuccuagggguuacuucaaaauacgaagugggaaaagcucaauaaugagaucagaugcacccauuggcaaaugcaagucugaaugcaucacuccaaauggaagcauucccaaugacaaaccauuccaaaauguaaacaggaucacauacggggcuugccccagauauguuaagcaaagcacucugaaguuggcaacaggaaugcgaaauguaccagagaaacaaacuagaggcauauuuggcgcaauagcggguuucauagaaaaugguugggagggaaugguggaugguugguacgguuucaggcaucaaaauucugagggaagaggacaagcagcagaucucaaaagcacucaagcugcaaucgaucaaaucaaugggaagcugaaucgauugaucgggaaaaccaacgagaaauuccaucagauugaaaaagaauucucagaaguagaagggagaauucaggaccuugagaaauauguugaggacacuaaaauagaucucuggucauacaacgcggagcuucuuguugcccuggagaaccaacauacaauugaucuaacugacucagaaaugaacaaacuguuugaaaaaacaaagaagcaacugagggaaaacgcugaggauaugggcaaugguuguuucaaaauauaccacaaaugugacaaugccugcauaggaucaaucagaaauggaacuuaugaccacgauguauacagagaugaagcauuaaacaaccgguuccagaucaagggaguugagcugaagucaggguacaaagauuggauccuauggauuuccuuugccauaucauguuuuuugcuuuguguugcuuuguugggguucaucaugugggccugccaaaagggcaacauuaggugcaacauuugcauuuga

SEQ ID NO: 42692 - RNA, 1701 nt, Artificial Sequence; identical to SEQ ID NO: 42632
  derived and/or modified CDS sequence (wt) from hemagglutinin__InfluenzaA__AHC59341

SEQ ID NO: 42693 - RNA, 1701 nt, Artificial Sequence; identical to SEQ ID NO: 42638
  derived and/or modified CDS sequence (wt) from hemagglutinin__InfluenzaA__AHC59365

SEQ ID NO: 42694 - RNA, 1701 nt, Artificial Sequence
  derived and/or modified CDS sequence (wt) from hemagglutinin__InfluenzaA__AHC59377
augaagacuaucauugcuuugagcuacauucuaugucugguuuucgcucaaaaacuuccuggaaaugacaacagcacggcaacgcugugccuugggcaccaugcaguaccaaacggaacgguagugaaaacaaucacgaaugaccaaauugaaguuacuaaugcuacugagcugguucagaauuccucaacaggugaaauaugcgacagcccucaucagauccuugauggagaaaacugcacacuaauagaugcucuauugggagacccucagugugauggcuuccaaaauaagaaaugggaccuuuuuguugaacgaagcaaagccuacagcaacuguuacccuuaugaugugccggauuaugccucccuuaggucacuaguugccucauccggcacacuggaguuuaacaaugaaagcuucaauuggacuggagucacucaaaacggaacaagcucugcuugcauaaggagaucuaauaauaguuucuuuaguagauugaauugguugacccacuuaaacuucaaauacccagcauugaacgugacuaugccaaacaaugaacaauuugacaaauuguacauuugggggguucaccacccggguacggacaaggaccaaaucuuccuguaugcucaagcaucaggaagaaucacaguaucuaccaaaagaagccaacaagcuguaaucccgaauaucggaucuagacccagaguaaggaauaucccuagcagaauaagcaucuauuggacaauaguaaaaccgggagacauacuuuugauuaacagcacagggaaucuaauugcuccuagggguuacuucaaaauacgaagugggaaaagcucaauaaugagaucagaugcacccauuggcaaaugcaauucugaaugcaucacuccaaauggaagcauucccaaugacaaaccauuccaaaauguaaacaggaucacauacggggccugucccagauauguuaagcaaaacacucugaaauuggcaacaggaaugcgaaauguaccagagaaacaaacuagaggcauauuuggcgcaauagcggguuucauagaaaaugguugggagggaaugguggaugguugguacgguuucaggcaucaaaauucugagggaagaggacaagcagcagaucucaaaagcacucaagcagcaaucgaucaaaucaaugggaagcugaauagauugaucgggaaaaccaacgagaaauuccaucagauugaaaaagaauucucagaagucgaagggagaauucagaaccuugagaaauauguugaggacacuaaaauagaucucuggucauacaacgcggagcuucuuguugcccuggagaaccaacauacaauugaucuaacugacucagaaaugaacaaacuguuugaaaaaacaaagaagcaacugagggaaaaugcugaggauaugggcaaugguuguuucaaaauauaccacaaaugugacaaugccugcauaggaucaaucagaaauggaacuuaugaccacgauguauacagagaugaagcauuaaacaaccgguuccagaucaagggaguugagcugaagucaggguacaaagauuggauccuauggauuuccuuugccauaucauguuuuuugcuuuguguugcuuuguugggguucaucaugugggccugccaaaaaggcaacauuaggugcaacauuugcauuuga

SEQ ID NO: 42695 - RNA, 1701 nt, Artificial Sequence; identical to SEQ ID NO: 42608
  derived and/or modified CDS sequence (wt) from hemagglutinin__InfluenzaA__AHC59413

SEQ ID NO: 42696 - RNA, 1701 nt, Artificial Sequence; identical to SEQ ID NO: 42669
  derived and/or modified CDS sequence (wt) from hemagglutinin__InfluenzaA__AHC59425

SEQ ID NO: 42697 - RNA, 1701 nt, Artificial Sequence
  derived and/or modified CDS sequence (wt) from hemagglutinin__InfluenzaA__AHC59437
augaagacuaucauugcuuugagcuacauucuaugucugguuuucgcucaaaaacuuccuggaaaugacaacagcacggcaacgcugugccuugggcaccaugcaguaccaaacggaacgauagugaaaacaaucacgaaugaccaaauugaaguuacuaaugcuacugagcugguucagaguuccucaacaggugaaauaugcgacaguccucaucagauccuugauggagaaaacugcacacuaauagaugcucuauugggagacccucagugugauggcuuccaaaauaagaagugggaccuuuuuguugaacgaagcaaagccuacagcaacuguuacccuuaugaugugccggauuaugccucccuuaggucacuaguugccucauccggcacacuggaguuuaacaaugaaagcuucaauuggacuggagucacucaaaacggaacaagcucugcuugcauaaggagaucuaauaguaguuucuuuaguagauugaauugguugacccacuuaaacuucaaauacccagcauugaacgugacuaugccaaacaaugaacaauuugacaaauuguacauuugggggguucaccacccggguacggacaaggaccaaaucuuccuguaugcucaaucaucaggaagaaucacaguaucuaccaaaagaagccaacaagcuguaaucccgaauaucggaucuagacccagaauaaggaauaucccuagcagaauaagcaucuauuggacaauaguaaaaccgggagacauacuuuugaucaacagcacagggaaucugauugcuccuagggguuacuucaaaauacgaagugggaaaagcucaauaaugagaucagaugcacccauuggcaaaugcaauucugaaugcaucacuccaaauggaagcauucccaaugacaaaccauuccaaaauguaaacaggaucacauacggggccugucccagauauguuaagcaaagcacucugaaauuggcaacaggaaugcgaaauguaccagagaaacaaacuagaggcauauuuggcgcaauagcggguuucauagaaaaugguugggagggaaugguggaugguugguacgguuucaggcaucaaaauucugagggaagaggacaagcagcagaucucaaaagcacucaagcagcaauagaucaaaucaaugggaagcugaaucgauugaucgggaaaaccaacgagaaauuccaucagauugaaaaagaauucucagaagucgaagggagaauucaggaccuugagaaauauguugaggacacuaaaauagaucucuggucauacaacgcggagcuucuuguugcccuggagaaccaacauacaauugaucuaacugacucagaaaugaacaaacuguuugaaaaaacaaagaagcaacugagggaaaaugcugaggauaugggcaaugguuguuucaaaauauaccacaaaugugacaaugccugcauaggaucaaucagaaauggaacuuauaaccacgauguauacagagaugaagcauuaaacaaccgguuccagaucaagggaguugagcugaagucaggguacaaagauuggauccuauggauuuccuuugccauaucauguuuuuugcuuuguguugcuuuguugggguucaucaugugggccugccaaaagggcaacauuaggugcaacauuugcauuuga

SEQ ID NO: 42698 - RNA, 1701 nt, Artificial Sequence
  derived and/or modified CDS sequence (wt) from hemagglutinin__InfluenzaA__AHC59449
augaagacuaucauugcuuugagcuacauucuaugucugguuuucgcucaaaaacuuccugggaaugacaacagcacggcaacgcugugccuugggcaccaugcagugccaaacggaacgauagugaaaacaaucacgaaugaccaaauugaaguuacuaaugcuacugaacugguucagaguuccucaacaggugaaauaugcaacaguccucaucagauccuugauggagaaaacugcacacuaauagaugcucuauugggagacccucagugugauggcuuccaaaacaagaaaugggaccuuuuuguugaacgaagcaaagcccacagcaacuguuacccuuaugaugugccggauuaugccucccuuaggucacuaguugccucauccggcacacuggaguuuaacaaugaaagcuucaauuggacuggagucacucaaaacggaacaagcucugcuugcauaaggggaucuaauaauaguuucuuuaguagauugaauugguugacccacuuaaacuucaaauacccagcauugaacgugacuaugccaaacaaugaacaauuugacaaauuguacauuugggggguucaccacccggguacggacaaggaccaaaucuuccuguaugcucaagcaucaggaagaaucacaguaucuaccaaaagaagccaacaagcuguaauuccgaauaucggaucuagacccagaguaaggaauaucccuagcagaguaagcaucuauuggacaauaguaaaaccgggagacauacuuuugauuaacagcacagggaaucuaauugcuccuagggguuacuucaaaauacgaagugggaaaagcucaauaaugagaucagaugcacccauuggcaaaugcaauucugcaugcaucaccccaaauggaagcauucccaaugacaaaccauuccaaaauguaaacaggaucacauacggggccugucccagauauguuaagcaaaacacucugaaauuggcaacaggaaugagaaauguaccagagaaacaaacuagaggcauauuuggcgcaauagcggguuucauagaaaaugguugggagggaaugguggaugguugguacgguuucaggcaucaaaauucugagggaaggggacaagcagcagaucucaaaagcacucaagcagcaaucgaucaaaucaaugggaagcugaauagauugaucgggagaaccaacgagaaauuccaucagauugaaaaagaauucucagaagucgaagggagaauucaggaccuugagaaauauguugaggacacuaaaauagaucucuggucauacaacgcggagcuucuuguugcccuggagaaccaacacacaauugaucuaacugacucagaaaugaacaaacuguuugaaaaaacaaagaagcaacugagagaaaaugcugaggauaugggcaaugguuguuucaaaauauaccacaaaugugacaaugccugcauaggaucaaucagaaauggaacuuaugaccacgauguguacagagaugaagcauuaaacaaccgauuccagaucaagggaguugagcugaagucaggguacaaagauuggauccuauggauuuccuuugccauaucauguuuuuugcuuuguguugcuuuguugggguucaucaugugggccugccaaaaaggcaacauuaggugcaacauuugcauuuga

SEQ ID NO: 42699 - RNA, 1701 nt, Artificial Sequence; identical to SEQ ID NO: 40369
  derived and/or modified CDS sequence (wt) from hemagglutinin__InfluenzaA__AHC59461

SEQ ID NO: 42700 - RNA, 1701 nt, Artificial Sequence; identical to SEQ ID NO: 42691
  derived and/or modified CDS sequence (wt) from hemagglutinin__InfluenzaA__AHC59473

SEQ ID NO: 42701 - RNA, 1701 nt, Artificial Sequence; identical to SEQ ID NO: 42608
  derived and/or modified CDS sequence (wt) from hemagglutinin__InfluenzaA__AHC59485

SEQ ID NO: 42702 - RNA, 1701 nt, Artificial Sequence
  derived and/or modified CDS sequence (wt) from hemagglutinin__InfluenzaA__AHC59497
augaagacuaucauugcuuugagcuacauucuaugucugguuuucgcucaaaaacuuccuggaaaugacaacagcacggcaacgcugugccuugggcaccaugcagugccaaacggaacgauagugaaaacaaucacgaaugaccaaauugaaguuacuaaugcuacugagcugguucagaguuccucaacaggugaaauaugcaacaguccucaucagauccuugauggagaaaacugcacacuaauagaugcucuauugggagacccucagugugauggcuuccaaaacaagaaaugggaccuuuuuguugaacgaagcaaagcccacagcaacuguuacccuuaugaugugccggauuaugccucccuuaggucacuaguugccucauccggcacacuggaguuuaacaaugaaagcuucaauuggacuggagucacucaaaacggaacaagcucugcuugcauaaggagaucuaauaauaguuucuuuaguagauugaauugguugacccacuuaaacuucaaauacccagcauugaacgugacuaugccaaacaaugaacaauuugacaaauuguacauuugggggguucaccauccggguacggacaaggaccaaaucuuccuguaugcucaagcaucaggaagaaucacaguaucuaccaaaagaagccaacaagcuguaauuccgaauaucggaucuagacccagaguaaggaauaucccuagcagaguaagcaucuauuggacaauaguaaaaccgggagacauacuuuugauuaacagcacagggaaucuaauugcuccuagggguuacuucaaaauacgaagugggaaaagcucaauaaugagaucagaugcacccauuggcaaaugcaauucugcaugcaucacuccaaauggaagcauucccaaugacaaaccauuccaaaauguaaacaggaucacauacggggccugucccagauauguuaagcaaaacacucugaaauuggcaacaggaaugagaaauguaccagagaaacaaacuagaggcauauuuggcgcaauagcggguuucauagaaaaugguugggagggaaugguggaugguugguacgguuucaggcaucaaaauucugagggaaggggacaagcagcagaucucaaaagcacucaagcagcaaucgaucaaaucaaugggaagcugaauagauugaucgggaaaaccaacgagaaauuccaucagauugaaaaagaauucucagaagucgaagggagaauucaggaccuugagaaauauguugaggacacuaaaauagaucucuggucauacaacgcggagcuucuuguugcccuggagaaccaacacacaauugaucuaacugacucagaaaugaacaaacuguuugaaaaaacaaagaagcaacugagggaaaaugcugaggauaugggcaaugguuguuucaaaauauaccacaaaugugacaaugccugcauaggaucaaucagaaauggaacuuaugaccacgauguguacagagaugaagcauuaaacaaccgauuccagaucaagggaguugagcugaagucaggguacaaagauuggauccuauggauuuccuuugccauaucauguuuuuugcuuuguguugcuuuguugggguucaucaugugggccugccaaaaaggcaacauuaggugcaacauuugcauuuga

SEQ ID NO: 42703 - RNA, 1701 nt, Artificial Sequence
  derived and/or modified CDS sequence (wt) from hemagglutinin__InfluenzaA__AHC59509
augaagacuaucauugcuuugagcuacauucuaugucugguuuucgcucaaaaacuuccuggaaaugacaacagcacggcaacgcugugccuugggcaccaugcagugccaaacggaacgauagugaaaacaaucacgaaugaccaaauugaaguuacuaaugcuacugagcugguucagaguuccucaacaggugaaauaugcaacaguccucaucagauccuugauggagaaaacugcacacuaauagaugcucuauugggagacccucagugugauggcuuccaaaacaagaaaugggaccuuuuuguugaacgaagcaaagcccacagcaacuguuacccuuaugaugugccggauuaugccucccuuaggucacuaguugccucauccggcacacuggaguuuaacaaugaaagcuucaauuggacuggagucacucaaaacggaacaagcucugcuugcauaaggagaucuaauaauaguuucuuuaguagauugaauugguuaacccacuuaaacuucaaauacccagcauugaacgugacuaugccaaacaaugaacaauuugacaaauuguacauuugggggguucaccacccggguacggacaaggaccaaaucuuccuguaugcucaagcagcaggaagaaucacaguaucuaccaaaagaagccaacaagcuguaauuccgaauaucggaucuagacccagaguaaggaauaucccuagcagaguaagcaucuauuggacaauaguaaaaccgggagacauacuuuugauuaacagcacagggaaucuaauugcuccuagggguuacuucaaaauacgaagugggaaaagcucaauaaugagaucagaugcacccauuggcaaaugcaauucugcaugcaucacuccaaauggaagcauucccaaugacaaaccauuccaaaauguaaacaggaucacauacggggccugucccagauauguuaagcaaaacacucugaaauuggcaacaggaaugagaaauguaccagagaaacaaacuagaggcauauuuggcgcaauagcugguuucauagaaaaugguugggagggaaugguggaugguugguacgguuucaggcaucaaaauucugagggaaggggacaagcagcagaucucaaaagcacucaagcagcaaucgaucaaaucaaugggaagcugaauagauugaucgggaaaaccaacgagaaauuccaucagauugaaaaagaauucucagaagucgaagggagaauucaggaccuugagaaauauguugaggacacuaaaauagaucucuggucauacaacgcggagcuucuuguugcccuggagaaccaacacacaauugaucuaacugacucagaaaugaacaaacuguuugaaaaaacaaagaagcaacugagggaaaaugcugaggauaugggcaaugguuguuucaaaauauaccacaaaugugacaaugccugcauaggaucaaucagaaauggaacuuaugaccacgauguguacagagaugaagcauuaaacaaccgauuccagaucaagggaguugagcugaagucaggguacaaagauuggauccuauggauuuccuuugccauaucauguuuuuugcuuuguguugcuuuguugggguucaucaugugggccugccaaaaaggcaacauuaggugcaacauuugcauuuga

SEQ ID NO: 42704 - RNA, 1701 nt, Artificial Sequence; identical to SEQ ID NO: 42703
  derived and/or modified CDS sequence (wt) from hemagglutinin__InfluenzaA__AHC59521

SEQ ID NO: 42705 - RNA, 1701 nt, Artificial Sequence
  derived and/or modified CDS sequence (wt) from hemagglutinin__InfluenzaA__AHC59533
augaagacuaucauugcuuugagcuacauucuaugucugguuuucgcucaaaaacuuccuggaaaugacaacagcacggcaacgcugugccuugggcaccaugcagugccaaacggaacgauagugaaaacaaucacgaaugaccaaauugaaguuacuaaugcuacugagcugguucagaguuccucaacaggugaaauaugcaacaguccucaucagauccuugauggagaaaacugcacacuaauagaugcucuauugggagacccucagugugauggcuuccaaaacaagaaaugggaccuuuuuguugaacgaagcaaagcccacagcaacuguuacccuuaugaugugccggauuaugccucccuuaggucacuaguugccucauccggcacacuggaguuuaaaaaugaaagcuucaauuggacuggagucacucaaaacggaacaagcucugcuugcauaaggagaucuaauaauaguuucuuuaguagauugaauugguugacccacuuaaacuucaaauacccagcauugaacgugacuaugccaaacaaugaacaauuugacaaauuguacauuugggggguucaccacccggguacggacaaggaccaaaucuuccuguaugcucaagcaucaggaagaaucacaguaucuaccaaaagaagccaacaagcuguaauuccgaauaucggaucuagacccagaguaaggaauaucccuagcagaguaagcaucuauuggacaauaguaaaaccgggagacauacuuuugauuaacagcacagggaaucuaauugcuccuagggguuacuucaaaauacgaagugggaaaagcucaauaaugagaucagaugcacccauuggcaaaugcaauucugcaugcaucacuccaaauggaagcauucccaaugacaaaccauuccaaaauguaaacaggaucacauacggggccugucccagauauguuaagcaaaacacucugaaauuggcaacaggaaugagaaauguaccagagaaacaaacuagaggcauauuuggcgcaauagcggguuucauagaaaauggcugggagggaaugguggaugguugguacgguuucaggcaucaaaauucugagggaaggggacaagcagcagaucucaaaagcacucaagcagcaaucgaucaaaucaaugggaagcugaauagauugaucgggaaaaccaacgagaaauuccaucagauugaaaaagaauucucagaagucgaagggagaauucaggaccuugagaaauauguugaggacacuaaaauagaucucuggucauacaacgcggagcuucuuguugcccuggagaaccaacacacaauugaucuaacugacucagaaaugaacaaacuguuugaaaaaacaaagaagcaacugagggaaaaugcugaggauaugggcaaugguuguuucaaaauauaucacaaaugugacaaugccugcauaggaucaaucagaaauggaacuuaugaccacgauguguacagagaugaagcauuaaacaaccgauuccagaucaagggaguugagcugaagucaggguacaaagauuggauccuauggauuuccuuugccauaucauguuuuuugcuuuguguugcuuuguugggguucaucaugugggccugccaaaaaggcaacauuaggugcaacauuugcauuuga

SEQ ID NO: 42706 - RNA, 1701 nt, Artificial Sequence
  derived and/or modified CDS sequence (wt) from hemagglutinin__InfluenzaA__AHC59545
augaagacuaucauugcuuugagcuacauucuaugucugguuuucgcucaaaaacuuccuggaaaugacaacagcacggcaacgcugugccuugggcaccaugcagugccaaacggaacgauagugaaaacaaucacgaaugaccaaauugaaguuacuaaugcuacugagcugguucagaguuccucaacaggugaaauaugcaacaguccucaucagauccuugauggagaaaacugcacacuaauagaugcucuauugggagacccucagugugauggcuuccaaaacaagaaaugggaccuuuuuguugaacgaagcaaagcccacagcaacuguuacccuuaugaugugccggauuaugccucccuuaggucacuaguugccucauccggcacacuggaguuuaacaaugaaagcuucaauuggacuggagucacucaaaacggaacaagcucugcuugcauaaggagaucuaauaauaguuucuuuaguagauugaauugguugacccacuuaaacuucaaauacccagcauugaacgugacuaugccaaacaaugaacaauuugacaaauuguacauuugggggguucaccacccggguacggacaaggaccaaaucuuccuguaugcucaagcaucaggaagaaucacaguaucuaccaaaagaagccaacaagcuguaauuccgaauaucggaucuagacccagaguaaggaauaucccuagcagaguaagcaucuauuggacaauaguaaaaccgggagacauacuuuugauuaacagcacagggaaucuaauugcuccuagggguuacuucaaaauacgaagugggaaaagcucaauaaugagaucagaugcacccauuggcaaaugcaauucugcaugcaucacuccaaauggaagcauucccaaugacaaaccauuccaaaauguaaacaggaucacauacggggccugucccagauauguuaagcaaaacacucugaaauuggcaacaggaaugagaaauguaccagagaaacaaacuagaggcauauuuggcgcaauagcggguuucauagaaaaugguugggagggaaugguggaugguugguacgguuucaggcaucaaaauucugagggaaggggacaagcagcagaucucaaaagcacucaagcagcaaucgaucaaaucaaugggaagcugaauagauugaucgggaaaaccaacgagaaauuccaucagauugaaaaagaauucucagaagucgaagggagaauucaggaccuugagaaauauguugaggacacuaaaauagaucucuggucauacaacgcggagcuucuuguugcccuggagaaccaacacacaauugaucuaacugacucagaaaugaacaaacuguuugaaaaaacaaagaagcaacugagggaaaaugcugaggauaugggcaaugguuguuucaaaauauaccacaaaugugacaaugccugcauaggaucaaucagaaauggaacuuaugaccacgauguguacagagacgaagcauuaaacaaccgauuccagaucaagggaguugagcugaagucaggguacaaagauuggauccuauggauuuccuuugccauaucauguuuuuugcuuuguguugcuuuguugggguucaucaugugggccugccaaaaaggcaacauuaggugcaacauuugcauuuga

SEQ ID NO: 42707 - RNA, 1701 nt, Artificial Sequence; identical to SEQ ID NO: 42630
  derived and/or modified CDS sequence (wt) from hemagglutinin__InfluenzaA__AHC59557

SEQ ID NO: 42708 - RNA, 1701 nt, Artificial Sequence
  derived and/or modified CDS sequence (wt) from hemagglutinin__InfluenzaA__AHC59569
augaagacuaucauugcuuugagcuacauucuaugucugguuuucgcucaaaaacuuccuggaaaugacaacagcacggcaacgcugugccuugggcaccaugcaguaccaaacggaacgauagugaaaacaaucacgaaugaccaaauugaaguuacuaaugcuacugagcugguucagaauuccucaacaggugaaauaugcgacaguccucaucagauccuugauggagaaaacugcacacuaauagaugcucuauugggagacccucagugugauggcuuccaaaauaagaaaugggaccuuuuuguugaacgaagcaaagccuacagcaacuguuacccuuaugaugugccggauuaugccucccuuaggucacuaguugccucauccggcacacuggaguuuaacaaugaaagcuucaauuggacuggagucacucaaaacggaacaagcucugcuugcauaaggagaucuaauaauaguuucuuuaguagauugaauugguugacccacuuaaacuucaaauacccagcauugaacgugacuaugccaaacaaugaacaauuugacaaauuguacauuugggggguucaccacccggguacggacaaggaccaaaucuuccuguaugcucaagcaucaggaagaaucacaguaucuaccaaaagaagccaacaagcuguaaucccgaauaucggaucuagacccagaguaaggaauaucccuagcagaauaagcaucuauuggacaauaguaaaaccgggagacauacuuuugauuaacagcacagggaaucuaauugcuccuagggguuacuucaaaauacgaagugggaaaagcucaauaaugagaucagaugcacccauuggcaaaugcaauucugaaugcaucacuccaaauggaagcauucccaaugacaaaccauuccaaaauguaaacaggaucacauacggggccugucccagauauguuaagcaaaacacucugaaauuggcaacaggaaugcgaaauguaccagagaaacaaacuagaggcauauuuggcgcaauagcggguuucauagaaaaugguugggagggaaugauggaugguugguacgguuucaggcaucaaaauucugagggaagaggacaagcagcagaucucaaaagcacucaagcagcaaucgaucaaaucaaugggaagcugaauagauugaucgggaaaaccaacgagaaauuccaucagauugaaaaagaauucucagaagucgaagggagaauucaggaccuugagaaauauguugaggacacuaaaauagaucucuggucauacaacgcggagcuucuuguugcccuggagaaccaacauacaauugaucuaacugacucagaaaugaacaaacuguuugaaaaaacaaagaagcaacugagggaaaaugcugaggauaugggcaaugguuguuucaaaauauaccacaaaugugacaaugccugcauaggaucaaucagaaauggaacuuaugaccacgauguauacagagaugaagcauuaaacaaccgguuccagaucaagggaguugagcugaagucaggguacaaagauuggauccuauggauuuccuuugccauaucauguuuuuugcuuuguguugcuuuguugggguucaucaugugggccugccaaaaaggcaacauuaggugcaacauuugcauuuga

SEQ ID NO: 42709 - RNA, 1701 nt, Artificial Sequence; identical to SEQ ID NO: 42627
  derived and/or modified CDS sequence (wt) from hemagglutinin__InfluenzaA__AHC59581

SEQ ID NO: 42710 - RNA, 1701 nt, Artificial Sequence; identical to SEQ ID NO: 42703
  derived and/or modified CDS sequence (wt) from hemagglutinin__InfluenzaA__AHC59593

SEQ ID NO: 42711 - RNA, 1701 nt, Artificial Sequence
  derived and/or modified CDS sequence (wt) from hemagglutinin__InfluenzaA__AHC59605
augaagacuaucauugcuuugagcuacauucuaugucugguuuucgcucaaaaacuuccuggaaaugacaacagcacggcaacgcugugccuugggcaccaugcaguaccaaacggaacgauagugaaaacaaucacgaaugaccaaauugaaguuacuaaugcuacugagcugguucagaguuccucaacaggugaaauaugcgacaguccucaucagauccuugauggagaaaacugcacacuaauagaugcucuauugggagacccucagugugauggcuuccaaaauaagaagugggaccuuuuuguugaacgaagcaaagccuacagcaacuguuacccuuaugaugugccggauuaugccucccuuaggucacuaguugccucauccggcacacuggaguuuaacaaugaaagcuucaauuggacuggagucacucaaaacggaacaagcucugcuugcauaaggagaucuaauaguaguuucuuuaguagauugaauugguugacccacuuaaacuucaaauacccagcauugaacgugacuaugccaaacaaugaacaauuugacaaauuguacauuugggggguucaccacccggguacggacaaggaccaaaucuuccuguaugcucaaucaucaggaagaaucacaguaucuaccaaaagaagccaacaagcuguaaucccgaauaucggaucuagacccagaauaaggaauaucccuagcagaauaagcaucuauuggacaauaguaaaaccgggagacauacuuuugauuaacagcacagggaaucuaauugcuccuagggguuacuucaaaauacgaagugggaaaagcucaauaaugagaucagaugcacccauuggcaaaugcaauucugaaugcaucacuccaaauggaagcauucccaaugacaaaccauuccaaaauguaaacaggaucacauacggggccugucccagauauguuaagcaaagcacucugaaauuggcaacaggaaugcgaaauguaccagagaaacaaacuagaggcauauuuggcgcaauagcggguuucauagaaaaugguugggagggaaugguggaugguugguacgguuucaggcaucaaaauucugagggaagaggacaagcagcagaucucaaaagcacucaagcagcaauagaucaaaucaaugggaagcugaaucgauugaucgggaaaaccaacgagaaauuccaucagauugaaaaagaauucucagaagucgaagggagaauucaggaccuugagaaauauguugaggacacuaaaauagaucucuggucauacaacgcggagcuucuuguugcccuggagaaccaacauacaauugaucuaacugacucagaaaugaacaaacuguuugaaaaaacaaagaagcaacugagggaaaaugcugaggauaugggcaaugguuguuucaaaauauaccacaaaugugacaaugccugcauaggaucaaucagaaauggaacuuauaaccacgauguauacagagaugaagcauuaaacaaccgguuccagaucaagggaguugagcugaagucaggguacaaagauuggauccuauggauuuccuuugccauaucauguuuuuugcuuuguguugcuuuguugggguucaucaugugggccugccaaaagggcaacauuaggugcaacauuugcauuuga

SEQ ID NO: 42712 - RNA, 1701 nt, Artificial Sequence; identical to SEQ ID NO: 42607
  derived and/or modified CDS sequence (wt) from hemagglutinin__InfluenzaA__AHC59617

SEQ ID NO: 42713 - RNA, 1701 nt, Artificial Sequence; identical to SEQ ID NO: 42706
  derived and/or modified CDS sequence (wt) from hemagglutinin__InfluenzaA__AHC59629

SEQ ID NO: 42714 - RNA, 1701 nt, Artificial Sequence
  derived and/or modified CDS sequence (wt) from hemagglutinin__InfluenzaA__AHC59641
augaagacuaucauugcuuugagcuacauucuaugucugguuuucgcucaaaaacuuccugggaaugacaacagcacggcaacgcugugccuugggcaccaugcagugccaaacggaacgauagugaaaacaaucacgaaugaccaaauugaaguuacuaaugcuacugaacugguucagaguuccucaacaggugaaauaugcaacaguccucaucagauccuugauggagaaaacugcacacuaauagaugcucuauugggagacccucagugugauggcuuccaaaacaagaaaugggaccuuuuuguugaacgaagcaaagcccacagcaacuguuacccuuaugaugugccggauuaugccucccuuaggucacuaguugccucauccggcacacuggaguuuaacaaugaaagcuucaauuggacuggagucacucaaaacggaacaagcucugcuugcauaaggggaucuaauaauaguuucuuuaguagauugaauugguugacccacuuaaacuucaaauacccagcauugaacgugacuaugccaaacaaugaacaauuugacaaauuguacauuugggggguucaccacccggguacggacaaggaccaaaucuuccuguaugcucaagcaucaggaagaaucacaguaucuaccaaaagaagccaacaagcuguaauuccgaauaucggaucuagacccagaguaaggaauaucccuagcagaguaagcaucuauuggacaauaguaaaaccgggagacauacuuuugauuaacagcacagggaaucuaauugcuccuagggguuacuucaaaauacgaagugggaaaagcucaauaaugagaucagaugcacccauuggcaaaugcaauucugcaugcaucacuccaaauggaagcauucccaaugacaaaccauuccaaaauguaaacaggaucacauacggggccugucccagauauguuaagcaaaacacucugaaauuggcaacaggaaugagaaauguaccagagaaacaaacuagaggcauauuuggcgcaauagcggguuucauagaaaaugguugggagggaaugguggaugguugguacgguuucaggcaucaaaauucugagggaaggggacaagcagcagaucucaaaagcacucaagcagcaaucgaucaaaucaaugggaagcugaauagauugaucgggaaaaccaacgagaaauuccaucagauugaaaaagaauucucagaagucgaagggagaauucaggaccuugagaaauauguugaggacacuaaaauagaucucuggucauacaacgcggagcuucuuguugcccuggagaaccaacacacaauugaucuaacugacucagaaaugaauaaacuguuugaaaaaacaaagaagcaacugagggaaaaugcugaggauaugggcaaugguuguuucaaaauauaccacaaaugugacaaugccugcauaggaucaaucagaaauggaacuuaugaccacgauguguacagagaugaagcauuaaacaaccgauuccagaucaagggaguugagcugaagucaggguacaaagauuggauccuauggauuuccuuugccauaucauguuuuuugcuuuguguugcuuuguugggguucaucaugugggccugccaaaaaggcaacauuaggugcaacauuugcauuuga

SEQ ID NO: 42715 - RNA, 1701 nt, Artificial Sequence
  derived and/or modified CDS sequence (wt) from hemagglutinin__InfluenzaA__AHC59653
augaagacuaucauugcuuugagcuacauucuaugucugguuuucgcucaaaaacuuccuggaaaugacaacagcacggcaacgcugugccuugggcaccaugcagugccaaacggaacgauagugaaaacaaucacgaaugaccaaauugaaguuacuaaugcuacugagcugguucagaguuccucaacaggugaaauaugcaacaguccucaucagauccuugauggagaaaacugcacacuaauagaugcucuauugggagacccucagugugauggcuuccaaaacaagaaaugggaccuuuuuguugaacgaagcaaagcccacagcaacuguuacccuuaugaugugccggauuaugccucccuuaggucacuaguugccucauccggcacacuggaguuuaacaaugaaagcuucaauuggacuggagucacucaaaacggaacaagcucugcuugcauaaggagaucuaauaauaguuucuuuaguagauugaauugguugacccacuuaaacuucaaauacccagcauugaacgugacuaugccaaacaaugaacaauuugacaaauuguacauuugggggguucaccacccggguacggacaaggaccaaaucuuccuguaugcucaagcaucaggaagaaucacaguaucuacccaaagaagccaacaagcuguaauuccgaauaucggaucuagacccagaguaaggaauaucccuagcagaguaagcaucuauuggacaauaguaaaaccgggagacauacuuuugauuaacagcacagggaaucuaauugcuccuagggguuacuucaaaauacgaagugggaaaagcucaauaaugagaucagaugcacccauuggcaaaugcaauucugcaugcaucacuccaaauggaagcauucccaaugacaaaccauuccaaaauguaaacaggaucacauacggggccugucccagauauguuaagcaaaacacucugaaauuggcaacaggaaugagaaauguaccagagaaacaaacuagaggcauauuuggcgcaauagcggguuucauagaaaaugguugggagggaaugguggaugguugguacgguuucaggcaucaaaauucugagggaaggggacaagcagcagaucucaaaagcacucaagcagcaaucgaucaaaucaaugggaagcugaauagauugaucgggaaaaccaacgagaaauuccaucagauugaaaaagaauucucagaagucgaagggagaauucaggaccuugagaaauauguugaggacacuaaaauagaucucuggucauacaacgcggagcuucuuguugcccuggagaaccaacacacaauugaucuaacugacucagaaaugaacaaacuguuugaaaaaacaaagaagcaacugagggaaaaugcugaggauaugggcaaugguuguuucaaaauauaccacaaaugugacaaugccugcauaggaucaaucagaaauggaacuuaugaccacgauguguacagagaugaagcauuaaacaaccgauuccagaucaagggaguugagcugaagucaggguacaaagauuggauccuauggauuuccuuugccauaucauguuuuuugcuuuguguugcuuuguugggguucaucaugugggccugccaaaaaggcaacauuaggugcaacauuugcauuuga

SEQ ID NO: 42716 - RNA, 1701 nt, Artificial Sequence; identical to SEQ ID NO: 42703
  derived and/or modified CDS sequence (wt) from hemagglutinin__InfluenzaA__AHC59665

SEQ ID NO: 42717 - RNA, 1701 nt, Artificial Sequence; identical to SEQ ID NO: 42627
  derived and/or modified CDS sequence (wt) from hemagglutinin__InfluenzaA__AHC59677

SEQ ID NO: 42718 - RNA, 1701 nt, Artificial Sequence
  derived and/or modified CDS sequence (wt) from hemagglutinin__InfluenzaA__AHC59689
augaagacuaucauugcuuugagcuacauucuaugucugguuuucgcucaaaaacuuccuggaaaugacaacagcacggcaacgcugugccuugggcaccaugcagugccaaacggaacgauagugaaaacaaucacgaaugaccaaauugaaguuacuaaugcuacugagcugguucagaguuccucaacaggugaaauaugcaacaguccucaucagauccuugauggagaaaacugcacacuaauagaugcucuauugggagacccucagugugauggcuuccaaaacaagaaaugggaccuuuuuguugaacgaagcaaagcccacagcaacuguuacccuuaugaugugccggauuaugccucccuuaggucacuaguugccucauccggcacacuggaguuuaacaaugaaagcuucaauuggacuggagucacucaaaacggaacaagcucugcuugcauaaggagaucuaauaauaguuucuuuaguagauuaaauugguugacccacuuaaacuucaaauacccagcauugaacgugacuaugccaaacaaugaacaauuugacaaauuguacauuugggggguucaccacccggguacggacaaggaccaaaucuuccuguaugcucaagcaucaggaagaaucacaguaucuacccaaagaagccaacaagcuguaauuccgaauaucggaucuagacccagaguaaggaauaucccuagcagaguaagcaucuauuggacaauaguaaaaccgggagacauacuuuugauuaacagcacagggaaucuaauugcuccuagggguuacuucaaaauacgaagugggaaaagcucaauaaugagaucagaugcacccauuggcaaaugcaauucugcaugcaucacuccaaauggaagcauucccaaugacaaaccauuccaaaauguaaacaggaucacauacggggccugucccagauauguuaagcaaaacacucugaaauuggcaacaggaaugagaaauguaccagagaaacaaacuagaggcauauuuggcgcaauagcggguuucauagaaaaugguugggagggaaugguggaugguugguacgguuucaggcaucaaaauucugagggaaggggacaagcagcagaucucaaaagcacucaagcagcaaucgaucaaaucaaugggaagcugaauagauugaucgggaaaaccaacgagaaauuccaucagauugaaaaagaauucucagaagucgaagggagaauucaggaccuugagaaauauguugaggacacuaaaauagaucucuggucauacaacgcggagcuucuuguugcccuggagaaccaacacacaauugaucuaacugacucagaaaugaacaaacuguuugaaaaaacaaagaagcaacugagggaaaaugcugaggauaugggcaaugguuguuucaaaauauaccacaaaugugacaaugccugcauaggaucaaucagaaauggaacuuaugaccacgauguguacagagaugaagcauuaaacaaccgauuccagaucaagggaguugagcugaagucaggguacaaagauuggauccuauggauuuccuuugccauaucauguuuuuugcuuuguguugcuuuguugggguucaucaugugggccugccaaaaaggcaacauuaggugcaacauuugcauuuga

SEQ ID NO: 42719 - RNA, 1701 nt, Artificial Sequence; identical to SEQ ID NO: 42666
  derived and/or modified CDS sequence (wt) from hemagglutinin__InfluenzaA__AHC59701

SEQ ID NO: 42720 - RNA, 1701 nt, Artificial Sequence; identical to SEQ ID NO: 42657
  derived and/or modified CDS sequence (wt) from hemagglutinin__InfluenzaA__AHC59713

SEQ ID NO: 42721 - RNA, 1701 nt, Artificial Sequence
  derived and/or modified CDS sequence (wt) from hemagglutinin__InfluenzaA__AHC59737
augaagacuaucauugcuuugagcuacauucuaugucugguuuucgcucaaaaacuuccuggaaaugacaacagcacggcaacgcugugccuugggcaccaugcaguaccaaacggaacgauagugaaaacaaucacgaaugaccaaauugaagucacuaaugcuacugagcugguucagaauuccucaacaggugaaauaugcgacaguccucaucagaucauugauggagaaaacugcacacuaauagaugcucuauugggagacccucagugugauggcuuccaaaauaagaaaugggaccuuuuuguugaacgaagcaaagccuacagcaacuguuacccuuaugaugugccggauuaugccucccuuaggucacuaguugccucauccggcacacuggaguuuaacaaugaaagcuucaauuggacuggagucacucaaaacggaacaagcucugcuugcauaaggagaucuaauaauaguuucuuuaguagauugaauugguugacccacuuaaacuucaaauacccagcauugaacgugacuaugccaaacaaugaacaauuugacaaguuguacauuugggggguucaccacccggguacggacaaggaccaaaucuuccuguaugcucaagcaucaggaagaaucacaguaucuaccaaaagaagccaacaagcuguaaucccgaauaucggaucuagacccagaguaaggaauaucccuagcagaauaagcaucuauuggacaauaguaaaaccgggagacauacuuuugauuaacagcacagggaaucuaauugcuccuagggguuacuucaaaauacgaagugggaaaagcucaauaaugagaucagaugcacccauuggcaaaugcaauucugaaugcaucacuccaaauggaagcauucccaaugacaaaccauuccaaaauguaaacaggaucacauacggggccugucccagauauguuaagcaaaacacucugaaauuggcaacaggaaugcgaaauguaccagagaaacaaacuagaggcauauuuggcgcaauagcggguuucauagaaaaugguugggagggaaugguggaugguugguacgguuucaggcaucaaaauucugagggaagaggacaagcagcagaucucaaaagcacucaagcagcaaucgaucaaaucaaugggaagcugaauagauugaucgggaaaaccaacgagaaauuccaucagauugaaaaagaauucucagaagucgaagggagaauucaggaccuugagaaauauguugaggacacuaaaauagaucucuggucauacaacgcggagcuucuuguugcccuggagaaccaacauacaauugaucuaacugacucagaaaugaacaaacuguuugaaaaaacaaagaagcaacugagggaaaaugcugaggauaugggcaaugguuguuucaaaauauaccacaaaugugacaaugccugcauaggaucaaucagaaauggaacuuaugaccacgauguauacagagaugaagcauuaaacaaccgguuccagaucaagggaguugagcugaagucaggguacaaagauuggauccuauggauuuccuuugccauaucauguuuuuugcuuuguguugcuuuguugggguucaucaugugggccugccaaaaaggcaacauuaggugcaacauuugcauuuga

SEQ ID NO: 42722 - RNA, 1701 nt, Artificial Sequence
  derived and/or modified CDS sequence (wt) from hemagglutinin__InfluenzaA__AHC59749
augaagacuaucauugcuuugagcuacauucuaugucugguuuucgcucaaaaacuuccuggaaaugacaacagcacggcaacgcugugccuugggcaccaugcagugccaaacggaacgauagugaaaacaaucacgaaugaccaaauugaaguuacuaaugcuacugagcugguucagaguuccucaacaggugaaauaugcaacaguccucaucagauccuugauggagaaaacugcacacuaauagaugcucuauugggagacccucagugugauggcuuccaaaacaagaaaugggaccuuuuuguugaacgaagcaaagcccacagcaacuguuacccuuaugaugugccggauuaugccucccuuaggucacuaguugccucauccggcacacuggaguuuaacaaugaaagcuucaauuggacuggagucacucaaaacggaacaagcucugcuugcauaaggagaucuaauaauaguuucuuuagcagauugaauugguuaacccacuuaaacuucaaauacccagcauugaacgugacuaugccaaacaaugaacaauuugacaaauuguacauuugggggguucaccacccggguacggacaaggaccaaaucuuccuguaugcucaagcagcaggaagaaucacaguaucuaccaaaagaagccaacaagcuguaauuccgaauaucggaucuagacccagaguaaggaauaucccuagcagaguaagcaucuauuggacaauaguaaaaccgggagacauacuuuugauuaacagcacagggaaucuaauugcuccuagggguuacuucaaaauacgaagugggaaaagcucaauaaugagaucagaugcacccauuggcaaaugcaauucugcaugcaucacuccaaauggaagcauucccaaugacaaaccauuccaaaauguaaacaggaucacauacggggccugucccagauauguuaagcaaaacacucugaaauuggcaacaggaaugagaaauguaccagagaaacaaacuagaggcauauuuggcgcaauagcugguuucauagaaaaugguugggagggaaugguggaugguugguacgguuucaggcaucaaaauucugagggaaggggacaagcagcagaucucaaaagcacucaagcagcaaucgaucaaaucaaugggaagcugaauagauugaucgggaaaaccaacgagaaauuccaucagauugaaaaagaauucucagaagucgaagggagaauucaggaccuugagaaauauguugaggacacuaaaauagaucucuggucauacaacgcggagcuucuuguugcccuggagaaccaacacacaauugaucuaacugacucagaaaugaacaaacuguuugaaaaaacaaagaagcaacugagggaaaaugcugaggauaugggcaaugguuguuucaaaauauaccacaaaugugacaaugccugcauaggaucaaucagaaauggaacuuaugaccacgauguguacagagaugaagcauuaaacaaccgauuccagaucaagggaguugagcugaagucaggguacaaagauuggauccuauggauuuccuuugccauaucauguuuuuugcuuuguguugcuuuguugggguucaucaugugggccugccaaaaaggcaacauuaggugcaacauuugcauuuga

SEQ ID NO: 42723 - RNA, 1701 nt, Artificial Sequence
  derived and/or modified CDS sequence (wt) from hemagglutinin__InfluenzaA__AHC59761
augaagacuaucauugcuuugagcuacauucuaugucugguuuucgcucaaaaacuuccuggaaaugacaacagcacggcaacgcugugccuugggcaccaugcagugccaaacggaacgauagugaaaacaaucacgaaugaccaaauugaaguuacuaaugcuacugagcugguucaaaguuccucaacaggugaaauaugcaacaguccucaucagauccuugauggagaaaacugcacacuaauagaugcucuauugggagacccucagugugauggcuuccaaaacaagaaaugggaccuuuuuguugaacgaagcaaagcccacagcaacuguuacccuuaugaugugccggauuaugccucccuuaggucacuaguugccucauccggcacacuggaguuuaacaaugaaagcuucaauuggacuggagucacucaaaacggaacaagcucugcuugcauaaggagaucuaauaauaguuucuuuaguagauugaauugguugacccacuuaaacuucaaauacccagcauugaacgugacuaugccaaacaaugaacaauuugacaaauuguacauuugggggguucaccacccggguacggacaaggaccaaaucuuccuguaugcucaagcaucaggaagaaucacaguaucuaccaaaagaagccaacaagcuguaauuccgaauaucggaucuagacccagaguaaggaauaucccuagcagaguaagcaucuauuggacaauaguaaaaccgggagacauacuuuugauuaacagcacagggaaucuaauugcuccuagggguuacuucaaaauacgaagugggaaaagcucaauaaugagaucagaugcacccauuggcaaaugcaauucugcaugcaucacuccaaauggaagcauucccaaugacaaaccauuccaaaauguaaacaggaucacauacggggccugucccagauauguuaagcaaaacacucugaaauuggcaacaggaaugagaaauguaccagagaaacaaacuagaggcauauuuggcgcaauagcggguuucauagaaaauggcugggagggaaugguggaugguugguacgguuucaggcaucaaaauucugagggaaggggacaagcagcagaucucaaaagcacucaagcagcaaucgaucaaaucaaugggaagcugaauagauugaucgggaaaaccaacgagaaauuccaucagauugaaaaagaauuuucagaagucgaagggagaauucaggaccuugagaaauauguugaggacacuaaaauagaucucuggucauacaacgcggagcuucuuguugcccuggagaaccaacacacaauugaucuaacugacucagaaaugaacaaacuguuugaaaaaacaaagaagcaacugagggaaaaugcugaggauaugggcaaugguuguuucaaaauauaucacaaaugugacaaugccugcauaggaucaaucagaaauggaacuuaugaccacgauguguacagagaugaagcauuaaacaaccgauuccagaucaagggaguugagcugaagucaggguacaaagauuggauccuauggauuuccuuugccauaucauguuuuuugcuuuguguugcuuuguugggguucaucaugugggccugccaaaaaggcaacauuaggugcaacauuugcauuuga

SEQ ID NO: 42724 - RNA, 1701 nt, Artificial Sequence
  derived and/or modified CDS sequence (wt) from hemagglutinin__InfluenzaA__AHC59773
augaagacuaucauugcuuugagcuacauucuaugucugguuuucgcucaaaaacuuccuggaaaugacaacagcacggcaacgcugugccuugggcaccaugcagugccaaacggaacgauagugaaaacaaucacgaaugaccaaauugaaguuacuaaugcuacugagcugguucaaaguuccucaacaggugaaauaugcaacaguccucaucagauccuugauggagaaaacugcacacuaauagaugcucuauugggagacccucagugugauggcuuccaaaacaagaaaugggaccuuuuuguugaacgaagcaaagcccacagcaacuguuacccuuaugaugugccggauuaugccucccuuaggucacuaguugccucauccggcacacuggaguuuaacaaugaaagcuucaauuggacuggagucacucaaaacggaacaagcucugcuugcauaaggagaucuaauaauaguuucuuuaguagauugaauugguugacccacuuaaacuucaaauacccagcauugaacgugacuaugccaaacaaugaacaauuugacaaauuguacauuugggggguucaccacccggguacggacaaggaccaaaucuuccuguaugcucaagcaucaggaagaaucacaguaucuaccaaaagaagccaacaagcuguaauuccgaauaucggaucuagacccagaguaaggaauaucccuagcagaguaagcaucuauuggacaauaguaaaaccgggagacauacuuuugauuaacagcacagggaaucuaauugcuccuagggguuacuucaaaauacgaagugggaaaagcucaauaaugagaucagaugcacccauuggcaaaugcaauucugcaugcaucacuccaaauggaagcauucccaaugacaaaccauuccaaaauguaaacaggaucacauacggggccugucccagauauguuaagcaaaacacucugaaauuggcaacaggaaugagaaauguaccagagaaacaaacuagaggcauauuuggcgcaauagcggguuucauagaaaauggcugggagggaaugguggaugguugguacgguuucaggcaucaaaauucugagggaaggggacaagcagcagaucucaaaagcacucaagcagcaaucgaucaaaucaaugggaagcugaauagauugaucgggaaaaccaacgagaaauuccaucagauugaaaaagaauucucagaagucgaagggagaauucaggaccuugagaaauauguugaggacacuaaaauagaucucuggucauacaacgcggagcuucuuguugcccuggagaaccaacacacaauugaucuaacugacucagaaaugaacaaacuguuugaaaaaacaaagaagcaacugagggaaaaugcugaggauaugggcaaugguuguuucaaaauauaucacaaaugugacaaugccugcauaggaucaaucagaaauggaacuuaugaccacgauguguacagagaugaagcauuaaacaaccgauuccagaucaagggaguugagcugaagucaggguacaaagauuggauccuauggauuuccuuugccauaucauguuuuuugcuuuguguugcuuuguugggguucaucaugugggccugccaaaaaggcaacauuaggugcaacauuugcauuuga

SEQ ID NO: 42725 - RNA, 1701 nt, Artificial Sequence; identical to SEQ ID NO: 40264
  derived and/or modified CDS sequence (wt) from hemagglutinin__InfluenzaA__AHC59785

SEQ ID NO: 42726 - RNA, 1701 nt, Artificial Sequence; identical to SEQ ID NO: 42627
  derived and/or modified CDS sequence (wt) from hemagglutinin__InfluenzaA__AHC59797

SEQ ID NO: 42727 - RNA, 1701 nt, Artificial Sequence; identical to SEQ ID NO: 42632
  derived and/or modified CDS sequence (wt) from hemagglutinin__InfluenzaA__AHC59809

SEQ ID NO: 42728 - RNA, 1701 nt, Artificial Sequence
  derived and/or modified CDS sequence (wt) from hemagglutinin__InfluenzaA__AHC59821
augaagacuaucauugcuuugagcuacauucuaugucugguuuucgcucaaaaacuuccuggaaaugacaacagcacggcaacgcugugccuugggcaccaugcaguaccaaacggaacgauagugaaaacaaucacgaaugaccaaauugaaguuacuaaugcuacugagcugguucagaauucaucaacaggugaaauaugcgacaguccucaucagauccuugauggagaaaacugcacacuaauagaugcucuauugggagacccucagugugauggccuccaaaauaagaaaugggaccuuuuuguugaacgaagcaaagccuacagcaacuguuacccuuaugaugugccggauuaugccucccuuaggucacuaguugccucauccggcacacuggaguuuaacaaugaaagcuucaauuggacuggagucacucaaaacggaacaagcucugcuugcauaaggagaucuaauaauaguuucuuuaguagauugaauugguugacccacuuaaacuucaaauacccagcauugaacgugacuaugccaaacaaugaacaauuugacaaauuguacauuugggggguucaccacccggguacggacaaggaccaaaucuuccuguaugcucaagcaucaggaagaaucacaguaucuaccaaaagaagccaacaagcuguaaucccgaauaucggaucuagacccagaguaaggaauaucccuagcagaauaagcaucuauuggacaauaguaaaaccgggagacauacuuuugauuaacagcacagggaaucuaauugcuccuagggguuacuucaaaauacgaagugggaaaagcucaauaaugagaucagaugcacccauuggcaaaugcaauucugaaugcaucacuccaaauggaagcauucccaaugacaaaccauuccaaaauguaaacaggaucacauacggggccugucccagauauguuaagcaaaacacucugaaauuggcaacaggaaugcgaaauguaccagagaaacaaacuagaggcauauuuggcgcaauagcggguuucauagaaaaugguugggagggaaugguggaugguugguacgguuucaggcaucaaaauucugagggaagaggacaagcagcagaucucaaaagcacucaagcagcaaucgaucaaaucaaugggaagcugaacagauugaucgggaaaaccaacgagaaauuccaucagauugaaaaagaauucucagaagucgaagggagaauucaggaccuugagaaauauguugaggacacuaaaauagaucucuggucauacaacgcggagcuucuuguugcccuggagaaccaacauacaaucgaucuaacugacucagaaaugaacaaacugguugaaaaaacaaagaagcaacugagggaaaaugcugaggauaugggcaaugguuguuucaaaauauaccacaaaugugacaaugccugcauaggaucaaucagaaauggaacuuaugaccacgauguauacagagaugaagcauuaaacaaccgguuccagaucaagggaguugagcugaagucaggguacaaagauuggauccuauggauuuccuuugccauaucauguuuuuugcuuuguguugcuuuguugggguucaucaugugggccugccaaaaaggcaacauuaggugcaacauuugcauuuga

SEQ ID NO: 42729 - RNA, 1701 nt, Artificial Sequence; identical to SEQ ID NO: 42714
  derived and/or modified CDS sequence (wt) from hemagglutinin__InfluenzaA__AHC59833

SEQ ID NO: 42730 - RNA, 1701 nt, Artificial Sequence
  derived and/or modified CDS sequence (wt) from hemagglutinin__InfluenzaA__AHC59845
augaagacuaucauugcuuugagcuacauucuaugucugguuuucgcucaaaaacuuccuggaaaugacaacagcacggcaacgcugugccuugggcaccaugcaguaccaaacggaacgauagugaaaacaaucacgaaugaccaaauugaaguuacuaaugcuacugagcugguucaaaguuccucaacaggugaaauaugcgacaguccucaucagauccuugauggagaaaacugcacacuaauagaugcucuauugggagacccucagugugauggcuuccaaaauaagaagugggaccuuuuuguugaacgaagcaaagccuacagcaacuguuacccuuaugaugugccggauuaugccucccuuaggucacuaguugccucauccggcacacuggaguuuaacaaugaaagcuucaauuggacuggagucacucaaaacggaacaagcucugcuugcauaaggagaucuaauaguaguuucuuuaguagauugaauugguugacccacuuaaacuucaaauacccagcauugaacgugacuaugccaaacaaugaacaauuugacaaauuguacauuugggggguucaccacccggguacggacaaggaccaaaucuuccuguaugcucaaucuucaggaagaaucacaguaucuaccaaaagaagccaacaagcuguaaccccgaauaucggaucuagacccagaauaaggaauaucccuagcagaauaagcaucuauuggacaauaguaaaaccgggagacauacuuuugauuaacagcacagggaaucuaauugcuccuagggguuacuucaaaauacgaagugggaaaagcucaauaaugagaucagaugcacccauuggcaaaugcaauucugaaugcaucacuccaaaugggagcauucccaaugacaaaccauuccaaaauguaaacaggaucacauacggggccugucccagauauguuaagcaaagcacucugaaauuggcaacaggaaugcgaaauguaccagagaaacaaacuagaggcauauuuggcgcaauagcggguuucauagaaaaugguugggagggaaugguggaugguugguacgguuucaggcaucaaaauucugagggaagaggacaagcagcagaucucaaaagcacucaagcagcaaucgaucaaaucaaugggaagcugaaucgauugaucgggaaaaccaacgagaaauuccaucagauugaaaaagaauucucagaagucgaagggagaauucaggaccuugagaaauauguugaggacacuaaaauagaucucuggucauacaacgcggagcuucuuguugcccuggagaaccaacauacaauugaucuaacugacucagaaaugaacaaacuguuugaaaaaacaaagaagcaacugagggaaaaugcugaggauaugggcaaugguuguuucaaaauauaccacaaaugugacaaugccugcauaggaucaaucagaaauggaacuuauaaccacgauguauacagagaugaagcauuaaacaaccgguuccagaucaagggaguugagcugaagucaggguacaaagauuggauccuauggauuuccuuugccauaucauguuuuuugcuuuguguugcuuuguugggguucaucaugugggccugccaaaagggcaacauuaggugcaacauuugcauuuga

SEQ ID NO: 42731 - RNA, 1701 nt, Artificial Sequence; identical to SEQ ID NO: 42605
  derived and/or modified CDS sequence (wt) from hemagglutinin__InfluenzaA__AHC59857

SEQ ID NO: 42732 - RNA, 1701 nt, Artificial Sequence; identical to SEQ ID NO: 42634
  derived and/or modified CDS sequence (wt) from hemagglutinin__InfluenzaA__AHC59869

SEQ ID NO: 42733 - RNA, 1701 nt, Artificial Sequence; identical to SEQ ID NO: 42607
  derived and/or modified CDS sequence (wt) from hemagglutinin__InfluenzaA__AHC59881

SEQ ID NO: 42734 - RNA, 1701 nt, Artificial Sequence; identical to SEQ ID NO: 40369
  derived and/or modified CDS sequence (wt) from hemagglutinin__InfluenzaA__AHC59892

SEQ ID NO: 42735 - RNA, 1701 nt, Artificial Sequence
  derived and/or modified CDS sequence (wt) from hemagglutinin__InfluenzaA__AHC59904
augaagacuaucauugcuuugagcuacauucuaugucugguuuucgcucaaaaacuuccugggaaugacaacagcacggcaacgcugugccuugggcaccaugcagugccaaacggaacgauagugaaaacaaucacgaaugaccaaauugaaguuacuaaugcuacugaacugguucagaguuccucaacaggugaaauaugcaacaguccucaucagauccuugauggagaaaacugcacacuaauagaugcucuauugggagacccucagugugauggcuuccaaaacaagaaaugggaccuuuuuguugaacgaagcaaagcccacagcaacuguuacccuuaugaugugccggauuaugccucccuuaggucacuaguugccucauccggcacacuggaguuuaacaaugaaagcuucaauuggacuggagucacucaaaacggaacaagcucugcuugcauaaggggaucuaauaauaguuucuuuaguagauugaauugguugacccacuuaaacuucaaauacccagcauugaacgugacuaugccaaacaaugaacaauuugacaaauuguacauuugggggguucaccacccggguacggacaaggaccaaaucuuccuguaugcucaagcaucaggaagaaucacaguaucuaccaaaagaagccaacaagcuguaauuccgaauaucggaucuagacccagaguaaggaauaucccuagcagaguaagcaucuauuggacaauaguaaaaccgggagacauacuuuugauuaacagcacagggaaucuaauugcuccuagggguuacuucaaaauacgaagugggaaaagcucaauaaugagaucagaugcacccauuggcaaaugcaauucugcaugcaucacuccaaauggaagcauucccaaugacaaaccauuccaaaauguaaacaggaucacauacggggccugucccagauauguuaagcaaaacacuuugaaauuggcaacaggaaugagaaauguaccagagaaacaaacuagaggcauauuuggcgcaauagcggguuucauagaaaaugguugggagggaaugauggaugguugguacgguuucaggcaucaaaauucugagggaaggggacaagcagcagaucucaaaagcacucaagcagcaaucgaucaaaucaaugggaagcugaauagauugaucgggaaaaccaacgagaaauuccaucagauugaaaaagaauucucagaagucgaagggagaauucaggaccuugagaaauauguugaggacacuaaaauagaucucuggucauacaacgcggagcuucuuguugcccuggagaaccaacacacaauugaucuaacugacucagaaaugaacaaacuguuugaaaaaacaaagaagcaacugagggaaaaugcugaggauaugggcaaugguuguuucaaaauauaccacaaaugugacaaugccugcauaggaucaaucagaaauggaacuuaugaccacgauguguacagagaugaagcauuaaacaaccgauuccagaucaaaggaguugagcugaagucaggguacaaagauuggauccuauggauuuccuuugccauaucauguuuuuugcuuuguguugcuuuguugggguucaucaugugggccugccaaaaaggcaacauuaggugcaacauuugcauuuga

SEQ ID NO: 42736 - RNA, 1701 nt, Artificial Sequence
  derived and/or modified CDS sequence (wt) from hemagglutinin__InfluenzaA__AHC59915
augaagacugucauugcuuugagcuacauucuaugucuggcuuucgcucaaaaacuuccuggaaaugacaacagcacggcaacgcugugccuugggcaccaugcaguaccaaacggaacgauagugaaaacaaucacgaaugaccaaauugaaguuacuaaugcuacugagcugguucagaguuccucaacaggugaaauaugcgacaguccucaucagauccuugauggagaaaacugcacacuaauagaugcucuauugggagacccucagugugauggcuuccaaaauaagaaaugggaccuuuuuguugaacgaagcaaagccuacagcaacuguuacccuuaugaugugccggauuaugccucccuuaggucacuaguugccucauccggcacacuggaguuuaacaaugaaagcuucaauuggacuggagucacucaaaacggaacaagcucugcuugcauaaggagaucuaauaauaguuucuuuaguagauugaauugguugacccacuuaaacuucaaauacccagcauugaacgugacuaugccaaacaaugaacaauuugacaaauuguacauuugggggguucaccacccggguacugacaaggaccaaaucuuccuguaugcucaagcaucaggaagaaucacaguaucuaccaaaagaagccaacaagcuguaaucccgaauaucggaucuagacccagaguaaggaauaucccuagcagaauaagcaucuauuggacaauaguaaaaccgggagacauacuuuugauuaacagcacagggaaucuaauugcuccuagggguuacuucaaaauacgaagugggaaaagcucaauaaugagaucagaugcacccauuggcaaaugcaauucugaaugcaucacuccaaauggaagcauucccaaugacaaaccauuccaaaauguaaacaggaucacauacggggccugucccagauauguuaagcaaaacacucugaaauuggcaacaggaaugcgaaauguaccagagaaacaaacuagaggcauauuuggcgcaauagcggguuucauagaaaaugguugggagggaaugguggaugguugguacgguuucaggcaucaaaauucugagggaagaggacaagcagcagaucucaaaagcacucaagcagcaaucgaucaaaucaaugggaagcugaauagauugaucgggaaaaccaacgagaaauuccaucagauugaaaaagaauucucagaagucgaagggagaauucaggaccuugagaaauauguugaggacacuaaaauagaucucuggucauacaacgcggagcuucuuguugcccuggagaaccaacauacaauugaucuaacugacucagaaaugaacaaacuguuugaaaaaacaaagaagcaacugagggaaaaugcugaggauaugggcaaugguuguuucaaaauauaccacaaaugugacaaugccugcauaggaucaaucagaaauggaacuuaugaccacgauguauacagagaugaagcauuaaacaaccgguuccagaucaagggaguugagcugaagucaggguacaaagauuggauccuauggauuuccuuugccauaucauguuuuuugcuuuguguugcuuuguugggguucaucaugugggccugccaaaaaggcaacauuaggugcaacauuugcauuuga

SEQ ID NO: 42737 - RNA, 1701 nt, Artificial Sequence
  derived and/or modified CDS sequence (wt) from hemagglutinin__InfluenzaA__AHC59939
augaagacuaucauugcuuugagcuacauucuaugucugguuuucgcucaaaaacuuccuggaaaugacaacagcacggcaacgcugugccuugggcaccaugcagugccaaacggaacgauagugaaaacaaucacgaaugaccaaauugaaguuacuaaugcuacugagcugguucagaguuccucaacaggugaaauaugcaacaguccucaucagauccuugauggagaaaacugcacacuaauagaugcucuauugggagacccucagugugauggcuuccaaaacaagaaaugggaccuuuuuguugaacgaagcaaagcccacagcaacuguuacccuuaugaugugccggauuaugccucccuuaggucacuaguugccucauccggcacacuggaguuuaacaaugaaagcuucaauuggacuggagucacucaaaacggaacaagcucugcuugcauaaggagaucuaauaauaguuucuuuaguagauugaauugguugacccacuuaaacuucaaauacccagcauugaacgugacuaugccaaacaaugaacaauuugacaaauuguacauuugggggguucaccacccggguacggacaaggaccaaaucuuccuguaugcucaagcaucaggaagaaucacaguaucuaccaaaagaagccaacaagcuguaauuccgaauaucggaucuagacccagaguaaggaauaucccuagcagaguaagcaucuauuggacaauaguaaaaccgggagacauacuuuugauuaacagcacagggaaucuaauugcuccuagggguuacuucaaaauacgaagugggaaaagcucaauaaugagaucagaugcacccauuggcaaaugcaauucugcaugcaucacuccaaauggaagcauucccaaugacaaaccauuccaaaauguaaacaggaucacauacggggccugucccagauauguuaagcaaaacacucugaaauuggcaacaggaaugagaaauguaccagagaaacaaacuagaggcauauuuggcgcaauagcggguuucauagaaaaugguugggagggaaugguggaugguugguacgguuucaggcaucaaaauucugagggaaggggacaagcagcagaucucaaaagcacucaagcagcaaucgaucaaaucaaugggaagcugaauagauugaucgggaaaaccaacgagaaauuccaucagauugaaaaagaauucucagaagucgaagggagaauucaggaccuugagaaauauguugaggacacuaaaauagaucucuggucauacaacgcggagcuucuuguugcccuggagaaccaacacacaauugaucuaacugacucagaaaugaacaaacuguuugaaaaaacaaagaagcaacugagggaaaaugcugaggauaugggcaaugguuguuucaaaauauaccacaaaugugacaaugccugcauaggaucaaucagaaauggaacuuaugaccacgauguguacagagaugaagcauuaaacaaccgauuccagaucaagggaguugagcugaagucaggguacaaagauuggaucuuauggauuuccuuugccauaucauguuuuuugcuuuguguugcuuuguugggguucaucaugugggccugccaaaaaggcaacauuaggugcaacauuugcauuuga

SEQ ID NO: 42738 - RNA, 1701 nt, Artificial Sequence
  derived and/or modified CDS sequence (wt) from hemagglutinin__InfluenzaA__AHC59963
augaagacuaucauugcuuugagcuacauucuaugucugguuuucgcucaaaaacuuccuggaaaugacaacagcacggcaacgcugugccuugggcaccaugcaguaccaaacggaacgauagugaaaacaaucacgaaugaccaaauugaaguuacuaaugcuacugagcugguucagaguuccucaacaggugaaauaugcgacaguccucaucagauccuugauggagaaaacugcacacuaauagaugcucuauugggagacccucagugugauggcuuccaaaauaagaagugggaccuuuuuguugaacgaagcaaagccuacagcaacuguuacccuuaugaugugccggauuaugccucccuuaggucacuaguugccucauccggcacacuggaguuuaacaaugaaagcuucaauuggacuggagucacucaaaacggaacaagcucugcuugcauaaggagaucuaauaguaguuucuuuaguagauugaauugguugacccacuuaaacuucaaauacccagcauugaacgugacuaugccaaacaaugaacaauuugacaaauuguacauuugggggguucaccacccggguacggacaaggaccaaaucuuccuguaugcucaaucaucaggaagaaucacaguaucuaccaaaagaagccaacaagcuguaaucccgaauaucggaucuagacccagaauaaggaauaucccuagcagaauaagcaucuauuggacaauaguaaaaccgggagacauacuuuugauuaacagcacagggaaucuaauugcuccuagggguuauuucaaaauacgaagugggaaaagcucaauaaugagaucagaugcacccauuggcaaaugcaauucugaaugcaucacuccaaauggaagcauucccaaugacaaaccauuccaaaauguaaacaggaucacauacggggccugucccagauauauuaagcaaagcacucugaaauuggcaacaggaaugcgaaauguaccagagaaacaaacuagaggcauauuuggcgcaauagcggguuucauagaaaaugguugggagggaaugguggaugguugguacgguuucaggcaucaaaauucugagggaagaggacaagcagcagaucucaaaagcacucaagcagcaauagaucaaaucaaugggaagcugaaucgauugaucgggaaaaccaacgagaaauuccaucagauugaaaaagaauucucagaagucgaagggagaauucaggaccuugagaaauauguugaggacacuaaaauagaucucuggucauacaacgcggagcuucuuguugcccuggagaaccaacauacaauugaucuaacugacucagaaaugaacaaacuguuugaaaaaacaaagaagcaacugagggaaaaugcugaggauaugggcaaugguuguuucaaaauauaccacaaaugugacaaugccugcauaggaucaaucagaaauggaacuuauaaccacgauguauacagagaugaagcauuaaacaaccgguuccagaucaagggaguugagcugaagucaggguacaaagauuggauccuauggauuuccuuugccauaucauguuuuuugcuuuguguugcuuuguugggguucaucaugugggccugccaaaagggcaacauuaggugcaacauuugcauuuga

SEQ ID NO: 42739 - RNA, 1701 nt, Artificial Sequence
  derived and/or modified CDS sequence (wt) from hemagglutinin__InfluenzaA__AHC59987
augaagacuaucauugcuuugagcuacauucuaugucugguuuucgcucaaaaacuuccuggaaaugacaacagcacggcaacgcugugccuugggcaccaugcagugccaaacggaacgauagugaaaacaaucacgaaugaccaaauugaaguuacuaaugcuacugagcugguucagaguuccucaacaggugaaauaugcaacaguccucaucagauccuugacggagaaaacugcacacuaauagaugcucuauugggagacccucagugugauggcuuccaaaacaagaaaugggaccuuuuuguugaacgaagcaaagcccacagcaacuguuacccuuaugaugugccggauuaugccucccuuaggucacuaguugccucauccggcacacuggaguuuaacaaugaaagcuucaauuggacuggagucacucaaaacggaacaagcucugcuugcauaaggagaucuaauaauaguuucuuuaguagauugaauugguugacccacuuaaacuucaaauacccagcauugaacgugacuaugccaaacaaugaacaauuugacaaauuguacauuugggggguucaccacccggguacggacaaggaccaaaucuuccuguaugcucaagcagcaggaagaaucacaguaucuaccaaaagaagccaacaagcuguaauuccgaauaucggaucuagacccagaguaaggaauaucccuagcagaguaagcaucuauuggacaauaguaaaaccgggagacauacuuuugauuaacagcacagggaaucuaauugcuccuagggguuacuucaaaauacgaagugggaaaagcucaauaaugagaucagaugcacccauuggcaaaugcaauucugcaugcaucacuccaaauggaagcauucccaaugacaaaccauuccaaaauguaaacaggaucacauacggggccugucccagauauguuaagcaaaacacucugaaauuggcaacaggaaugagaaauguaccagagaaacaaacuagaggcauauuuggcgcaauagcugguuucauagaaaaugguugggagggaaugguggaugguugguacgguuucaggcaucaaaauucugagggaaggggacaagcagcagaucucaaaagcacucaagcagcaaucgaucaaaucaaugggaagcugaauagauugaucgggaaaaccaacgagaaauuccaucagauugaaaaagaauucucagaagucgaagggagaauucaggaccuugagaaauauguugaggacacuaaaauagaucucuggucauacaacgcggagcuucuuguugcccuggagaaccaacacacaauugaucuaacugacucggaaaugaacaaacuguuugaaaaaacaaagaagcaacugagggaaaaugcugaggauaugggcaaugguuguuucaaaauauaccacaaaugugacaaugccugcauaggaucaaucagaaauggaacuuaugaccacgauguguacagagaugaagcauuaaacaaccgauuccagaucaagggaguugagcugaagucaggguacaaagauuggauccuauggauuuccuuugccauaucauguuuuuugcuuuguguugcuuuguugggguucaucaugugggccugccaaaaaggcaacauuaggugcaacauuugcauuuga

SEQ ID NO: 42740 - RNA, 1701 nt, Artificial Sequence; identical to SEQ ID NO: 42703
  derived and/or modified CDS sequence (wt) from hemagglutinin__InfluenzaA__AHC59999

SEQ ID NO: 42741 - RNA, 1701 nt, Artificial Sequence; identical to SEQ ID NO: 42608
  derived and/or modified CDS sequence (wt) from hemagglutinin__InfluenzaA__AHC60011

SEQ ID NO: 42742 - RNA, 1701 nt, Artificial Sequence
  derived and/or modified CDS sequence (wt) from hemagglutinin__InfluenzaA__AHC60023
augaagacuaucauugcuuugagcuacauucuaugucugguuuucgcucaaaaacuuccuggaaaugacaacagcacggcaacgcugugccuugggcaccaugcagugccaaacggaacgauagugaaaacaaucacgaaugaccaaauugaaguuacuaaugcuacugagcugguucagaguuccucaacaggugaaauaugcaacaguccucaucagauccuugauggagaaaacugcacacuaauagaugcucuauugggagacccucagugugauggcuuccaaaacaaaaaaugggaccuuuuuguugaacgaagcaaagcccacagcaacuguuacccuuaugaugugccggauuaugccucccuuaggucacuaguugccucauccggcacacuggaguuuaacaaugaaagcuucaauuggacuggagucacucaaaacggaacaagcucugcuugcauaaggagaucuaauaauaguuucuuuaguagauugaauugguugacccacuuaaacuucaaauacccagcauugaacgugacuaugccaaacaaugaacaauuugacaaauuguacauuugggggguucaccacccggguacggacaaggaccaaaucuuccuguaugcucaagcagcaggaagaaucacaguaucuaccaaaagaagccaacaagcuguaauuccgaauaucggaucuagacccagaguaaggaauaucccuagcagaguaagcaucuauuggacaauaguaaaaccgggagacauacuuuugauuaacagcacagggaaucuaauugcuccuagggguuacuucaaaauacgaagugggaaaagcucaauaaugagaucagaugcacccauuggcaaaugcaauucugcaugcaucacuccaaauggaagcauucccaaugacaaaccauuccaaaauguaaacaggaucacauacggggccugucccagauauguuaagcaaaacacucugaaauuggcaacaggaaugagaaauguaccagagaaacaaacuagaggcauauuuggcgcaauagcugguuucauagaaaaugguugggagggaaugguggaugguugguacgguuucaggcaucaaaauucugagggaaggggacaagcagcagaucucaaaagcacucaagcagcaaucgaucaaaucaaugggaagcugaauagauugaucgggaaaaccaacgagaaauuccaucagauugaaaaagaauucucagaagucgaagggagaauucaggaccuugagaaauauguugaggacacuaaaauagaucucuggucauacaacgcggagcuucuuguugcccuggagaaccaacacacaauugaucuaacugacucagaaaugaacaaacuguuugaaaaaacaaagaagcaacugagggaaaaugcugaggauaugggcaaugguuguuucaaaauauaccacaaaugugacaaugccugcauaggaucaaucagaaauggaacuuaugaccacgauguguacagagaugaagcauuaaacaaccgauuccagaucaagggaguugagcugaagucaggguacaaagauuggauccuauggauuuccuuugccauaucauguuuuuugcuuuguguugcuuuguugggguucaucaugugggccugccaaaaaggcaacauuaggugcaacauuugcauuuga

SEQ ID NO: 42743 - RNA, 1701 nt, Artificial Sequence; identical to SEQ ID NO: 40264
  derived and/or modified CDS sequence (wt) from hemagglutinin__InfluenzaA__AHC60035

SEQ ID NO: 42744 - RNA, 1701 nt, Artificial Sequence
  derived and/or modified CDS sequence (wt) from hemagglutinin__InfluenzaA__AHC60047
augaagacuaucauugcuuugagcuacauucuaugucugguuuucgcucaaaaacuuccuggaaaugacaacagcacggcaacgcugugccuugggcaccaugcaguaccaaauggaacgauagugaaaacaaucacgaaugaccaaauugaaguuacuaaugcuacugagcugguucagaauuccucaacaggugaaauaugcgacaguccucaucagauccuugauggagaaaacugcacacuaauagaugcucuauugggagacccucagugugauggcuuccaaaauaagaaaugggaccuuuuuguugaacgaagcaaagccuacagcaacuguuacccuuaugaugugccggauuaugccucccuuaggucacuaguugccucauccggcacacuggaguuuaacaaugaaagcuucaauuggacuggagucacucaaaacggaacaagcucugcuugcauaaggagaucuaauaauaguuucuuuaguagauugaauugguugacccacuuaaacuucaaauacccagcauugaacgugacuaugccaaacaaugaacaauuugacaaauuguacauuugggggguucaccacccggguacggacaaggaccaaaucuuccuguaugcucaagcaucaggaagaaucacaguaucuaccaaaagaagccaacaagcuguaaucccgaauaucggaucuagacccagaguaaggaauaucccuagcagaauaagcaucuauuggacaauaguaaaaccgggagacauacuuuugauuaacagcacagggaaucuaauugcuccuagggguuacuucaaaauacgaagugggaaaagcucaauaaugagaucagaugcacccauuggcaaaugcaauucugaaugcaucacuccaaauggaagcauucccaaugacaaaccauuccaaaauguaaacaggaucacauacggggccugucccagauauguuaagcaaaacacucugaaauuggcaacaggaaugcgaaauguaccagagaaacaaacuagaggcauauuuggcgcaauagcggguuucauagaaaaugguugggagggaaugguggaugguugguacgguuucaggcaucaaaauucugagggaagaggacaagcagcagaucucaaaagcacucaagcagcaaucgaucaaaucaaugggaagcugaauagauugaucgggaaaaccaacgagaaauuccaucagauugaaaaagaauucucagaagucgaagggagaauucaggaccuugagaaauauguugaggacacuaaaauagaucucuggucauacaacgcggagcuucuuguugcccuggagaaccaacauacaauugaucuaacugacucagaaaugaacaaacuguuugaaaaaacaaagaagcaacugagggaaaaugcugaggauaugggcaaugguuguuucaaaauauaccacaaaugugacaaugccugcauaggaucaaucagaaauggaacuuaugaccacgauguauacagagaugaagcauuaaacaaccgguuccagaucaagggaguugagcugaagucaggguacaaagauuggauccuauggauuuccuuugccauaucauguuuuuugcuuuguguugcuuuguugggguucaucaugugggccugccaaaaaggcaacauuaggugcaacauuugcauuuga

SEQ ID NO: 42745 - RNA, 1701 nt, Artificial Sequence
  derived and/or modified CDS sequence (wt) from hemagglutinin__InfluenzaA__AHC60059
augaagacuaucauugcuuugagcuacauucuaugucugguuuucgcucaaaaacuuccuggaaaugacaacagcacggcaacgcugugccuugggcaccaugcaguaccaaauggaacgauagugaaaacaaucacgaaugaccaaauugaaguuacuaaugcuacugagcugguucagaauuccucaacaggugaaauaugcgacaguccucaucagauccuugauggagaaaacugcacacuaauagaugcucuauugggagacccucagugugauggcuuccaaaauaagaaaugggaccuuuuuguugaacgaagcaaagccuacagcaacuguuacccuuaugaugugccggauuaugccucccuuaggucacuaguugccucauccggcacacuggaguuuaacaaugaaagcuucaauuggacuggagucacucaaaacggaacaagcucugcuugcauaaggagaucuaauaauaguuucuuuaguagauugaauugguugacccacuuaaacuucaaauacccagcauugaacgugacuaugccaaacaaugaacaauuugacaaauuguacauuugggggguucaccacccggguacggacaaggaccaaaucuuccuguaugcucaagcaucaggaagaaucacaguaucuaccaaaagaagccaacaagcuguaaucccgaauaucggaucuagacccagaguaaggaauaucccuagcagaauaagcaucuauuggacaauaguaaaaccgggagacauacuuuugauuaacagcacagggaaucuaauugcuccuagggguuacuucaaaauacgaagugggaaaagcucaauaaugagaucagaugcacccauuggcaaaugcaauucugcaugcaucacuccaaauggaagcauucccaaugacaaaccauuccaaaauguaaacaggaucacauacggggccugucccagauauguuaagcaaaacacucugaaauuggcaacaggaaugagaaauguaccagagaaacaaacuagaggcauauuuggcgcaauagcggguuucauagaaaaugguugggagggaaugguggaugguugguacgguuucaggcaucaaaauucugagggaaggggacaagcagcagaucucaaaagcacucaagcagcaaucgaucaaaucaaugggaagcugaauagauugaucgggaaaaccaacgagaaauuccaucagauugaaaaagaauucucagaagucgaagggagaauucaggaccuugagaaauauguugaggacacuaaaauagaucucuggucauacaacgcggagcuucuuguugcccuggagaaccaacacacaauugaucuaacugacucagaaaugaacaaacuguuugaaaaaacaaagaagcaacugagggaaaaugcugaggauaugggcaaugguuguuucaaaauauaccacaaaugugacaaugccugcauaggaucaaucagaaauggaacuuauaaccacgauguguacagagaugaagcauuaaacaaccgauuccagaucaagggaguugagcugaagucaggguacaaagauuggauccuauggauuuccuuugccauaucauguuuuuugcuuuguguugcuuuguugggguucaucaugugggccugccaaaaaggcaacauuaggugcaacauuugcauuuga

SEQ ID NO: 42746 - RNA, 1701 nt, Artificial Sequence
  derived and/or modified CDS sequence (wt) from hemagglutinin__InfluenzaA__AHC60071
augaagacuaucauugcuuugagcuacauucuaugucugguuuucgcucaaaaacuuccuggaaaugacaacagcacggcaacgcugugccuugggcaccaugcaguaccaaacggaacgauagugaaaacaaucacgaaugaccaaauugaaguuacuaaugcuacugagcugguucagaguuccucaacaggugaaauaugcgacaguccucaucagauccuugauggagaaaacugcacacuaauagaugcucuauugggagacccucagugugauggcuuccaaaauaagaagugggaccuuuuuguugaacgaagcaaagccuacagcaacuguuacccuuaugaugugccggauuaugccucccuuaggucacuaguugccucauccggcacacuggaguuuaacaaugaaagcuucaauuggacuggagucacucaaaacggaacaagcucugcuugcauaaggagaucuaauaguaguuucuuuaguagauugaauugguugacccacuuaaacuucaaauacccagcauugaacgugacuaugccaaacaaugaacaauuugacaaauuguacauuugggggguucaccacccggguacggacaaggaccaaaucuuccuguaugcucaaucuucaggaagaaucacaguaucuaccaaaagaagccaacaagcuguaaucccgaauaucggaucuagacccagaauaaggaauaucccuagcagaauaagcaucuauuggacaauaguaaaaccgggagacauacuuuugauuaacagcacagggaaucuaauugcuccuagggguuacuucaaaauacgaagugggaaaagcucaauaaugagaucagaugcacccauuggcaaaugcaauucugaaugcaucacuccaaaugggagcauucccaaugacaaaccauuccaaaauguaaacaggaucacauacggggccugucccagauauguuaagcaaagcacucugaaauuggcaacaggaaugcgaaauguaccagagaaacaaacuagaggcauauuuggcgcaauagcggguuucauagaaaaugguugggagggaaugguggaugguugguacgguuucaggcaucaaaauucugagggaagaggacaagcagcagaucucaaaagcacucaagcagcaaucgaucaaaucaaugggaagcugaaucgauugaucgggaaaaccaacgagaaauuccaucagauugaaaaagaauucucagaagucgaagggagaauucaggaccuugagaaauauguugaggacacuaaaauagaucucuggucauacaacgcggagcuucuuguugcccuggagaaccaacauacaauugaucuaacugacucagaaaugaacaaacuguuugaaaaaacaaagaagcaacugagggaaaaugcugaggauaugggcaaugguuguuucaaaauauaccacaaaugugacaaugccugcauaggaucaaucagaaauggaacuuauaaccacgauguauacagagaugaagcauuaaacaaccgguuccagaucaagggaguugagcugaagucaggguacaaagauuggauccuauggauuuccuuugccauaucauguuuuuugcuuuguguugcuuuguugggguucaucaugugggccugccaaaagggcaacauuaggugcaacauuugcauuuga

SEQ ID NO: 42747 - RNA, 1701 nt, Artificial Sequence; identical to SEQ ID NO: 42630
  derived and/or modified CDS sequence (wt) from hemagglutinin__InfluenzaA__AHC60083

SEQ ID NO: 42748 - RNA, 1701 nt, Artificial Sequence
  derived and/or modified CDS sequence (wt) from hemagglutinin__InfluenzaA__AHC60095
augaagacuaucauugcuuugagcuacauucuaugucugguuuucgcucaaaaacuuccuggaaaugacaacagcacggcaacgcugugccuugggcaccaugcaguaccaaacggaacgauagugaaaacaaucacgaaugaccaaauugaaguuacuaaugcuacugagcugguucagaauuccucaacaggugaaauaugcgacaguccucaucagauccuugauggagaaaacugcacacuaauagaugcucuauugggagacccucagugugauggcuuccaaaauaagaaaugggaccuuuuuguugaacgaagcaaagccuacagcaacuguuacccuuaugaugugccggauuaugccucccuuaggucacuaguugccucauccggcacacuggaguuuaacaaugaaagcuucaauuggacuggagucacucaaaacggaacaagcucugcuugcauaaggagaucuaauaauaguuucuuuaguagauugaauugguugacccacuuaaacuucaaauacccagcauugaacgugacuaugccaaacaaugaacaauuugacaaauuguacauuugggggguucaccacccggguacggacaaggaccaaaucuuccuguaugcucaagcaucaggaagaaucacaguaucuaccaaaagaagccaacaagcuguaaucccgaauaucggaucuagacccagaguaaggaauaucccuagcaggauaagcaucuauuggacaauaguaaaaccgggagacauacuuuugauuaacagcacagggaaucuaauugcuccuagggguuacuucaaaauacgaagugggaaaagcucaauaaugagaucagaugcacccauuggcaaaugcaauucugaaugcaucacuccaaauggaagcauucccaaugacaaaccauuccaaaauguaaacaggaucacauacggggccugucccagauauguuaagcaaaacacucugaaauuggcaacaggaaugcgaaauguaccagagaaacaaacuagaggcauauuuggcgcaauagcggguuucauagaaaaugguugggagggaaugguggaugguugguacgguuucaggcaucaaaauucugagggaagaggacaagcagcagaucucaaaagcacucaagcagcaaucgaucaaaucaaugggaagcugaauagauugaucgggaaaaccaacgagaaauuccaucagauugaaaaagaauucucagaagucgaagggagaauucaggaccuugagaaauauguugaggacacuaaaauagaucucuggucauacaacgcggagcuucuuguugcccuggagaaccaacauacaauugaucuaacugacucagaaaugaacaaacuguuugaaaaaacaaagaagcaacugagggaaaaugcugaggauaugggcaaugguuguuucaaaauauaccacaaaugugacaaugccugcauaggaucaaucagaaauggaacuuaugaccacgauguauacagagaugaagcauuaaacaaccgguuccagaucaagggaguugagcugaagucaggguacaaagauuggauccuauggauuuccuuugccauaucauguuuuuugcuuuguguugcuuuguugggguucaucaugugggccugccaaaaaggcaacauuaggugcaacauuugcauuuga

SEQ ID NO: 42749 - RNA, 1701 nt, Artificial Sequence
  derived and/or modified CDS sequence (wt) from hemagglutinin__InfluenzaA__AHC60107
augaagacuaucauugcuuugagcuacauucuaugucugguuuucgcucaaaaacuuccuggaaaugacaacagcacggcaacgcugugccuugggcaccaugcaguaccaaacggaacgauagugaaaacaaucacgaaugaccaaauugaaguuacuaaugcuacugagcugguucagaauuccucaacaggugaaauaugcgacaguccucaucagaucauugauggagaaaacugcacacuaauagaugcucuauugggagacccucagugugauggcuuccaaaauaagaaaugggaccuuuuuguugaacgaagcaaagccuacagcaacuguuacccuuaugaugugccggauuaugccucccuuaggucacuaguugccucauccggcacauuggaguuuaacaaugaaagcuucaauuggacuggagucacucaaaacggaacaagcucugcuugcauaaggagaucuaauaauaguuucuuuaguagauugaauugguugacccacuuaaacuucaaauacccagcauugaacgugacuaugccaaacaaugaacaauuugacaaguuguacauuugggggguucaccacccggguacggacaaggaccaaaucuuccuguaugcucaagcaucaggaagaaucacaguaucuaccaaaagaagccaacaagcuguaaucccgaauaucggaucuagacccagaguaaggaauaucccuagcagaauaagcaucuauuggacaauaguaaaaccgggagacauacuuuugauuaacagcacagggaaucuaauugcuccuagggguuacuucaaaauacgaagugggaaaagcucaauaaugagaucagaugcacccauuggcaaaugcaauucugaaugcaucacuccaaauggaagcauucccaaugacaaaccauuccaaaauguaaacaggaucacauacggggccugucccagauauguuaagcaaaacacucugaaauuggcaacaggaaugcgaaauguaccagagaaacaaacuagaggcauauuuggcgcaauagcggguuucauagaaaaugguugggagggaaugguggaugguugguacgguuucaggcaucaaaauucugagggaagaggacaagcagcagaucucaaaagcacucaagcagcaaucgaucaaaucaaugggaagcugaauagauugaucgggaaaaccaacgagaaauuccaucagauugaaaaagaauucucagaagucgaagggagaauucaggaccuugagaaauauguugaggacacuaaaauagaucucuggucauacaacgcggagcuucuuguugcccuggagaaccaacauacaauugaucuaacugacucagaaaugaacaaacuguuugaaaaaacaaagaagcaacugagggaaaaugcugaggauaugggcaaugguuguuucaaaauauaccacaaaugugacaaugccugcauaggaucaaucagaaauggaacuuaugaccacgauguauacagagaugaagcauuaaacaaccgguucaagaucaagggaguugagcugaagucaggguacaaagauuggauccuauggauuuccuuugccauaucauguuuuuugcuuuguguugcuuuguugggguucaucaugugggccugccaaaaaggcaacauuaggugcaacauuugcauuuga

SEQ ID NO: 42750 - RNA, 1701 nt, Artificial Sequence; identical to SEQ ID NO: 42627
  derived and/or modified CDS sequence (wt) from hemagglutinin__InfluenzaA__AHC60119

SEQ ID NO: 42751 - RNA, 1701 nt, Artificial Sequence; identical to SEQ ID NO: 42608
  derived and/or modified CDS sequence (wt) from hemagglutinin__InfluenzaA__AHC60131

SEQ ID NO: 42752 - RNA, 1701 nt, Artificial Sequence; identical to SEQ ID NO: 42660
  derived and/or modified CDS sequence (wt) from hemagglutinin__InfluenzaA__AHC60143

SEQ ID NO: 42753 - RNA, 1701 nt, Artificial Sequence
  derived and/or modified CDS sequence (wt) from hemagglutinin__InfluenzaA__AHC60155
augaagacugucauugcuuugagcuacauucuaugucuggcuuucgcucaaaaacuuccuggaaaugacaacagcacggcaacgcugugccuugggcaccaugcaguaccaaacggaacgauagugaaaacaaucacgaaugaccaaauugaaguuacuaaugcuacugagcugguucagaguuccccaacaggugaaauaugcgacaguccucaucagauccuugauggagaaaacugcacacuaauagaugcucuauugggagacccucagugugauggcuuccaaaauaagaaaugggaccuuuuuguugaacgaagcaaagccuacagcaacuguuacccuuaugaugugccggauuaugccucccuuaggucacuaguugccucauccggcacacuggaguuuaacaaugaaagcuucaauuggacuggagucacucaaaacggaacaagcucugcuugcauaaggagaucuaauaauaguuucuuuaguagauugaauugguugacccacuuaaacuucaaauacccagcauugaacgugacuaugccaaacaaugaacaauuugacaaauuguacauuugggggguucaccacccggguacugacaaggaccaaaucuuccuguaugcucaagcaucaggaagaaucacaguaucuaccaaaagaagccaacaagcuguaaucccgaauaucggaucuagacccagaguaaggaauaucccuagcagaauaagcaucuauuggacaauaguaaaaccgggagacauacuuuugauuaacagcacagggaaucuaauugcuccuagggguuacuucaaaauacgaagugggaaaagcucaauaaugagaucagaugcacccauuggcaaaugcaauucugaaugcaucacuccaaauggaagcauucccaaugacaaaccauuccaaaauguaaacaggaucacauacggggccugucccagauauguuaagcaaaacacucugaaauuggcaacaggaaugcgaaauguaccagagaaacaaacuagaggcauauuuggcgcaauagcggguuucauagaaaaugguugggagggaaugguggaugguugguacgguuucaggcaucaaaauucugagggaagaggacaagcagcagaucucaaaagcacucaagcagcaaucgaucaaaucaaugggaagcugaauagauugaucgggaaaaccaacgagaaauuccaucagauugaaaaagaauucucagaagucgaagggagaauucaggaccuugagaaauauguugaggacacuaaaauagaucucuggucauacaacgcggagcuucuuguugcccuggagaaccaacauacaauugaucuaacugacucagaaaugaacaaacuguuugaaaaaacaaagaagcaacugagggaaaaugcugaggauaugggcaaugguuguuucaaaauauaccacaaaugugacaaugccugcauaggaucaaucagaaauggaacuuaugaccacgauguauacagagaugaagcauuaaacaaccgguuccagaucaaggggguugagcugaagucaggguacaaagauuggauccuauggauuuccuuugccauaucauguuuuuugcuuuguguugcuuuguugggguucaucaugugggccugccaaaaaggcaacauuaggugcaacauuugcauuuga

SEQ ID NO: 42754 - RNA, 1701 nt, Artificial Sequence
  derived and/or modified CDS sequence (wt) from hemagglutinin__InfluenzaA__AHC60167
augaagacuaucauugcuuugagcuacauucuaugucugguuuucgcucaaaaacuuccuggaaaugacaacagcacggcaacgcugugccuugggcaccaugcagugccaaacggaacgauagugaaaacaaucacgaaugaccaaauugaaguuacuaaugcuacugagcugguucagaguuccucaacaggugaaauaugcaacaguccucaucagauccuugauggagaaaacugcacacuaauagaugcucuauugggagacccucagugugauggcuuccaaaacaagaaaugggaccuuuuuguugaacgaagcaaagcccacagcaacuguuacccuuaugaugugccggauuaugccucccuuaggucacuaguugccucauccggcacacuggaguuuaacaaugaaagcuucaauuggacuggagucacucaaaacggaacaagcucugcuugcauaaggagaucuaauaauaguuucuuuaguagauugaauugguugacccacuuaaacuucaaauacccagcauugaacgugacuaugccaaacaaugaacaauuugacaaauuguacauuugggggguucaccacccggguacggacaaggaccaaaucuuccuguaugcucaagcagcaggaagaaucacaguaucuaccaaaagaagccaacaagcuguaauuccgaauaucggaucuagacccagaguaaggaauaucccuagcagaguaagcaucuauuggacaauaguaaaaccgggagacauacuuuugauuaacagcacagggaaucuaauugcuccuagggguuacuucaaaauacgaagugggaaaagcucaauaaugagaucagaugcacccauuggcaaaugcaauucugcaugcaucacuccaaauggaagcauucccaaugacaaaccauuccaaaauguaaacaggaucacauacggggccugucccagauauguuaagcaaaacacucugaaauuggcaacaggaaugagaaauguaccagagaaacaaacuagaggcauauuuggcgcaauagcugguuucauagaaaaugguugggagggaaugguggaugguugguacgguuucaggcaucaaaauucugagggaaggggacaagcagcagaucucaaaagcacucaagcagcaaucgaucaaaucaauggaaagcugaauagauugaucgggaaaaccaacgagaaauuccaucagauugaaaaagaauucucagaagucgaagggagaauucaggaccuugagaaauauguugaggacacuaaaauagaucucuggucauacaacgcggagcuucuuguugcccuggagaaccaacacacaauugaucuaacugacucagaaaugaacaaacuguuugaaaaaacaaagaagcaacugagggaaaaugcugaggauaugggcaaugguuguuucaaaauauaccacaaaugugacaaugccugcauaggaucaaucagaaauggaacuuaugaccacgauguguacagagaugaagcauuaaacaaccgauuccagaucaagggaguugagcugaagucaggguacaaagauuggauccuauggauuuccuuugccauaucauguuuuuugcuuuguguugcuuuguugggguucaucaugugggccugccaaaaaggcaacauuaggugcaacauuugcauuuga

SEQ ID NO: 42755 - RNA, 1701 nt, Artificial Sequence; identical to SEQ ID NO: 40264
  derived and/or modified CDS sequence (wt) from hemagglutinin__InfluenzaA__AHC60179

SEQ ID NO: 42756 - RNA, 1701 nt, Artificial Sequence; identical to SEQ ID NO: 42705
  derived and/or modified CDS sequence (wt) from hemagglutinin__InfluenzaA__AHC60191

SEQ ID NO: 42757 - RNA, 1701 nt, Artificial Sequence; identical to SEQ ID NO: 42705
  derived and/or modified CDS sequence (wt) from hemagglutinin__InfluenzaA__AHC60203

SEQ ID NO: 42758 - RNA, 1701 nt, Artificial Sequence
  derived and/or modified CDS sequence (wt) from hemagglutinin__InfluenzaA__AHC60215
augaagacuaucauugcuuugagcuacauucuaugucugguuuucgcucaaaaacuuccuggaaaugacaacagcacggcaacgcugugccuugggcaccaugcaguaccaaauggaacgauagugaaaacaaucacgaaugaccaaauugaaguuacuaaugcuacugagcugguucagaguuccucaacaggugaaauaugcgacaguccucaucagauccuugauggagaaaacugcacacuaauagaugcucuauugggagacccucagugugauggcuuccaaaauaagaagugggaccuuuuuguugaacgaagcaaagccuacagcaacuguuacccuuaugaugugccggauuaugccucccuuaggucacuaguugccucauccggcacacuggaguuuaacaaugaaagcuucaauuggacuggagucacucaaaacggaacaagcucugcuugcauaaggagaucuaauaguaguuucuuuaguagauugaauugguugacccacuuaaacuucaaauacccagcauugaacgugacuaugccaaacaaugaacaauuugacaaauuguacauuugggggguucaccacccggguacggacaaggaccaaaucuuccuguaugcucaaucaucaggaagaaucacaguaucuaccaaaagaagccaacaagcuguaaucccgaauaucggaucuagacccagaauaaggaauaucccuagcagaauaagcaucuauuggacaauaguaaaaccgggagacauacuuuugauuaacagcacagggaaucuaauugcuccuagggguuacuucaaaauacgaagugggaaaagcucaauaaugagaucagaugcacccauuggcaaaugcaauucugaaugcaucacuccaaauggaagcauucccaaugacaaaccauuccaaaauguaaacaggaucacauacggggccugucccagauauguuaagcaaagcacucugaaauuggcaacaggaaugcgaaauguaccagagaaacaaacuagaggcauauuuggcgcaauagcggguuucauagaaaaugguugggagggaaugguggaugguugguacgguuucaggcaucaaaauucugagggaagaggacaagcagcagaucucaaaagcacucaagcagcaauagaucaaaucaaugggaagcugaaucgauugaucgggaaaaccaacgagaaauuccaucagauugaaaaagaauucucagaagucgaagggagaauucaggaccuugagaaauauguugaggacacuaaaauagaucucuggucauacaacgcggagcuucuuguugcccuggagaaccaacauacaauugaucuaacugacucagaaaugaacaaacuguuugaaaaaacaaagaagcaacugagggaaaaugcugaggauaugggcaaugguuguuucaaaauauaccacaaaugugacaaugccugcauaggaucaaucagaaauggaacuuauaaccacgauguauacagagaugaagcauuaaacaaccgguuccagaucaagggaguugagcugaagucaggguacaaagauuggauccuauggauuuccuuugccauaucauguuuuuugcuuuguguugcuuuguugggguucaucaugugggccugccaaaagggcaacauuaggugcaacauuugcauuuga

SEQ ID NO: 42759 - RNA, 1701 nt, Artificial Sequence; identical to SEQ ID NO: 40264
  derived and/or modified CDS sequence (wt) from hemagglutinin__InfluenzaA__AHC60239

SEQ ID NO: 42760 - RNA, 1701 nt, Artificial Sequence
  derived and/or modified CDS sequence (wt) from hemagglutinin__InfluenzaA__AHC60251
augaagacuaucauugcuuugagcuacauucuaugucugguuuucgcucaaaaacuuccuggaaaugacaacagcacggcaacgcugugccuugggcaccaugcaguaccaaacggaacgauagugaaaacaaucacgaaugaccaaauugaaguuacuaaugcuacugagcugguucagaauuccucaacaggugaaauaugcgacaguccucaucagauccuugauggagaaaacugcacacuaauagaugcucuauugggagacccucagugugauggcuuccaaaauaagaaaugggaccuuuuuguugaacgaagcaaagccuacagcaacuguuacccuuaugaugugccggauuaugccucccuuaggucacuaguugccucauccggcacacuggaguuuaacaaugaaagcuucaauuggacuggagucacucaaaacggaacaagcucugcuugcauaaggagaucuaauaauaguuucuuuaguagauugaauugguugacccacuugaacuucaaauacccagcauugaacgugacuaugccaaacaaugaacaauuugacaaauuguacauuugggggguucaccacccggguacggacaaggaccaaaucuuccuguaugcucaagcaucaggaagaaucacaguaucuaccaaaagaagccaacaagcuguaaucccgaauaucggaucuagacccagaguaaggaauaucccuagcagaauaagcaucuauuggacaauaguaaaaccgggagacauacuuuugauuaacagcacagggaaucuaauugcuccuagggguuacuucaaaauacgaagugggaaaagcucaauaaugagaucagaugcacccauuggcaaaugcaauucugaaugcaucacuccaaauggaagcauucccaaugacaaaccauuccaaaauguaaacaggaucacauacggggccugucccagauauguuaagcaaaacacucugaaauuggcaacaggaaugcgaaauguaccagagaaacaaacuagaggcauauuuggcgcaauagcggguuucauagaaaaugguugggagggaaugguggaugguugguacgguuucaggcaucaaaauucugagggaagaggacaagcagcagaucucaaaagcacucaagcagcaaucgaucaaaucaaugggaagcugaauagauugaucgggaaaaccaacgagaaauuccaucagauugaaaaagaauucucagaagucgaagggagaauucaggaccuugagaaauauguugaggacacuaaaauagaucucuggucauacaacgcggagcuucuuguugcccuggagaaccaacauacaauugaucuaacugacucagaaaugaacaaacuguuugaaaaaacaaagaagcaacugagggaaaaugcugaggauaugggcaaugguuguuucaaaauauaccacaaaugugacaaugccugcauaggaucaaucagaaauggaacuuaugaccacgauguguacagagaugaagcauuaaacaaccgguuccagaucaagggaguugagcugaagucaggguacaaagauuggauccuauggauuuccuuugccauaucauguuuuuugcuuuguguugcuuuguugggguucaucaugugggccugccaaaaaggcaacauuaggugcaacauuugcauuuga

SEQ ID NO: 42761 - RNA, 1701 nt, Artificial Sequence
  derived and/or modified CDS sequence (wt) from hemagglutinin__InfluenzaA__AHC60263
augaagacuaucauugcuuugagcuacauucuaugucugguuuucgcucaaaaacuuccuggaaaugaaaacagcacggcaacgcugugccuugggcaccaugcaguaccaaacggaacgauagugaaaacaaucacgaaugaccaaauugaaguuacuaaugcuacugagcugguucagaauuccucaacaggugaaauaugcgacaguccucaucagauccuugauggagaaaacugcacacuaauagaugcucuauugggagacccucagugugauggcuuccaaaauaagaaaugggaccuuuuuguugaacgaagcaaagccuacagcaacuguuacccuuaugaugugccggauuaugccucccuuaggucacuaguugccucauccggcacacuggaguuuaacaaugaaagcuucaauuggacuggagucacucaaaacggaacaagcucugcuugcauaaggagaucuaauaauaguuucuuuaguagauugaauugguugacccacuuaaacuucaaauacccagcauugaacgugacuaugccaaacaaugaacaauuugacaaauuguacauuugggggguucaccacccggguacggacaaggaccaaaucuuccuguaugcucaagcaucaggaagaaucacaguaucuaccaaaagaagccaacaagcuguaaucccgaauaucggaucuagacccagaguaaggaauaucccuagcagaauaagcaucuauuggacaauaguaaaaccgggagacauacuuuugauuaacagcacagggaaucuaauugcuccuagggguuacuucaaaauacgaagugggaaaagcucaauaaugagaucagaugcacccauuggcaaaugcaauucugaaugcaucacuccaaauggaagcauucccaaugacaaaccauuccaaaauguaaacaggaucacauacggggccugucccagauauguuaagcaaaacacucugaaauuggcaacaggaaugcgaaauguaccagagaaacaaacuagaggcauauuuggcgcaauagcggguuucauagaaaaugguugggagggaaugguggaugguugguacgguuucaggcaucaaaauucugagggaagaggacaagcagcagaucucaaaagcacucaagcagcaaucgaucaaaucaaugggaagcugaauagauugaucgggaaaaccaacgagaaauuccaucagauugaaaaagaauucucagaagucgaagggagaauucaggaccuugagaaauauguugaggacacuaaaauagaucucuggucauacaacgcggagcuucuuguugcccuggagaaccaacauacaauugaucuaacugacucagaaaugaacaaacuguuugaaaaaacaaagaagcaacugagggaaaaugcugaggauaugggcaaugguuguuucaaaauauaccacaaaugugacaaugccugcauaggaucaaucagaaauggaacuuaugaccacgauguauacagagaugaagcacuaaacaaccgguuccagaucaagggaguugagcugaagucaggguacaaagauuggauccuauggauuuccuuugccauaucauguuuuuugcuuuguguugcuuuguugggguucaucaugugggccugccaaaaaggcaacauuaggugcaacauuugcauuuga

SEQ ID NO: 42762 - RNA, 1701 nt, Artificial Sequence; identical to SEQ ID NO: 42703
  derived and/or modified CDS sequence (wt) from hemagglutinin__InfluenzaA__AHC60275

SEQ ID NO: 42763 - RNA, 1701 nt, Artificial Sequence
  derived and/or modified CDS sequence (wt) from hemagglutinin__InfluenzaA__AHC60287
augaagacuaucauugcuuugagcuacauucuaugucugguuuucgcucaaaaacuuccuggaaaugacaacagcacggcaacgcugugccuugggcaccaugcaguaccaaacggaacgauagugaaaacaaucacgaaugaccaaauugaaguuacuaaugcuacugagcugguucagaauuccucaacaggugaaauaugcgacaguccucaucagaucauugauggagaaaacugcacacuaauagaugcucuauugggagacccucagugugauggcuuccaaaauaagaaaugggaccuuuuuguugaacgaagcaaagccuacagcaacuguuacccuuaugaugugccggauuaugccucccuuaggucacuaguugccucauccggcacacuggaguuuaacaaugaaagcuucaauuggacuggagucacucaaaacggaacaagcucugcuugcauaaggagaucuaauaauaguuucuuuaguagauugaauugguugacccacuuaaacuucaaauacccagcauugaacgugacuaugccaaacaaugaacaauuugacaaguuguacauuugggggguucaccacccggguacggacaaggaccaaaucuuccuguaugcucaagcaucaggaagaaucacaguaucuaccaaaagaagccaacaagcuguaaucccgaauaucggaucuagacccagaguaaggaauaucccuagcagaauaagcaucuauuggacaauaguaaaaccgggagacauacuuuugauuaacagcacagggaaucuaauugcuccuagggguuacuucaaaauacgaagugggaaaagcucaauaaugagaucagaugcacccauuggcaaaugcaauucugaaugcaucacuccaaauggaagcauucccaaugacaaaccauuccaaaauguaaacaggaucacauacggggccugucccagauauguuaagcaaaacacucugaaauuggcaacaggaaugcgaaauguaccagagaaacaaacuagaggcauauuuggcgcaauagcggguuucauagaaaaugguugggagggaaugguggaugguugguacgguuucaggcaucaaaauucugagggaagaggacaagcagcagaucucaaaagcacucaagcagcaaucgaucaaaucaaugggaagcugaauagauugaucgggaaaaccaacgagaaauuccaucagauugaaaaagaauucucagaagucgaagggagaauucaggaccuugagaaauauguugaggacacuaaaauagaucucuggucauacaacgcggagcuucuuguugcccuggagaaccaacauacaauugaucuaacugacucagaaaugaacaaacuguuugaaaaaacaaagaagcaacugagggaaaaugcugaggauaugggcaaugguuguuucaaaauauaccacaaaugugacaaugccugcauaggaucaaucagaaauggaacuuaugaccacgauguauacagagaugaagcauuaaacaaccgguucaagaucaagggaguugagcugaagucaggguacaaagauuggauccuauggauuuccuuugccauaucauguuuuuugcuuuguguugcuuuguugggguucaucaugugggccugccaaaaaggcaacauuaggugcaacauuugcauuuga

SEQ ID NO: 42764 - RNA, 1701 nt, Artificial Sequence; identical to SEQ ID NO: 42630
  derived and/or modified CDS sequence (wt) from hemagglutinin__InfluenzaA__AHC60299

SEQ ID NO: 42765 - RNA, 1701 nt, Artificial Sequence
  derived and/or modified CDS sequence (wt) from hemagglutinin__InfluenzaA__AHC60311
augaagacuaucauugcuuugagcuacauucuaugucugguuuucgcucaaaaacuuccuggaaaugacaacagcacggcaacgcugugccuugggcaccaugcaguaccaaacggaacgauagugaaaacaaucacgaaugaccaaauugaaguuacuaaugcuacugagcugguucagaauuccucaacaggugaaauaugcgacaguccucaucagauccuugauggagaaaacugcacacuaauagaugcucuauugggagacccucagugugauggcuuccaaaauaagaaaugggaccuuuuuguugaacgaagcaaagccuacagcaacuguuacccuuaugaugugccggauuaugccucccuuaggucacuaguugccucauccggcacacuggaguuugacaaugaaagcuucaauuggacuggagucacucaaaacggaacaagcucugcuugcauaaggagaucuaauaauaguuucuuuaguagauugaauugguugacccacuuaaacuucaaauacccagcauugaacgugacuaugccaaacaaugaacaauuugacaaauuguacauuugggggguucaccacccggguacggacaaggaccaaaucuuccuguaugcucaagcaucaggaagaaucacaguaucuaccaaaagaagccaacaagcuguaaucccgaauaucggaucuagacccagaguaaggaauaucccuagcagaauaagcaucuauuggacaauaguaaaaccgggagacauacuuuugauuaacagcacagggaaucuaauugcuccuagggguuacuucaaaauacgaagugggaaaagcucaauaaugagaucagaugcacccauuggcaaaugcaauucugaaugcaucacuccaaauggaagcauucccaaugacaaaccauuccaaaauguaaacaggaucacauacggggccugucccagauauguuaagcaaaacacucugaaauuggcaacaggaaugcgaaauguaccagagaaacaaacuagaggcauauuuggcgcaauagcggguuucauagaaaaugguugggagggaaugguggaugguugguacgguuucaggcaucaaaauucugagggaagaggacaagcagcagaucucaaaagcacucaagcagcaaucgaucaaaucaaugggaagcugaauagauugaucgggaaaaccaacgagaaauuccaucagauugaaaaagaauucucagaagucgaagggagaauucaggaccuugagaaauauguugaggacacuaaaauagaucucuggucauacaacgcggagcuucuuguugcccuggagaaccaacauacaauugaucuaacugacucagaaaugaacaaacuguuugaaaaaacaaagaagcaacugagggaaaaugcugaggauaugggcaaugguuguuucaaaauauaccacaaaugugacaaugccugcauaggaucaaucagaaauggaacuuaugaccacgauguauacagagaugaagcauuaaacaaccgguuccagaucaagggaguugagcugaagucaggguacaaagauuggauccuauggauuuccuuugccauaucauguuuuuugcuuuguguugcuuuguugggguucaucaugugggccugccaaaaaggcaacauuaggugcaacauuugcauuuga

SEQ ID NO: 42766 - RNA, 1701 nt, Artificial Sequence; identical to SEQ ID NO: 40264
  derived and/or modified CDS sequence (wt) from hemagglutinin__InfluenzaA__AHC60323

SEQ ID NO: 42767 - RNA, 1701 nt, Artificial Sequence
  derived and/or modified CDS sequence (wt) from hemagglutinin__InfluenzaA__AHC60335
augaagacuaucauugcuuugagcuacauucuaugucugguuuucgcucaaaaacuuccuggaaaugacaacagcacggcaacgcugugccuugggcaccaugcaguaccaaacggaacgauagugaaaacaaucacgaaugaccaaauugaaguuacuaaugcuacugagcugguucagaguuccucaacaggugaaauaugcgacaguccucaucagauccuugauggagaaaacugcacacuaauagaugcucuauugggagacccucagugugauggcuuccaaaauaagaagugggaccuuuuuguugaacgaagcaaagccuacagcaacuguuacccuuaugaugugccggauuaugccucccuuaggucacuaguugccucauccggcacacuggaguuuaacaaugaaagcuucaauuggacuggagucacucaaaacggaacaagcucugcuugcauaaggagaucuaauaguaguuucuuuaguagauugaauugguugacccacuuaaacuucaaauacccagcauugaacgugacuaugccaaacaaugaacaauuugacaaauuguacauuugggggguucaccacccggguacggacaaggaccaaaucuuccuguaugcucaaucaucaggaagaaucacaguaucuaccaaaagaagccaacaagcuguaaucccgaauaucggaucuagacccagaauaaggaauaucccuagcagaauaagcaucuauuggacaauaguaaaaccgggagacauacuuuugaucaacagcacagggaaucugauugcuccuagagguuacuucaaaauacgaagugggaaaagcucaauaaugagaucagaugcacccauuggcaaaugcaauucugaaugcaucacuccaaauggaagcauucccaaugacaaaccauuccaaaauguaaacaggaucacauacggggccugucccagauauguuaagcaaagcacucugaaauuggcaacaggaaugcgaaauguaccagagaaacaaacuagaggcauauuuggcgcaauagcggguuucauagaaaaugguugggagggaaugguggaugguugguacgguuucaggcaucaaaauucugagggaagaggacaagcagcagaucucaaaagcacucaagcagcaauagaucaaaucaaugggaagcugaaucgauugaucgggaaaaccaacgagaaauuccaucagauugaaaaagaauucucagaagucgaagggagaauucaggaccuugagaaauauguugaggacacuaaaauagaucucuggucauacaacgcggagcuucuuguugcccuggagaaccaacauacaauugaucuaacugacucagaaaugaacaaacuguuugaaaaaacaaagaagcaacugagggaaaaugcugaggauaugggcaaugguuguuucaaaauauaccacaaaugugacaaugccugcauaggaucaaucagaaauggaacuuauaaccacgauguauacagagaugaagcauuaaacaaccgguuccagaucaagggaguugagcugaagucaggguacaaagauuggauccuauggauuuccuuugccauaucauguuuuuugcuuuguguugcuuuguugggguucaucaugugggccugccaaaagggcaacauuaggugcaacauuugcauuuga

SEQ ID NO: 42768 - RNA, 1701 nt, Artificial Sequence; identical to SEQ ID NO: 42739
  derived and/or modified CDS sequence (wt) from hemagglutinin__InfluenzaA__AHC60347

SEQ ID NO: 42769 - RNA, 1701 nt, Artificial Sequence; identical to SEQ ID NO: 42607
  derived and/or modified CDS sequence (wt) from hemagglutinin__InfluenzaA__AHC60359

SEQ ID NO: 42770 - RNA, 1701 nt, Artificial Sequence; identical to SEQ ID NO: 42691
  derived and/or modified CDS sequence (wt) from hemagglutinin__InfluenzaA__AHC60371

SEQ ID NO: 42771 - RNA, 1701 nt, Artificial Sequence
  derived and/or modified CDS sequence (wt) from hemagglutinin__InfluenzaA__AHC60383
augaagacuaucauugcuuugagcuacauucuaugucugguuuucgcucaaaaacuuccuggaaaugacaacagcacggcaacgcugugccuugggcaccaugcagugccaaacggaacgauagugaaaacaaucacgaaugaccaaauugaaguuacuaaugcuacugagcugguucagaguuccucaacaggugaaauaugcaacaguccucaucagauccuugauggagaaaacugcacacuaauagaugcucuauugggagacccucagugugauggcuuccaaaacaagaaaugggaccuuuuuguugaacgaagcaaagcccacagcaacuguuacccuuaugaugugccggauuaugccucccuuaggucacuaguugccucauccggcacacuggaguuuaacaaugaaagcuucaauuggacuggagucacucaaaacggaacaagcucugcuugcauaaggagaucuaauaauaguuucuuuaguagauuaaauugguugacccacuuaaacuucaaauacccagcauugaacgugacuaugccaaacaaugaacaauuugacaaauuguacauuugggggguucaccacccggguacggacaaggaccaaaucuuccuguaugcucaagcagcaggaagaaucacaguaucuaccaaaagaagccaacaagcuguaauuccgaauaucggaucuagacccagaguaaggaauaucccuagcagaguaagcaucuauuggacaauaguaaaaccgggagacauacuuuugauuaacagcacagggaaucuaauugcuccuagggguuacuucaaaauacgaagugggaaaagcucaauaaugagaucagaugcacccauuggcaaaugcaauucugcaugcaucacuccaaauggaagcauucccaaugacaaaccauuccaaaauguaaacaggaucacauacggggccugucccagauauguuaagcaaaacacucugaaauuggcaacaggaaugagaaauguaccagagaaacaaacuagaggcauauuuggcgcaauagcugguuucauagaaaaugguugggagggaaugguggaugguugguacgguuucaggcaucaaaauucugagggaaggggacaagcagcagaucucaaaagcacucaagcagcaaucgaucaaaucaaugggaagcugaauagauugaucgggaaaaccaacgagaaauuccaucagauugaaaaagaauucucagaagucgaagggagaauucaggaccuugagaaauauguugaggacacuaaaauagaucucuggucauacaacgcggagcuucuuguugcccuggagaaccaacacacaauugaucuaacugacucagaaaugaacaaacuguuugaaaaaacaaagaagcaacugagggaaaaugcugaggauaugggcaaugguuguuucaaaauauaccacaaaugugacaaugccugcauaggaucaaucagaaauggaacuuaugaccacgauguguacagagaugaagcauuaaacaaccgauuccagaucaagggaguugagcugaagucaggguacaaagauuggauccuauggauuuccuuugccauaucauguuuuuugcuuuguguugcuuuguugggguucaucaugugggccugccaaaaaggcaacauuaggugcaacauuugcauuuga

SEQ ID NO: 42772 - RNA, 1701 nt, Artificial Sequence; identical to SEQ ID NO: 42706
  derived and/or modified CDS sequence (wt) from hemagglutinin__InfluenzaA__AHC60395

SEQ ID NO: 42773 - RNA, 1701 nt, Artificial Sequence; identical to SEQ ID NO: 42705
  derived and/or modified CDS sequence (wt) from hemagglutinin__InfluenzaA__AHC60407

SEQ ID NO: 42774 - RNA, 1701 nt, Artificial Sequence
  derived and/or modified CDS sequence (wt) from hemagglutinin__InfluenzaA__AHC60419
augaagacuaucauugcuuugagcuacauucuaugucugguuuucgcucaaaaacuuccuggaaaugacaacagcacggcaacgcugugccuugggcaccaugcagugccaaacggaacgauagugaaaacaaucacgaaugaccaaauugaaguuacuaaugcuacugagcugguucagaguuccucaacaggugaaauaugcaacaguccucaucagauccuugauggagaaaacugcacacuaauagaugcucuauugggagacccucagugugauggcuuccaaaacaagaaaugggaccuuuuuguugaacgaagcaaagcccacagcaacuguuacccuuaugaugugccggauuaugccucccuuaggucacuaguugccucauccggcacacuggaguuuaacaaugaaagcuucaauuggacuggagucacucaaaacggaacaagcucugcuugcauaaggagaucuaauaauaguuucuuuaguagauugaauugguugacccacuuaaacuucaaauacccagcauugaacgugacuaugccaaacaaugaacaauuugacaaauuguacauuugggggguucaccacccggguacggacaaggaccaaaucuuccuguaugcucaagcagcaggaagaaucacaguaucuaccaaaagaagccaacaagcuguaauuccgaauaucggaucuagacccagaguaaggaauaucccuagcagaguaagcaucuauuggacaauaguaaaaccgggagacauacuuuugauuaacagcacagggaaucuaauugcuccuagggguuacuucaaaauacgaagugggaaaagcucaauaaugagaucagaugcacccauuggcaaaugcaauucugcaugcaucacuccaaauggaagcauucccaaugacaaaccauuccaaaauguaaacaggaucacauacggggccugucccagauauguuaagcaaaacacucugaaauuggcaacaggaaugagaaauguaccagagaaacaaacuagaggcauauuuggcgcaauagcugguuucauagaaaaugguugggagggaaugguggaugguugguacgguuucaggcaucaaaauucugagggaaggggacaagcagcagaucucaaaagcacucaagcagcaaucgaucaaaucaaugggaagcugaauagauugaucgggaaaaccaacgagaaauuccaucagauugaaaaagaauucucagaagucgaagggagaauucaggaccuugagaaauauguugaggacacuaaaauagaucucuggucauacaacgcggagcuucuuguugcccuggagaaccaacacacaauugaucuaacugacucggaaaugaacaaacuguuugaaaaaacaaagaagcaacugagggaaaaugcugaggauaugggcaaugguuguuucaaaauauaccacaaaugugacaaugccuguauaggaucaaucagaaauggaacuuaugaccacgauguguacagagaugaagcauuaaacaaccgauuccagaucaagggaguugagcugaagucaggguacaaagauuggauccuauggauuuccuuugccauaucauguuuuuugcuuuguguugcuuuguugggguucaucaugugggccugccaaaaaggcaacauuaggugcaacauuugcauuuga

SEQ ID NO: 42775 - RNA, 1701 nt, Artificial Sequence; identical to SEQ ID NO: 42607
  derived and/or modified CDS sequence (wt) from hemagglutinin__InfluenzaA__AHC60431

SEQ ID NO: 42776 - RNA, 1701 nt, Artificial Sequence; identical to SEQ ID NO: 42703
  derived and/or modified CDS sequence (wt) from hemagglutinin__InfluenzaA__AHC60455

SEQ ID NO: 42777 - RNA, 1701 nt, Artificial Sequence; identical to SEQ ID NO: 42703
  derived and/or modified CDS sequence (wt) from hemagglutinin__InfluenzaA__AHC60467

SEQ ID NO: 42778 - RNA, 1701 nt, Artificial Sequence; identical to SEQ ID NO: 42658
  derived and/or modified CDS sequence (wt) from hemagglutinin__InfluenzaA__AHC60479

SEQ ID NO: 42779 - RNA, 1701 nt, Artificial Sequence; identical to SEQ ID NO: 42618
  derived and/or modified CDS sequence (wt) from hemagglutinin__InfluenzaA__AHC60491

SEQ ID NO: 42780 - RNA, 1701 nt, Artificial Sequence
  derived and/or modified CDS sequence (wt) from hemagglutinin__InfluenzaA__AHC60503
augaagacuaucauugcuuugagcuacauucuaugucugguuuucgcucaaaaacuuccuggaaaugacaacagcacggcaacgcugugccuugggcaccaugcaguaccaaacggaacgauagugaaaacaaucacgaaugaccaaauugaaguuacuaaugcuacugagcugguucagaguuccucaacaggugaaauaugcaacaguccucaucagauccuugauggagaaaacugcacacuaauagaugcucuauugggagacccucagugugauggcuuccaaaauaagaaaugggaccuuuuuguugaacgaagcaaagccuacagcaacuguuacccuuaugaugugccggauuaugccucccuuaggucacuaguugccucauccggcacacuggaguuuaacaaugaaagcuucaauuggacuggagucacucaaaacggaacaagcucugcuugcauaaggagaucuaauaauaguuucuuuaguagauugaauugguugacccacuuaaacuucaaauacccagcauugaacgugacuaugccaaacaaugaacaauuugacaaauuguacauuugggggguucaccacccggguacggacaaggaccaaaucuuccuguaugcucaagcaucaggaagaaucacaguaucuaccaaaagaagccaacaagcuguaaucccgaauaucggaucuagacccagaguaaggaauaucccuagcagaauaagcaucuauuggacaauaguaaaaccgggagacauacuuuugauuaacagcacagggaaucuaauugcuccuagggguuacuucaaaauacgaagugggaaaagcucaauaaugagaucagaugcacccauuggcaaaugcaauucugcaugcaucacuccaaauggaagcauucccaaugacaaaccauuccaaaauguaaacaggaucacauacggggccugucccagauauguuaagcaaaacacucugaaauuggcaacaggaaugagaaauguaccagagaaacaaacuagaggcauauuuggcgcaauagcugguuucauagaaaaugguugggagggaaugguggaugguugguacgguuucaggcaucaaaauucugagggaagaggacaagcagcagaucucaaaagcacucaagcagcaaucgaucaaaucaaugggaagcugaauagauugaucgggaaaaccaacgagaaauuccaucagauugaaaaagaauucucagaagucgaagggagaauucaggaccuugagaaauauguugaggacacuaaaauagaucucuggucauacaacgcggagcuucuuguugcccuggagaaccaacauacaauugaucuaacugacucagaaaugaacaaacuguuugaaaaaacaaagaagcaacugagggaaaaugcugaggauaugggcaaugguuguuucaaaauauaccacaaaugugacaaugccugcauaggaucaaucagaaauggaacuuaugaccacgauguguacagagaugaagcauuaaacaaccgauuccagaucaagggaguugagcugaagucaggguacaaagauuggauccuauggauuuccuuugccauaucauguuuuuugcuuugcguuguuuuguugggguucaucaugugggccugccaaaaaggcaacauuaggugcaacauuugcauuuga

SEQ ID NO: 42781 - RNA, 1701 nt, Artificial Sequence; identical to SEQ ID NO: 42608
  derived and/or modified CDS sequence (wt) from hemagglutinin__InfluenzaA__AHC60515

SEQ ID NO: 42782 - RNA, 1701 nt, Artificial Sequence; identical to SEQ ID NO: 40264
  derived and/or modified CDS sequence (wt) from hemagglutinin__InfluenzaA__AHC60527

SEQ ID NO: 42783 - RNA, 1701 nt, Artificial Sequence; identical to SEQ ID NO: 42608
  derived and/or modified CDS sequence (wt) from hemagglutinin__InfluenzaA__AHC60539

SEQ ID NO: 42784 - RNA, 1701 nt, Artificial Sequence; identical to SEQ ID NO: 42721
  derived and/or modified CDS sequence (wt) from hemagglutinin__InfluenzaA__AHC60551

SEQ ID NO: 42785 - RNA, 1701 nt, Artificial Sequence
  derived and/or modified CDS sequence (wt) from hemagglutinin__InfluenzaA__AHC60563
augaagacuaucauugcuuugagcuacauucuaugucugguuuucgcucaaaaacuuccuggaaaugacaacagcacggcaacgcugugccuugggcaccaugcaguaccaaacggaacgauagugaaaacaaucacgaaugaccaaauugaaguuacuaaugcuacugagcugguucagaguuccucaacaggugaaauaugcgacaguccucaucagauccuugauggagaaaacugcacacuaauagaugcucuauugggagacccucagugugauggcuuccaaaauaagaagugggaccuuuuuguugaacgaagcaaagccuacagcaacuguuacccuuaugaugugccggauuaugccucccuuaggucacuaguugccucauccggcacacuggaguuuaacaaugaaagcuucaauuggacuggagucacucaaaacggaacaagcucugcuugcauaaggagaucuaauaguaguuucuuuaguagauugaauugguugacccacuuaaacuucaaauacccagcauugaacgugacuaugccaaacaaugaacaauuugacaaauuguacauuugggggguucaccacccggguacggacaaggaccaaaucuuccuguaugcucaaucuucaggaagaaucacaguaucuaccaaaagaagccaacaagcuguaaucccgaauaucggaucuagacccagaauaaggaauaucccuagcagaauaagcaucuauuggacaauaguaaaaccgggagacauacuuuugauuaacagcacagggaaucuaauugcuccuagggguuacuucaaaauacgaagugggaaaagcucaauaaugagaucagaugcacccauuggcaaaugcaauucugaaugcaucacuccaaaugggagcauucccaaugacaaaccauuccaaaauguaaacaggaucacauacggggccugucccagauauguuaagcaaagcacucugaaauuggcaacaggaaugcgaaauguaccagagaaacaaacuagaggcauauuuggcgcaauagcggguuucauagaaaaugguugggagggaaugguggaugguugguacgguuucaggcaucaaaauucugagggaagaggacaagcagcagaucucaaaagcacucaagcagcaaucgaucaaaucaaugggaagcugaaucgauugaucgggaaaaccaacgagaaauuccaucagauugaaaaagaauucucagaagucgaagggagaauucaggaccuugagaaauauguugaggacacuaaaauagaucucuggucauacaacgcggagcuucuuguugcccuggagaaccaacauacaauugaucuaacugacucagaaaugaacaaacuguuugaaaaaacaaagaagcaacugagggaaaaugcugaggauaugggcaaugguuguuucaaaauauaccacaaaugugacaaugccugcauaggaucaaucagaaauggaacuuauaaccacgauguauacagagaugaagcauuaaacaaccgguuccagaucaagggaguugagcugaagucuggguacaaagauuggauccuauggauuuccuuugccauaucauguuuuuugcuuuguguugcuuuguugggguucaucaugugggccugccaaaagggcaacauuaggugcaacauuugcauuuga

SEQ ID NO: 42786 - RNA, 1701 nt, Artificial Sequence
  derived and/or modified CDS sequence (wt) from hemagglutinin__InfluenzaA__AHC60575
augaagacuaucauugcuuugagcuacauucuaugucugguuuucgcucaaaaacuuccuggaaaugacaacagcacggcaacgcugugccuugggcaccaugcaguaccaaacggaacgauagugaaaacaaucacgaaugaccaaauugaaguuacuaaugcuacugagcugguucagaguuccucaacaggugaaauaugcgacaguccucaucagauccuugauggagaaaacugcacacuaauagaugcucuauugggagacccucagugugauggcuuccaaaauaagaagugggaccuuuuuguugaacgaagcaaagccuacagcaacuguuacccuuaugaugugccggauuaugccucccuuaggucacuaguugccucauccggcacacuggaguuuaacaaugaaagcuucaauuggacuggagucacucaaaacggaacaagcucugcuugcauaaggagaucuaauaguaguuucuuuaguagauugaauugguugacccacuuaaacuucaaauacccagcauugaacgugacuaugccaaacaaugaacaauuugacaaauuguacauuugggggguucaccacccggguacggacaaggaccaaaucuuccuguaugcucaaucaucaggaagaaucacaguaucuaccaaaagaagccaacaagcuguaaucccgaauaucggaucuagacccagaauaaggaauaucccuagcagaauaagcaucuauuggacaauaguaaaaccaggagacauacuuuugauuaacagcacagggaaucuaauugcuccuagggguuacuucaaaauacgaagugggaaaagcucaauaaugagaucagaugcacccauuggcaaaugcaauucugaaugcaucacuccaaauggaagcauucccaaugacaaaccauuccaaaauguaaacaggaucacauacggggccugucccagauauguuaagcaaagcacucugaaauuggcaacaggaaugcgaaauguaccagagaaacaaacuagaggcauauuuggcgcaauagcggguuucauagaaaaugguugggagggaaugguggaugguugguacgguuucaggcaucaaaauucugagggaagaggacaagcagcagaucucaaaagcacucaagcagcaaucgaucaaaucaaugggaagcugaaucgauugaucgggaaaaccaacgagaaauuccaucagauugaaaaagaauucucagaagucgaagggagaauucaggaccuugagaaauauguugaggacacuaaaauagaucucuggucauacaacgcggagcuucuuguugcccuggagaaccaacauacaauugaucuaacugacucagaaaugaacaaacuguuugaaaaaacaaagaagcaacugagggaaaaugcugaggauaugggcaaugguuguuucaaaauauaccacaaaugugacaaugccugcauaggaucaaucagaaauggaacuuauaaccacgauguauacagagaugaagcauuaaacaaccgguuccagaucaagggaguugagcugaagucaggguacaaagauuggauccuauggauuuccuuugccauaucauguuuuuugcuuuguguugcuuuguugggguucaucaugugggccugccaaaagggcaacauuaggugcaacauuugcauuuga

SEQ ID NO: 42787 - RNA, 1701 nt, Artificial Sequence
  derived and/or modified CDS sequence (wt) from hemagglutinin__InfluenzaA__AHC60587
augaagacuaucauugcuuugagcuacauucuaugucugguuuucgcucaaaaacuuccuggaaaugacaacagcacggcaacgcugugccuugggcaccaugcaguaccaaacggaacgauagugaaaacaaucacgaaugaccaaauugaaguuacuaaugcuacugagcugguucagaauuccucaacaggugaaauaugcgacaguccucaucagauccuugauggagaaaacugcacacuaauagaugcucuauugggagacccucagugugauggcuuccaaaauaagaaaugggaccuuuuuguugaacgaagcaaagccuacagcaacuguuacccuuaugaugugccggauuaugccucccuuaggucacuaguugccucauccggcacacuggaguuuaacaaugaaagcuucaauuggacuggagucacucaaaacggaacaagcucugcuugcauaaggagaucuaauaauaguuucuuuaguagauugaauugguugacccacuuaaacuucaaauacccagcauugaacgugacuaugccaaacaaugaacaauuugacaaauuguacauuugggggguucaccacccggguacggacaaggaccaaaucuuccuguaugcucaagcaucaggaagaaucacaguaucuaccaaaagaagccaacaagcuguaaucccgaauaucggaucuagacccagaguaaggaauaucccuagcagaauaagcaucuauuggacaauaguaaaaccgggagacauacuuuugauuaacagcacagggaaucuaauugcuccuagggguuacuucaaaauacgaagugggaaaagcucaauaaugagaucagaugcacccauuggcaaaugcaauucugaaugcaucacuccaaauggaagcauucccaaugacaaaccauuccaaaauguaaacaggaucacauacggggccugucccagauauguuaagcaaaacacucugaaauuggcaacaggaaugcgaaauguaccagagaaacaaacuagaggcauauuuggcgcaauagcggguuucauagaaaaugguugggagggaaugguggaugguugguacgguuucaggcaucaaaauucugagggaagaggacaagcagcagaucucaaaagcacucaagcagcaaucgaucaaaucaaugggaagcugaauagauugaucgggaaaaccaacgagaaauuccaucagauugaaaaagaauucucagaagucgaagggagaauucagaaccuugagaaauauguugaggacacuaaaauagaucucuggucauacaacgcggagcuucuuguugcccuggagaaccaacauacaauugaucuaacugacucagaaaugaacaaacuguuugaaaaaacaaagaagcaacugagggaaaaugcugaggauaugggcaaugguuguuucaaaauauaccacaaaugugacaaugccugcauaggaucaaucagaaauggaacuuaugaccacgauguauacagagaugaagcauuaaacaaccgguuccagaucaagggaguugagcugaagucaggguacaaagauuggauccuauggauuuccuuugccauaucauguuuuuugcuuuguguugcuuuguugggguucaucaugugggccugccaaaaaggcaacauuaggugcaacauuugcauuuga

SEQ ID NO: 42788 - RNA, 1701 nt, Artificial Sequence; identical to SEQ ID NO: 42632
  derived and/or modified CDS sequence (wt) from hemagglutinin__InfluenzaA__AHC60599

SEQ ID NO: 42789 - RNA, 1701 nt, Artificial Sequence; identical to SEQ ID NO: 40369
  derived and/or modified CDS sequence (wt) from hemagglutinin__InfluenzaA__AHC60611

SEQ ID NO: 42790 - RNA, 1701 nt, Artificial Sequence
  derived and/or modified CDS sequence (wt) from hemagglutinin__InfluenzaA__AHC60623
augaagacuaucauugcuuugagcuacauucuaugucugguuuucgcucaaaaacuuccuggaaaugacaacagcacggcaacgcugugccuugggcaccaugcaguaccaaacggaacgauagugaaaacaaucacgaaugaccaaauugaaguuacuaaugcuacugagcugguucagaguuccucaacaggugaaauaugcgacaguccucaucagauccuugauggagaaaacugcacacuaauagaugcucuauugggagacccucagugugauggcuuccaaaauaagaagugggaccuuuuuguugaacgaagcaaagccuacagcaacuguuacccuuaugaugugccggauuaugccucccuuaggucacuaguugccucauccggcacacuggaguuuaacaaugaaagcuucaauuggacuggagucacucaaaacggaacaagcucugcuugcauaaggagaucuaauaguaguuucuuuaguagauugaauugguugacccacuuaaacuucaaauacccagcauugaacgugacuaugccaaacaaugaacaauuugacaaauuguacauuugggggguucaccacccggguacggacaaggaccaaaucuuccuguaugcucaaucuucaggaagaaucacaguaucuaccaaaagaagccaacaagcuguaaucccgaauaucggaucuagacccagaauaaggaauaucccuagcagaauaagcaucuauuggacaauaguaaaaccgggagacauacuuuugauuaacagcacagggaaucuaauugcuccuagggguuacuucaaaauacgaaaugggaaaagcucaauaaugagaucagaugcacccauuggcaaaugcaauucugaaugcaucacuccaaaugggagcauucccaaugacaaaccauuccaaaauguaaacaggaucacauacggggccugucccagauauguuaagcaaagcacucugaaauuggcaacaggaaugcgaaauguaccagagaaacaaacuagaggcauauuuggcgcaauagcggguuucauagaaaaugguugggagggaaugguggaugguugguacgguuucaggcaucaaaauucugagggaagaggacaagcagcagaucucaaaagcacucaagcagcaaucgaucaaaucaaugggaagcugaaucgauugaucgggaaaaccaacgagaaauuccaucagauugaaaaagaauucucagaagucgaagggagaauucaggaccuugagaaauauguugaggacacuaaaauagaucucuggucauacaacgcggagcuucuuguugcccuggagaaccaacauacaauugaucuaacugacucagaaaugaacaaacuguuugaaaaaacaaagaagcaacugagggaaaaugcugaggauaugggcaaugguuguuucaaaauauaccacaaaugugacaaugccugcauaggaucaaucagaaauggaacuuauaaccacgauguauacagagaugaagcauuaaacaaccgguuccagaucaagggaguugagcugaagucaggguacaaagauuggauccuauggauuuccuuugccauaucauguuuuuugcuuuguguugcuuuguugggguucaucaugugggccugccaaaagggcaacauuaggugcaacauuugcauuuga

SEQ ID NO: 42791 - RNA, 1701 nt, Artificial Sequence
  derived and/or modified CDS sequence (wt) from hemagglutinin__InfluenzaA__AHC60635
augaagacuaucauugcuuugagcuacauucuaugucugguuuucgcucaaaaacuuccuggaaaugacaacagcacggcaacgcugugccuugggcaccaugcaguaccaaacggaacgauagugaaaacaaucacgaaugaccaaauugaaguuacuaaugcuacugagcugguucagaguuccucaacaggugaaauaugcgacaguccucaucagauccuugauggagaaaacugcacacuaauagaugcucuauugggagacccucagugugauggcuuccaaaauaagaagugggaccuuuuuguugaacgaagcaaagccuacagcaacuguuacccuuaugaugugccggauuaugccucccuuaggucacuaguugccucauccggcacacuggaguuuaacaaugaaagcuucaauuggacuggagucacucaaaacggaacaagcucugcuugcauaaggagaucuaauaguaguuucuuuaguagauugaauugguugacccacuuaaacuucaaauacccagcauugaacgugacuaugccaaacaaugaacaauuugacaaauuguacauuugggggguucaccacccggguacggauaaggaccaaaucuuccuguaugcucaaucuucaggaagaaucacaguaucuaccaaaagaagccaacaagcuguaaucccgaauaucggaucuagacccagaauaaggaauaucccuagcagaauaagcaucuauuggacaauaguaaaaccgggagacauacuuuugauuaacagcacagggaaucuaauugcuccuagggguuacuucaaaauacgaagugggaaaagcucaauaaugagaucagaugcacccauuggcaaaugcaauucugaaugcaucacuccaaaugggagcauucccaaugacaaaccauuccaaaauguaaacaggaucacauacggggccugucccagauauguuaagcaaagcacucugaaauuggcaacaggaaugcgaaauguaccagagaaacaaacuagaggcauauuuggcgcaauagcggguuucauagaaaaugguugggagggaaugguggaugguugguacgguuucaggcaucaaaauucugagggaagaggacaagcagcagaucucaaaagcacucaagcagcaaucgaucaaaucaaugggaagcugaaucgauugaucgggaaaaccaacgagaaauuccaucagauugaaaaagaauucucagaagucgaagggagaauucaggaccuugagaaauauguugaggacacuaaaauagaucucuggucauacaacgcggagcuucuuguugcccuggagaaccaacauacaauugaucuaacugacucagaaaugaacaaacuguuugaaaaaacaaagaagcaacugagggaaaaugcugaggauaugggcaaugguuguuucaaaauauaccacaaaugugacaaugccugcauaggaucaaucagaaauggaacuuauaaccacgauguauacagagaugaagcauuaaacaaccgguuccagaucaagggaguugagcugaagucuggguacaaagauuggauccuauggauuuccuuugccauaucauguuuuuugcuuuguguugcuuuguugggguucaucaugugggccugccaaaagggcaacauuaggugcaacauuugcauuuga

SEQ ID NO: 42792 - RNA, 1701 nt, Artificial Sequence
  derived and/or modified CDS sequence (wt) from hemagglutinin__InfluenzaA__AHC60647
augaagacuaucauugcuuugagcuacauucuaugucugguuuucacucaaaaacuuccuggaaaugacaacagcacggcaacgcugugccuugggcaccaugcaguaccaaauggaacgauagugaaaacaaucacgaaugaccaaauugaaguuacuaaugcuacugagcugguucagaauuccucaacaggugaaauaugcgacaguccucaucagauccuugauggagaaaacugcacacuaauagaugcucuauugggagacccucagugugauggcuuccaaaauaagaaaugggaccuuuuuguugaacgaagcaaagccuacagcaacuguuacccuuaugaugugccggauuaugccucccuuaggucacuaguugccucauccggcacacuggaguuuaacaaugaaagcuucaauuggacuggagucacucaaaacggaacaagcucugcuugcauaaggagaucuaauaauaguuucuuuaguagauugaauugguugacccacuuaaacuucaaauacccagcauugaacgugacuaugccaaacaaugaacaauuugacaaauuguacauuugggggguucaccacccggguacggacaaggaccaaaucuuccuguaugcucaagcaucaggaagaaucacaguaucuaccaaaagaagccaacaagcuguaaucccgaauaucggaucuagacccagaguaaggaauaucccuagcagaauaagcaucuauuggacaauaguaaaaccgggagacauacuuuugauuaacagcacagggaaucuaauugcuccuagggguuacuucaaaauacgaagugggaaaagcucaauaaugagaucagaugcacccauuggcaaaugcaauucugaaugcaucacuccaaauggaagcauucccaaugacaaaccauuccaaaauguaaacaggaucacauacggggccugucccagauauguuaagcaaaacacucugaaauuggcaacaggaaugcgaaauguaccagagaaacaaacuagaggcauauuuggcgcaauagcggguuucauagaaaaugguugggagggaaugguggaugguugguacgguuucaggcaucaaaauucugagggaagaggacaagcagcagaucucaaaagcacucaagcagcaaucgaucaaaucaaugggaagcugaauagauugaucgggaaaaccaacgagaaauuccaucagauugaaaaagaauucucagaagucgaagggagaauucaggaccuugagaaauauguugaggacacuaaaauagaucucuggucauacaacgcggagcuucuuguugcccuggagaaccaacauacaauugaucuaacugacucagaaaugaacaaacuguuugaaaaaacaaagaagcaacugagggaaaaugcugaggauaugggcaaugguuguuucaaaauauaccacaaaugugacaaugccugcauaggaucaaucagaaauggaacuuaugaccacgauguauacagagaugaagcauuaaacaaccgguuccagaucaagggaguugagcugaagucaggguacaaagauuggauccuauggauuuccuuugccauaucauguuuuuugcuuuguguugcuuuguugggguucaucaugugggccugccaaaaaggcaacauuaggugcaacauuugcauuuga

SEQ ID NO: 42793 - RNA, 1701 nt, Artificial Sequence
  derived and/or modified CDS sequence (wt) from hemagglutinin__InfluenzaA__AHC60659
augaagacuaucauugcuuugagcuacauucuaugucugguuuucacucaaaaacuuccuggaaaugacaacagcacggcaacgcugugccuugggcaccaugcagugccaaacggaacgauagugaaaacaaucacgaaugaccaaauugaaguuacuaaugcuacugagcugguucagaguuccucaacaggugaaauaugcaacaguccucaucagauccuugauggagaaaacugcacacuaauagaugcucuauugggagacccucagugugauggcuuccaaaacaagaaaugggaccuuuuuguugaacgaagcaaagcccacagcaacuguuacccuuaugaugugccggauuaugccucccuuaggucacuaguugccucauccggcacacuggaguuuaacaaugaaagcuucaauuggacuggagucacucaaaacggaacaagcucugcuugcauaaggagaucuaauaauaguuucuuuaguagauugaauugguuaacccacuuaaacuucaaauacccagcauugaacgugacuaugccaaacaaugaacaauuugacaaauuguacauuugggggguucaccacccggguacggacaaggaccaaaucuuccuguaugcucaagcagcaggaagaaucacaguaucuaccaaaagaagccaacaagcuguaauuccgaauaucggaucuagacccagaguaaggaauaucccuagcagaguaagcaucuauuggacaauaguaaaaccgggagacauacuuuugauuaacagcacagggaaucuaauugcuccuagggguuacuucaaaauacgaagugggaaaagcucaauaaugagaucagaugcacccauuggcaaaugcaauucugcaugcaucacuccaaauggaagcauucccaaugacaaaccauuccaaaauguaaacaggaucacauacggggccugucccagauauguuaagcaaaacacucugaaauuggcaacaggaaugagaaauguaccagagaaacaaacuagaggcauauuuggcgcaauagcugguuucauagaaaaugguugggagggaaugguggaugguugguacgguuucaggcaucaaaauucugagggaaggggacaagcagcagaucucaaaagcacucaagcagcaaucgaucaaaucaaugggaagcugaauagauugaucgggaaaaccaacgagaaauuccaucagauugaaaaagaauucucagaagucgaagggagaauucaggaccuugagaaauauguugaggacacuaaaauagaucucuggucauacaacgcggagcuucuuguugcccuggagaaccaacacacaauugaucuaacugacucagaaaugaacaaacuguuugaaaaaacaaagaagcaacugagggaaaaugcugaggauaugggcaaugguuguuucaaaauauaccacaaaugugacaaugccugcauaggaucaaucagaaauggaacuuaugaccacgauguguacagagaugaagcauuaaacaaccgauuccagaucaagggaguugagcugaagucaggguacaaagauuggauccuauggauuuccuuugccauaucauguuuuuugcuuuguguugcuuuguugggguucaucaugugggccugccaaaaaggcaacauuaggugcaacauuugcauuuga

SEQ ID NO: 42794 - RNA, 1701 nt, Artificial Sequence
  derived and/or modified CDS sequence (wt) from hemagglutinin__InfluenzaA__AHC60671
augaagacuaucauugcuuugagcuacauucuaugucugguuuucgcucaaaaacuuccuggaaaugacaacagcacggcaacgcugugccuugggcaccaugcagugccaaacggaacgauagugaaaacaaucacgaaugaccaaauugaaguuacuaaugcuacugagcugguucagaguuccucaacaggugaaauaugcaacaguccucaucagauccuugauggagaaaacugcacacuaauagaugcucuauugggagacccucagugugauggcuuccaaaacaaggaaugggaccuuuuuguugaacgaagcaaagcccacagcaacuguuacccuuaugaugugccggauuaugccucccuuaggucacuaguugccucauccggcacacuggaguuuaacaaugaaagcuucaauuggacuggagucacucaaaacggaacaagcucugcuugcauaaggagaucuaauaauaguuucuuuaguagauugaauugguugacccacuuaaacuucaaauacccagcauugaacgugacuaugccaaacaaugaacaauuugacaaauuguacauuugggggguucaccacccggguacggacaaggaccaaaucuuccuguaugcucaagcaucaggaagaaucacaguaucuaccaaaagaagccaacaagcuguaauuccgaauaucggaucuagacccagaguaaggaauaucccuagcagaguaagcaucuauuggacaauaguaaaaccgggagacauacuuuugauuaacagcacagggaaucuaauugcuccuagggguuacuucaaaauacgaagugggaaaagcucaauaaugagaucagaugcacccauuggcaaaugcaauucugcaugcaucacuccaaauggaagcauucccaaugacaaaccauuccaaaauguaaacaggaucacauacggggccugucccagauauguuaagcaaaacacucugaaauuggcaacaggaaugagaaauguaccagagaaacaaacuagaggcauauuuggcgcaauagcggguuucauagaaaaugguugggagggaaugguggaugguugguacgguuucaggcaucaaaauucugagggaaggggacaagcagcagaucucaaaagcacucaagcagcaaucgaucaaaucaaugggaagcugaauagauugaucgggaaaaccaacgagaaauuccaucagauugaaaaagaauucucagaagucgaagggagaauucaggaccuugagaaauauguugaggacacuaaaauagaucucuggucauacaacgcggagcuucuuguugcccuggagaaccaacacacaauugaucuaacugacucagaaaugaacaaacuguuugaaaaaacaaagaagcaacugagggaaaaugcugaggauaugggcaaugguuguuucaaaauauaccacaaaugugacaaugccugcauaggaucaaucagaaauggaacuuaugaccacgauguguacagagaugaagcauuaaacaaccgauuccagaucaagggaguugagcugaagucaggguacaaagauuggauccuauggauuuccuuugccauaucaugcuuuuugcuuuguguugcuuuguugggguucaucaugugggccugccaaaaaggcaacauuaggugcaacauuugcauuuga

SEQ ID NO: 42795 - RNA, 1701 nt, Artificial Sequence
  derived and/or modified CDS sequence (wt) from hemagglutinin__InfluenzaA__AHC60683
augaagacuaucauugcuuugagcuacauucuaugucugguuuucgcucaaaaacuuccuggaaaugacaacagcacggcaacgcugugccuugggcaccaugcagugccaaacggaacgauagugaaaacaaucacgaaugaccaaauugaaguuacuaaugcuacugagcugguucagaguuccucaacaggugaaauaugcaacaguccucaucagauccuugauggagaaaacugcacacuaauagaugcucuauugggagacccucagugugauggcuuccaaaacaagaaaugggaccuuuuuguugaacgaagcaaagcccacagcaacuguuacccuuaugaugugccggauuaugccucccuuaggucacuaguugccucauccggcacacuggaguuuaacaaugaaagcuucaauuggacuggagucacucaaaacggaacaagcucugcuugcauaaggagaucuaauaauaguuucuuuaguagauugaauugguugacccacuuaaacuucaaauacccagcauugaacgugacuaugccaaacaaugaacaauuugacaaauuguacauuugggggguucaccacccggguacggacaaggaccaaaucuuccuguaugcucaagcagcaggaagaaucacaguaucuaccaaaagaagccaacaagcuguaauuccgaauaucggaucuagacccagaguaaggaauaucccuagcagaguaagcaucuauuggacaauaguaaaaccgggagacauacuuuugauuaacagcacagggaaucuaauugcuccuagggguuacuucaaaauacgaagugggaaaagcucaauaauaagaucagaugcacccauuggcaaaugcaauucugcaugcaucacuccaaauggaagcauucccaaugacaaaccauuccaaaauguaaacaggaucacauacggggccugucccagauauguuaagcaaaacacucugaaauuggcaacaggaaugagaaauguaccagagaaacaaacuagaggcauauuuggcgcaauagcugguuucauagaaaaugguugggagggaaugguggaugguugguacgguuucaggcaucaaaauucugagggaaggggacaagcagcagaucucaaaagcacucaagcagcaaucgaucaaaucaaugggaagcugaauagauugaucgggaaaaccaacgagaaauuccaucagauugaaaaagaauucucagaagucgaagggagaauucaggaccuugagaaauauguugaggacacuaaaauagaucucuggucauacaacgcggagcuucuuguugcccuggagaaccaacacacaauugaucuaacugacucagaaaugaacaaacuguuugaaaaaacaaagaagcaacugagggaaaaugcugaggauaugggcaaugguuguuucaaaauauaccacaaaugugacaaugccugcauaggaucaaucagaaauggaacuuaugaccacgauguguacagagaugaagcauuaaacaaccgauuccagaucaagggaguugagcugaagucaggguacaaagauuggauccuauggauuuccuuugccauaucauguuuuuugcuuuguguugcuuuguugggguucaucaugugggccugccaaaaaggcaacauuaggugcaacauuugcauuuga

SEQ ID NO: 42796 - RNA, 1701 nt, Artificial Sequence
  derived and/or modified CDS sequence (wt) from hemagglutinin__InfluenzaA__AHC60695
augaagacuaucauugcuuugagcuacauucuaugucugguuuucgcucaaaaacuuccugggaaugacaacagcacggcaacgcugugccuugggcaccaugcagugccaaacggaacgauagugaaaacaaucacgaaugaccaaauugaaguuacuaaugcuacugaacugguucagaguuccucaacaggugaaauaugcaacaguccucaucagauccuugauggagaaaacugcacacuaauagaugcucuauugggagacccucagugugauggcuuccaaaacaagaaaugggaccuuuuuguugaacgaagcaaagcccacagcaacuguuauccuuaugaugugccggauuaugccucccuuaggucacuaguugccucauccggcacacuggaguuuaacaaugaaagcuucaauuggacuggagucacucaaaacggaacaagcucugcuugcaugaggggaucuaauaauaguuucuuuaguagauugaauugguugacccacuuaaacuucaaauacccagcauugaacgugacuaugccaaacaaugaacaauuugacaaauuguacauuugggggguucaccacccggguacggacaaggaccaaaucuuccuguaugcucaagcaucaggaagaaucacaguaucuaccaaaagaagccaacaagcuguaauuccgaauaucggaucuagacccagaguaaggaauaucccuagcagaguaagcaucuauuggacaauaguaaaaccgggagacauacuuuugauuaacagcacagggaaucuaauugcuccuagggguuacuucaaaauacgaagugggaaaagcucaauaaugagaucagaugcacccauuggcaaaugcaauucugcaugcaucaccccaaauggaagcauucccaaugacaaaccauuccaaaauguaaacaggaucacauacggggccugucccagauauguuaagcaaaacacucugaaauuggcaacaggaaugagaaauguaccagagaaacaaacuagaggcauauuuggcgcaauagcggguuucauagaaaaugguugggagggaaugguggaugguugguacgguuucaggcaucaaaauucugagggaagaggacaagcagcagaucucaaaagcacucaagcagcaaucgaucaaaucaaugggaagcugaauagauugaucgggaaaaccaacgagaaauuccaucaaauugaaaaagaauucucagaagucgaagggagaauucaggaccuugagaaauauguugaggacacuaaaauagaucucuggucauacaacgcggagcuucuuguugcccuggagaaccaacacacaauugaucuaacugacucagaaaugaacaaacuguuugaaaaaacaaagaagcaacugagggaaaaugcugaggauaugggcaaugguuguuucaaaauauaccacaaaugugacaaugccugcauaggaucaaucagaaauggaacuuaugaccacgauguguacagagaugaagcauuaaacaaccgauuccagaucaagggaguugagcugaagucaggguacaaagauuggauccuauggauuuccuuugccauaucauguuuuuugcuuuguguugcuuuguugggguucaucaugugggccugccaaaaaggcaacauuaggugcaacauuugcauuuga

SEQ ID NO: 42797 - RNA, 1701 nt, Artificial Sequence
  derived and/or modified CDS sequence (wt) from hemagglutinin__InfluenzaA__AHC60707
augaagacuaucauugcuuugagcuacauucuaugucugguuuucgcucaaaaacuuccuggaaaugacaacagcacggcaacgcugugccuugggcaccaugcaguaccaaacggaacgauagugaaaacaaucacggaugaccaaauugaaguuacuaaugcuacugagcugguucagaauuccucaacaggugaaauaugcgacaguccucaucagauccuugauggagaaaacugcacacuaauagaugcucuauugggagacccucagugugauggcuuccaaaauaagaaaugggaccuuuuuguugaacgaagcaaagccuacagcaacuguuacccuuaugaugugccggauuaugccucccuuaggucacuaguugccucauccggcacacuggaguuuaacaaugaaagcuucaauuggacuggagucacucaaaacggaacaagcucugcuugcauaaggagaucuaauaauaguuucuuuaguagauugaauugguugacccacuuaaacuucaaauacccagcauugaacgugacuaugccaaacaaugaacaauuugacaaauuguacauuugggggguucaccacccggguacggacaaggaccaaaucuuccuguaugcucaagcaucaggaagaaucacaguaucuaccaaaagaagccaacaagcuguaaucccgaauaucggaucuagacccagaguaaggaauaucccuagcagaauaagcaucuauuggacaauaguaaaaccgggagacauacuuuugauuaacagcacagggaaucuaauugcuccuagggguuacuucaaaauacgaagugggaaaagcucaauaaugagaucagaugcacccauuggcaaaugcaauucugaaugcaucacuccaaauggaagcauucccaaugacaaaccauuccaaaauguaaacaggaucacauacggggccugucccagauauguuaagcaaaacacucugaaauuggcaacaggaaugcgaaauguaccagagaaacaaacuagaggcauauuuggcgcaauagcggguuucauagaaaaugguugggagggaaugguggaugguugguacgguuucaggcaucaaaauucugagggaagaggacaagcagcagaucucaaaagcacucaagcagcaaucgaucaaaucaaugggaagcugaauagauugaucgggaaaaccaacgagaaauuccaucagauugaaaaagaauucucagaagucgaagggagaauucaggaccuugagaaauauguugaggacacuaaaauagaucucuggucauacaacgcggagcuucuuguugcccuggagaaccaacauacaauugaucuaacugacucagaaaugaacaaacuguuugaaaaaacaaagaagcaacugagggaaaaugcugaggauaugggcaaugguuguuucaaaauauaccacaaaugugacaaugccugcauaggaucaaucagaaauggaacuuaugaccacgauguauacagagaugaagcauuaaacaaccgguuccagaucaagggaguugagcugaagucaggguacaaagauuggaucauauggauuuccuuugccauaucauguuuuuugcuuuguguugcuuuguugggguucaucaugugggccugccaaaaaggcaacauuaggugcaacauuugcauuuga

SEQ ID NO: 42798 - RNA, 1701 nt, Artificial Sequence; identical to SEQ ID NO: 42703
  derived and/or modified CDS sequence (wt) from hemagglutinin__InfluenzaA__AHC60719

SEQ ID NO: 42799 - RNA, 1701 nt, Artificial Sequence; identical to SEQ ID NO: 42608
  derived and/or modified CDS sequence (wt) from hemagglutinin__InfluenzaA__AHC60731

SEQ ID NO: 42800 - RNA, 1701 nt, Artificial Sequence; identical to SEQ ID NO: 42705
  derived and/or modified CDS sequence (wt) from hemagglutinin__InfluenzaA__AHC60743

SEQ ID NO: 42801 - RNA, 1701 nt, Artificial Sequence
  derived and/or modified CDS sequence (wt) from hemagglutinin__InfluenzaA__AHC60767
augaagacuaucauugcuuugagcuacauucuaugucugguuuucgcucaaaaacuuccuggaaaugacaacagcacggcaacgcugugccuugggcaccaugcaguaccgaacggaacgauagugaaaacaaucacgaaugaccaaauugaaguuacuaaugcuacugagcugguccagaguuccucaacaggugaaauaugcgacaguccucaucagauccuugauggagaaaacugcacacuaauagaugcucuauugggagacccucagugugauggcuuccaaaauaagaaaugggaccuuuuuguugaacgaagcaaagccuacagcaacuguuacccuuaugaugugccggauuaugccucccuuaggucacuaguugccucauccggcacacuggaguuuaacaaugaaagcuucaauuggacuggagucacucaaaacggaacaagcucugcuugcauaaggagaucuaauaauaguuucuuuaguagauugaauugguugacccacuuaaacuucaaauacccagcauugaacgugacuaugccaaacaaugaacaauuugacaaauuguacauuugggggguucaccacccggguacugacaaggaccaaaucuuccuguaugcucaagcaucaggaagaaucacaguaucuaccaaaagaagccaacaagcuguaaucccgaauaucggaucuagacccagaguaaggaauaucccuagcagaauaagcaucuauuggacaauaguaaaaccgggagacauacuuuugauuaacagcacagggaaucuaauugcuccuagggguuacuucaaaauacgaagugggaaaagcucaauaaugagaucagaugcacccauuggcaaaugcaauucugaaugcaucacuccaaauggaagcauucccaaugacaaaccauuccaaaauguaaacaggaucacauacggggccugucccagauauguuaagcaaaacacucugaaauuggcaacaggaaugcgaaauguaccagagaaacaaacuagaggcauauuuggcgcaauagcggguuucauagaaaaugguugggagggaaugguggaugguugguacgguuucaggcaucaaaauucugagggaagaggacaagcagcagaucucaaaagcacucaagcagcaaucgaucaaaucaaugggaagcugaauagauugaucgggaaaaccaacgagaaauuccaucagauugaaaaagaauucucagaagucgaagggagaauucaggaccuugagaaauauguugaggacacuaaaauagaucucuggucauacaacgcggagcuucuuguugcccuggagaaccaacauacaauugaucuaacugacucagaaaugaacaaacuguuugaaaaaacaaagaagcaacugagggaaaaugcugaggauaugggcaaugguuguuucaaaauauaccacaaaugugacaaugccugcauaggaucaaucagaaauggaacuuaugaccacgauguauacagagaugaagcauuaaacaaccgguuccagaucaagggaguugagcugaagucaggguacaaagauuggauccuauggauuuccuuugccauaucauguuuuuugcuuuguguugcuuuguugggguucaucaugugggccugccaaaaaggcaacauuaggugcaacauuugcauuuga

SEQ ID NO: 42802 - RNA, 1701 nt, Artificial Sequence
  derived and/or modified CDS sequence (wt) from hemagglutinin__InfluenzaA__AHC60779
augaagacuaucauugcuuugagcuacauucuaugucugguuuucgcucaaaaacuuccuggaaaugacaacagcacggcaacgcugugccuugggcaccaugcagugccaaacggaacgauagugaaaacaaucacgaaugaccaaauugaaguuacuaaugcuacugagcugguucagaguuccucaacaggugaaauaugcaacaguccucaucagauccuugauggagaaaacugcacacuaauagaugcucuauugggagacccucagugugauggcuuccaaaacaagaaaugggaccuuuuuguugaacgaagcaaagcccacagcaacuguuacccuuaugaugugccggauuaugccucccuuaggucacuaguugccucauccggcacacuggaguuuaacaaugaaagauucaauuggacuggagucacucaaaacggaacaagcucugcuugcauaaggagaucuaauaauaguuucuuuaguagauugaauugguugacccacuuaaacuucaaauacccagcauugaacgugacuaugccaaacaaugaacaauuugacaaauuguacauuugggggguucaccacccggguacggacaaggaccaaaucuuccuguaugcucaagcagcaggaagaaucacaguaucuaccaaaagaagccaacaagcuguaauuccgaauaucggaucuagacccagaguaaggaauaucccuagcagaguaagcaucuauuggacaauaguaaaaccgggagacauacuuuugauuaacagcacagggaaucuaauugcuccuagggguuacuucaaaauacgaagugggaaaagcucaauaaugagaucagaugcacccauuggcaaaugcaauucugcaugcaucacuccaaauggaagcauucccaaugacaaaccauuccaaaauguaaacaggaucacauacggggccugucccagauauguuaagcaaaacacucugaaauuggcaacaggaaugagaaauguaccagagaaacaaacuagaggcauauuuggcgcaauagcugguuucauagaaaaugguugggagggaaugguggaugguugguacgguuucaggcaucaaaauucugagggaaggggacaagcagcagaucucaaaagcacucaagcagcaaucgaucaaaucaauggaaagcugaauagauugaucgggaaaaccaacgagaaauuccaucagauugaaaaagaauucucagaagucgaagggagaauucaggaccuugagaaauauguugaggacacuaaaauagaucucuggucauacaacgcggagcuucuuguugcccuagagaaccaacacacaauugaucuaacugacucagaaaugaacaaacuguuugaaaaaacaaagaagcaacugagggaaaaugcugaggauaugggcaaugguuguuucaaaauauaccacaaaugugacaaugccugcauaggaucaaucagaaauggaacuuaugaccacgauguguacagagaugaagcauuaaacaaccgauuccagaucaagggaguugagcugaagucaggguacaaagauuggauccuauggauuuccuuugccauaucauguuuuuugcuuuguguugcuuuguugggguucaucaugugggccugccaaaaaggcaacauuaggugcaacauuugcauuuga

SEQ ID NO: 42803 - RNA, 1701 nt, Artificial Sequence; identical to SEQ ID NO: 42634
  derived and/or modified CDS sequence (wt) from hemagglutinin__InfluenzaA__AHC60791

SEQ ID NO: 42804 - RNA, 1701 nt, Artificial Sequence; identical to SEQ ID NO: 42663
  derived and/or modified CDS sequence (wt) from hemagglutinin__InfluenzaA__AHC60803

SEQ ID NO: 42805 - RNA, 1701 nt, Artificial Sequence; identical to SEQ ID NO: 42739
  derived and/or modified CDS sequence (wt) from hemagglutinin__InfluenzaA__AHC60815

SEQ ID NO: 42806 - RNA, 1701 nt, Artificial Sequence
  derived and/or modified CDS sequence (wt) from hemagglutinin__InfluenzaA__AHC60827
augaagacuaucauugcuuugagcuacauucuaugucugguuuucgcucaaaaacuuccugggaaugacaacagcacggcaacgcugugccuugggcaccaugcagugccaaacggaacgauagugaaaacaaucacgaaugaccaaauugaaguuacuaaugcuacugaacugguucagaguuccucaacagaugaaauaugcaacaguccucaucagauccuugauggagaaaacugcacacuaauagaugcucuauugggagacccucagugugauggcuuccaaaacaagaaaugggaccuuuuuguugaacgaagcaaagcccacagcaacuguuacccuuaugaugugccggauuaugccucccuuaggucacuaguugccucauccggcacacuggaguuuaacaaugaaagcuucaauuggacuggagucacucaaaacggaacaagcucugcuugcauaaggggaucuaauaauaguuucuuuaguagauugaauugguugacccacuuaaacuucaaauacccagcauugaacgugacuaugccaaacaaugaacaauuugacaaauuguacauuugggggguucaccacccggguacggacaaggaccaaaucuuccuguaugcucaagcaucaggaagaaucacaguaucuaccaaaagaagccaacaagcuguaauuccgaauaucggaucuagacccagaguaaggaauaucccuagcagaguaagcaucuauuggacaauaguaaaaccgggagacauacuuuugauuaacagcacagggaaucuaauugcuccuagggguuacuucaaaauacgaagugggaaaagcucaauaaugagaucagaugcacccauuggcaaaugcaauucugcaugcaucaccccaaauggaagcauucccaaugacaaaccauuccaaaauguaaacaggaucacauacggggccugucccagauauguuaagcaaaacacucugaaauuggcaacaggaaugagaaauguaccagagaaacaaacuagaggcauauuuggcgcaauagcggguuucauagaaaaugguugggagggaaugguggaugguugguacgguuucaggcaucaaaauucugagggaaggggacaagcagcagaucucaaaagcacucaagcagcaaucgaucaaaucaaugggaagcugaauagauugaucgggaaaaccaacgagaaauuccaucagauugaaaaagaauucucagaagucgaagggagaauucaggaccuugagaaauauguugaggacacuaaaauagaucucuggucauacaacgcggagcuucuuguugcccuggagaaccaacacacaauugaucuaacugacucagaaaugaacaaacuguuugaaaaaacaaagaagcaacugagggaaaaugcugaggauaugggcaaugguuguuucaaaauauaccacaaaugugacaaugccugcauaggaucaaucagaaauggaacuuaugaccacgauguguacagagaugaagcauuaaacaaccgauuccagaucaagggaguugagcugaagucaggguacaaagauuggauccuauggauuuccuuugccauaucauguuuuuugcuuuguguugcuuuguugggguucaucaugugggccugccaaaaaggcaacauuaggugcaacauuugcauuuga

SEQ ID NO: 42807 - RNA, 1701 nt, Artificial Sequence; identical to SEQ ID NO: 42641
  derived and/or modified CDS sequence (wt) from hemagglutinin__InfluenzaA__AHC60839

SEQ ID NO: 42808 - RNA, 1701 nt, Artificial Sequence; identical to SEQ ID NO: 42608
  derived and/or modified CDS sequence (wt) from hemagglutinin__InfluenzaA__AHC60851

SEQ ID NO: 42809 - RNA, 1701 nt, Artificial Sequence
  derived and/or modified CDS sequence (wt) from hemagglutinin__InfluenzaA__AHC60863
augaagacuaucauugcuuugagcuacauucuaugucugguuuucgcucaaaaacuuccuggaaaugacaacagcacggcaacgcugugccuugggcaccaugcagugccaaacggaacgauagugaaaacaaucacgaaugaccaaauugaaguuacuaaugcuacugagcugguucagaguuccucaacaggugaaauaugcaacaguccucaucagauccuugauggagaaaacugcacacuaauagaugcucuauugggagacccucagugugauggcuuccaaaacaagaaaugggaccuuuuuguugaacgaagcaaagcccacagcaacuguuacccuuaugaugugccggauuaugccucccuuaggucacuaguugccucauccggcacacuggaguuuaacaaugaaagcuucaauuggacuggagucacucaaaacggaacaagcucugcuugcauaaggagaucuaauaauaguuucuuuaguagauugaauugguuaacccacuuaaacuucaaauacccagcauugaacgugacuaugccaaacaaugaacaauuugacaaauuguacauuugggggguucaccacccggguacggacaaggaccaaaucuuccuguaugcucaagcagcaggaagaaucacaguaucuaccaaaagaagccaacaagcuguaauuccgaauaucggaucuagacccagaguaaggaauaucccuagcagaguaagcaucuauuggacaauaguaaaaccgggagacauacuuuugauuaacagcacagggaaucuaauugcuccuagggguuacuucaaaauacgaagugggaaaagcucaauaaugagaucagaugcacccauuggcaaaugcaauucugcaugcaucacuccaaauggaagcauucccaaugacaaaccauuccaaaauguaaacaggaucacauacggggccugucccagauauguuaagcaaaacacucugaaauuggcaacaggaaugagaaauguaccagagaaacaaacuagaggcauauuuggcgcaauagcugguuucauagaaaaugguugggagggaaugguggaugguugguacgguuucaggcaucaaaauucugagggaaggggacaagcagcagaucucaaaagcacucaagcagcaaucgaucaaaucaaugggaagcugaauagauugaucgggaaaaccaacgagaaauuccaucagauugaaaaagaauucucagaagucgaagggagaauucaggaccuugagaaauauguugaggacacuaaaauagaucucuggucauacaacgcggagcuucuuguugcccuggagaaccaacacacaauugaucuaacugacucagaaaugaacaaacuguuugaaaaaacaaagaagcaacugagggaaaaugcugaggauaugggcaaugguuguuucaaaauauaccacaaaugugacaaugccugcauaggaucaaucagaaauggaacuuaugaccacgauguguacagagaugaagcauuaaacaaccgauuccagaucaagggaguugagcugaaggcaggguacaaagauuggauccuauggauuuccuuugccauaucauguuuuuugcuuuguguugcuuuguugggguucaucaugugggccugccaaaaaggcaacauuaggugcaacauuugcauuuga

SEQ ID NO: 42810 - RNA, 1701 nt, Artificial Sequence; identical to SEQ ID NO: 42607
  derived and/or modified CDS sequence (wt) from hemagglutinin__InfluenzaA__AHC60875

SEQ ID NO: 42811 - RNA, 1701 nt, Artificial Sequence; identical to SEQ ID NO: 42724
  derived and/or modified CDS sequence (wt) from hemagglutinin__InfluenzaA__AHC60887

SEQ ID NO: 42812 - RNA, 1701 nt, Artificial Sequence; identical to SEQ ID NO: 42801
  derived and/or modified CDS sequence (wt) from hemagglutinin__InfluenzaA__AHC60899

SEQ ID NO: 42813 - RNA, 1701 nt, Artificial Sequence; identical to SEQ ID NO: 42618
  derived and/or modified CDS sequence (wt) from hemagglutinin__InfluenzaA__AHC60911

SEQ ID NO: 42814 - RNA, 1701 nt, Artificial Sequence
  derived and/or modified CDS sequence (wt) from hemagglutinin__InfluenzaA__AHC60923
augaagacuaucauugcuuugagcuacauucuaugucugguuuucgcucaaaaacuuccugggaaugacaacagcacggcaacgcugugccuugggcaccaugcagugccaaacggaacgauagugaaaacaaucacgaaugaccaaauugaaguuacuaaugcuacugaacugguucagaguuccucaacaggugaaauaugcaacaguccucaucagauccuugauggagaaaacugcacacuaauagaugcucuauugggagacccucagugugauggcuuccaaaacaagaaaugggaccuuuuuguugaacgaagcaaagcccacagcaacuguuacccuuaugaugugccggauuaugccucccuuaggucacuaguugccucauccggcacacuggaguuuaacaaugaaagcuucaauuggacuggagucacucaaaacggaacaagcucugcuugcauaaggggaucuaauaauaguuucuuuaguagauugaauugguugacccacuuaaacuucaaauacccagcauugaacgugacuaugccaaacaaugaacaauuugacaaauuguacauuugggggguucaccacccggguacggacaaggaccaaaucuuccuguaugcucaagcaucaggaagaaucacaguaucuaccaaaagaagccaacaagcuguaauuccgaauauuggaucuagacccagaguaaggaauaucccuagcagaguaagcaucuauuggacaauaguaaaaccgggagacauacuuuugauuaacagcacagggaaucuaauugcuccuagggguuacuucaaaauacgaagugggaaaagcucaauaaugagaucagaugcacccauuggcaaaugcaauucugcaugcaucacuccaaauggaagcauucccaaugacaaaccauuccaaaauguaaacaggaucacauacggggccugucccagauauguuaagcaaaacacucugaaauuggcaacaggaaugagaaauguaccagagaaacaaacuagaggcauauuuggcgcaauagcggguuucauagaaaaugguugggagggaaugguggaugguugguacgguuucaggcaucaaaauucugagggaaggggacaagcagcagaucucaaaagcacucaagcagcaaucgaucaaaucaaugggaagcugaauagauugaucgggaaaaccaacgagaaauuccaucagauugaaaaagaauucucagaagucgaagggagaauucaggaccuugagaaauauguugaggacacuaaaauagaucucuggucauacaacgcggagcuucuuguugcccuggagaaccaacacacaauugaucuaacugacucagaaaugaacaaacuguuugaaaaaacaaagaagcaacugagggaaaaugcugaggauaugggcaaugguuguuucaaaauauaccacaaaugugacaaugccugcauaggaucaaucagaaauggaacuuaugaccacgauguguacagagaugaagcauuaaacaaccgauuccagaucaagggaguugagcugaagucaggguacaaagauuggauccuauggauuuccuuugccauaucauguuuuuugcuuuguguugcuuuguugggguucaucaugugggccugccaaaaaggcaacauuaggugcaacauuugcauuuga

SEQ ID NO: 42815 - RNA, 1701 nt, Artificial Sequence; identical to SEQ ID NO: 40264
  derived and/or modified CDS sequence (wt) from hemagglutinin__InfluenzaA__AHC60935

SEQ ID NO: 42816 - RNA, 1701 nt, Artificial Sequence
  derived and/or modified CDS sequence (wt) from hemagglutinin__InfluenzaA__AHC60947
augaagacuaucauugcuuugagcuacauucuaugucugguuuucgcucaaaaacuuccuggaaaugacaacagcacggcaacgcugugccuugggcaccaugcagugccaaacggaacgauagugaaaacaaucacgaaugaccaaauugaaguuacuaaugcuacugagcugguucagaguuccucaacaggugaaauaugcaacaguccucaucagauccuugauggagaaaacugcacacuaauagaugcucuauugggagacccucagugugauggcuuccaaaacaagaaaugggaccuuuuuguugaacgaagcaaagcccacagcaacuguuacccuuaugaugugccggauuaugccucccuuagaucacuaguugccucauccggcacacuggaguuuaacaaugaaagcuucaauuggacuggagucacucaaaacggaacaagcucugcuugcauaaggagaucuaauaauaguuucuuuaguagauugaauugguugacccacuuaaacuucaaauacccagcauugaacgugacuaugccaaacaaugaacaauuugacaaauuguacauuugggggguucaccacccggguacggacaaggaccaaaucuuccuguaugcucaagcaucaggaagaaucacaguaucuaccaaaagaagccaacaagcuguaauuccgaauaucggaucuagacccagaguaaggaauaucccuagcagaguaagcaucuauuggacaauaguaaaaccgggagacauacuuuugauuaacagcacagggaaucuaauugcuccuagggguuacuucaaaauacgaagugggaaaagcucaauaaugagaucagaugcacccauuggcaaaugcaauucugcaugcaucacuccaaauggaagcauucccaaugacaaaccauuccaaaauguaaacaggaucacauacggggccugucccagauauguuaagcaaaacacucugaaauuggcaacaggaaugagaaauguaccagagaaacaaacuagaggcauauuuggcgcaauagcggguuucauagaaaaugguugggagggaaugguggaugguugguacgguuucaggcaucaaaauucugagggaaggggacaagcagcagaucucaaaagcacucaagcagcaaucgaucaaaucaaugggaagcugaauagauugaucgggaaaaccaacgagaaauuccaucagauugaaaaagaauucucagaagucgaagggagaauucaggaccuugagaaauauguugaggacacuaaaauagaucucuggucauacaacgcggagcuucuuguugcccuggagaaccaacacacaauugaucuaacugacucagaaaugaacaaacuguuugaaaaaacaaagaagcaacugagggaaaaugcugaggauaugggcaaugguuguuucaaaauauaccacaaaugugacaaugccugcauaggaucaaucagaaauggaacuuaugaccacgauguguacagagaugaagcauuaaacaaccgauuccagaucaagggaguugagcugaagucaggguacaaagauuggauccuauggauuuccuuugccauaucauguuuuuugcuuuguguugcuuuguugggguucaucaugugggccugccaaaaaggcaacauuaggugcaacauuugcauuuga

SEQ ID NO: 42817 - RNA, 1701 nt, Artificial Sequence; identical to SEQ ID NO: 40264
  derived and/or modified CDS sequence (wt) from hemagglutinin__InfluenzaA__AHC60959

SEQ ID NO: 42818 - RNA, 1701 nt, Artificial Sequence; identical to SEQ ID NO: 42703
  derived and/or modified CDS sequence (wt) from hemagglutinin__InfluenzaA__AHC60971

SEQ ID NO: 42819 - RNA, 1701 nt, Artificial Sequence
  derived and/or modified CDS sequence (wt) from hemagglutinin__InfluenzaA__AHC60983
augaagacuaucauugcuuugagcuacauucuaugucugguuuucgcucaaaaacuuccuggaaaugacaacagcacggcaacgcugugccuugggcaccaugcaguaccaaacggaacgauagugaaaacaaucacgaaugaccaaauugaaguuacuaaugcuacugagcugguucagaauuccucaacaggugaaauaugcgacaguccucaucagauccuugauggagaaaacugcacacuaauagaugcucuauugggagacccucagugugauggcuuccaaaauaagaaaugggaccuuuuuguugaacgaagcaaagccuacagcaacuguuacccuuaugaugugccggauuaugccucccuuaggucacuaguugccucauccggcacacuggaguuuaacaaugaaagcuucaauuggacuggagucacucaaaacggaacaagcucugcuugcauaaggagaucuaauaauaguuucuuuaguagauugaauugguugacccacuuaaacuucaaauacccagcauugaacgugacuaugccaaacaaugaacaauuugacaaauuguacauuugggggguucaccacccggguacggacaaggaccaaaucuuccuguaugcucaagcaucaggaagaaucacaguaucuaccaaaagaagccaacaagcuguaaucccgaauaucggaucuagacccagaguaaggaauaucccuagcagaauaagcaucuauuggacaauaguaaaaccgggagacauacuuuugauuaacagcacagggaaucuaauugcuccuagggguuacuucaaaauacgaagugggaaaagcucaauaaugagaucagaugcacccauuggcaaaugcaauucugaaugcaucacuccaaauggaagcauucccaaugacaaaccauuccaaaauguaaacaggaucacauacggggccugucccagauauguuaagcaaaacacucugaaauuggcaacaggaaugcgaaauguaccagagaaacaaacuagaggcauauuuggcgcaauagcggguuucauagaaaaugguugggagggaaugguggaugguugguacgguuucaggcaucaaaauucugagggaagaggacaagcagcagaucucaaaagcacucaagcagcaaucgaucaaaucaaugggaagcugaauagauugaucgggaaaaccaacgagaaauuccaucagauugaaaaggaauucucagaagucgaagggagaauucaggaccuugagaaauauguugaggacacuaaaauagaucucuggucauacaacgcggagcuucuuguugcccuggagaaccaacauacaauugaucuaacugacucagaaaugaacaaacuguuugaaaaaacaaagaagcaacugagggaaaaugcugaggauaugggcaaugguuguuucaaaauauaccacaaaugugacaaugccugcauaggaucaaucagaaauggaacuuaugaccacgauguauacagagaugaagcauuaaacaaccgguuccagaucaagggaguugagcugaagucaggguacaaagauuggauccuauggauuuccuuugccauaucauguuuuuugcuuuguguugcuuuguugggguucaucaugugggccugccaaaaaggcaacauuaggugcaacauuugcauuuga

SEQ ID NO: 42820 - RNA, 1701 nt, Artificial Sequence; identical to SEQ ID NO: 42634
  derived and/or modified CDS sequence (wt) from hemagglutinin__InfluenzaA__AHC61007

SEQ ID NO: 42821 - RNA, 1701 nt, Artificial Sequence; identical to SEQ ID NO: 42603
  derived and/or modified CDS sequence (wt) from hemagglutinin__InfluenzaA__AHC61019

SEQ ID NO: 42822 - RNA, 1701 nt, Artificial Sequence
  derived and/or modified CDS sequence (wt) from hemagglutinin__InfluenzaA__AHC61031
augaagacuaucauugcuuugagcuacauucuaugucugguuuucgcucaaaaacuuccuggaaaugacaacagcacggcaacgcugugccuugggcaccaugcagugccaaacggaacgauagugaaaacaaucacgaaugaccaaauugaaguuacuaaugcuacugagcugguucagaguuccucaacaggugaaauaugcaacaguccucaucagauccuugauggagaaaacugcacacuaauagaugcucuauugggagacccucagugugauggcuuccaaaacaagaaaugggaccuuuuuguugaacgaagcaaagcccacagcaacuguuacccuuaugaugugccggauuaugccucccuuaggucacuaguugccucauccggcacacuggaguuuaacaaugaaagcuucaauuggacuggagucacucaaaacggaacaagcucugcuugcauaaggagaucuaauaauaguuucuuuaguagauugaauugguugacccauuuaaacuucaaauacccagcauugaacgugacuaugccaaacaaugaacaauuugacaaauuguacauuugggggguucaccacccggguacggacaaggaccaaaucuuccuguaugcucaagcagcaggaagaaucacaguaucuaccaaaagaagccaacaagcuguaauuccgaauaucggaucuagacccagaguaaggaauaucccuagcagaguaagcaucuauuggacaauaguaaaaccgggagacauacuuuugauuaacagcacagggaaucuaauugcuccuagggguuacuucaaaauacgaagugggaaaagcucaauaaugagaucagaugcacccauuggcaaaugcaauucugcaugcaucacuccaaauggaagcauucccaaugacaaaccauuccaaaauguaaacaggaucacauacggggccugucccagauauguuaagcaaaacacucugaaauuggcaacaggaaugagaaauguaccagagaaacaaacuagaggcauauuuggcgcaauagcugguuucauagaaaaugguugggagggaaugguggaugguugguacgguuucaggcaucaaaauucugagggaaggggacaagcagcagaucucaaaagcacucaagcagcaaucgaucaaaucaaugggaagcugaauagauugaucgggaaaaccaacgagaaauuccaucagauugaaaaagaauucucagaagucgaagggagaauucaggaccuugagaaauauguugaggacacuaaaauagaucucuggucauacaacgcggagcuucuuguugcccuggagaaccaacacacaauugaucuaacugacucagaaaugaacaaacuguuugaaaaaacaaagaagcaacugagggaaaaugcugaggauaugggcaaugguuguuucaaaauauaccacaaaugugacaaugccugcauaggaucaaucagaaauggaacuuaugaccacgauguguacagagaugaagcauuaaacaaccgauuccagaucaagggaguugagcugaagucaggguacaaagauuggauccuauggauuuccuuugccauaucauguuuuuugcuuugcguuguuuuguugggguucaucaugugggccugccaaaaaggcaacauuaggugcaacauuugcauuuga

SEQ ID NO: 42823 - RNA, 1701 nt, Artificial Sequence; identical to SEQ ID NO: 42606
  derived and/or modified CDS sequence (wt) from hemagglutinin__InfluenzaA__AHC61043

SEQ ID NO: 42824 - RNA, 1701 nt, Artificial Sequence
  derived and/or modified CDS sequence (wt) from hemagglutinin__InfluenzaA__AHC61055
augaagacuaucauugcuuugagcuacauucuaugucugguuuucgcucaaaaacuuccuggaaaugacaacagcacggcaacgcugugccuugggcaccaugcagugccaaacggaacgauagugaaaacaaucacgaaugaccaaauugaaguuacuaaugcuacugagcugguucagaguuccucaacaggugaaauaugcaacaguccucaucagauccuugauggagaaaacugcacacuaauagaugcucuauugggagacccucagugugauggcuuccaaaacaagaaaugggaccuuuuuguugaacgaagcaaagcccacagcaacuguuacccuuaugaugugccggauuaugccucccuuaggucacuaguugccucauccggcacacuggaguuuaacaaugaaagcuucaauuggacuggagucacucaaaacggaacaagcucugcuugcauaaggagaucuaauaauaguuucuuuaguagauugaauugguuaacccacuuaaacuucaaauacccagcauugaacgugacuaugccaaacaaugaacaauuugacaaauuguacauuugggggguucaccacccggguacggacaaggaccaaaucuuccuguaugcucaagcagcaggaagaaucacaguaucuaccaaaagaagccaacaagcuguaauuccgaauaucggaucuagacccagaguaaggaauaucccuagcagaguaagcaucuauuggacaauaguaaaaccgggagacauacuuuugauuaacagcacagggaaucuaauugcuccuagggguuacuucaaaauacgaagugggaaaagcucaauaaugagaucagaugcacccauuggcaaaugcaauucugcaugcaucacuccaaauggaagcauucccaaugacaaaccauuccaaaauguaaacaggaucacauacggggccugucccagauauguuaagcaaaacacucugaaauuggcaacaggaaugagaaauguaccagagaaacaaacuagaggcauauuuggcgcaauagcugguuucauagaaaaugguugggagggaaugguggaugguugguacgguuucaggcaucaaaauucugagggaaggggacaagcagcagaucucaaaagcacucaagcagcaaucgaucaaaucaaugggaagcugaauagauugaucgggaaaaccaacgagaaauuccaucagauugaaaaagaauucucagaagucgaagggagaauucagaaccuugagaaauauguugaggacacuaaaauagaucucuggucauacaacgcggagcuucuuguugcccuggagaaccaacacacaauugaucuaacugacucagaaaugaacaaacuguuugaaaaaacaaagaagcaacugagggaaaaugcugaggauaugggcaaugguuguuucaaaauauaccacaaaugugacaaugccugcauaggaucaaucagaaauggaacuuaugaccacgauguguacagagaugaagcauuaaacaaccgauuccagaucaagggaguugagcugaagucaggguacaaagauuggauccuauggauuuccuuugccauaucauguuuuuugcuuuguguugcuuuguugggguucaucaugugggccugccaaaaaggcaacauuaggugcaacauuugcauuuga

SEQ ID NO: 42825 - RNA, 1701 nt, Artificial Sequence; identical to SEQ ID NO: 42691
  derived and/or modified CDS sequence (wt) from hemagglutinin__InfluenzaA__AHC61067

SEQ ID NO: 42826 - RNA, 1701 nt, Artificial Sequence
  derived and/or modified CDS sequence (wt) from hemagglutinin__InfluenzaA__AHC61079
augaagacuaucauugcuuugagcuacauucuaugucugguuuucgcucaaaaacuuccuggaaaugacaacagcacggcaacgcugugccuugggcaccaugcaguaccaaacggaacgauagugaaaacaaucacgaaugaccaaauugaaguuacuaaugcuacugagcugguucagaguuccucaacaggugaaauaugcgacaguccucaucagauccuugauggagaaaacugcacacuaauagaugcucuauugggagacccucagugugauggcuuccaaaauaagaagugggaccuuuuuguugaacgaagcaaagccuacagcaacuguuacccuuaugaugugccggauuaugccucccuuaggucacuaguugccucauccggcacacuggaguuuaacaaugaaagcuucaauuggacuggagucacucaaaacggaacaagcuccgcuugcauaaggagaucuaauaguaguuucuuuaguagauugaauugguugacccacuuaaacuucaaauacccagcauugaacgugacuaugccaaacaaugaacaauuugacaaauuguacauuugggggguucaccacccggguacggacaaggaccaaaucuuccuguaugcucaaucaucaggaagaaucacaguaucuaccaaaagaagccaacaagcuguaaucccgaauaucggaucuagacccagaauaaggaauaucccuagcagaauaagcaucuauuggacaauaguaaaaccgggagacauacuuuugauuaacagcacagggaaucuaauugcuccuagggguuacuucaaaauacgaagugggaaaagcucaauaaugagaucagaugcacccauuggcaaaugcaauucugaaugcaucacuccaaauggaagcauucccaaugacaaaccauuccaaaauguaaacaggaucacauacggggccugucccagauauguuaagcaaagcacucugaaauuggcaacaggaaugcgaaauguaccagagaaacaaacuagaggcauauuuggcgcaauagcggguuucauagaaaaugguugggagggaaugguggaugguugguacgguuucaggcaucaaaauucugagggaagaggacaagcagcagaucucaaaagcacucaagcagcaaucgaucaaaucaaugggaagcugaaucgauugaucgggaaaaccaacgagaaauuccaucagauugaaaaagaauucucagaagucgaagggagaauucaggaccuugagaaauauguugaggacacuaaaauagaucucuggucauacaacgcggagcuucuuguugcccuggagaaccaacauacaauugaucuaacugacucagaaaugaacaaacuguuugaaaaaacaaagaagcaacugagggaaaaugcugaggauaugggcaaugguuguuucaaaauauaccacaaaugugacaaugccugcauaggaucaaucagaaauggaacuuauaaccacgauguauacagagaugaagcauuaaacaaccgguuccagaucaagggaguugagcugaagucaggguacaaagauuggauccuauggauuuccuuugccauaucauguuuuuugcuuuguguugcuuuguugggguucaucaugugggccugccaaaagggcaacauuaggugcaacauuugcauuuga

SEQ ID NO: 42827 - RNA, 1701 nt, Artificial Sequence; identical to SEQ ID NO: 42607
  derived and/or modified CDS sequence (wt) from hemagglutinin__InfluenzaA__AHC61103

SEQ ID NO: 42828 - RNA, 1701 nt, Artificial Sequence; identical to SEQ ID NO: 42607
  derived and/or modified CDS sequence (wt) from hemagglutinin__InfluenzaA__AHC61115

SEQ ID NO: 42829 - RNA, 1701 nt, Artificial Sequence; identical to SEQ ID NO: 40264
  derived and/or modified CDS sequence (wt) from hemagglutinin__InfluenzaA__AHC61127

SEQ ID NO: 42830 - RNA, 1701 nt, Artificial Sequence
  derived and/or modified CDS sequence (wt) from hemagglutinin__InfluenzaA__AHC61139
augaagacuaucauugcuuugagcuacauucuaugucugguuuucgcucaaaaacuuccuggaaaugacaacagcacggcaacgcugugccuugggcaccaugcagugccaaacggaacgauagugaaaacaaucacgaaugaccaaauugaaguuacuaaugcuacugagcugguucagaguuccucaacaggugaaauaugcaacaguccucaucagauccuugauggagaaaacugcacacuaauagaugcucuauugggagacccucagugugauggcuuccaaaacaagaaaugggaccuuuuuguugaacgaagcaaagcccacagcaacuguuacccuuaugaugugccggauuaugccucccuuaggucacuaguugccucauccggcacacuggaguuuaacaaugaaagcuucaauuggacuggagucacucaaaacggaacaagcucugcuugcauaaggagaucuaauaauaguuucuuuaguagauuaaauugguugacccacuuaaacuucaaauacccagcauugaacgugacuaugccaaacaaugaacaauuugacaaauuguacauuugggggguucaccacccggguacggacaaggaccaaaucuuccuguaugcucaagcaucaggaagaaucacaguaucuacccaaagaagccaacaagcuguaauuccgaauaucggaucuagacccagaguaaggaauaucccuagcagaguaagcaucuauuggacaauaguaaaaccgggagacauacuuuugauuaacagcacagggaaucuaauugcuccuagggguuacuucaaaauacgaagugggaaaagcucaauaaugagaucagaugcacccauuggcaaaugcaauucugcaugcaucacuccaaauggaagcauucccaaugacaaaccauuccaaaauguaaacaggaucacauacggggccugucccagauauguuaagcaaaacacucugaaauuggcaacaggaaugagaaauguaccagagaaacaaacuagaggcauauuuggcgcaauagcggguuucauagaaaaugguugggagggaaugguggaugguugguacgguuucaggcaucaaaauucugagggaaggggacaagcagcagaucucaaaagcacucaagcagcaaucgaucaaaucaaugggaagcugaauagauugaucgggaaaaccaacgagaaauuccaucagauugaaaaagaauucucagaagucgaagggagaauucaggaccuugagaaauauguugaggacacuaaaauagaucucuggucauacaacgcggagcuucuuguugcccuggagaaccaacacacaauugaucuaacugacucagaaaugaacaaacuguuugaaaaaacaaagaagcaacugagggaaaaugcugaggauaugggcaaugguuguuucaaaauauaccacaaaugugacaaugccugcauaggaucaaucagaaauggaacuuauaaccacgauguguacagagaugaagcauuaaacaaccgauuccagaucaagggaguugagcugaagucaggguacaaagauuggauccuauggauuuccuuugccauaucauguuuuuugcuuuguguugcuuuguugggguucaucaugugggccugccaaaaaggcaacauuaggugcaacauuugcauuuga

SEQ ID NO: 42831 - RNA, 1701 nt, Artificial Sequence; identical to SEQ ID NO: 42607
  derived and/or modified CDS sequence (wt) from hemagglutinin__InfluenzaA__AHC61151

SEQ ID NO: 42832 - RNA, 1701 nt, Artificial Sequence
  derived and/or modified CDS sequence (wt) from hemagglutinin__InfluenzaA__AHC61163
augaagacuaucauugcuuugagcuacauucuaugucugguuuucgcucaaaaacuuccuggaaaugacaacagcacggcaacgcugugccuugggcaccaugcagugccaaacggaacgauagugaaaacaaucacgaaugaccaaauugaaguuacuaaugcuacugagcugguucagaguuccucaacaggugaaauaugcaacaguccucaucagauccuugauggagaaaacugcacacuaauagaugcucuauugggagacccucagugugauggcuuccaaaacaagaaaugggaccuuuuuguugaacgaagcaaagcccacagcaacuguuacccuuaugaugugccggauuaugccucccuuaggucacuaguugccucauccggcacacuggaguuuaaaaaugaaagcuucaauuggacuggagucacucaaaacggaacaagcucugcuugcauaaggagaucuaauaauaguuucuuuaguagauugaauugguugacccacuuaaacuucaaauacccagcauugaacgugacuaugccaaacaaugaacaauuugacaaauuguacauuugggggguucaccacccggguacggacaaggaccaaaucuuccuguaugcucaagcaucaggaagaaucacaguaucuaccaaaagaagccaacaagcuguaguuccgaauaucggaucuagacccagaguaaggaauaucccuagcagaguaagcaucuauuggacaauaguaaaaccgggagacauacuuuugauuaacagcacagggaaucuaauugcuccuagggguuacuucaaaauacgaagugggaaaagcucaauaaugagaucagaugcacccauuggcaaaugcaauucugcaugcaucacuccaaauggaagcauucccaaugacaaaccauuccaaaauguaaacaggaucacauacggggccugucccagauauguuaagcaaaacacucugaaauuggcaacaggaaugagaaauguaccagagaaacaaacuagaggcauauuuggcgcaauagcggguuucauagaaaauggcugggagggaaugguggaugguugguacgguuucaggcaucaaaauucugagggaaggggacaagcagcagaucucaaaagcacucaagcagcaaucgaucaaaucaaugggaagcugaauagauugaucgggaaaaccaacgagaaauuccaucagauugaaaaagaauucucagaagucgaagggagaauucaggaccuugagaaauauguugaggacacuaaaauagaucucuggucauacaacgcggagcuucuuguugcccuggagaaccaacacacaauugaucuaacugacucagaaaugaacaaacuguuugaaaaaacaaagaagcaacugagggaaaaugcugaggauaugggcaaugguuguuucaaaauauaucacaaaugugacaaugccugcauaggaucaaucagaaauggaacuuaugaccacgauguguacagagaugaagcauuaaacaaccgauuccagaucaagggaguugagcugaagucaggguacaaagauuggauccuauggauuuccuuugccauaucauguuuuuugcuuuguguugcuuuguugggguucaucaugugggccugccaaaaaggcaacauuaggugcaacauuugcauuuga

SEQ ID NO: 42833 - RNA, 1701 nt, Artificial Sequence; identical to SEQ ID NO: 40264
  derived and/or modified CDS sequence (wt) from hemagglutinin__InfluenzaA__AHC61175

SEQ ID NO: 42834 - RNA, 1701 nt, Artificial Sequence; identical to SEQ ID NO: 42607
  derived and/or modified CDS sequence (wt) from hemagglutinin__InfluenzaA__AHC61187

SEQ ID NO: 42835 - RNA, 1701 nt, Artificial Sequence; identical to SEQ ID NO: 42609
  derived and/or modified CDS sequence (wt) from hemagglutinin__InfluenzaA__AHC61199

SEQ ID NO: 42836 - RNA, 1701 nt, Artificial Sequence
  derived and/or modified CDS sequence (wt) from hemagglutinin__InfluenzaA__AHC61211
augaagacuaucauugcuuugagcuacauucuaugucugguuuucgcucaaaaacuuccugggaaugacaacagcacggcaacgcugugccuugggcaccaugcagugccaaacggaacgauagugaaaacaaucacgaaugaccaaauugaaguuacuaaugcuacugaacugguucagaguuccucaacaggugaaauaugcaacaguccucaucagauccuugauggagaaaacugcacacuaauagaugcucuauugggagacccucagugugauggcuuccaaaacaagaaaugggaccuuuuuguugaacgaagcaaagcccacagcaacuguuacccuuaugaugugccggauuaugccucccuuaggucacuaguugccucauccggcacacuggaguuuaacaaugaaagcuucaauuggacuggagucacucaaaacggaacaagcucugcuugcauaaggggaucuaauaauaguuucuuuaguagauugaauugguugacccacuuaaacuucaaauacccagcauugaacgugacuaugccaaacaaugaacaauuugacaaauuguacauuugggggguucaccacccggguacggacaaggaccaaaucuuccuguaugcucaagcaucaggaagaaucacgguaucuaccaaaagaagccaacaagcuguaauuccgaauaucggaucuagacccagaguaaggaauaucccuagcagaguaagcaucuauuggacaauaguaaaaccgggagacauacuuuugauuaacagcacagggaaucuaauugcuccuagggguuacuucaaaauacgaagugggaaaagcucaauaaugagaucagaugcacccauuggcaaaugcaauucugcaugcaucacuccaaauggaagcauucccaaugacaaaccauuccaaaauguaaacaggaucacauacggggccugucccagauauguuaagcaaaacacucugaaauuggcaacaggaaugagaaauguaccagagaaacaaacuagaggcauauuuggcgcaauagcggguuucauagaaaaugguugggagggaaugguggaugguugguacgguuucaggcaucaaaauucugagggaaggggacaagcagcagaucucaaaagcacucaagcagcaaucgaucaaaucaaugggaagcugaauagauugaucgggaaaaccaacgagaaauuccaucagauugaaaaagaauucucagaagucgaagggagaauucaggaccuugagaaauauguugaggacacuaaaauagaucucuggucauacaacgcggagcuucuuguugcccuggagaaccaacacacaauugaucuaacugacucagaaaugaacaaacuguuugaaaaaacaaagaagcaacugagggaaaaugcugaggauaugggcaaugguuguuucaaaauauaccacaaaugugacaaugccugcauaggaucaaucagaaauggaacuuaugaccacgauguguacagagaugaagcauuaaacaaccgauuccagaucaagggaguugagcugaagucaggguacaaagauuggauccuauggauuuccuuugccauaucauguuuuuugcuuuguguugcuuuguugggguucaucaugugggccugccaaaaaggcaacauuaggugcaacauuugcauuuga

SEQ ID NO: 42837 - RNA, 1701 nt, Artificial Sequence; identical to SEQ ID NO: 42703
  derived and/or modified CDS sequence (wt) from hemagglutinin__InfluenzaA__AHC61223

SEQ ID NO: 42838 - RNA, 1701 nt, Artificial Sequence; identical to SEQ ID NO: 42672
  derived and/or modified CDS sequence (wt) from hemagglutinin__InfluenzaA__AHC61235

SEQ ID NO: 42839 - RNA, 1701 nt, Artificial Sequence; identical to SEQ ID NO: 40264
  derived and/or modified CDS sequence (wt) from hemagglutinin__InfluenzaA__AHC61247

SEQ ID NO: 42840 - RNA, 1701 nt, Artificial Sequence; identical to SEQ ID NO: 40264
  derived and/or modified CDS sequence (wt) from hemagglutinin__InfluenzaA__AHC61259

SEQ ID NO: 42841 - RNA, 1701 nt, Artificial Sequence; identical to SEQ ID NO: 42608
  derived and/or modified CDS sequence (wt) from hemagglutinin__InfluenzaA__AHC61271

SEQ ID NO: 42842 - RNA, 1701 nt, Artificial Sequence
  derived and/or modified CDS sequence (wt) from hemagglutinin__InfluenzaA__AHC61283
augaagacuaucauugcuuugagcuacauucuaugucugguuuucgcucaaaaacuuccuggaaaugacaacagcacggcaacgcugugccuugggcaccaugcagugccaaacggaacgauagugaaaacaaucacgaaugaccaaauugaaguuacuaaugcuacugagcugguucagaguuccucaacaggugaaauaugcaacaguccucaucagauccuugauggagaaaacugcacacuaauagaugcucuauugggagacccucagugugauggcuuccaaaacaagaaaugggaccuuuuuguugaacgaagcaaagcccacagcaacuguuacccuuaugaugugccggauuaugccucccuuaggucacuaguugccucauccggcacacuggaguuuaacaaugaaagcuucaauuggacuggagucacucaaaacggaacaagcucugcuugcauaaggagaucuaauaauaguuucuuuaguagauugaauugguugacccacuuaaacuucaaauacccagcauugaacgugacuaugccaaacaaugaacaauuugacaaauuguacauuugggggguucaccacccggguacggacaaggaccaaaucuuccuguaugcucaagcagcaggaagaaucacaguaucuaccaaaagaagccaacaagcuguaauuccgaauaucggaucuagacccagaguaaggaauaucccuagcagaguaagcaucuauuggacaauaguaaaaccgggagacauacuuuugauuaacagcacagggaaucuaauugcuccuagggguuacuucaaaauacgaagugggaaaagcucaauaaugagaucagaugcacccauuggcaaaugcaauucugcaugcaucacuccaaauggaagcauucccaaugacaaaccauuccaaaauguaaacaggaucacauacggggccugucccagauauguuaagcaaaacacucugaaauuggcaacaggaaugagaaauguaccagagaaacaaacuagaggcauauuuggcgcaauagcugguuucauagaaaaugguugggagggaaugguggaugguugguacgguuucaggcaucaaaauucugagggaaggggacaagcagcagaucucaaaagcacucaagcagcaaucgaucaaaucaaugggaagcugaauagauugaucgggaaaaccaacgagaaauuccaucagauugaaaaagaauucucagaagucgaagggagaauucaggaccuugagaaauauguugaggacacuaaaauagaucucuggucauacaacgcggagcuucuuguugcccuggagaaccaacacacaauugaucuaacugacucggaaaugaacaaacuguuugaaaaaacaaagaagcaacugagggaaaaugcugaggauaugggcaaugguuguuucaaaauauaccacaaaugugacaaugccugcauaggaucaaucagaaauggaacuuaugaccacgauguguacagagaugaagcauuaaacaaccgauuccagaucaagggaguugagcugaagucaggguacaaagauuggauccuauggauuuccuuugccauaucauguuuuuugcuuuguguugcuuuguugggguucaucaugugggccugccaaaaaggcaacauuaggugcaacauuugcauuuga

SEQ ID NO: 42843 - RNA, 1701 nt, Artificial Sequence; identical to SEQ ID NO: 42632
  derived and/or modified CDS sequence (wt) from hemagglutinin__InfluenzaA__AHC61295

SEQ ID NO: 42844 - RNA, 1701 nt, Artificial Sequence
  derived and/or modified CDS sequence (wt) from hemagglutinin__InfluenzaA__AHC61307
augaagacuaucauugcuuugagcuacauucuaugucugguuuucgcucaaaaacuuccugggaaugacaacagcacggcaacgcugugccuugggcaccaugcagugccaaacggaacgauagugaaaacaaucacgaaugaccaaauugaaguuacuaaugcuacugaacugguucagaguuccucaacaggugaaauaugcaacaguccucaucagauccuugauggagaaaacugcacacuaauagaugcucuauugggagacccucagugugauggcuuccaaaacaagaaaugggaccuuuuuguugaacgaagcaaagcccacagcaacuguuacccuuaugaugugccggauuaugccucccuuaggucacuaguugccucauccggcacacuggaguuuaacaaugaaagcuucaauuggacuggagucacucaaaacggaacaagcucugcuugcauaaggggaucuaauaauaguuucuuuaguagauugaauugguugacccacuuaaacuucaaauacccagcauugaacgugacuaugccaaacaaugaacaauuugacaaauuguacauuugggggguucaccacccggguacggacaaggaccaaaucuuccuguaugcucaagcaucaggaagaaucacaguaucuaccaaaagaagccaacaagcuguaauuccgaauaucggaucuagacccagaguaaggaauaucccuagcagaguaagcaucuauuggacaauaguaaaaccgggagacauacuuuugauuaacagcacagggaaucuaauugcuccuagggguuacuucaaaauacgaagugggaaaagcucaauaaugagaucagaugcacccauuggcaaaugcaauucugcaugcaucaccccaaauggaagcauucccaaugacaaaccauuccaaaauguaaacaggaucacauacggggccugucccagauauguuaagcaaaacacucugaaauuggcaacaggaaugagaaauguaccagagaaacaaacuagaggcauauuuggcgcaauagcggguuucauagaaaaugguugggagggaaugguggaugguugguacgguuucaggcaucaaaauucugagggaaggggacaagcagcagaucucaaaagcacucaagcagcaaucgaucaaaucaaugggaagcugaauagauugaucgggagaaccaacgagaaauuccaucagauugaaaaagaauucucagaagucgaagggagaauucaggaccuugagaaauauguugaggacacuaaaauagaucucuggucauacaacgcggagcuucuuguugcccuggagaaccaacacacaauugaucuaacugacucagaaaugaacaaacuguuugaaaaaacaaagaagcaacugagggaaaaugcugaggauaugggcaaugguuguuucaaaauauaccacaaaugugacaaugccugcauaggaucaaucagaaauggaacuuaugaccacgauguguacagagaugaagcauuaaacaaccgauuccagaucaagggaguugagcugaagucaggguacaaagauuggauccuauggauuuccuuugccauaucauguuuuuugcuuuguguugcuuuguugggguucaucaugugggccugccaaaaaggcaacauuaggugcaacauuugcauuuga

SEQ ID NO: 42845 - RNA, 1701 nt, Artificial Sequence; identical to SEQ ID NO: 42627
  derived and/or modified CDS sequence (wt) from hemagglutinin__InfluenzaA__AHC61319

SEQ ID NO: 42846 - RNA, 1701 nt, Artificial Sequence
  derived and/or modified CDS sequence (wt) from hemagglutinin__InfluenzaA__AHC61331
augaagacuaucauugcuuugagcuacauucuaugucugguuuucgcucaaaaacuuccugggaaugacaacagcacggcaacgcugugccuugggcaccaugcagugccaaacggaacgauagugaaaacaaucacgaaugaccaaauugaaguuacuaaugcuacugaacugguucagaguuccucaacaggugaaauaugcaacaguccucaucagauccuugauggagaaaacugcacacuaauagaugcucuauugggagacccucagugugauggcuuccaaaacaagaaaugggaccuuuuuguugaacgaagcaaagcccacagcaacuguuacccuuaugaugugccggauuaugccucccuuaggucacuaguugccucauccggcacacuggaguuuaacaaugaaagcuucaauuggacuggagucacucaaaacggaacaagcucugcuugcauaaggggaucuaauaauaguuucuuuaguagauugaauugguugacccacuuaaacuucaaauacccagcauugaacgugacuaugccaaacaaugaacaauuugacaaauuguacauuugggggguucaccacccggguacggauaaggaccaaaucuuccuguaugcucaagcaucaggaagaaucacaguaucuaccaaaagaagccaacaagcuguaauuccgaauaucggaucuagacccagaguaaggaauaucccuagcagaguaagcaucuauuggacaauaguaaaaccgggagacauacuuuugauuaacagcacagggaaucuaauugcuccuagggguuacuucaaaauacgaagugggaaaagcucaauaaugagaucagaugcacccauuggcaaaugcaauucugcaugcaucacuccaaauggaagcauucccaaugacaaaccauuccaaaauguaaacaggaucacauacggggccugucccagauauguuaagcaaaacacucugaaauuggcaacaggaaugagaaauguaccagagaaacaaacuagaggcauauuuggcgcaauagcggguuucauagaaaaugguugggagggaaugguggaugguugguacgguuucaggcaucaaaauucugagggaaggggacaagcagcagaucucaaaagcacucaagcagcaaucgaucaaaucaaugggaagcugaauagauugaucgggaaaaccaacgagaaauuccaucagauugaaaaagaauucucagaagucgaagggagaauucaggaccuugagaaauauguugaggacacuaaaauagaucucuggucauacaacgcggagcuucuuguugcccuggagaaccaacacacaauugaucuaacugacucagaaaugaacaaacuguuugaaaaaacaaagaagcaacugagggaaaaugcugaggauaugggcaaugguuguuucaaaauauaccacaaaugugacaaugccugcauaggaucaaucagaaauggaacuuaugaccacgauguguacagagaugaagcauuaaacaaccgauuccagaucaagggaguugagcugaagucaggguacaaagauuggauccuauggauuuccuuugccauaucauguuuuuugcuuuguguugcuuuguugggguucaucaugugggccugccaaaaaggcaacauuaggugcaacauuugcauuuga

SEQ ID NO: 42847 - RNA, 1701 nt, Artificial Sequence
  derived and/or modified CDS sequence (wt) from hemagglutinin__InfluenzaA__AHC61343
augaagacuaucauugcuuugagcuacauucuaugucugguuuucgcucaaaaacuuccugggaaugacaacagcacggcaacgcugugccuugggcaccaugcagugccaaacggaacgauagugaaaacaaucacgaaugaccaaauugaaguuacuaaugcuacugaacugguucagaguuccucaacaggugaaauaugcaacaguccucaucagauccuugauggagaaaacugcacacuaauagaugcucuauugggagacccucagugugauggcuuccaaaacaagaaaugggaccuuuuuguugaacgaagcaaagcccacagcaacuguuacccuuaugaugugccggauuaugccucccuuaggucacuaguugccucauccggcacacuggaguuuaacaaugaaagcuucaauuggacuggagucacucaaaacggaacaagcucugcuugcauaaggggaucuaauaauaguuucuuuaguagauugaauugguugacccacuuaaacuucaaauacccagcauugaacgugacuaugccaaacaaugaacaauuugacaaauuguacauuugggggguucaccacccggguacggacaaggaccaaaucuuccuguaugcucaagcaucaggaagaaucacgguaucuaccaaaagaagccaacaagcuguaauuccgaauaucggaucuagacccagaguaaggaauaucccuagcagaauaagcaucuauuggacaauaguaaaaccgggagacauacuuuugauuaacagcacagggaaucuaauugcuccuagggguuacuucaaaauacgaagugggaaaagcucaauaaugagaucagaugcacccauuggcaaaugcaauucugcaugcaucacuccaaauggaagcauucccaaugacaaaccauuccaaaauguaaacaggaucacauacggggccugucccagauauguuaagcaaaacacucugaaauuggcaacaggaaugagaaauguaccagagaaacaaacuagaggcauauuuggcgcaauagcggguuucauagaaaaugguugggagggaaugguggaugguugguacgguuucaggcaucaaaauucugagggaaggggacaagcagcagaucucaaaagcacucaagcagcaaucgaucaaaucaaugggaagcugaauagauugaucgggaaaaccaacgagaaauuccaucagauugaaaaagaauucucagaagucgaagggagaauucaggaccuugagaaauauguugaggacacuaaaauagaucucuggucauacaacgcggagcuucuuguugcccuggagaaccaacacacaauugaucuaacugacucagaaaugaacaaacuguuugaaaaaacaaagaagcaacugagggaaaaugcugaggauaugggcaaugguuguuucaaaauauaccacaaaugugacaaugccugcauaggaucaaucagaaauggaacuuaugaccacgauguguacagagaugaagcauuaaacaaccgauuccagaucaagggaguugagcugaagucaggguacaaagauuggauccuauggauuuccuuugccauaucauguuuuuugcuuuguguugcuuuguugggguucaucaugugggccugccaaaaaggcaacauuaggugcaacauuugcauuuga

SEQ ID NO: 42848 - RNA, 1701 nt, Artificial Sequence
  derived and/or modified CDS sequence (wt) from hemagglutinin__InfluenzaA__AHC61355
augaagacuaucauugcuuugagcuacauucuaugucugguuuucgcucaaaaacuuccuggaaaugacaacagcacggcaacgcugugccuugggcaccaugcagugccaaacggaacgauagugaaaacaaucacgaaugaccaaauugaaguuacuaaugcuacugagcugguucagaguuccucaacaggugaaauaugcaacaguccucaucagauccuugauggagaaaacugcacacuaauagaugcucuauugggagacccucagugugauggcuuccaaaacaagaaaugggaccuuuuuguugaacgaagcaaagcccacagcaacuguuacccuuaugaugugccggauuaugccucccuuaggucacuaguugccucauccggcacacuggaguuuaacaaugaaagcuucaauuggacuggagucacucaaaacggaacaagcucugcuugcauaaggagaucuaauaauaguuucuuuaguagauugaauugguugacccacuuaaacuucaaauacccagcauugaacgugacuaugccaaacaaugaacaauuugacaaauuguacauuugggggguucaccacccggguacggacaaggaccaaaucuuccuguaugcucaagcagcaggaagaaucacaguaucuaccaaaagaagccaacaagcuguaauuccgaauaucgggucuagacccagaguaaggaauaucccuagcagaguaagcaucuauuggacaauaguaaaaccgggagacauacuuuugauuaacagcacagggaaucuaauugcuccuagggguuacuucaaaauacgaagugggaaaagcucaauaaugagaucagaugcacccauuggcaaaugcaauucugcaugcaucacuccaaauggaagcauucccaaugacaaaccauuccaaaauguaaacaggaucacauauggggccugucccagauauguuaagcaaaacacucugaaauuggcaacaggaaugagaaauguaccagagaaacaaacuagaggcauauuuggcgcaauagcugguuucauagaaaaugguugggagggaaugguggaugguugguacgguuucaggcaucaaaauucugagggaaggggacaagcagcagaucucaaaagcacucaagcagcaaucgaucaaaucaaugggaagcugaauagauugaucgggaaaaccaacgagaaauuccaucagauugaaaaagaauucucagaagucgaagggagaauucaggaccuugagaaauauguugaggacacuaaaauagaucucuggucauacaacgcggagcuucuuguugcccuggagaaccaacacacaauugaucuaacugacucagaaaugaacaaacuguuugaaaaaacaaagaagcaacugagggaaaaugcugaggauaugggcaaugguuguuucaaaauauaccacaaaugugacaaugccugcauaggaucaaucagaaauggaacuuaugaccacgauguguacagagaugaagcauuaaacaaccgauuccagaucaagggaguugagcugaagucaggguacaaagauuggauccuauggauuuccuuugccauaucauguuuuuugcuuuguguugcuuuguugggguucaucaugugggccugccaaaaaggcaacauuaggugcaacauuugcauuuga

SEQ ID NO: 42849 - RNA, 1701 nt, Artificial Sequence; identical to SEQ ID NO: 42703
  derived and/or modified CDS sequence (wt) from hemagglutinin__InfluenzaA__AHC61367

SEQ ID NO: 42850 - RNA, 1701 nt, Artificial Sequence
  derived and/or modified CDS sequence (wt) from hemagglutinin__InfluenzaA__AHC61379
augaagacuaucauugcuuugagcuacauucuaugucugguuuucgcucaaaaacuuccuggaaaugacaacagcacggcaacgcugugccuugggcaccaugcagugccaaacggaacgauagugaaaacaaucacgaaugaccaaauugaaguuaccaaugcuacugagcugguucagaguuccucaacaggugaaauaugcaacaguccucaucagauccuugauggagaaaacugcacacuaauagaugcucuauugggagacccucagugugauggcuuccaaaacaagaaaugggaccuuuuuguugaacgaagcaaagcccacagcaacuguuacccuuaugaugugccggauuaugccucccuuaggucacuaguugccucauccggcacacuggaguuuaacaaugaaagcuucaauuggacuggagucacucaaaacggaacaagcucugcuugcauaaggagaucuaauaauaguuucuuuaguagauugaauugguugacccacuuaaacuucaaauacccagcauugaacgugacuaugccaaacaaugaacaauuugacaaauuguacauuugggggguucaccacccggguacggacaaggaccaaaucuuccuguaugcucaagcaucaggaagaaucacaguaucuaccaaaagaagccaacaagcuguaauuccgaauaucggaucuagacccagaguaaggaauaucccuagcagaguaagcaucuauuggacaauaguaaaaccgggagacauacuuuugauuaacagcacagggaaucuaauugcuccuagggguuacuucaaaauacgaagugggaaaagcucaauaaugagaucagaugcacccauuggcaaaugcaauucugcaugcaucacuccaaauggaagcauucccaaugacaaaccauuccaaaauguaaacaggaucacauacggggccugucccagauauguuaagcaaaacacucugaaauuggcaacaggaaugagaaauguaccagagaaacaaacuagaggcauauuuggcgcaauagcggguuucauagaaaauggcugggagggaaugguggaugguugguacgguuucaggcaucaaaauucugagggaaggggacaagcagcagaucucaaaagcacucaagcagcaaucgaucaaaucaaugggaagcugaauagauugaucgggaaaaccaacgagaaauuccaucagauugaaaaagaauucucagaaguugaagggagaauucaggaccuugagaaauauguugaggacacuaaaauagaucucuggucauacaacgcggagcuucuuguugcccuggagaaccaacacacaauugaucuaacugacucagaaaugaacaaacuguuugaaaaaacaaagaagcaacugagggaaaaugcugaggauaugggcaaugguuguuucaaaauauaucacaaaugugacaaugccugcauaggaucaaucagaaauggaacuuaugaccacgauguguacagagaugaagcauuaaacaaccgauuccagaucaagggaguugagcugaagucaggguacaaagauuggauccuauggauuuccuuugccauaucauguuuuuugcuuuguguugcuuuguugggguucaucaugugggccugccaaaaaggcaacauuaggugcaacauuugcauuuga

SEQ ID NO: 42851 - RNA, 1701 nt, Artificial Sequence; identical to SEQ ID NO: 42703
  derived and/or modified CDS sequence (wt) from hemagglutinin__InfluenzaA__AHC61391

SEQ ID NO: 42852 - RNA, 1701 nt, Artificial Sequence
  derived and/or modified CDS sequence (wt) from hemagglutinin__InfluenzaA__AHC61403
augaagacuaucauugcuuugagcuacauucuaugucugguuuucgcucaaaaacuuccuggaaaugacaacagcacggcaacgcugugccuugggcaccaugcagugccaaacggaacgauagugaaaacaaucacgaaugaccaaauugaaguuaccaaugcuacugagcugguucagaguuccucaacaggugaaauaugcaacaguccucaucagauccuugauggagaaaacugcacacuaauagaugcucuauugggagacccucagugugauggcuuccaaaacaagaaaugggaccuuuuuguugaacgaagcaaagcccacagcaacuguuacccuuaugaugugccggauuaugccucccuuaggucacuaguugccucauccggcacacuggaguuuaacaaugaaagcuucaauuggacuggagucacucaaaacggaacaagcucugcuugcauaaggagaucuaauaauaguuucuuuaguagauugaauugguugacccacuuaaacuucaaauacccagcauugaacgugacuaugccaaacaaugaacaauuugacaaauuguacauuugggggguucaccacccggguacggacaaggaccaaaucuuccuguaugcucaagcaucaggaagaaucacaguaucuaccaaaagaagccaacaagcuguaauuccgaauaucggaucuagacccagaguaaggaauaucccuagcagaguaagcaucuauuggacaauaguaaaaccgggagacauacuuuugauuaacagcacagggaaucuaauugcuccuagggguuacuucaaaauacgaagugggaaaagcucaauaaugagaucagaugcacccauuggcaaaugcaauucugcaugcaucacuccaaauggaagcauucccaaugacaaaccauuccaaaauguaaacaggaucacauacggggccuguuccagauauguuaagcaaaacacucugaaauuggcaacaggaaugagaaauguaccagagaaacaaacuagaggcauauuuggcgcaauagcggguuucauagaaaauggcugggagggaaugguggaugguugguacgguuucaggcaucaaaauucugagggaaggggacaagcagcagaucucaaaagcacucaagcagcaaucgaucaaaucaaugggaagcugaauagauugaucgggaaaaccaacgagaaauuccaucagauugaaaaagaauucucagaagucgaagggagaauucaggaccuugagaaauauguugaggacacuaaaauagaucucuggucauacaacgcggagcuucuuguugcccuggagaaccaacacacaauugaucuaacugacucagaaaugaacaaacuguuugaaaaaacaaagaagcaacugagggaaaaugcugaggauaugggcaaugguuguuucaaaauauaucacaaaugugacaaugccugcauaggaucaaucagaaauggaacuuaugaccacgauguguacagagaugaagcauuaaacaaccgauuccagaucaagggaguugagcugaagucaggguacaaagauuggauccuauggauuuccuuugccauaucauguuuuuugcuuuguguugcuuuguugggguucaucaugugggccugccaaaaaggcaacauuaggugcaacauuugcauuuga

SEQ ID NO: 42853 - RNA, 1701 nt, Artificial Sequence; identical to SEQ ID NO: 42607
  derived and/or modified CDS sequence (wt) from hemagglutinin__InfluenzaA__AHC61415

SEQ ID NO: 42854 - RNA, 1701 nt, Artificial Sequence
  derived and/or modified CDS sequence (wt) from hemagglutinin__InfluenzaA__AHC61427
augaagacuaucauugcuuugagcuacauucuaugucugguuuucgcucaaaaacuuccuggaaaugacaacagcacggcaacgcugugccuugggcaccaugcagugccaaacggaacgauagugaaaacaaucacgaaugaccaaauugaaguuacuaaugcuacugagcugguucagaguuccucaacaggugaaauaugcaacaguccucaucagauccuugauggagaaaacugcacacuaauagaugcucuauugggagacccucagugugauggcuuccaaaacaauaaaugggaccuuuuuguugaacgaagcaaagcccacagcaacuguuacccuuaugaugugccggauuaugccucccuuaggucacuaguugccucauccggcacacuggaguuuaacaaugaaagcuucaauuggacuggagucacucaaaacggaacaagcucugcuugcauaaggagaucuaauaauaguuucuuuaguagauugaauugguugacccacuuaaacuucaaauacccagcauugaacgugacuaugccaaacaaugaacaauuugacaaauuguacauuugggggguucaccacccggguacggacaaggaccaaaucuuccuguaugcucaagcagcaggaagaaucacaguaucuaccaaaagaagccaacaagcuguaauuccgaauaucggaucuagacccagaguaaggaauaucccuagcagaguaagcaucuauuggacaauaguaaaaccgggagacauacuuuugauuaacagcacagggaaucuaauugcuccuagggguuacuucaaaauacgaagugggaaaagcucaauaauaagaucagaugcacccauuggcaaaugcaauucugcaugcaucacuccaaauggaagcauucccaaugacaaaccauuccaaaauguaaacaggaucacauacggggccugucccagauauguuaagcaaaacacucugaaauuggcaacaggaaugagaaauguaccagagaaacaaacuagaggcauauuuggcgcaauagcugguuucauagaaaaugguugggagggaaugguggaugguugguacgguuucaggcaucaaaauucugagggaaggggacaagcagcagaucucaaaagcacucaagcagcaaucgaucaaaucaaugggaagcugaauagauugaucgggaaaaccaacgagaaauuccaucagauugaaaaagaauucucagaagucgaagggagaauucaggaccuugagaaauauguugaggacacuaaaauagaucucuggucauacaacgcggagcuucuuguugcccuggagaaccaacacacaauugaucuaacugacucagaaaugaacaaacuguuugaaaaaacaaagaagcaacugagggaaaaugcugaggauaugggcaaugguuguuucaaaauauaccacaaaugugacaaugccugcauaggaucaaucagaaauggaacuuaugaccacgauguguacagagaugaagcauuaaacaaccgauuccagaucaagggaguugagcugaagucaggguacaaagauuggauccuauggauuuccuuugccauaucauguuuuuugcuuuguguugcuuuguugggguucaucaugugggccugccaaaaaggcaacauuaggugcaacauuugcauuuga

SEQ ID NO: 42855 - RNA, 1701 nt, Artificial Sequence
  derived and/or modified CDS sequence (wt) from hemagglutinin__InfluenzaA__AHC61439
augaagacuaucauugcuuugagcuacauucuaugucugguuuucgcucaaaaacuuccuggaaaugacaacagcacggcaacgcugugccuugggcaccaugcagugccaaacggaacgauagugaaaacaaucacgaaugaccaaauugaaguuacuaaugcuacugagcugguucagaguuccucaacaggugaaauaugcaacaguccucaucagauccuugauggagaaaacugcacacuaauagaugcucuauugggagacccucagugugauggcuuccaaaacaagaaaugggaccuuuuuguugaacgaagcaaagcccacagcaacuguuacccuuaugaugugccggauuaugccucccuuaggucacuaguugccucauccggcacacuggaguuuaacaaugaaagcuucaauuggacuggagucacucaaaacggaacaagcucugcuugcauaaggagaucuaauaauaguuucuuuaguagauugaauugguuaacccacuuaaacuucaaauacccagcauugaacgugacuaugccaaacaaugaacaauuugacaaauuguacauuugggggguucaccacccggguacggacaaggaucaaaucuuccuguaugcucaagcagcaggaagaaucacaguaucuaccaaaagaagccaacaagcuguaauuccgaauaucggaucuagacccagaguaaggaauaucccuagcagaguaagcaucuauuggacaauaguaaaaccgggagacauacuuuugauuaacagcacagggaaucuaauugcuccuagggguuacuucaaaauacgaagugggaaaagcucaauaaugagaucagaugcacccauuggcaaaugcaauucuacaugcaucacuccaaauggaagcauucccaaugacaaaccauuccaaaauguaaacaggaucacauacggggccugucccagauauguuaagcaaaacacucugaaauuggcaacaggaaugagaaauguaccagagaaacaaacuagaggcauauuuggcgcaauagcugguuucauagaaaaugguugggagggaaugguggaugguugguacgguuucaggcaucaaaauucugagggaaggggacaagcagcagaucucaaaagcacucaagcagcaaucgaucaaaucaaugggaagcugaauagauugaucgggaaaaccaacgagaaauuccaucagauugaaaaagaauucucagaagucgaagggagaauucaggaccuugagaaauauguugaggacacuaaaauagaucucuggucauacaacgcggagcuucuuguugcccuggagaaccaacacacaauugaucuaacugacucagaaaugaacaaacuguuugaaaaaacaaagaagcaacugagggaaaaugcugaggauaugggcaaugguuguuucaaaauauaccacaaaugugacaaugccugcauaggaucaaucagaaauggaacuuaugaccacgauguguacagagaugaagcauuaaacaaccgauuccagaucaagggaguugagcugaagucaggguacaaagauuggauccuauggauuuccuuugccauaucauguuuucugcuuuguguugcuuuguugggguucaucaugugggccugccaaaaaggcaacauuaggugcaacauuugcauuuga

SEQ ID NO: 42856 - RNA, 1701 nt, Artificial Sequence; identical to SEQ ID NO: 42703
  derived and/or modified CDS sequence (wt) from hemagglutinin__InfluenzaA__AHC61451

SEQ ID NO: 42857 - RNA, 1701 nt, Artificial Sequence
  derived and/or modified CDS sequence (wt) from hemagglutinin__InfluenzaA__AHC61463
augaagacuaucauugcuuugagcuacauucuaugucugguuuucgcucaaaaacuuccuggaaaugacaacagcacggcaacgcugugccuugggcaccaugcagugccaaacggaacgauagugaaaacaaucacgaaugaccaaauugaaguuacuaaugcuacugagcugguucagaguuccucaacaggugaaauaugcaacaguccucaucagauccuugauggagaaaacugcacacuaauagaugcucuauugggagacccucagugugauggcuuccaaaacaagaaaugggaccuuuuuguugaacgaagcaaagcccacagcaacuguuacccuuaugaugugccggauuaugccucccuuaggucacuaguugccucauccggcacacuggaguuuaacaaugaaagcuucaauuggacuggagucacucaaaacggaacaagcucugcuugcauaaggagaucuaauaauaguuucuuuaguagauugaauugguugacccacuuaaacuucaaauacccagcauugaacgugacuaugccaaacaaugaacaauuugacaaauuguacauuugggggguucaccacccggguacggacaaggaccaaaucuuccuguaugcucaagcagcaggaagaaucacaguaucuaccaaaagaagccaacaagcuguaauuccgaauaucggaucuagacccagaguaaggaauaucccuagcagaguaagcaucuauuggacaauaguaaaaccgggagacauacuuuugauuaacagcacagggaaucuaauugcuccuagggguuacuucaaaauacgaagugggaaaagcucaauaaugagaucagaugcacccaucggcaaaugcaauucugcaugcaucacuccaaauggaagcauucccaaugacaaaccauuccaaaauguaaacaggaucacauacggggccugucccagauauguuaagcaaaacacucugaaauuggcaacaggaaugagaaauguaccagagaaacaaacuagaggcauauuuggcgcaauagcugguuucauagaaaaugguugggagggaaugguggaugguugguacgguuucaggcaucaaaauucugagggaaggggacaagcagcagaucucaaaagcacucaagcagcaaucgaucaaaucaaugggaagcugaauagauugaucgggaaaaccaacgagaaauuccaucagauugaaaaagaauucucagaagucgaagggagaauucaggaccuugagaaauauguugaggacacuaaaauagaucucuggucauacaacgcggagcuucuuguugcccuggagaaccaacacacaauugaucuaacugacucagaaaugaacaaacuguuugaaaaaacaaagaagcaacugagggaaaaugcugaggauaugggcaaugguuguuucaaaauauaccacaaaugugacaaugccugcauaggaucaaucagaaauggaacuuaugaccacgauguguacagagaugaagcauuaaacaaccgauuccagaucaagggaguugagcugaagucaggguacaaagauuggauccuauggauuuccuuugccauaucauguuuuuugcuuuguguugcuuuguugggguucaucaugugggccugccaaaaaggcaacauuaggugcaacauuugcauuuga

SEQ ID NO: 42858 - RNA, 1701 nt, Artificial Sequence; identical to SEQ ID NO: 40264
  derived and/or modified CDS sequence (wt) from hemagglutinin__InfluenzaA__AHC61475

SEQ ID NO: 42859 - RNA, 1701 nt, Artificial Sequence; identical to SEQ ID NO: 42723
  derived and/or modified CDS sequence (wt) from hemagglutinin__InfluenzaA__AHC61487

SEQ ID NO: 42860 - RNA, 1701 nt, Artificial Sequence; identical to SEQ ID NO: 40264
  derived and/or modified CDS sequence (wt) from hemagglutinin__InfluenzaA__AHC61499

SEQ ID NO: 42861 - RNA, 1701 nt, Artificial Sequence; identical to SEQ ID NO: 42703
  derived and/or modified CDS sequence (wt) from hemagglutinin__InfluenzaA__AHC61511

SEQ ID NO: 42862 - RNA, 1701 nt, Artificial Sequence
  derived and/or modified CDS sequence (wt) from hemagglutinin__InfluenzaA__AHC61523
augaagacuaucauugcuuugagcuacauucuaugucugguuuucgcucaaaaacuuccuggaaaugacaacagcacggcaacgcugugccuugggcaccaugcaguaccaaacggaacgauagugaaaacaaucacgaaugaccaaauugaaguuacuaaugcuacugagcugguucagaguuccucaacaggugaaauaugcgacaguccucaucagauccuugauggagaaaacugcacacuaauagaugcucuauugggagacccucagugugauggcuuccaaaauaagaagugggaccuuuuuguugaacgaagcaaagccuacagcaacuguuacccguaugaugugccggauuaugccucccuuaggucacuaguugccucauccggcacacuggaguuuaacaaugaaagcuucaauuggacuggagucacucaaaacggaacaagcucugcuugcauaaggagaucuaauaguaguuucuuuaguagauugaauugguugacccacuuaaacuucaaauacccagcauugaacgugacuaugccaaacaaugaacaauuugacaaauuguacauuugggggguucaccacccggguacggacaaggaccaaaucuuccuguaugcucaaucaucaggaagaaucacaguaucuaccaaaagaagccaacaagcuguaaucccgaauaucggaucuagacccagaauaaggaauaucccuagcagaauaagcaucuauuggacaauaguaaaaccgggagacauacuuuugauuaacagcacagggaaucuaauugcuccuagggguuacuucaaaauacgaagugggaaaagcucaauaaugagaucagaugcacccauuggcaaaugcaauucugaaugcaucacuccaaaugggagcauucccaaugacaaaccauuccaaaauguaaacaggaucacauacggggccugucccagauauguuaagcaaagcacucugaaauuggcaacaggaaugcgaaauguaccagagaaacaaacuagaggcauauuuggcgcaauagcggguuucauagaaaaugguugggagggaaugguggaugguugguacgguuucaggcaucaaaauucugagggaagaggacaagcagcagaucucaaaagcacucaagcagcaaucgaucaaaucaaugggaagcugaaucgauugaucgggaaaaccaacgagaaauuccaucagauugaaaaagaauucucagaagucgaagggagaauucaggaccuugagaaauauguugaggacacuaaaauagaucucuggucauacaacgcggagcuucuuguugcccuggagaaccaacauacaauugaucuaacugacucagaaaugaacaaacuguuugaaaaaacaaagaagcaacugagggaaaaugcugaggauaugggcaaugguuguuucaaaauauaccacaaaugugacaaugccugcauaggaucaaucagaaauggaacuuauaaccacgauguauacagagaugaagcauuaaacaaccgguuccagaucaagggaguugagcugaagucaggguacaaagauuggauccuauggauuuccuuugccauaucauguuuuuugcuuuguguugcuuuguugggguucaucaugugggccugccaaaagggcaacauuaggugcaacauuugcauuuga

SEQ ID NO: 42863 - RNA, 1701 nt, Artificial Sequence
  derived and/or modified CDS sequence (wt) from hemagglutinin__InfluenzaA__AHC61535
augaagacuaucauugcuuugagcuacauucuaugucugguuuucgcucaaaaacuuccuggaaaugacaacagcacggcaacgcugugccuugggcaccaugcagugccgaacggaacgauagugaaaacaaucacgaaugaccaaauugaaguuacuaaugcuacugagcugguucagaguuccucaacaggugaaauaugcaacaguccucaucagauccuugauggagaaaacugcacacuaauagaugcucuauugggagacccucagugugauggcuuccaaaacaagaaaugggaccuuuuuguugaacgaagcaaagcccacagcaacuguuacccuuaugaugugccggauuaugccucccuuaggucacuaguugccucauccggcacacuggaguuuaacaaugaaagcuucaauuggacuggagucacucaaaacggaacaagcucugcuugcauaaggagaucuaauaauaguuucuuuaguagauugaauugguugacccacuuaaacuucaaauacccagcauugaacgugacuaugccaaacaaugaacaauuugacaaauuguacauuugggggguucaccacccggguacggacaaggaccaaaucuuccuguaugcucaagcaucaggaagaaucacaguaucuaccaaaagaagccaacaagcuguaauuccgaauaucggaucuagacccagaguaaggaauaucccuagcagaguaagcaucuauuggacaauaguaaaaccgggagacauacuuuugauuaacaguacagggaaucuaauugcuccuagggguuacuucaaaauacgaagugggaaaagcucaauaaugagaucagaugcacccauuggcaaaugcaauucugcaugcaucacuccaaauggaagcauucccaaugacaaaccauuccaaaauguaaacaggaucacauacggggccugucccagauauguuaagcaaaacacucugaaauuggcaacaggaaugagaaauguaccagagaaacaaacuagaggcauauuuggcgcaauagcggguuucauagaaaaugguugggaaggaaugguggaugguugguacgguuucaggcaucaaaauucugagggaaggggacaagcagcagaucucaaaagcacucaagcagcaaucgaucaaaucaaugggaagcuaaauagauugaucgggaaaaccaacgagaaauuccaucagauugaaaaagaauucucagaagucgaagggagaauucaggaccuugagaaauauguugaggacacuaaaauagaucucuggucauacaacgcggagcuucuuguugcccuggagaaccaacacacaauugaucuaacugacucagaaaugaccaaacuguuugaaaaaacaaagaagcaacugagggaaaaugcugaggauaugggcaaugguuguuucaaaauauaccacaaaugugacaaugccugcauaggaucaaucagaaauggaacuuaugaccacgauguguacagagaugaagcauuaaacaaccgauuccagaucaagggaguugagcugaagucaggguacaaagauuggauccuauggauuuccuuugccauaucauguuuuuugcuuuguguugcuuuguugggguucaucaugugggccugccaaaaaggcaacauuaggugcaacauuugcauuuga

SEQ ID NO: 42864 - RNA, 1701 nt, Artificial Sequence; identical to SEQ ID NO: 42703
  derived and/or modified CDS sequence (wt) from hemagglutinin__InfluenzaA__AHC61547

SEQ ID NO: 42865 - RNA, 1701 nt, Artificial Sequence
  derived and/or modified CDS sequence (wt) from hemagglutinin__InfluenzaA__AHC61559
augaagacuaucauugcuuugagcuacauucuaugucugguuuucgcucaaaaacuuccuggaaaugacaacagcacggcaacgcugugccuugggcaccaugcaguaccaaacggaacgauagugaaaacaaucacgaaugaccaaauugaaguuacuaaugcuacugagcugguucagaauuccucaacaggugaaauaugcgacaguccucaucagaucauugauggagaaaacugcacacuaauagaugcucuauugggagacccucagugugauggcuuccaaaauaagaaaugggaccuuuuuguugaacgaagcaaggccuacagcaacuguuacccuuaugaugugccggauuaugccucccuuaggucacuaguugccucauccggcacacuggaguuuaacaaugaaagcuucaauuggacuggagucacucaaaacggaacaagcucugcuugcauaaggagaucuaauaauaguuucuuuaguagauugaauugguugacccacuuaaacuucaaauacccagcauugaacgugacuaugccaaacaaugaacaauuugacaaguuguacauuugggggguucaccacccggguacggacaaggaccaaaucuuccuguaugcucaagcaucaggaagaaucacaguaucuaccaaaagaagccaacaagcuguaaucccgaauaucggaucuagacccagaguaaggaauaucccuagcagaauaagcaucuauuggacaauaguaaaaccgggagacauacuuuugauuaacagcacagggaaucuaauugcuccuagggguuacuucaaaauacgaagugggaaaagcucaauaaugagaucagaugcacccauuggcaaaugcaauucugaaugcaucacuccaaauggaagcauucccaaugacaaaccauuccaaaauguaaacaggaucacauacggggccugucccagauauguuaagcaaaacacucugaaauuggcaacaggaaugcgaaauguaccagagaaacaaacuagaggcauauuuggcgcaauagcggguuucauagaaaaugguugggagggaaugguggaugguugguacgguuucaggcaucaaaauucugagggaagaggacaagcagcagaucucaaaagcacucaagcagcaaucgaucaaaucaaugggaagcugaauagauugaucaggaaaaccaacgagaaauuccaucagauugaaaaagaauucucagaagucgaagggagaauucaggaccuugagaaauauguugaggacacuaaaauagaucucuggucauacaacgcggagcuucuuguugcccuggagaaccaacauacaauugaucuaacugacucagaaaugaacaaacuguuugaaaaaacaaagaagcaacugagggaaaaugcugaggauaugggcaaugguuguuucaaaauauaccacaaaugugacaaugccugcauaggaucaaucagaaauggaacuuaugaccacgauguauacagagaugaagcauuaaacaaccgguuccagaucaagggaguugagcugaagucagggcacaaagauuggauccuauggauuuccuuugccauaucauguuuuuugcuuuguguugcuuuguugggguucaucaugugggccugccaaaaaggcaacauuaggugcaacauuugcauuuga

SEQ ID NO: 42866 - RNA, 1701 nt, Artificial Sequence; identical to SEQ ID NO: 42632
  derived and/or modified CDS sequence (wt) from hemagglutinin__InfluenzaA__AHC61571

SEQ ID NO: 42867 - RNA, 1701 nt, Artificial Sequence; identical to SEQ ID NO: 42703
  derived and/or modified CDS sequence (wt) from hemagglutinin__InfluenzaA__AHC61583

SEQ ID NO: 42868 - RNA, 1701 nt, Artificial Sequence; identical to SEQ ID NO: 42758
  derived and/or modified CDS sequence (wt) from hemagglutinin__InfluenzaA__AHC61595

SEQ ID NO: 42869 - RNA, 1701 nt, Artificial Sequence
  derived and/or modified CDS sequence (wt) from hemagglutinin__InfluenzaA__AHC61607
augaagacuaucauugcuuugagcuacauucuaugucugguuuucgcucaaaaacuuccuggaaaugacaacagcacggcaacgcugugccuugggcaccaugcaguaccaaacggaacgauagugaaaacaaucacgaaugaccaaauugaaguuacuaaugcuacugagcugguucagaauuccucaacaggugaaauaugcgacaguccucaucagauccuugauggagaaaacugcacacuaauagaugcucuauugggagacccucagugugauggcuuccaaaauaagaaaugggaccuuuuuguugaacgaagcaaagccuacagcaacuguuacccuuaugaugugccggauuaugccucccuuaggucacuaguugccucauccggcacacuggaguuuaacaaugaaagcuucaauuggacuggagucacucaaaacggaacaagcucugcuugcauaaggagaucuaauaauaguuucuuuaguagauugaauugguugacccacuuaaacuucaaauacccagcauugaacgugacuaugccaaacaaugaacaauuugacaaauuguacauuugggggguucaccacccggguacggacaaggaccaaaucuuccuguaugcucaagcaucaggaagaaucacaguaucuaccaaaagaagccaacaagcuguaaucccgaauaucggaucuagacccagaguaaggaauaucccuagcagaauaagcaucuauuggacaauaguaaaaccgggagacauacuuuugauuaacagcacagggaaucuaauugcuccuagggguuacuucaaaauacgaagugggaaaagcucaauaaugagaucagaugcacccauuggcaaaugcaauucugaaugcaucacuccaaauggaagcauucccaaugacaaaccauuccaaaauguaaacaggaucacauacggggccugucccagauauguuaagcaacacacucugaaauuggcaacaggaaugcgaaauguaccagagaaacaaacuagaggcauauuuggcgcaauagcggguuucauagaaaaugguugggagggaaugguggaugguugguacgguuucaggcaucaaaauucugagggaagaggacaagcagcagaucucaaaagcacucaagcagcaaucgaucaaaucaaugggaagcugaauagauugaucgggaaaaccaacgagaaauuccaucagauugaaaaagaauucucagaagucgaagggagaauucaggaccuugagaaauauguugaggacacuaaaauagaucucuggucauacaacgcggagcuucuuguugcccuggagaaccaacauacaauugaucuaacugacucagaaaugaacaaacuguuugaaaaaacaaagaagcaacugagggaaaaugcugaggauaugggcaaugguuguuucaaaauauaccacaaaugugacaaugccugcauaggaucaaucagaaauggaacuuaugaccacgauguauacagagaugaagcauuaaacaaccgguuccagaucaagggaguugagcugaagucaggguacaaagauuggauccuauggauuuccuuugccauaucauguuuuuugcuuuguguugcuuuguugggguucaucaugugggccugccaaaaaggcaacauuaggugcaacauuugcauuuga

SEQ ID NO: 42870 - RNA, 1701 nt, Artificial Sequence; identical to SEQ ID NO: 42632
  derived and/or modified CDS sequence (wt) from hemagglutinin__InfluenzaA__AHC61619

SEQ ID NO: 42871 - RNA, 1701 nt, Artificial Sequence
  derived and/or modified CDS sequence (wt) from hemagglutinin__InfluenzaA__AHC61631
augaagacuaucauugcuuugagcuacauucuaugucugguuuucgcucaaaaacuuccuggaaaugacaacagcacggcaacgcugugccuugggcaccaugcagugccaaacggaacgauagugaaaacaaucacgaaugaccaaauugaaguuacuaaugcuacugagcugguucagaguuccucaacaggugaaauaugcaacaguccucaucagauccuugauggagaaaacugcacaauaauagaugcucuauugggagacccucagugugauggcuuccaaaacaagaaaugggaucuuuuuguugaacgaagcaaagcccacagcaacuguuacccuuaugaugugccggauuaugccucccuuaggucacuaguugccucauccggcacacuggaguuuaacaaugaaagcuucaauuggacuggagucacucaaaacggaacaagcucugcuugcauaaggagaucuaauaauaguuucuuuaguagauugaauugguuaacccacuuaaacuucaaauacccagcauugaacgugacuaugccaaacaaugaacaauuugacaaauuguacauuugggggguucaccacccggguacggacaaggaccaaaucuuccuguaugcucaagcagcaggaagaaucacaguaucuaccaaaagaagccaacaagcuguaauuccgaauaucggaucuagacccagaguaaggaauaucccuagcagaguaagcaucuauuggacaauaguaaaaccgggagacauacuuuugauuaacagcacagggaaucuaauugcuccuagggguuacuucaaaauacgaagugggaaaagcucaauaaugagaucagaugcacccauuggcaaaugcaauucugcaugcaucacuccaaauggaagcauucccaaugacaaaccauuccaaaauguaaacaggaucacauacggggccugucccagauauguuaagcaaaacacucugaaauuggcaacaggaaugagaaauguaccagagaaacaaacuagaggcauauuuggcgcaauagcugguuucauagaaaaugguugggagggaaugguggaugguugguacgguuucaggcaucaaaauucugagggaaggggacaagcagcagaucucaaaagcacucaagcagcaaucgaucaaaucaaugggaagcugaauagauugaucgggaaaaccaacgagaaauuccaucagauugaaaaagaauucucagaagucgaagggagaauucaggaccuugagaaauauguugaggacacuaaaauagaucucuggucauacaacgcggagcuucuuguugcccuggagaaccaacacacaauugaucuaacugacucagaaaugaacaaacuguuugaaaaaacaaagaagcaacugagggaaaaugcugaggauaugggcaaugguuguuucaaaauauaccacaaaugugacaaugccugcauaggaucaaucagaaauggaacuuaugaccacgauguguacagagaugaagcauuaaacaaccgauuccagaucaagggaguugagcugaagucaggguacaaagauuggauccuauggauuuccuuugccauaucauguuuuuugcuuuguguugcuuuguugggguucaucaugugggccugccaaaaaggcaacauuaggugcaacauuugcauuuga

SEQ ID NO: 42872 - RNA, 1701 nt, Artificial Sequence
  derived and/or modified CDS sequence (wt) from hemagglutinin__InfluenzaA__AHC61643
augaagacuaucauugcuuugagcuacguucuaugucugguuuucgcucaaaaacuuccuggaaaugacaacagcacggcaacgcugugccuugggcaccaugcagugccaaacggaacgauagugaaaacaaucacgaaugaccaaauugaaguuacuaaugcuacugagcugguucagaguuccucaacaggugaaauaugcaacaguccucaucagauccuugauggagaaaacugcacacuaauagaugcucuauugggagacccucagugugauggcuuccaaaacaagaaaugggaccuuuuuguugaacgaagcaaagcccacagcaacuguuacccuuaugaugugccggauuaugccucccuuaggucacuaguugccucauccggcacacuggaguuuaacaaugaaagcuucaauuggacuggagucacucaaaacggaacaagcucugcuugcauaaggagaucuaauaauaguuucuuuaguagauugaauugguugacccacuuaaacuucaaauacccagcauugaacgugacuaugccaaacaaugaacaauuugacaaauuguacauuugggggguucaccacccggguacggacaaggaccaaaucuuccuguaugcucaagcagcaggaagaaucacaguaucuaccaaaagaagccaacaagcuguaauuccgaauaucggaucuagacccagaguaaggaauaucccuagcagaguaagcaucuauuggacaauaguaaaaccgggagacauacuuuugauuaacagcacagggaaucuaauugcuccuagggguuacuucaaaauacgaagugggaaaagcucaauaaugagaucagaugcacccauuggcaaaugcaauucugcaugcaucacuccaaauggaagcauucccaaugacaaaccauuccaaaauguaaacaggaucacauacggggccugucccagauauguuaagcaaaacacucugaaauuggcaacaggaaugagaaauguaccagaaaaacaaacuagaggcauauuuggcgcaauagcugguuucauagaaaaugguugggagggaaugguggaugguugguacgguuucaggcaucaaaauucugagggaaggggacaagcagcagaucucaaaagcacucaagcagcaaucgaucaaaucaaugggaagcugaauagauugaucgggaaaaccaacgagaaauuccaucagauugaaaaagaauucucagaagucgaagggagaauucaggaccuugagaaauauguugaggacacuaaaauagaucucuggucauacaacgcggagcuucuuguugcccuggagaaccaacacacaauugaucuaacugacucggaaaugaacaaacuguuugaaaaaacaaagaagcaacugagggaaaaugcugaggauaugggcaaugguuguuucaaaauauaccacaaaugugacaaugccugcauaggaucaaucagaaauggaacuuaugaccacgauguguacagagaugaagcauuaaacaaccgauuccagaucaagggaguugagcugaagucaggguacaaagauuggauccuauggauuuccuuugccauaucauguuuuuugcuuuguguugcuuuguugggguucaucaugugggccugccaaaaaggcaacauuaggugcaacauuugcauuuga

SEQ ID NO: 42873 - RNA, 1701 nt, Artificial Sequence
  derived and/or modified CDS sequence (wt) from hemagglutinin__InfluenzaA__AHC61655
augaagacuaucauugcuuugagcuacauucuaugucugguuuucacucaaaaacuuccuggaaaugacaacagcacggcaacgcugugccuugggcaccaugcagugccaaacggaacgauagugaaaacaaucacgaaugaccaaauugaaguuacuaaugcuacugagcugguucagaguuccucaacaggugaaauaugcaacaguccucaucagauccuugauggagaaaacugcacacuaauagaugcucuauugggagacccucagugugauggcuuccaaaacaauaaaugggaccuuuuuguugaacgaagcaaagcccacagcaacuguuacccuuaugaugugccggauuaugccucccuuaggucacuaguugccucauccggcacacuggaguuuaacaaugaaagcuucaauuggacuggagucacucaaaacggaacaagcucugcuugcauaaggagaucuaauaauaguuucuuuaguagauugaauugguugacccacuuaaacuucaaauacccagcauugaacgugacuaugccaaacaaugaacaauuugacaaauuguacauuugggggguucaccacccggguacggacaaggaccaaaucuuccuguaugcucaagcagcaggaagaaucacaguaucuaccaaaagaagccaacaagcuguaauuccgaauaucggaucuagacccagaguaaggaauaucccuagcagaguaagcaucuauuggacaauaguaaaaccgggagacauacuuuugauuaacagcacagggaaucuaauugcuccuagggguuacuucaaaauacgaagugggaaaagcucaauaauaagaucagaugcacccauuggcaaaugcaauucugcaugcaucacuccaaauggaagcauucccaaugacaaaccauuccaaaauguaaacaggaucacauacggggccugucccagauauguuaagcaaaacacucugaaauuggcaacaggaaugagaaauguaccagagaaacaaacuagaggcauauuuggcgcaauagcugguuucauagaaaaugguugggagggaaugguggaugguugguacgguuucaggcaucaaaauucugagggaaggggacaagcagcagaucucaaaagcacucaagcagcaaucgaucaaaucaaugggaagcugaauagauugaucgggaaaaccaacgagaaauuccaucagauugaaaaagaauucucagaagucgaagggagaauucaggaccuugagaaauauguugaggacacuaaaauagaucucuggucauacaacgcggagcuucuuguugcccuggagaaccaacacacaauugaucuaacugacucagaaaugaacaaacuguuugaaaaaacaaagaagcaacugagggaaaaugcugaggauaugggcaaugguuguuucaaaauauaccacaaaugugacaaugccugcauaggaucaaucagaaauggaacuuaugaccacgauguguacagagaugaagcauuaaacaaccgauuccagaucaagggaguugagcugaagucaggguacaaagauuggauccuauggauuuccuuugccauaucauguuuuuugcuuuguguugcuuuguugggguucaucaugugggccugccaaaaaggcaacauuaggugcaacauuugcauuuga

SEQ ID NO: 42874 - RNA, 1701 nt, Artificial Sequence
  derived and/or modified CDS sequence (wt) from hemagglutinin__InfluenzaA__AHC61667
augaagacuaucauugcuuugagcuacauucuaugucugguuuucgcucaaaaacuuccuggaaaugacaacagcacggcaacgcugugccuugggcaccaugcaguaccaaacggaacgauagugaaaacaaucacgaaugaccaaauugaaguuacuaaugcuacugagcugguucagaguuccucaacaggugaaauaugcgacaguccucaucagauccuugauggagaaaacugcacacuaauagaugcucuauugggagacccucagugugauggcuuccaaaauaagaagugggaccuuuuuguugaacgaagcaaagccuacagcaacuguuacccuuaugaugugccggauuaugccucccuuaggucacuaguugccucauccggcacacuggaguuuaacaaugaaagcuucaauuggacuggagucacucaaaacggaacaagcucugcuugcauaaggagaucuaauaauaguuucuuuaguagauugaauugguugacccacuuaaacuucaaauacccagcauugaacgugacuaugccaaacaaugaacaauuugacaaauuguacauuugggggguucaccacccggguacggacaaggaccaaaucuuccuguaugcucaaucaucaggaagaaucacaguaucuaccaaaagaagccaacaagcuguaaucccgaauaucggaucuagacccagaauaaggaauaucccuagcagaauaagcaucuauuggacaauaguaaaaccgggagacauacuuuugaucaacagcacagggaaucugauugcuccuagggguuacuucaaaauacgaagugggaaaagcucaauaaugagaucagaugcacccauuggcaaaugcaauucugaaugcaucacuccaaauggaagcauucccaaugacaaaccauuccaaaauguaaacaggaucacauacggggccugucccagauauguuaagcaaagcacucugaaauuggcaacaggaaugcgaaauguaccagagaaacaaacuagaggcauauuuggcgcaauagcggguuucauagaaaaugguugggagggaaugguggaugguugguacgguuucaggcaucaaaauucugagggaagaggacaagcagcagaucucaaaagcacucaagcagcaauagaucaaaucaaugggaagcugaaucgauugaucgggaaaaccaacgagaaauuccaucagauugaaaaagaauucucagaagucgaagggagaauucaggaccuugagaaauauguugaggacacuaaaauagaucucuggucauacaacgcggagcuucuuguugcccuggagaaccaacauacaauugaucuaacugacucagaaaugaacaaacuguuugaaaaaacaaagaagcaacugagggaaaaugcugaggauaugggcaaugguuguuucaaaauauaccacaaaugugacaaugccugcauaggaucaaucagaaauggaacuuauaaccacgauguauacagagaugaagcauuaaacaaccgguuccagaucaagggaguugagcugaagucaggguacaaagauuggauccuauggauuuccuuugccauaucauguuuuuugcuuuguguugcuuuguugggguucaucaugugggccugccaaaagggcaacauuaggugcaacauuugcauuuga

SEQ ID NO: 42875 - RNA, 1701 nt, Artificial Sequence; identical to SEQ ID NO: 42836
  derived and/or modified CDS sequence (wt) from hemagglutinin__InfluenzaA__AHC61679

SEQ ID NO: 42876 - RNA, 1701 nt, Artificial Sequence; identical to SEQ ID NO: 42746
  derived and/or modified CDS sequence (wt) from hemagglutinin__InfluenzaA__AHC61691

SEQ ID NO: 42877 - RNA, 1701 nt, Artificial Sequence; identical to SEQ ID NO: 42682
  derived and/or modified CDS sequence (wt) from hemagglutinin__InfluenzaA__AHC61703

SEQ ID NO: 42878 - RNA, 1701 nt, Artificial Sequence; identical to SEQ ID NO: 42685
  derived and/or modified CDS sequence (wt) from hemagglutinin__InfluenzaA__AHC61715

SEQ ID NO: 42879 - RNA, 1701 nt, Artificial Sequence; identical to SEQ ID NO: 40264
  derived and/or modified CDS sequence (wt) from hemagglutinin__InfluenzaA__AHC61727

SEQ ID NO: 42880 - RNA, 1701 nt, Artificial Sequence; identical to SEQ ID NO: 42661
  derived and/or modified CDS sequence (wt) from hemagglutinin__InfluenzaA__AHC61739

SEQ ID NO: 42881 - RNA, 1701 nt, Artificial Sequence
  derived and/or modified CDS sequence (wt) from hemagglutinin__InfluenzaA__AHC61751
augaagacuaucauugcuuugagcuacauucuaugucugguuuucgcucaaaaacuuccuggaaaugacaacagcacggcaacgcugugccuugggcaccaugcaguaccaaacggaacgauagugaaaacaaucacgaaugaccaaauugaaguuacuaaugcuacugagcugguucagaauuccucaacaggugaaauaugcgacaguccucaucagauccuugauggagaaaacugcacacuaauagaugcucuauugggagacccucagugugauggcuuccaaaauaagaaaugggaccuuuuuguugaacgaagcaaagccuacagcaacuguuacccuuaugaugugccggauuaugccucccuuaggucacuaguugccucauccggcacacuggaguuuaacaaugaaagcuucaauuggacuggagucacucaaaacggaacaagcucugcuugcauaaggagaucuaauaauaguuucuuuaguagauugaauugguugacccacuuaaacuucaaauacccagcauugaacgugacuaugccaaacaaugaacaauuugacaaauuguacauuugggggguucaccacccggguacggacaaggaccaaaucuuccuguaugcucaagcaucaggaagaaucacaguaucuaccaaaagaagccaacaagcuguaaucccgaaugucggaucuagacccagaguaaggaauaucccuagcagaauaagcaucuauuggacaauaguaaaaccgggagacauacuuuugauuaacagcacagggaaucuaauugcuccuagggguuacuucaaaauacgaagugggaaaagcucaauaaugagaucagaugcacccauuggcaaaugcaauucugaaugcaucacuccaaauggaagcauucccaaugacaaaccauuccaaaauguaaacaggaucacauacggggccugucccagauauguuaagcaaaacacucugaaauuggcaacaggaaugcgaaauguaccagagaaacaaacuagaggcauauuuggcgcaauagcggguuucauagaaaaugguugggagggaaugguggaugguugguacgguuucaggcaucaaaauucugagggaagaggacaagcagcagaucucaaaagcacucaagcagcaaucgaucaaaucaaugggaagcugaauagauugaucgggaaaaccaacgagaaauuccaucagauugaaaaagaauucucagaagucgaagggagaauucaggaccuugagaaauauguugaggacacuaaaauagaucucuggucauacaacgcggagcuucuuguugcccuggagaaccaacauacaauugaucuaacugacucagaaaugaacaaacuguuugaaaaaacaaagaagcaacugagggaaaaugcugaggauaugggcaaugguuguuucaaaauauaccacaaaugugacaaugccugcauaggaucaaucagaaauggaacuuaugaccacgauguauacagagaugaagcauuaaacaaccgguuccagaucaagggaguugagcugaagucaggguacaaagauuggauccuauggauuuccuuugccauaucauguuuuuugcuuuguguugcuuuguugggguucaucaugugggccugccaaaaaggcaacauuaggugcaacauuugcauuuga

SEQ ID NO: 42882 - RNA, 1701 nt, Artificial Sequence
  derived and/or modified CDS sequence (wt) from hemagglutinin__InfluenzaA__AHC61763
augaagacuaucauugcuuugagcuacauucuaugucugguuuucgcucaaaaacuuccuggaaaugacaacagcacggcaacgcugugccuugggcaccaugcagugccaaacggaacgauagugaaaacaaucacgaaugaccaaauugaaguuacuaaugcuacugagcugguucagaguuccucaacaggugaaauaugcaacaguccucaucagauccuugauggagaaaacugcacacuaauagaugcucuauugggagacccucagugugauggcuuccaaaacaagaaaugggaccuuuuuguugaacgaagcaaagcccacagcaacuguuacccuuaugaugugccggauuaugccucccuuaggucacuaguugccucauccggcacacuggaguuuaacaaugaaagcuucaauuggacuggagucacucaaaacggaacaagcucugcuugcauaaggagaucuaauaauaguuucuuuaguagauugaauugguugacccacuuaaacuucaaauacccagcauugaacgugacuaugccaaacaaugaacaauuugacaaauuguacauuugggggguucaccacccggguacggacaaggaccaaaucuuccuguaugcucaagcagcaggaagaaucacaguaucuaccaaaagaagccaacaaacuguaauuccgaauaucggaucuagacccagaguaaggaauaucccuagcagaguaagcaucuauuggacaauaguaaaaccgggagacauacuuuugauuaacagcacagggaaucuaauugcuccuagggguuacuucaaaauacgaagugggaaaagcucaauaaugagaucagaugcacccauuggcaaaugcaauucugcaugcaucacuccaaauggaagcauucccaaugacaaaccauuccaaaauguaaacaggaucacauacggggccugucccagauauguuaagcaaaacacucugaaauuggcaacaggaaugagaaauguaccagagaaacaaacuagaggcauauuuggcgcaauagcugguuucauagaaaaugguugggagggaaugguggaugguugguacgguuucaggcaucaaaauucugagggaaggggacaagcagcagaucucaaaagcacucaagcagcaaucgaucaaaucaaugggaagcugaauagauugaucgggaaaaccaacgagaaauuccaucagauugaaaaagaauucucagaagucgaagggagaauucaggaccuugagaaauauguugaggacacuaaaauagaucucuggucauacaacgcggagcuucuuguugcccuggagaaccaacacacaauugaucuaacugacucagaaaugaacaaacuguuugaaaaaacaaagaagcaacugagggaaaaugcugaggauaugggcaaugguuguuucaaaauauaccacaaaugugacaaugccugcauaggaucaaucagaaauggaacuuaugaccacgauguguacagagaugaagcauuaaacaaccgauuccagaucaagggaguugagcugaagucaggguacaaagauuggauccuauggauuuccuuugccauaucauguuuuuugcuuuguguugcuuuguugggguucaucaugugggccugccaaaaaggcaacauuaggugcaacauuugcauuuga

SEQ ID NO: 42883 - RNA, 1701 nt, Artificial Sequence
  derived and/or modified CDS sequence (wt) from hemagglutinin__InfluenzaA__AHC61775
augaagacuaucauugcuuugagcuacauucuaugucugguuuucgcucaaaaacuuccuggaaaugacaacagcacggcaacgcugugccuugggcaccaugcagugccaaacggaacgauagugaaaacaaucacgaaugaccaaauugaaguuacuaaugcuacugagcugguucagaguuccucaacaggugaaauaugcaacaguccucaucagauccuugauggagaaaacugcacacuaauagaugcucuauugggagacccucagugugauggcuuccaaaacaagaaaugggaccuuuuuguugaacgaagcaaagcccacagcaacuguuacccuuaugaugugccggauuaugccucccuuaggucacuaguugccucauccggcacacuggaguuuaauaaugaaagcuucaauuggacuggagucacucaaaacggaacaagcucugcuugcauaaggagaucuaauaauaguuucuuuaguagauugaauugguugacccacuuaaacuucaaauacccagcauugaacgugacuaugccaaacaaugaacaauuugacaaauuguacauuugggggguucaccacccggguacggacaaggaccaaaucuuccuguaugcucaagcaucaggaagaaucacaguaucuaccaaaagaagccaacaagcuguaauuccgaauaucggaucuagacccagaguaaggaauaucccuagcagaguaagcaucuauuggacaauaguaaaaccgggagacauacuuuugauuaacagcacagggaaucuaauugcuccuagggguuacuucaaaauacgaagugggaaaagcucaauaaugagaucagaugcacccauuggcaaaugcaauucugcaugcaucacuccaaauggaagcauucccaaugacaaaccauuccaaaauguaaacaggaucacauacggggccugucccagauauguuaagcaaaacacucugaaauuggcaacaggaaugagaaauguaccagagaaacaaacuagaggcauauuuggcgcaauagcggguuucauagaaaauggcugggagggaaugguggaugguugguacgguuucaggcaucaaaauucugagggaaggggacaagcagcagaucucaaaagcacucaagcagcaaucgaucaaaucaaugggaagcugaauagauugaucgggaaaaccaacgagaaauuccaucagauugaaaaagaauucucagaagucgaagggagaauucaggaccuugagaaauauguugaggacacuaaaauagaucucuggucauacaacgcggagcuucuuguugcccuggagaaccaacacacaauugaucuaacugacucagaaaugaacaaacuguuugaaaaaacaaagaagcaacugagggaaaaugcugaggauaugggcaaugguuguuucaaaauauaucacaaaugugacaaugccugcauaggaucaaucagaaauggaacuuaugaccacgauguguacagagaugaagcauuaaacaaccgauuccagaucaagggaguugagcugaagucaggguacaaagauuggauccuauggauuuccuuugccauaucauguuuuuugcuuuguguugcuuuguugggguucaucaugugggccugccaaaaaggcaacauuaggugcaacauuugcauuuga

SEQ ID NO: 42884 - RNA, 1701 nt, Artificial Sequence; identical to SEQ ID NO: 40264
  derived and/or modified CDS sequence (wt) from hemagglutinin__InfluenzaA__AHC61787

SEQ ID NO: 42885 - RNA, 1701 nt, Artificial Sequence; identical to SEQ ID NO: 42836
  derived and/or modified CDS sequence (wt) from hemagglutinin__InfluenzaA__AHC61799

SEQ ID NO: 42886 - RNA, 1701 nt, Artificial Sequence
  derived and/or modified CDS sequence (wt) from hemagglutinin__InfluenzaA__AHC61823
augaagacuaucauugcuuugagcuacauucuaugucugguuuucgcucaaaaacuuccuggaaaugacaacagcacggcaacgcugugccuugggcaccaugcaguaccaaacggaacgauagugaaaacaaucacgaaugaccaaauugaaguuacuaaugcuacugagcugguucagaguuccucaacaggugaaauaugcgacaguccucaucagauccuugauggagaaaacugcacacuaauagaugcucuauugggagacccucagugugauggcuuccaaaauaagaagugggaccuuuuuguugaacgaagcaaagccuacagcaacuguuacccuuaugaugugccggauuaugccucccuuaggucacuaguugccucauccggcacacuggaguuuaacaaugaaagcuucaauuggacuggagucacucaaaacggaacaagcucugcuugcauaaggagaucuaauaguaguuucuuuaguagauugaauugguugacccacuuaaacuucaaauacccagcauugaacgugacuaugccaaacaaugaacaauuugacaaauuguacauuugggggguucaccacccggguacggacaaggaccaaaucuuccuguaugcucaaucaucaggaagaaucacaguaucuaccaaaagaagccaacaagcuguaaucccgaauaucggaucuagacccagaauaaggaauaucccuagcagaauaagcaucuauuggacaauaguaaaaccgggagacauacuuuugauuaacagcacagggaaucuaauugcuccuagggguuacuucaaaauacgaagugggaaaagcucaauaaugaaaucagaugcacccauugacaaaugcaauucugaaugcaucacuccaaauggaagcauucccaaugacaaaccauuccaaaauguaaacaggaucacauacggggccugucccagauauguuaagcaaagcacucugaaauuggcaacaggaaugcgaaauguaccagagaaacaaacuagaggcauauuuggcgcaauagcggguuucauagaaaaugguugggagggaaugguggaugguugguacgguuucaggcaucaaaauucugagggaagaggacaagcagcagaucucaaaagcacucaagcagcaaucgaucaaaucaaugggaaacugaaucgauugaucgggaaaaccaacgagaaauuccaucagauugaaaaagaauucucagaagucgaagggagaauucaggaccuugagaaauauguugaggacacuaaaauagaucucuggucauacaacgcggagcuucuuguugcccuggagaaccaacauacaauugaucuaacugacucagaaaugaacaaacuguuugaaaaaacaaagaagcaacugagggaaaaugcugaggauaugggcaaugguuguuucaaaauauaccacaaaugugacaaugccugcauaggaucaaucagaaauggaacuuauaaccacgauguauacagagaugaagcauuaaacaaccgguuccagaucaagggaguugagcugaagucaggguacaaagauuggauccuauggauuuccuuugccauaucauguuuuuugcuuuguguugcuuuguugggguucaucaugugggccugccaaaagggcaacauuaggugcaacauuugcauuuga

SEQ ID NO: 42887 - RNA, 1701 nt, Artificial Sequence; identical to SEQ ID NO: 40264
  derived and/or modified CDS sequence (wt) from hemagglutinin__InfluenzaA__AHC61835

SEQ ID NO: 42888 - RNA, 1701 nt, Artificial Sequence; identical to SEQ ID NO: 42607
  derived and/or modified CDS sequence (wt) from hemagglutinin__InfluenzaA__AHC61847

SEQ ID NO: 42889 - RNA, 1701 nt, Artificial Sequence
  derived and/or modified CDS sequence (wt) from hemagglutinin__InfluenzaA__AHC61859
augaagacuaucauugcuuugagcuacauucuaugucugguuuucgcucaaaaacuuccuggaaaugacaacagcacggcaacgcugugccuugggcaccaugcagugccaaacggaacgauagugaaaacaaucacgaaugaccaaauugaaguuacuaaugcuacugagcugguucagaguuccucaacaggugaaauaugcaacaguccucaucagauccuugauggagaaaacugcacacuaauagaugcucuauugggagacccucagugugauggcuuccaaaacaagaaaugggaccuuuuuguugaacgaagcaaagcccacagcaacuguuacccuuaugaugugccggauuaugccucccuuaggucacuaguugccucauccggcacacuggaguuuaacaaugaaagcuucaauuggacuggagucacucaaaacggaacaagcucugcuugcauaaggagaucuaauaauaguuucuuuaguagauugaauugguuaacccacuuaaacuucaaauacccagcauugaacgugacuaugccaaacaaugaacaauuugacaaauuguacauuugggggguucaccacccggguacggacaaggaccaaaucuuccuguaugcucaagcagcaggaagaaucacaguaucuaccaaaagaagccaacaagcuguaauuccgaauaucggaucuagacccagaguaaggaauaucccuagcagaguaagcaucuauuggacaauaguaaaaccgggagacauacuuuugauuaacagcacagggaaucuaauugcuccuagggguuacuucaaaauacgaagugggaaaagcucaauaaugagaucagaugcacccauuggcaaaugcaauucugcaugcaucacuccaaauggaagcauucccaaugacaaaccauuccaaaauguaaacaggaucacauacggggccugucccagauauguuaagcaaaacacucugaaauuggcaacaggaaugagaaauguaccagagaaacaaacuagaggcauauuuggcgcaauagcugguuucauagaaaaugguugggagggaaugguggaugguugguacgguuucaggcaucaaaauucugagggaaggggacaagcagcagaucucaaaagcacucaagcagcaaucgaucaaaucaaugggaagcugaauagauugaucgggaaaaccaacgagaaauuccaucagauugaaaaagaauucucagaagucgaagggagaauucaggaccuugagaaauauguugaggacacuaaaauagaucucuggucauacaacgcggagcuucuuguugcccuggagaaccaacacacaauugaucuaacugacucagaaaugaacaaacuguuugaaaaaacaaagaagcaacugagggaaaaugcugaggauaugggcaaugguuguuucaaaauauaccacaaaugugacaaugccugcauaggaucaaucagaaauggaacuuaugaccacgauguguacagagaugaagcauuaaacaaccgauuccagaucaagggaguugagcugaagucaggguacaaagauuggauccuauggauuuccuuugccauaucauguuuucugcuuuguguugcuuuguugggguucaucaugugggccugccaaaaaggcaacauuaggugcaacauuugcauuuga

SEQ ID NO: 42890 - RNA, 1701 nt, Artificial Sequence; identical to SEQ ID NO: 40264
  derived and/or modified CDS sequence (wt) from hemagglutinin__InfluenzaA__AHC61871

SEQ ID NO: 42891 - RNA, 1701 nt, Artificial Sequence
  derived and/or modified CDS sequence (wt) from hemagglutinin__InfluenzaA__AHC61883
augaagacuaucauugcuuugagcuacauucuaugucugguuuucgcucaaaaacuuccuggaaaugacaacagcacggcaacgcugugccuugggcaccaugcaguaccaaacggaacgauagugaaaacaaucacgaaugaccaaauugaaguuacuaaugcuacugagcugguucagaguuccucaacaggugaaauaugcgacaguccucaucagauccuugauggagaaaacugcacacuaauagaugcucuauugggagacccucagugugauggcuuccaaaauaagaagugggaccuuuuuguugaacgaagcaaagccuacagcaacuguuacccuuaugaugugccggauuaugccucccuuaggucacuaguugccucauccggcacacuggaguuuaacaaugaaagcuucaauuggacuggagucacucaaaacggaacaagcucugcuugcauaaggagaucuaauaguaguuucuuuaguagauugaauugguugacccacuuaaacuucaaauacccagcauugaacgugacuaugccaaacaaugaacaauuugacaaauuguacauuugggggguucaccacccggguacggacaaggaccaaaucuuccuguaugcucaaucaucaggaagaaucacaguaucuaccaaaagaagccaacaagcuguaaucccgaauaucggaucuagacccagaauaaggaauaucccuagcagaauaagcaucuauuggacaauaguaaaaccgggagacauacuuuugauuaacagcacagggaaucuaauugcuccuagggguuacuucaaaauacgaagugggaaaagcucaauaaugagaucagaugcacccauuggcaaaugcaauucugaaugcaucacuccaaauggaagcauucccaaugacaaaccauuccaaaauguaaacaggaucacauacggggccugucccagauauguuaagcaaagcacucugaaauuggcaacaggaaugcgaaauguaccagagaaacaaacuagaggcauauuuggcgcaauagcggguuucauagaaaaugguugggagggaaugguggaugguugguaugguuucaggcaucaaaauucugagggaagaggacaagcagcagaucucaaaagcacucaagcagcaaucgaucaaaucaaugggaagcugaaucgauugaucgggaaaaccaacgagaaauuccaucagauugaaaaagaauucucagaagucgaagggagaauucaggaccuugagaaauauguugaggacacuaaaauagaucucuggucauacaacgcggagcuucuuguugcccuggagaaccaacauacaauugaucuagcugacucagaaaugaacaaacuguuugaaaaaacaaagaagcaacugagggaaaaugcugaggauaugggcaaugguuguuucaaaauauaccacaaaugugacaaugccugcauaggaucaaucagaaauggaacuuauaaccacgauguauacagagaugaagcuuuaaacaaccgguuccagaucaagggaguugagcugaagucaggguacaaagauuggauccuauggauuuccuuugccauaucauguuuuuugcuuuguguugcuuuguugggguucaucaugugggccugccaaaagggcaacauuaggugcaacauuugcauuuga

SEQ ID NO: 42892 - RNA, 1701 nt, Artificial Sequence; identical to SEQ ID NO: 42608
  derived and/or modified CDS sequence (wt) from hemagglutinin__InfluenzaA__AHC61895

SEQ ID NO: 42893 - RNA, 1701 nt, Artificial Sequence; identical to SEQ ID NO: 42607
  derived and/or modified CDS sequence (wt) from hemagglutinin__InfluenzaA__AHC61907

SEQ ID NO: 42894 - RNA, 1701 nt, Artificial Sequence
  derived and/or modified CDS sequence (wt) from hemagglutinin__InfluenzaA__AHC61931
augaagacuaucauugcuuugagcuacauucuaugucugguuuucgcucaaaaacuuccuggaaaugacaacagcacggcaacgcugugccuugggcaccaugcagugccaaacggaacgauagugaaaacaaucacgaaugaccaaauugaaguuacuaaugcuacugagcugguucagaguuccucaacaggugaaauaugcaacaguccucaucagauccuugauggagaaaacugcacacuaauagaugcucuauugggagacccucagugugauggcuuccaaaacaagaaaugggaccuuuuuguugaacgaagcaaagcccacagcaacuguuacccuuaugaugugccggauuaugccucccuuaggucacuaguugccucauccggcacacuggaguuuaacaaugaaagcuucaauuggacuggagucacucaaaacggaacaagcucugcuugcauaaggagaucuaauaauaguuucuuuaguagauugaauugguugacccacuuaaacuucaaauacccagcauugaacgugacuaugccaaacaaugaacaauuugacaaauuguacauuugggggguucaccacccggguacggacaaggaccaaaucuuccuguaugcucaagcagcaggaagaaucacaguaucuaccaaaagaagccaacaagcuguaauuccgaauaucggaucuagacccagaguaaggaauaucccuagcagaguaagcaucuauuggacaauaguaaaaccgggagacauacuuuugauuaacagcacagggaaucuaauugcuccuagggguuacuucaaaauacgaagugggaaaagcucaauaaugagaucagaugcacccauuggcaaaugcaauucugcaugcaucacuccaaauggaagcauucccaaugacaaaccauuccaaaauguaaacaggaucacauacggggccugucccagauauguuaagcaaaacacucugaaauuggcaacaggaaugagaaauguaccagagaaacaaacuagaggcauauuuggcgcaauagcugguuucauagaaaaugguugggagggaaugguggaugguugguacgguuucaggcaucaaaauucugagggaaggggacaagcagcagaucucaaaagcacucaagcagcaaucgaucaaaucaaugggaagcugaauagauugaucgggaaaaccaacgagaaauuccaucagauugaaaaagaauucucagaagucgaagggagaauucaggaccuugagaaauauguugaggacacuaaaauagaucucuggucauacaacgcggagcuucuuguugcccuggagaaccaacacacaauugaucuaacugacucagaaaugaacaaacuguuugaaaaaacaaagaagcaacugagggaaaaugcugaggauaugggcaaugguuguuucaaaauauaccacaaaugugacaaugccugcauaggaucaaucagaaauggaacuuaugaccacgauguguacagagaugaagcauuaaacaaccgauuccagaucaagggaguugagcugaagucaggguacaaagguuggauccuauggauuuccuuugccauaucauguuuuuugcuuuguguugcuuuguugggguucaucaugugggccugccaaaaaggcaacauuaggugcaacauuugcauuuga

SEQ ID NO: 42895 - RNA, 1701 nt, Artificial Sequence
  derived and/or modified CDS sequence (wt) from hemagglutinin__InfluenzaA__AHC61943
augaagacuaucauugcuuugagcuacauucuaugucugguuuucgcucaaaaacuuccuggaaaugacaacagcacggcaacgcugugccuugggcaccaugcaguaccaaacggaacgauagugaaaacaaucacgaaugaccaaauugaaguuacuaaugcuacugagcugguucagaauuccucaacaggugaaauaugcgacaguccucaucagauccuugauggagaaaacugcacacuaauagaugcucuauugggagacccucagugugauggcuuccaaaauaagaaaugggaccuuuuuguugaacgaagcaaagccuacagcaacuguuacccuuaugaugugccggauuaugccucccuuaggucacuaguugccucauccggcacacuggaguuuaacaaugaaagcuucaauuggacuggagucacucaaaacggaacaagcucugcuugcauaaggagaucuaauaauaguuucuuuaguagauugaauugguugacccacuuaaacuucaaauacccagcauugaacgugacuaugccaaacaaugaacaauuugacaaauuguacauuugggggguucaccacccggguacggacaaggaccaaaucuuccuguaugcucaagcaucaggaagaaucacaguaucuaccaaaagaagccaacaagcuguaaucccgaauaucggaucuagacccagaguaaggaauaucccuagcagaauaagcaucuauuggacaauaguaaaaccgggagacauacuuuugauuaacagcacagggaaucuaauugcuccuagggguuacuucaaaauacgaagugggaaaagcucaauaaugagaucagaugcacccauuggcaaaugcaauucugaaugcaucacuccaaauggaagcauucccaaugacaaaccauuccaaaauguaaacaggaucacauacggggccugucccagauauguuaagcaaaacacucugaaauuggcaacaggaaugcgaaauguaccagagaaacaaacuagaggcauauuuggcgcaauagcggguuucauagaaaaugguugggagggaaugguggaugguugguacgguuucaggcaucaaaauucugagggaagaggacaagcagcagaucuuaaaagcacucaagcagcaaucgaucaaaucaaugggaagcugaauagauugaucgggaaaaccaacgagaaauuccaucagauugaaaaagaauucucagaagucgaagggagaauucaggaccuugagaaauauguugaggacacuaaaauagaucucuggucauacaacgcggagcuucuuguugcccuggagaaccaacauacaauugaucuaacugacucagaaaugaacaaacuguuugaaaaaacaaagaagcaacugagggaaaaugcugaggauaugggcaaugguuguuucaaaauauaccacaaaugugacaaugccugcauaggaucaaucagaaauggaacuuaugaccacgauguauacagagaugaagcauuaaacaaccgguuccagaucaagggaguugagcugaagucaggguacaaagauuggauccuauggauuuccuuugccauaucauguuuuuugcuuuguguugcuuuguugggguucaucaugugggccugccaaaaaggcaacauuaggugcaacauuugcauuuga

SEQ ID NO: 42896 - RNA, 1701 nt, Artificial Sequence; identical to SEQ ID NO: 41436
  derived and/or modified CDS sequence (wt) from hemagglutinin__InfluenzaA__AHC61955

SEQ ID NO: 42897 - RNA, 1701 nt, Artificial Sequence; identical to SEQ ID NO: 40264
  derived and/or modified CDS sequence (wt) from hemagglutinin__InfluenzaA__AHC61967

SEQ ID NO: 42898 - RNA, 1701 nt, Artificial Sequence; identical to SEQ ID NO: 42703
  derived and/or modified CDS sequence (wt) from hemagglutinin__InfluenzaA__AHC61979

SEQ ID NO: 42899 - RNA, 1701 nt, Artificial Sequence; identical to SEQ ID NO: 42608
  derived and/or modified CDS sequence (wt) from hemagglutinin__InfluenzaA__AHC61991

SEQ ID NO: 42900 - RNA, 1701 nt, Artificial Sequence
  derived and/or modified CDS sequence (wt) from hemagglutinin__InfluenzaA__AHC62003
augaagacuaucauugcuuugagcuacauucuaugucugguuuucgcucaaaaacuuccuggaaaugacaacagcacggcaacgcugugccuugggcaccaugcagugccaaacggaacgauagugaaaacaaucacgaaugaccaaauugaaguuacuaaugcuacugaacugguucagaguuccucaacaggugaaauaugcaacaguccucaucagauccuugauggagaaaacugcacacuaauagaugcucuauugggagacccucagugugauggcuuccaaaacaagaaaugggaccuuuuuguugaacgaagcaaagcccacagcaacuguuacccuuaugaugugccggauuaugccucccuuaggucacuaguugccucauccggcacacuggaguuuaaaaaugaaagcuucaauuggacuggagucacucaaaacggaacaagcucugcuugcauaaggagaucuaauaauaguuucuuuaguagauugaauugguugacccacuuaaacuucaaauacccagcauugaacgugacuaugccaaacaaugaacaauuugacaaauuguacauuugggggguucaccacccggguacggacaaggaccaaaucuuccuguaugcucaagcaucaggaagaaucacaguaucuaccaaaagaagccaacaagcuguaauuccgaauaucggaucuagacccagaguaaggaauaucccuagcagaguaagcaucuauuggacaauaguaaaaccgggagacauacuuuugauuaacagcacagggaaucuaauugcuccuagggguuacuucaaaauacgaagugggaaaagcucaauaaugagaucagaugcacccauuggcaaaugcaauucugcaugcaucacuccaaauggaagcauucccaaugacaaaccauuccaaaauguaaacaggaucacauacggggccugucccagauauguuaagcaaaacacucugaaauuggcaacaggaaugagaaauguaccagagaaacaaacuagaggcauauuuggcgcaauagcggguuucauagaaaauggcugggagggaaugguggaugguugguacgguuucaggcaucaaaauucugagggaaggggacaagcagcagaucucaaaagcacucaagcagcaaucgaucaaaucaaugggaagcugaauagauugaucgggaaaaccaacgagaaauuccaucagauugaaaaagaauucucagaagucgaagggagaauucaggaccuugagaaauauguugaggacacuaaaauagaucucuggucauacaacgcggagcuucuuguugcccuggagaaccaacacacaauugaucuaacugacucagaaaugaacaaacuguuugaaaaaacaaagaagcaacugagggaaaaugcugaggauaugggcaaugguuguuucaaaauauaucacaaaugugacaaugccugcauaggaucaaucagaaauggaacuuaugaccacgauguguacagagaugaagcauuaaacaaccgauuccagaucaagggaguugagcugaagucaggguacaaagauuggauccuauggauuuccuuugccauaucauguuuuuugcuuuguguugcuuuguugggguucaucaugugggccugccaaaaaggcaacauuaggugcaacauuugcauuuga

SEQ ID NO: 42901 - RNA, 1701 nt, Artificial Sequence; identical to SEQ ID NO: 40264
  derived and/or modified CDS sequence (wt) from hemagglutinin__InfluenzaA__AHC62015

SEQ ID NO: 42902 - RNA, 1701 nt, Artificial Sequence; identical to SEQ ID NO: 42711
  derived and/or modified CDS sequence (wt) from hemagglutinin__InfluenzaA__AHC62027

SEQ ID NO: 42903 - RNA, 1701 nt, Artificial Sequence
  derived and/or modified CDS sequence (wt) from hemagglutinin__InfluenzaA__AHC62039
augaagacuaucauugcuuugagcuacauucuaugucugguuuucgcucaaaaacuuccugggaaugacaacagcacggcaacgcugugccuugggcaccaugcagugccaaacggaacgauagugaaaacaaucacgaaugaccaaauugaaguuacuaaugcuacugaacugguucagaguuccucaacaggugaaauaugcaacaguccucaucagauccuugauggagaaaacugcacacuaauagaugcucuauugggagacccucagugugauggcuuccaaaacaagaaaugggaccuuuuuguugaacgaagcaaagcccacagcaacuguuacccuuaugaugugccggauuaugccucccuuaggucacuaguugccucauccggcacacuggaguuuaacaaugaaagcuucaauuggacuggagucacucaaaacggaacaagcucugcuugcauaaggggaucuaauaauaguuucuuuaguagauugaauugguugacccacuuaaacuucaaauacccagcauugaacgugacuaugccaaacaaugaacaauuugacaaauuguacauuugggggguucaccacccggguacggacaaggaccaaaucuuccuguaugcucaagcaucaggaagaaucacaguaucuaccaaaagaagccaacaagcuguaauuccgaauaucggaucuagacccagaguaaggaauaucccuagcagaguaagcaucuauuggacaauaguaaaaccgggagacauacuuuugauuaacagcacagggaaucuaauugcuccuagggguuacuucaaaauacgaagugggaaaagcucaauaaugaaaucagaugcacccauuggcaaaugcaauucugcaugcaucacuccaaauggaagcauucccaaugacaaaccauuccaaaauguaaacaggaucacauacggggccugucccagauauguuaagcaaaacacuuugaaauuggcaacaggaaugagaaauguaccagagaaacaaacuagaggcauauuuggcgcaauagcggguuucauagaaaaugguugggagggaaugauggaugguugguacgguuucaggcaucaaaauucugagggaaggggacaagcagcagaucucaaaagcacucaagcagcaaucgaucaaaucaaugggaagcugaauagauugaucgggaaaaccaacgagaaauuccaucagauugaaaaagaauucucagaagucgaagggagaauucaggaccuugagaaauauguugaggacacuaaaauagaucucuggucauacaacgcggagcuucuuguugcccuggagaaccaacacacaauugaucuaacugacucagaaaugaacaaacuguuugaaaaaacaaagaagcaacugagggaaaaugcugaggauaugggcaaugguuguuucaaaauauaccacaaaugugacaaugccugcauaggaucaaucagaaauggaacuuaugaccacgauguguacagagaugaagcauuaaacaaccgauuccagaucaagggaguugagcugaagucaggguacaaagauuggauucuauggauuuccuuugccauaucauguuuuuugcuuuguguugcuuuguugggguucaucaugugggccugccaaaaaggcaacauuaggugcaacauuugcauuuga

SEQ ID NO: 42904 - RNA, 1701 nt, Artificial Sequence
  derived and/or modified CDS sequence (wt) from hemagglutinin__InfluenzaA__AHC62050
augaagacuaucauugcuuugagcuacauucuaugucugguuuucgcucaaaaacuuccuggaaaugacaacagcacggcaacgcugugccuugggcaccaugcagugccaaacggaacgauagugaaaacaaucacgaaugaccaaauugaaguuaccaaugcuacugagcugguucagaguuccucaacaggugaaauaugcaacaguccucaucagauccuugauggagaaaacugcacacuaauagaugcucuauugggagacccucagugugauggcuuccaaaacaagaaaugggaccuuuuuguugaacgaagcaaagcccacagcaacuguuacccuuaugaugugccggauuaugccucccuuaggucacuaguugccucauccggcacacuggaguuuaacaaugaaagcuucaauuggacuggagucacucaaaacggaacaagcucugcuugcauaaggagaucuaauaauaguuucuuuaguagauugaauugguugacccacuuaaacuucaaauacccagcauugaacgugacuaugccaaacaaugaacaauuugacaaauuguacauuugggggguucaccacccggguacggacaaggaccaaaucuuccuguaugcucaagcaucaggaagaaucacaguaucuaccaaaagaagccaacaagcuguaauuccgaauaucggaucuagacccagaguaaggaaugucccuagcagaguaagcaucuauuggacaauaguaaaaccgggagacauacuuuugauuaacagcacagggaaucuaauugcuccuagggguuacuucaaaauacgaagugggaaaagcucaauaaugagaucagaugcacccauuggcaaaugcaauucugcaugcaucacuccaaauggaagcauucccaaugacaaaccauuccaaaauguaaacaggaucacauacggggccugucccagauauguuaagcaaaacacucugaaauuggcaacaggaaugagaaauguaccagagaaacaaacuagaggcauauuuggcgcaauagcggguuucauagaaaauggcugggagggaaugguggaugguugguacgguuucaggcaucaaaauucugagggaaggggacaagcagcagaucucaaaagcacucaagcagcaaucgaucaaaucaaugggaagcugaauagauugaucgggaaaaccaacgagaaauuccaucagauugaaaaagaauucucagaagucgaagggagaauucaggaccuugagaaauauguugaggacacuaaaauagaucucuggucauacaacgcggagcuucuuguugcccuggagaaccaacacacaauugaucuaacugacucagaaaugaacaaacuguuugaaaaaacaaagaagcaacugagggaaaaugcugaggauaugggcaaugguuguuucaaaauauaucacaaaugugacaaugccugcauaggaucaaucagaaauggaacuuaugaccacgauguguacagagaugaagcauuaaacaaccgauuccagaucaagggaguugagcugaagucaggguacaaagauuggauccuauggauuuccuuugccauaucauguuuuuugcuuuguguugcuuuguugggguucaucaugugggccugccaaaaaggcaacauuaggugcaacauuugcauuuga

SEQ ID NO: 42905 - RNA, 1701 nt, Artificial Sequence
  derived and/or modified CDS sequence (wt) from hemagglutinin__InfluenzaA__AHC62062
augaagacuaucauugcuuugagcuacauucuaugucugguuuucgcucaaaaacuuccuggaaaugacaacagcacggcaacgcugugccuugggcaccaugcaguaccaaacggaacgauagugaaaacaaucacgaaugaccaaauugaaguuacuaaugcuacugagcugguucagaguuccucaacaggugaaauaugcgacaguccucaucagauccuugauggagaaaacugcacacuaauagaugcucuauugggagacccucagugugauggcuuccaaaauaagaagugggaccuuuuuguugaacgaagcaaagccuacagcaacuguuacccuuaugaugugccggauuaugccucccuuaggucacuaguugccucauccggcacacuggaguuuaacaaugaaagcuucaauuggacuggagucacucaaaacggaacaagcucugcuugcauaaggagaucuaauaguaguuucuuuaguagauugaauugguugacccacuuaaacuucaaauacccagcauugaacgugacuaugccaaacaaugaacaauuugacaaauuguacauuugggggguucaccacccggguacggacaaggaccaaaucuuccuguaugcucaaucaucaggaagaaucacaguaucuaccaaaagaagccaacaagcuguaaucccgaauaucggaucuagacccagaauaaggaauaucccuagcagaauaagcaucuauuggacaauaguaaaaccgggagacauacuuuugauuaacagcacagggaaucuaauugcuccuagggguuacuucaaaauacgaagugggaaaagcucaauaaugagaucagaugcacccauuggcaaaugcaauucugaaugcaucacuccaaauggaagcauucccaaugacaaaccauuccaaaauguaaacaggaucacauacggggccugucccagauauguuaagcaaagcacucugaaauuggcaacaggaaugagaaauguaccagagaaacaaacuagaggcauauuuggcgcaauagcggguuucauagaaaaugguugggagggaaugguggaugguugguacgguuucaggcaucaaaauucugagggaagaggacaagcagcagaucucaaaagcacucaagcagcaauagaucaaaucaaugggaagcugaaucgauugaucgggaaaaccaacgagaaauuccaucagauugaaaaagaauucucagaagucgaagggagaauucaggaccuugagaaauauguugaggacacuaaaauagaucucuggucauacaacgcggagcuucuuguugcccuggagaaccaacauacaauugaucuaacugacucagaaaugaacaaacuguuugaaaaaacaaagaagcaacugagggaaaaugcugaggauaugggcaaugguuguuucaaaauauaccacaaaugugacaaugccugcauaggaucaaucagaaauggaacuuauaaccacgauguauacagagaugaagcauuaaacaaccgguuccagaucaagggaguugagcugaagucaggguacaaagauuggauccuauggauuuccuuugccauaucauguuuuuugcuuuguguugcuuuguugggguucaucaugugggccugccaaaagggcaacauuaggugcaacauuugcauuuga

SEQ ID NO: 42906 - RNA, 1701 nt, Artificial Sequence
  derived and/or modified CDS sequence (wt) from hemagglutinin__InfluenzaA__AHC62074
augaagacuaucauugcuuugagcuacauucuaugucugguuuucgcucaaaaacuuccuggaaaugacaacagcacggcaacgcugugccuugggcaccaugcaguaccgaacggaacgauagugaaaacaaucacgaaugaccaaauugaaguuacuaaugcuacugagcugguucagaguuccucaacaggugaaauaugcgacaguccucaucagauccuugauggagaaaacugcacacuaauagaugcucuauugggagacccucagugugauggcuuccaaaauaagaaaugggaccuuuuuguugaacgaagcaaagccuacagcaacuguuacccuuaugaugugccggauuaugccucccuuaggucacuaguugccucauccggcacacuggaguuuaacaaugaaagcuucaauuggacuggagucacucaaaacggaacaagcucugcuugcauaaggagaucuaauaauaguuucuuuaguagauugaauugguugacccacuuaaacuucaaauacccagcauugaacgugacuaugccaaacaaugaacaauuugacaaauuguacauuugggggguucaccacccggguacugacaaggaccaaaucuuccuguaugcucaagcaucaggaagaaucacaguaucuaccaaaagaaaccaacaagcuguaaucccgaauaucggaucuagacccagaguaaggaauaucccuagcagaauaagcaucuauuggacaauaguaaaaccgggagacauacuuuugauuaacagcacagggaaucuaauugcuccuagggguuacuucaaaauacgaagugggaaaagcucaauaaugagaucagaugcacccauuggcaaaugcaauucugaaugcaucacuccaaauggaagcauucccaaugacaaaccauuccaaaauguaaacaggaucacauacggggccugucccagauauguuaagcaaaacacucugaaauuggcaacaggaaugcgaaauguaccagagaaacaaacuagaggcauauuuggcgcaauagcggguuucauagaaaaugguugggagggaaugguggaugguugguacgguuucaggcaucaaaauucugagggaagaggacaagcagcagaucucaaaagcacucaagcagcaaucgaucaaaucaaugggaagcugaauagauugaucgggaaaaccaacgagaaauuccaucagauugaaaaagaauucucagaagucgaagggagaauucaggaccuugagaaauauguugaggacacuaaaauagaucucuggucauacaacgcggagcuucuuguugcccuggagaaccaacauacaauugaucuaacugacucagaaaugaacaaacuguuugaaaaaacaaagaagcaacugagggaaaaugcugaggauaugggcaaugguuguuucaaaauauaccacaaaugugacaaugccugcauaggaucaaucagaaauggaacuuauaaccacgauguauacagagaugaagcauuaaacaaccgguuccagaucaagggaguugagcugaagucaggguacaaagauuggauccuauggauuuccuuugccauaucauguuuuuugcuuuguguugcuuuguugggguucaucaugugggccugccaaaaaggcaacauuaggugcaacauuugcauuuga

SEQ ID NO: 42907 - RNA, 1701 nt, Artificial Sequence; identical to SEQ ID NO: 42703
  derived and/or modified CDS sequence (wt) from hemagglutinin__InfluenzaA__AHC62086

SEQ ID NO: 42908 - RNA, 1701 nt, Artificial Sequence; identical to SEQ ID NO: 42618
  derived and/or modified CDS sequence (wt) from hemagglutinin__InfluenzaA__AHC62098

SEQ ID NO: 42909 - RNA, 1701 nt, Artificial Sequence; identical to SEQ ID NO: 42703
  derived and/or modified CDS sequence (wt) from hemagglutinin__InfluenzaA__AHC62110

SEQ ID NO: 42910 - RNA, 1701 nt, Artificial Sequence
  derived and/or modified CDS sequence (wt) from hemagglutinin__InfluenzaA__AHC62122
augaagacuaucauugcuuugagcuacauucuaugucugguuuucgcucaaaaacuuccugggaaugacaacagcacggcaacgcugugccuugggcaccaugcagugccaaacggaacgauagugaaaacaaucacgaaugaccaaauugaaguuacuaaugcuacugaaaugguucagaguuccucaacaggugaaauaugcaacaguccucaccagauccuugauggagaaaacugcacacuaauagaugcucuauugggagacccucagugugauggcuuccaaaacaagaaaugggaccuuuuuguugaacgaagcaaagcccacagcaacuguuacccuuaugaugugccggauuaugccucccuuaggucacuaguugccucaucuggcacacuggaguuuaacaaugaaagcuucaauuggacuggagucacucaaaacggaacaagcucugcuugcauaaggggaucuaauaauaguuucuuuaguagauugaauugguugacccacucaaacuucaaauacccagcauugaacgugacuaugccaaacaaugaacaauuugacaaauuguacauuugggggguucaccacccggguacggacaaggaccaaaucuuccuguaugcucaagcaucaggaagaaucacaguaucuaccaaaagaagccaacaagcuguaauuccgaauaucggaucuagacccagaguaaggaauaucccuagcagaguaagcaucuauuggacaauaguaaaaccgggagacauacuuuugauuaacagcacagggaaucuaauugcuccuagggguuacuucaaaauacgaagugggaaaagcucaauaaugagaucagaugcacccauuggcaaaugcaauucugcaugcaucacuccaaauggaagcauucccaaugacaaaccauuccaaaauguaaacaggaucacauacggggccugucccagauauguuaagcaaaacacucugaaauuggcaacaggaaugagaaauguaccagagaaacaaacuagaggcauauuuggcgcaauagcggguuucauagaaaaugguugggagggaaugguggaugguugguacgguuucaggcaucaaaauucugagggaaggggacaagcagcagaucucaaaagcacucaagcagcaaucgaucaaaucaaugggaagcugaauagauugaucgggaaaaccaacgagaaauuccaucagauugaaaaagaauucucagaagucgaagggagaauucaggaccuugagaaauauguugaggacacuaaaauagaucucuggucauacaacgcggagcuucuuguugcccuggagaaccaacacacaauugaucuaacugauucagaaaugaacaaacuguuugaaaaaacaaagaagcaacugagggaaaaugcugaggauaugggcaaugguuguuucaaaauauaccacaaaugugacaaugccugcauaggaucaaucagaaauggaacuuaugaccacgauguguacagagaugaagcauuaaacaaccgauuccggaucaagggaguugagcugaagucaggguacaaagauuggauccuauggauuuccuuugccauaucauguuuuuugcuuuguguugcuuuguugggguucaucaugugggccugccaaaaaggcaacauuaggugcaacauuugcauuuga

SEQ ID NO: 42911 - RNA, 1701 nt, Artificial Sequence
  derived and/or modified CDS sequence (wt) from hemagglutinin__InfluenzaA__AHC62134
augaagacuaucauugcuuugagcuacauucuaugucugguuuucgcucaaaaacuuccuggaaaugacaacagcacggcaacgcugugccuugggcaccaugcagugccaaacggaacgauagugaaaacaaucacgaaugaccaaauugaaguuacuaaugcuacugagcugguucagaguuccucaacaggugaaauaugcaacaguccucaucagauccuugauggagaaaacugcacacuaauagaugcucuauugggagacccucagugugauggcuuccaaaacaagaaaugggaccuuuuuguugaacgaagcaaagcccacagcaacuguuaccccuaugaugugccggauuaugccucccuuaggucacuaguugccucauccggcacacuggaguuuaacaaugaaagcuucaauuggacuggagucacucaaaacggaacaagcucugcuugcauaaggagaucuaauaauaguuucuuuaguagauugaauugguugacccacuuaaacuucaaauacccagcauugaacgugacuaugccaaacaaugaacaauuugacaaauuguacauuugggggguucaccacccggguacggacaaggaccaaaucuuccuguaugcucaagcagcaggaagaaucacaguaucuaccaaaagaagccaacaagcuguaauuccgaauaucggaucuagacccagaguaaggaauaucccuagcagaguaagcaucuauuggacaauaguaaaaccgggagacauacuuuugauuaacagcacagggaaucuaauugcuccuagggguuacuucaaaauacgaagugggaaaagcucaauaaugagaucagaugcacccauuggcaaaugcaauucugcaugcaucacuccaaauggaagcauucccaaugacaaaccauuccaaaauguaaacaggaucacauacggggccugucccagauauguuaagcaaaacacucugaaauuggcaacaggaaugagaaauguaccagagaaacaaacuagaggcauauuuggcgcaauagcugguuucauagaaaaugguugggaggggaugguggaugguugguacgguuucaggcaucaaaacucugagggaaggggacaagcagcagaucucaaaagcacucaagcagcaaucgaucaaaucaaugggaagcugaauagauugaucgggaaaaccaacgagaaauuccaucagauugaaaaagaauucucagaagucgaagggagaauucaggaccuugagaaauauguugaggacacuaaaauagaucucuggucauacaacgcagagcuucuuguugcccuggagaaucaacacacaauugaucuaacugacucagaaaugaacaaacuguuugaaaaaacaaagaagcagcugagggaaaaugcugaggauaugggcaaugguuguuucaaaauauaccacaaaugugacaaugccugcauaggaucaaucagaaauggaacuuaugaccacgauguguacagagaugaagcauuaaacaaccgauuccagaucaagggaguugagcugaagucaggguacaaagauuggauccuauggauuuccuuugccauaucauguuuuuugcuuuguguugcuuuguugggguucaucaugugggccugccaaaaaggcaacauuaggugcaacauuugcauuuga

SEQ ID NO: 42912 - RNA, 1701 nt, Artificial Sequence
  derived and/or modified CDS sequence (wt) from hemagglutinin__InfluenzaA__AHC62146
augaagacuaucauugcuuugagcuacauucuaugucugguuuucgcucaaaaacuuccuggaaaugacaacagcacggcaacgcugugccuugggcaccaugcaguaccaaacggaacgauagugaaaacaaucacgaaugaccaaauugaaguuacuaaugcuacugagcugguucagaguuccucaacaggugaaauaugcaacaguccucaucagauccuugauggagaaaacugcacacuaauagaugcucuauugggagacccucagugugauggcuuccaaaauaagaagugggaccuuuuuguugaacgaagcaaagccuacagcaacuguuacccuuaugaugugccggauuaugccucccuuaggucacuaguugccucauccggcacacuggaguuuaacaaugaaagcuucaauuggacuggagucacucaaaacggaacaagcucugcuugcauaaggagaucuaauaguaguuucuuuaguagacugaauugguugacccacuuaaacuucaaauacccagcauugaacgugacuaugccaaacaaugaacaauuugacaaauuguacauuugggggguucaccacccggguacggacaaggaccaaaucuuccuguaugcucaaucuucaggaagaaucacaguaucuaccaaaagaagccaacaagcuguaaucccgaauaucggaucuagacccagaauaaggaauaucccuagcagaauaaguaucuauuggacaauaguaaaaccgggagacauacuuuugauuaacagcacagggaaucuaauugcuccuagggguuacuucaaaauacgaagugggaaaagcucaauaaugagaucagaugcacccauuggcaaaugcaauucugaaugcaucacuccaaaugggagcauucccaaugacaaaccauuccaaaauguaaacaggaucacauacggggccugucccagauauguuaagcaaagcacucugaaauuggcaacaggaaugcgaaauguaccagagaaacaaacuagaggcauauuuggcgcaauagcggguuucauagaaaaugguugggagggaaugguggaugguugguacgguuucaggcaucaaaauuaugagggaagaggacaagcagcagaucucaaaagcacucaagcagcaaucgaucaaaucaaugggaagcugaaucgauugaucgggaaaaccaacgagaaauuccaucagauugaaaaagaauucucagaagucgaagggagaauucaggaccuugagaaauauguugaggacacuaaaauagaucucuggucauacaacgcggagcuucuuguugcccuggagaaccaacauacaauugaucuaacugacucagaaaugaacaaacuguuugaaaaaacaaagaagcaacugagggaaaaugcugaggauaugggcaaugguuguuucaaaauauaccacaaaugugacaaugccugcauaggaucaaucagaaauggaacuuauaaccacgauguauacagagaugaagcauuaaacaaccgguuccagaucaagggaguugagcugaagucuggguacaaagauuggauccuauggauuuccuuugccauaucauguuuuuugcuuuguguugcuuuguugggguucaucaugugggccugccaaaagggcaacauuaggugcaacauuugcauuuga

SEQ ID NO: 42913 - RNA, 1701 nt, Artificial Sequence; identical to SEQ ID NO: 42607
  derived and/or modified CDS sequence (wt) from hemagglutinin__InfluenzaA__AHC62158

SEQ ID NO: 42914 - RNA, 1701 nt, Artificial Sequence
  derived and/or modified CDS sequence (wt) from hemagglutinin__InfluenzaA__AHC62170
augaagacuaucauugcuuugagcuacauucuaugucugguuuucgcucaaaaacuuccugggaaugacaacagcacggcaacgcugugccuugggcaccaugcagugccaaacggaacgauagugaaaacaaucacgaaugaccaaauugaaguuacuaaugcuacugaacugguucagaguuccucaacaggugaaauaugcaacaguccucaucagauccuugauggagaaaacugcacacuaauagaugcucuauugggagacccucagugugauggcuuccaaaacaagaaaugggaccuuuuuguugaacgaagcaaagcccacagcaacuguuacccuuaugaugugccggauuaugccucccuuaggucacuaguugccucauccggcacacuggaguuuaacaaugaaagcuucaauuggacuggagucacucaaaacggaacaagcucugcuugcauaaggggaucuaauaauaguuucuuuaguagauugaauugguugacccacuuaaacuucaaauacccagcauugaacgugacuaugccaaacaaugaacaauuugacaaauuguacauuugggggguucaccacccggguacggacaaggaccaaaucuuccuguaugcucaagcaucaggaagaaucacaguaucuaccaaaagaagccaacaagcuguaauuccuaauaucggaucuagacccagaguaaggaacaucccuagcagaguaagcaucuauuggacaauaguaaaaccgggagacauacuuuugauuaacagcacagggaaucuaauugcuccuagggguuacuucaaaauacgaagugggaaaagcucaauaaugagaucagaugcacccauuggcaaaugcaauucugcaugcaucacuccaaauggaagcauucccaaugacaaaccauuccaaaauguaaacaggaucacauacggggccugucccagauauguuaagcaaaacacucugaaauuggcaacaggaaugagaaauguaccagagaaacaaacuagaggcauauuuggcgcaauagcggguuucauagaaaaugguugggagggaaugauggaugguugguacgguuucaggcaucaaaacucugagggaaggggacaagcagcagaucucaaaagcacucaagcagcaaucgaucaaaucaaugggaagcugaauagauugaucggaaaaaccaacgagaaauuccaucagauugaaaaagaauucucagaagucgaagggagaauucaggaccuugagaaauauguugaggacacuaaaauagaucucuggucauacaacgcggagcuucuuguugcccuggagaaccaacacacaauugaucuaacugacucagaaaugaacaaacuguuugaaaaaacaaagaagcaacugagggaaaaugcugaggauaugggcaaugguuguuucaaaauauaccacaaaugugacaaugccugcauaggaucaaucagaaauggaacuuaugaccacaauguguacagagaugaagcauuaaacaaccgauuccagaucaagggaguugagcugaagucaggguacaaagauuggauccuauggauuuccuuugccauaucauguuuuuugcuuuguguugcuuuguugggguucaucaugugggccugccaaaaaggcaacauuaggugcaacauuugcauuuga

SEQ ID NO: 42915 - RNA, 1701 nt, Artificial Sequence; identical to SEQ ID NO: 42651
  derived and/or modified CDS sequence (wt) from hemagglutinin__InfluenzaA__AHC62182

SEQ ID NO: 42916 - RNA, 1701 nt, Artificial Sequence; identical to SEQ ID NO: 42786
  derived and/or modified CDS sequence (wt) from hemagglutinin__InfluenzaA__AHC62194

SEQ ID NO: 42917 - RNA, 1701 nt, Artificial Sequence
  derived and/or modified CDS sequence (wt) from hemagglutinin__InfluenzaA__AHC62206
augaagacuaucauugcuuugagcuacauucuaugucugguuuucgcucaaaaacuuccuggaaaugacaacagcacggcaacgcugugccuugggcaccaugcaguaccaaacggaacgauagugaaaacaaucacgaaugaccaaauugaaguuacuaaugcuacugagcugguucagaguuccucaacaggugaaauaugcgacaguccucaucagauccuugauggagaaaacugcacacuaauagaugcucuauugggagacccucagugugauggcuuccaaaauaagaagugggaccuuuuuguugaacgaagcaaagccuacagcaacuguuacccuuaugaugugccggauuaugccucccuuaggucacuaguugccucauccggcacacuggaguuuaacaaugaaagcuucauuuggacuggagucacucaaaacggaacaagcucugcuugcauaaggagaucuaauaguaguuucuuuaguagauugaauugguugacccacuuaaacuucaaauacccagcauugaacgugacuaugccaaacaaugaacaauuugacaaauuguacauuugggggguucaccacccggguacggauaaggaccaaaucuuccuguaugcucaaucuucaggaagaaucacaguaucuaccaaaagaagccaacaagcuguaaucccgaauaucggaucuagacccagaauaaggaauaucccuagcagaauaagcaucuauuggacaauaguaaaaccgggagacauacuuuugauuaacagcacagggaaucuaauugcuccuagggguuacuucaaaauacgaagugggaaaagcucaauaaugagaucagaugcacccauuggcaaaugcaauucugaaugcaucacuccaaaugggagcauucccaaugacaaaccauuccaaaauguaaacaggaucacauacggggccugucccagauauguuaagcaaagcacucugaaauuggcaacaggaaugcgaaauguaccagagaaacaaacuagaggcauauuuggcgcaauagcggguuucauagaaaaugguugggagggaaugguggaugguugguacgguuucaggcaucaaaauucugagggaagaggacaagcagcagaucucaaaagcacucaagcagcaaucgaucaaaucaaugggaagcugaaucgauugaucgggaaaaccaacgagaaauuccaucagauugaaaaagaauucucagaagucgaagggagaauucaggaccuugagaaauauguugaggacacuaaaauagaucucuggucauacaacgcggagcuucuuguugcccuggagaaccaacauacaauugaucuaacugacucagaaaugaacaaacuguuugaaaaaacaaagaagcaacugagggaaaaugcugaggauaugggcaaugguuguuucaaaauauaccacaaaugugacaaugccugcauaggaucaaucagaaauggaacuuauaaccacgauguauacagagaugaagcauuaaacaaccgguuccagaucaagggaguugagcugaagucuggguacaaagauuggauccuauggauuuccuuugccauaucauguuuuuugcuuuguguugcuuuguugggguucaucaugugggccugccaaaagggcaacauuaggugcaacauuugcauuuga

SEQ ID NO: 42918 - RNA, 1701 nt, Artificial Sequence
  derived and/or modified CDS sequence (wt) from hemagglutinin__InfluenzaA__AHC62218
augaagacuaucauugcuuugagcuacauucuaugucugguuuucgcucaaaaacuuccuggaaaugacaacagcacggcaacgcugugccuugggcaccaugcagugccaaacggaacgauagugaaaacaaucacgaaugaccaaauugaaguuacuaaugcuacugagcugguucagaguuccucaacaggugaaauaugcaacaguccucaucagauccuugauggagaaaacugcacacuaauagaugcucuauugggagacccucagugugauggcuuccaaaacaagaaaugggaccuuuuuguugaacgaagcaaagcccacagcaacuguuacccuuaugaugugccggauuaugccucccuuaggucacuaguugccucauccggcacacuggaguuuaacaaugaaagcuucaauuggacuggagucacucaaaacggaacaagcucugcuugcauaaggagaucuaauaauaguuucuuuaguagauugaauugguugacccacuuaaacuucaaauacccagcauugaacgugacuaugccaaacaaugaacaauuugacaaauuguacauuugggggguucaccacccggguacggacaaggaccaaaucuuccuguaugcucaagcaucaggaagaaucacaguaucuaccaaaagaagccaacaagcuguaauuccgaauaucggaucuagacccagaguaaggaauaucccuagcagaguaagcaucuauuggacaauaguaaaaccgggagacauacuuuugauuaacagcacagggaaucuaauugcuccuagggguuacuucaaaauacgaagugggaaaagcucaauaaugagaucagaugcacccauuggcaaaugcaauucugcaugcaucacuccaaauggaagcauucccaaugacaaaccauuccaaaauguaaacaggaucacauacggggccugucccagauauguuaagcaaaacacucugaaauuggcaacaggaaugagaaauguaccagagaaacaaacuagaggcauauuuggcgcaauagcggguuucauagaaaaugguugggagggaaugguggaugguugguacgguuucaggcaucaaaauucugagggaaggggacaagcagcagaucucaaaagcacucaagcagcaaucgaucaaaucaaugggaagcugaauagauugaucgggaaaaccaacgagaaauuccaucagauugaaaaagaauucucagaaguugaagggagaauucaggaccuugagaaauauguugaggacacuaaaauagaucucuggucauacaacgcggagcuucuuguugcccuggagaaccaacacacaauugaucuaacugacucagaaaugaacaaacuguuugaaaaaacaaagaagcaacugagggaaaaugcugaggauaugggcaaugguuguuucaaaauauaccacaaaugugacaaugccugcauaggaucaaucagaaauggaacuuaugaccacgauguguacagagaugaagcauuaaacaaccgauuccagaucaagggaguugagcugaagucaggguacaaagauuggauccuauggauuuccuuugccauaucauguuuuuugcuuuguguugcuuuguugggguucaucaugugggccugccaaaaaggcaacauuaggugcaacauuugcauuuga

SEQ ID NO: 42919 - RNA, 1701 nt, Artificial Sequence
  derived and/or modified CDS sequence (wt) from hemagglutinin__InfluenzaA__AHC62242
augaagacuaucauugcuuugagcuacauucuaugucugguuuucgcucaaaaaauuccuggaaaugacaacagcacggcaacgcuaugccuugggcaccaugcaguaccaaacggaacgauagugaaaacaaucacgaaugaccaaauugaaguuacuaaugcuacugagcugguucagaauuccucaacaggugaaauaugcgacaguccucaucagauccuugauggagaaaacugcacacuaauagaugcucuauugggagacccucagugugauggcuuccaaaauaagaaaugggaccuuuuuguugaacgaagcaaagccuacagcaacuguuacccuuaugaugugccggauuaugccucccuuaggucacuaguugccucauccggcacacuggaguuuaacaaugaaagcuucaauuggacuggagucacucaaaacggaacaagcucugcuugcauaaggagaucuaauaauaguuucuuuaguagauugaauugguugacccacuuaaacuucaaauacccagcauugaacgugacuaugccaaacaaugaacaauuugacaaauuguacauuugggggguucaccacccggguacggacaaggaccaaaucuuccuguaugcucaagcaucaggaagaaucacaguaucuaccaaaagaagccaacaagcuguaaucccgaauaucggaucuagacccagaguaaggaauaucccuagcagaauaagcaucuauuggacaauaguaaaaccgggagacauacuuuugauuaacagcacagggaaucuaauugcuccuagggguuacuucaaaauacgaagugggaaaagcucaauaaugagaucagaugcacccauuggcaaaugcaauucugaaugcaucacuccaaauggaagcauucccaaugacaaaccauuccaaaauguaaacaggaucacauacggggccugucccagauauguuaagcaaaacacucugaaauuggcaacaggaaugcgaaauguaccagagaaacaaacuagaggcauauuuggcgcaauagcggguuucauagaaaaugguugggagggaaugguggaugguugguacgguuucaggcaucaaaauucugagggaagaggacaagcagcagaucucaaaagcacucaagcagcaaucgaucaaaucaaugggaagcugaauagauugaucgggaaaaccaacgagaaauuccaucagauugaaaaagaauucucagaagucgaagggagaauucaggaccuugagaaauauguugaggacacuaaaauagaucucuggucauacaacgcggagcuucuuauugcccuggagaaccaacauacaauugaucuaacugacucagaaaugaacaaacuguuugaaaaaacaaagaagcaacugagggaaaaugcugaggauaugggcaaugguuguuucaaaauauaccacaaaugugacaaugccugcauaggaucaaucagaaauggaacuuaugaccacgauguauacagagaugaagcauuaaacaaccgguuccagaucaagggaguugagcugaagucaggguacaaagauuggauccuauggauuuccuuugccauaucauguuuuuugcuuuguguugcuuuguugggguucaucaugugggccugccaaaaaggcaacauuaggugcaacauuugcauuuga

SEQ ID NO: 42920 - RNA, 1701 nt, Artificial Sequence; identical to SEQ ID NO: 42730
  derived and/or modified CDS sequence (wt) from hemagglutinin__InfluenzaA__AHC62254

SEQ ID NO: 42921 - RNA, 1701 nt, Artificial Sequence; identical to SEQ ID NO: 42627
  derived and/or modified CDS sequence (wt) from hemagglutinin__InfluenzaA__AHC62266

SEQ ID NO: 42922 - RNA, 1701 nt, Artificial Sequence; identical to SEQ ID NO: 42793
  derived and/or modified CDS sequence (wt) from hemagglutinin__InfluenzaA__AHC62278

SEQ ID NO: 42923 - RNA, 1701 nt, Artificial Sequence
  derived and/or modified CDS sequence (wt) from hemagglutinin__InfluenzaA__AHC62290
augaagacuaucauugcuuugagcuacauucuaugucugauuuucgcucaaaaacuuccuggaaaugacaacagcacggcaacgcugugccuugggcaccaugcagugccaaacggaacgauagugaaaacaaucacgaaugaccaaauugaaguuacuaaugcuacugagcugguucagaguuccucaacaggugaaauaugcaacaguccucaucagauccuugauggagaaaacugcacacuaauagaugcucuauugggagacccucagugugauggcuuccaaaacaagaaaugggaccuuuuuguugaacgaagcaaagcccacagcaacuguuacccuuaugaugugccggauuaugccucccuuaggucacuaguugccucauccggcacacuggaguuuaacaaugaaagcuucaauuggacuggagucacucaaaacggaacaagcucugcuugcauaaggagaucuaauaauaguuucuuuaguagauugaauugguugacccacuuaaacuucaaauacccagcauugaacgugacuaugccaaacaaugaacaauuugacaaauuguacauuugggggguucaccacccggguacggacaaggaccaaaucuuccuguaugcucaagcaucaggaagaaucacaguaucuaccaaaagaagccaacaagcuguaauuccgaauaucggaucuagacccagaguaaggaauaucccuagcagaguaagcaucuauuggacaauaguaaaaccgggagacauacuuuugauuaacagcacagggaaucuaauugcuccuagggguuacuucaaaauacgaagugggaaaagcucaauaaugagaucagaugcacccauuggcaaaugcaauucugcaugcaucacuccaaauggaagcauucccaaugacaaaccauuccaaaauguaaacaggaucacauacggggccugucccagauauguuaagcaaaacacucugaaauuggcaacaggaaugagaaauguaccagagaaacaaacuagaggcauauuuggcgcaauagcggguuucauagaaaaugguugggagggaaugguggaugguugguacgguuucaggcaucaaaauucugagggaaggggacaagcagcagaucucaaaagcacucaagcagcaaucgaucaaaucaaugggaagcugaauagauugaucgggaaaaccaacgagaaauuccaucagauugaaaaagaauucucagaagucgaagggagaauucaggaccuugagaaauauguugaggacacuaaaauagaucucuggucauacaacgcggagcuucuuguugcccuggagaaccaacacacaauugaucuaacugacucagaaaugaacaaacuguuugaaaaaacaaagaagcaacugagggaaaaugcugaggauaugggcaaugguuguuucaaaauauaccacaaaugugacaaugccugcauaggaucaaucagaaauggaacuuaugaccacgauguguacagagaugaagcauuaaacaaccgauuccagaucaagggaguugagcugaagucaggguacaaagauuggauccuauggauuuccuuugccauaucauguuuuuugcuuuguguugcuuuguugggguucaucaugugggccugccaaaaaggcaacauuaggugcaacauuugcauuuga

SEQ ID NO: 42924 - RNA, 1701 nt, Artificial Sequence
  derived and/or modified CDS sequence (wt) from hemagglutinin__InfluenzaA__AHC62302
augaagacuaucauugcuuugagcuacauucuaugucugguuuucgcucaaaaacuuccuggaaaugacaacagcacggcaacgcugugccuugggcaccaugcagugccaaacggaacgauagugaaaacaaucacgaaugaccaaauugaaguuacuaaugcuacugagcugguucagaguuccucaacaggugaaauaugcaacaguccucaucagauccuugauggagaaaacugcacacuaauagaugcucuauugggagacccucagugugauggcuuccaaaacaagaaaugggaccuuuuuguugaacgaagcaaagcccacagcaacuguuacccuuaugaugugccggauuaugccucccuuaggucacuaguugccucauccggcacacuggaguuuaacaaugaaagcuucaauuggacuggagucacucaaaacggaacaagcucugcuugcauaaggagaucuaauaauaguuucuuuaguagauugaauugguugacccacuuaaacuucaaauacccagcauugaacgugacuaugccaaacaaugaacaauuugacaaauuguacauuugggggguucaccacccggguacggacaaggaccaaaucuuccuguaugcucaagcagcaggaagaaucacaguaucuaccaaaagaagccaacaagcuguaauuccgaauaucggaucuagacccagaguaaggaauaucccuagcagaguaagcaucuauuggacaauaguaaaaccgggagacauacuuuugauuaacagcacagggaaucuaauugcuccuagggguuacuucaaaauacgaaaugggaaaagcucaauaaugagaucagaugcacccauuggcaaaugcaauucugcaugcaucacuccaaauggaagcauucccaaugacaaaccauuccaaaauguaaacaggaucacauacggggccugucccagauauguuaagcaaaacacucugaaauuggcaacaggaaugagaaauguaccagagaaacaaacuagaggcauauuuggcgcaauagcugguuucauagaaaaugguugggagggaaugguggaugguugguacgguuucaggcaucaaaauucugagggaaggggacaagcagcugaucucaaaagcacucaagcagcaaucgaucaaaucaaugggaagcugaauagauugaucgggaaaaccaacgagaaauuccaucagauugaaaaagaauucucagaagucgaagggagaauucaggaccuugagaaauauguugaggacacuaaaauagaucucuggucauacaacgcggagcuucuuguugcccuggagaaccaacacacaauugaucuaacugacucggaaaugaacaaacuguuugaaaaaacaaagaagcaacugagggaaaaugcugaggauaugggcaaugguuguuucaaaauauaccacaaaugugacaaugccugcauaggaucaaucagaaauggaacuuaugaccacgauguguacagagaugaagcauuaaacaaccgauuccagaucaagggaguugagcugaagucaggguacaaagauuggauccuauggauuuccuuugccauaucauguuuuuugcuuuguguugcuuuguugggguucaucaugugggccugccaaaaaggcaacauuaggugcaacauuugcauuuga

SEQ ID NO: 42925 - RNA, 1701 nt, Artificial Sequence
  derived and/or modified CDS sequence (wt) from hemagglutinin__InfluenzaA__AHC62314
augaagacuaucauugcuuugagcuacauucuaugucugguuuucgcucaaaaacuuccuggaaaugacaacagcacggcaacgcugugccuugggcaccaugcaguaccaaacggaacgauagugaaaacaaucacgaaugaccaaauugaaguuacuaaugcuacugagcugguucagaauuccucaacaggugaaauaugcgacaguccucaucagauccuugauggagaaaacugcacacuaauagaugcucuauugggagacccucagugugauggcuuccaaaauaagaaaugggaccuuuuuguugaacgaagcaaagccuacagcaacuguuacccuuaugaugugccggauuaugccucccuuaggucacuaguugccucauccggcacacuggaguuuaacaaugaaagcuucaauuggacuggagucacucaaaacggaacaagcucugcuugcauaaggagaucuaauaauaguuucuuuaguagauugaauugguugacccacuuaaacuucaaauacccagcauugaacgugacuaugccaaacaaugaacaauuugacaaauuguacauuugggggguucaccacccggguacggacaaggaccaaaucuuccuguaugcucaagcaucaggaagaaucacaguaucuaccaaaagaagccaacaagcuguaaucccgaauaucggaucuagacccagaguaaggaauaucccuagcagaauaagcaucuauuggacaauaguaaaaccgggagacauacuuuugauuaacagcacagggaaucuaauugcuccuagggguuacuucaaaauacgaagugggaaaagcucaauaaugagaucagaugcacccauuggcaaaugcaauucugaaugcaucacuccaaauggaagcauucccaaugacaaaccauuccaaaauguaaacaggaucacauacggggccugucccagauauguuaagcaaaacacucugaaauuggcaacaggaaugcgaaauguaccagagaaacaaacuagaggcauauuuggcgcaauagcggguuucauagaaaaugguugggagggaaugguggaugguugguacgguuucaggcaucaaaauucugagggaagaggacaagcagcagaucucaaaagcacucaagcagcaaucgaucaaaucaaugggaagcugaauagauugaucgggaaaaccaacgagaaauuccaucagauugaaaaagaauucucagaagucgaagggagaauucaggaccuugagaaauauguugaggacacuaaaauagaucucuggucauacaacgcggagcuucuuguugcccuggagaaccaacauacaauugaucuaacugacucagaaaugaacaaacuguuugaaaaaacaaagaagcaacugagggaaaaugcugaggauaugggcaaugguuguuucaaaauauaccacaaaugugacaaugccugcauaggaucaaucagaaauggaacuuaugaccacgauguauacagagaugaagcauuaaacaaccgguuccagaucaggggaguugagcugaagucaggguacaaagauuggauccuauggauuuccuuugccauaucauguuuuuugcuuuguguugcuuuguugggguucaucaugugggccugccaaaaaggcaacauuaggugcaacauuugcauuuga

SEQ ID NO: 42926 - RNA, 1701 nt, Artificial Sequence; identical to SEQ ID NO: 42790
  derived and/or modified CDS sequence (wt) from hemagglutinin__InfluenzaA__AHC62326

SEQ ID NO: 42927 - RNA, 1701 nt, Artificial Sequence; identical to SEQ ID NO: 40264
  derived and/or modified CDS sequence (wt) from hemagglutinin__InfluenzaA__AHC62338

SEQ ID NO: 42928 - RNA, 1701 nt, Artificial Sequence
  derived and/or modified CDS sequence (wt) from hemagglutinin__InfluenzaA__AHC62350
augaagacuaucauugcuuugagcuacauucuaugucugguuuucgcucaaaaacuuccuggaaaugacaacagcacggcaacgcugugccuugggcaccaugcagugccaaacggaacgauagugaaaacaaucacgaaugaccaaauugaaguuacuaaugcuacugagcugguucagaguuccucaacaggugaaauaugcaacaguccucaucagauccuugauggagaaaacugcacacuaauagaugcucuauugggagauccucagugugauggcuuccaaaacaagaaaugggaccuuuuuguugaacgaagcaaagcccacagcaacuguuacccuuaugaugugccggauuaugccucccuuaggucacuaguugccucauccggcacacuggaguuuaacaaugaaagcuucaauuggacuggagucacucaaaacggaacaagcucugcuugcauaaggagaucuaauaauaguuucuuuaguagauugaauugguugacccacuuaaacuucaaauacccagcauugaacgugacuaugccaaacaaugaacaauuugacaaauuguacauuugggggguucaccacccggguacggacaaggaccaaaucuuccuguaugcucaagcagcaggaagaaucacaguaucuaccaaaagaagccaacaagcuguaauuccgaauaucggaucuagacccagaguaaggaauaucccuagcagaguaagcaucuauuggacaauaguaaaaccgggagacauacuuuugauuaacagcacagggaaucuaauugcuccuagggguuacuucaaaauacgaagugggaaaagcucaauaaugagaucagaugcacccauuggcaaaugcaauucugcaugcaucacuccaaauggaagcauucccaaugacaaaccauuccaaaauguaaacaggaucacauacggggccugucccagauauguuaagcaaaacacucugaaauuggcaacaggaaugagaaauguaccagagaaacaaacuagaggcauauuuggcgcaauagcugguuucauagaaaaugguugggagggaaugguggaugguugguacgguuucaggcaucaaaauucugagggaaggggacaagcagcagaucucaaaagcacucaagcagcaaucgaucaaaucaaugggaagcugaauagauugaucgggaaaaccaacgagaaauuccaucagauugaaaaagaauucucagaagucgaagggagaauucaggaccuugagaaauauguugaggacacuaaaauagaucucuggucauacaacgcggagcuucuuguugcccuggagaaccaacacacaauugaucuaacugacucagaaaugaacaaacuguuugaaaaaacaaagaagcaacugagggaaaaugcugaggauaugggcaaugguuguuucaaaauauaccacaaaugugacaaugccugcauaggaucaaucagaaauggaacuuaugaccacgauguguacagagaugaagcauuaaacaaccgauuccagaucaagggaguugagcugaagucaggguacaaagauuggauccuauggauuuccuuugccauaucauguuuuuugcuuuguguugcuuuguugggguucaucaugugggccugccaaaaaggcaacauuaggugcaacauuugcauuuga

SEQ ID NO: 42929 - RNA, 1701 nt, Artificial Sequence; identical to SEQ ID NO: 40264
  derived and/or modified CDS sequence (wt) from hemagglutinin__InfluenzaA__AHC62362

SEQ ID NO: 42930 - RNA, 1701 nt, Artificial Sequence
  derived and/or modified CDS sequence (wt) from hemagglutinin__InfluenzaA__AHC62374
augaagacuaucauugcuuugagcuacauucuaugucugguuuucgcucaaaaacuuccuggaaaugacaacagcacggcaacgcugugccuugggcaccaugcaguaccaaacggaacgauagugaaaacaaucacgaaugaccaaauugaaguuacuaaugcuacugagcugguucagaauuccucaacaggugaaauaugcgacaguccucaucagauccuugauggagaaaacugcacacuaauagaugcucuauugggagacccucagugugauggcuuccaaaauaagaaaugggaccuuuuuguugaacgaagcaaagccuacagcaacuguuacccuuaugaugugccggauuaugccucccuuaggucacuaguugccucauccggcacacuggaguuuaacaaugaaagcuucaauuggacuggagucacucaaaacggaacaagcucugcuugcauaaggagaucuaauaauaguuucuuuaguagauugaauugguugacccacuuaaacuucaaauacccagcauugaacgugacuaugccaaacaaugaacaauuugacaaauuguacauuugggggguucaccacccggguacggacaaggaccaaaucuuccuguaugcucaagcaucaggaagaaucacaguaucuaccaaaagaagccaacaagcuguaaucccgaauaucggaucuagacccagaguaaggaauaucccuagcagaauaagcaucuauuggacaauaguaaaaccgggagacauacuuuugauuaacagcacagggaaucuaauugcuccuagggguuacuucaaaauacgaagugggaaaagcucaauaaugagaucagaugcacccauuggcaaaugcaauucugaaugcaucacuccaaauggaagcauucccaaugacaaaccauuccaaaauguaaacaggaucacauacggggccugucccagauauguuaagcaaaacacucugaaauuggcaacaggaaugcgaaauguaccagagaaacaaacuagaggcauauuuggcgcaauagcggguuucauagaaaaugguugggagggaaugguggaugguugguacgguuucaggcaucaaaauucugagggaagaggacaagcagcagaucucaaaagcacucaagcagcaaucgaucaaaucaaugggaagcugaauagauugaucgggaaaaccaaugagaaauuccaucagauugaaaaagaauucucagaagucgaagggagaauucaggaccuugagaaauauguugaggacacuaaaauagaucucuggucauacaacgcggagcuucuuguugcccuggagaaccaacauacaauugaucuaacugacucagaaaugaacaaacuguuugaaaaaacaaagaagcaacugagggaaaaugcugaggauaugggcaaugguuguuucaaaauauaccacaaaugugacaaugccugcauaggaucaaucagaaauggaacuuaugaccacgauguauacagagaugaagcauuaaacaaccgguuccagaucaagggaguugagcugaagucaggguacaaagauuggauccuauggauuuccuuugccauaucauguuuuuugcuuuguguugcuuuguugggguucaucaugugggccugccaaaaaggcaacauuaggugcaacauuugcauuuga

SEQ ID NO: 42931 - RNA, 1701 nt, Artificial Sequence; identical to SEQ ID NO: 42793
  derived and/or modified CDS sequence (wt) from hemagglutinin__InfluenzaA__AHC62386

SEQ ID NO: 42932 - RNA, 1701 nt, Artificial Sequence; identical to SEQ ID NO: 42703
  derived and/or modified CDS sequence (wt) from hemagglutinin__InfluenzaA__AHC62398

SEQ ID NO: 42933 - RNA, 1701 nt, Artificial Sequence
  derived and/or modified CDS sequence (wt) from hemagglutinin__InfluenzaA__AHC62410
augaagacuaucauugcuuugagcuacauucuaugucugguuuucgcucaaaaacuuccuggaaaugacaacagcacggcaacgcugugccuugggcaccaugcagugccaaacggaacgauagugaaaacaaucacgaaugaccaaauugaaguuaccaaugcuacugagcugguucagaguuccucaacaggugaaauaugcaacaguccucaucagauccuugauggagaaaacugcacacuaauagaugcucuauugggagacccucagugugauggcuuccaaaacaagaaaugggaccuuuuuguugaacgaagcaaagcccacagcaacuguuacccuuaugaugugccggauuaugccucccuuaggucacuaguugccucauccggcacacuggaguuuaacaaugaaagcuucaauuggacuggagucacucaaaacggaacaagcucugcuugcauaaggagaucuaauaauaguuucuuuaguagauugaauugguugacccacuuaaacuucaaauacccagcauugaacgugacuaugccaaacaaugaacaauuugacaaauuguacauuugggggguucaccacccggguacggacaaggaccaaaucuuccuguaugcucaagcaucaggaagaaucacaguaucuaccaaaagaagccaacaagcuguaauuccgaauaucggaucuagacccagaguaaggaauaucccuagcagaguaagcaucuauuggacaauaguaaaaccgggagacauacuuuugauuaacagcacagggaaucuaauugcuccuagggguuacuucaaaauacgaagugggaaaagcucaauaauaagaucagaugcacccauuggcaaaugcaauucugcaugcaucacuccaaauggaagcauucccaaugacaaaccauuccaaaauguaaacaggaucacauacggggccugucccagauauguuaagcaaaacacucugaaauuggcaacaggaaugagaaauguaccagagaaacaaacuagaggcauauuuggcgcaauagcggguuucauagaaaauggcugggagggaaugguggaugguugguacgguuucaggcaucaaaauucugagggaaggggacaagcagcagaucucaaaagcacucaagcagcaaucgaucaaaucaaugggaagcugaauagauugaucgggaaaaccaacgagaaauuccaucagauugaaaaagaauucucagaagucgaagggagaauucaggaccuugagaaauauguugaggacacuaaaauagaucucuggucauacaacgcggagcuucuuguugcccuggagaaccaacacacaauugaucuaacugacucagaaaugaacaaacuguuugaaaaaacaaagaagcaacugagggaaaaugcugaggauaugggcaaugguuguuucaaaauauaucacaaaugugacaaugccugcauaggaucaaucagaaauggaacuuaugaccacgauguguacagagaugaagcauuaaacaaccgauuccagaucaagggaguugagcugaagucaggguacaaagauuggauccuauggauuuccuuugccauaucauguuuuuugcuuuguguugcuuuguugggguucaucaugugggccugccaaaaaggcaacauuaggugcaacauuugcauuuga

SEQ ID NO: 42934 - RNA, 1701 nt, Artificial Sequence; identical to SEQ ID NO: 42736
  derived and/or modified CDS sequence (wt) from hemagglutinin__InfluenzaA__AHC62422

SEQ ID NO: 42935 - RNA, 1701 nt, Artificial Sequence
  derived and/or modified CDS sequence (wt) from hemagglutinin__InfluenzaA__AHC62434
augaagacuaucauugcuuugagcuacauucuaugucugguuuucgcucaaaaacuuccuggaaaugacaacagcacggcaacgcugugccuugggcaccaugcagugccaaacggaacgauagugaaaacaaucacgaaugaccaaauugaaguuacuaaugcuacugagcugguucagaguuccucaacaggugaaauaugcaacaguccucaucagauccuugauggagaaaacugcacacuaauagaugcucuauugggagacccucagugugauggcuuccaaaacaagaaaugggaccuuuuuguugaacgaagcaaagcccacagcaacuguuacccuuaugaugugccggauuaugccucccuuaggucacuaguugccucauccggcacacuggaguuuaacaaugaaagcuucaauuggacuggagucacucaaaacggaacaagcucugcuugcauaaggagaucuaauaauaguuucuuuaguagauugaauugguugacccacuuaaacuucaaauacccagcauugaacgugacuaugccaaacaaugaacaauuugacaaauuguacauuugggggguucaccacccggguacggacaaggaccaaaucuuccuguaugcucaagcagcaggaagaaucacaguaucuaccaaaagaagccaacaagcuguaauuccgaauaucggaucuagacccagaguaaggaauaucccuagcagaguaagcaucuauuggacaauaguaaaaccgggagacauacuuuugauuaacagcacagggaaucuaauugcuccuagggguuacuucaaaauacaaagugggaaaagcucaauaaugagaucagaugcacccauuggcaaaugcaauucugcaugcaucacuccaaauggaagcauucccaaugacaaaccauuccaaaauguaaacaggaucacauacggggccugucccagauauguuaagcaaaacacucugaaauuggcaacaggaaugagaaauguaccagagaaacaaacuagaggcauauuuggcgcaauagcugguuucauagaaaaugguugggagggaaugguggaugguugguacgguuucaggcaucaaaauucugagggaaggggacaagcagcagaucucaaaagcacucaagcagcaaucgaucaaaucaaugggaagcugaauagauugaucgggaaaaccaacgagaaauuccaucagauugaaaaagaauucucagaagucgaagggagaauucaggaccuugagaaauauguugaggacacuaaaauagaucucuggucauacaacgcggagcuucuuguugcccuggagaaccaacacacaauugaucuaacugacucagaaaugaacaaacuguuugaaaaaacaaagaagcaacugagggaaaaugcugaggauaugggcaaugguuguuucaaaauauaccacaaaugugacaaugccugcauaggaucaaucagaaauggaacuuaugaccacgauguguacagagaugaagcauuaaacaaccgauuccagaucaagggaguugagcugaagucaggguacaaagauuggauccuauggauuuccuuugccauaucauguuuuuugcuuuguguugcuuuguugggguucaucaugugggccugccaaaaaggcaacauuaggugcaacauuugcauuuga

SEQ ID NO: 42936 - RNA, 1701 nt, Artificial Sequence; identical to SEQ ID NO: 42703
  derived and/or modified CDS sequence (wt) from hemagglutinin__InfluenzaA__AHC62446

SEQ ID NO: 42937 - RNA, 1701 nt, Artificial Sequence; identical to SEQ ID NO: 42608
  derived and/or modified CDS sequence (wt) from hemagglutinin__InfluenzaA__AHC62458

SEQ ID NO: 42938 - RNA, 1701 nt, Artificial Sequence
  derived and/or modified CDS sequence (wt) from hemagglutinin__InfluenzaA__AHC62470
augaagacuaucauugcuuugagcuacauucuaugucugguuuucgcucaaaaacuuccuggaaaugacaacagcacggcaacgcugugccuugggcaccaugcaguaccaaacggaacgauagugaaaacaaucacgaaugaccaaauugaaguuacuaaugcuacugagcugguucagaauuccucaacaggugaaauaugcgacaguccucaucagauccuugauggagaaaacugcacacuaauagaugcucuauugggagacccucagugugauggcuuccaaaauaagaaaugggaccuuuuuguugaacgaagcaaagccuacagcaacuguuacccuuaugaugugccggauuaugccucccuuaggucacuaguugccucauccggcacacuggaguuuaacaaugaaagcuucaauuggacuggagucacucaaaacggaacaagcucugcuugcauaaggagaucuaauaauaguuucuuuaguagauugaauugguugacccacuuaaacuucaaauacccagcauugaacgugacuaugccaaacaaugaacaauuugacaaauuguacauuugggggguucaccacccggguacggacaaggaccaaaucuuccuguaugcucaagcaucaggaagaaucacaguaucuaccaaaagaagccaacaagcuguaaucccgaauaucggaucuagacccagaguaaggaauaucccuagcagaauaagcaucuauuggacaauaguaaaaccgggagacauacuuuugauuaacagcacagggaaucuaauugcuccuagggguuacuucaaaauacgaagugggaaaagcucaauaaugagaucagaugcacccauuggcaaaugcaauucugaaugcaucacuccaaauggaagcauucccaauggcaaaccauuccaaaauguaaacaggaucacauacggggccugucccagauauguuaagcaaaacacucugaaauuggcaacaggaaugcgaaauguaccagagaaacaaacuagaggcauauuuggcgcaauagcggguuucauagaaaaugguugggagggaaugguggaugguugguacgguuucaggcaucaaaauucugagggaagaggacaagcagcagaucucaaaagcacucaagcagcaaucgaucaaaucaaugggaagcugaauagauugaucggaaaaaccaacgagaaauuccaucagauugaaaaagaauucucagaagucgaagggagaauucaggaccuugagaaauauguugaggacacuaaaauagaucucuggucauacaacgcggagcuucuuguugcccuggagaaccaacauacaauugaucuaacugacucagaaaugaacaaacuguuugaaaaaacaaagaagcaacugagggaaaaugcugaggauaugggcaaugguuguuucaaaauauaccacaaaugugacaaugccugcauaggaucaaucagaaauggaacuuaugaccacgauguauacagagaugaagcauuaaacaaccgguuccagaucaagggaguugagcugaagucaggguacaaagauuggauccuauggauuuccuuugccauaucauguuuuuugcuuuguguugcuuuguugggguucaucaugugggccugccaaaaaggcaacauuaggugcaacauuugcauuuga

SEQ ID NO: 42939 - RNA, 1701 nt, Artificial Sequence
  derived and/or modified CDS sequence (wt) from hemagglutinin__InfluenzaA__AHC62482
augaagacuaucauugcuuugagcuacauucuaugucugguuuucgcucaaaaacuuccuggaaaugacaauagcacggcaacgcugugccuugggcaccaugcaguaccaaacggaacgauagugaaaacaaucacgaaugaccgaauugaaguuacuaaugcuacugagcugguucagaauuccucaauaggugaaauaugcgacaguccucaucagauccuugauggagaaaacugcacacuaauagaugcucuauugggagacccucagugugauggcuuccaaaauaagaaaugggaccuuuuuguugaacgaagcaaagccuacagcaacuguuacccuuaugaugugccggauuaugccucccuuaggucacuaguugccucauccggcacacuggaguuuaacaaugaaagcuucaauuggacuggagucacucaaaacggaacaaguucugcuugcauaaggagaucuaauaauaguuucuuuaguagauuaaauugguugacccacuuaaacuucaaauacccagcauugaacgugacuaugccaaacaaugaacaauuugacaaauuguacauuugggggguucaccacccggguacggaaaaggaccaaaucuuccuguaugcucaaucaucaggaagaaucacaguaucuaccaaaagaagccaacaagcuguaaucccgaauaucggaucuagacccagaauaaggaauaucccuagcagaauaagcaucuauuggacaauaguaaaaccgggagacauacuuuugauuaacagcacagggaaucuaauugcuccuagggguuacuucaaaauacgaagugggaaaagcucaauaaugagaucagaugcacccauuggcaaaugcaagucugaaugcaucacuccaaauggaagcauucccaaugacaaaccauuccaaaauguaaacaggaucacauacggggccugccccagauauguuaagcaaagcacucugaaauuggcaacaggaaugcgaaauguaccagagaaacaaacuagaggcauauuuggcgcaauagcggguuucauagaaaaugguugggagggaaugguggaugguugguacgguuucaggcaucaaaauucugagggaagaggacaagcagcagaucucaaaagcacucaagcugcaaucgaucaaaucaaugggaagcugaaucgauugaucgggaaaaccaacgagaaauuccaucagauugaaaaagaauucucagaaguagaagggagaauucaggaccuugagaaauauguugaggacacuaaaauagaucucuggucauacaacgcggagcuucuuguugcccuggagaaccaacauacaauugaucuaacugacucagaaaugaacaaacuguuugaaaaaacaaagaagcaacugagggaaaaugcugaggauaugggcaaugguuguuucaaaauauaccacaaaugugacaaugccugcauaggaucaaucagaaauggaacuuaugaccacgauguauacagagaugaagcauuaaacaaccgguuccagaucaagggaguugagcugaagucaggguacaaagauuggauccuauggauuuccuuugccauaucauguuuuuugcuuuguguugcuuuguugggguucaucaugugggccugccaaaagggcaacauuaggugcaacauuugcauuuga

SEQ ID NO: 42940 - RNA, 1701 nt, Artificial Sequence
  derived and/or modified CDS sequence (wt) from hemagglutinin__InfluenzaA__AHC62506
augaagacuaucauugcuuugagcuacauucuaugucugguuuucgcucaaaaacuuccuggaaaugacaacagcacggcaacgcugugccuugggcaccaugcagugccaaacggaacgauagugaaaacaaucacgaaugaccaaauugaaguuacuaaugcuacugagcugguucagaguuccucaacaggugaaauaugcaacaguccucaucagauccuugauggagaaaacugcacacuaauagaugcucuauugggagacccucagugugauggcuuccaaaacaagaaaugggaccuuuuuguugaacgaagcaaagcccacagcaacuguuacccuuaugaugugccggauuaugccucccuuagaucacuaguugccucauccggcacacuggaguuuaacaaugaaagcuucaauuggacuggagucacucaaaacggaacaagcucugcuugcauaaggagaucuaauaauaguuucuuuaguagauugaauugguuaacccacuuaaacuucaaauacccagcauugaacgugacuaugccaaacaaugaacaauuugacaaauuguacauuugggggguucaccacccggguacggacaaggaccaaaucuuccuguaugcucaagcagcaggaagaaucacaguaucuaccaaaagaagccaacaagcuguaauuccgaauaucggaucuagacccagaguaaggaauaucccuagcagaguaagcaucuauuggacaauaguaaaaccgggagacauacuuuugauuaacagcacagggaaucuaauugcuccuagggguuacuucaaaauacgaagugggaaaagcucaauaaugagaucagaugcacccauuggcaaaugcaauucugcaugcaucacuccaaauggaagcauucccaaugacaaaccauuccaaaauguaaacaggaucacauacggggccugucccagauauguuaagcaaaacacucugaaauuggcaacaggaaugagaaauguaccagagaaacaaacuagaggcauauuuggcgcaauagcugguuucauagaaaaugguugggagggaaugguggaugguugguacgguuucaggcaucaaaauucugagggaaggggacaagcagcagaucucaaaagcacucaagcagcaaucgaucaaaucaaugggaagcugaauagauugaucgggaaaaccaacgagaaauuccaucagauugaaaaagaauucucagaagucgaagggagaauucaggaccuugagaaauauguugaggacacuaaaauagaucucuggucauacaacgcggagcuucuuguugcccuggagaaccaacacacaauugaucuaacugacucagaaaugaacaaacuguuugaaaaaacaaagaagcaacugagggaaaaugcugaggauaugggcaaugguuguuucaaaauauaccacaaaugugacaaugccugcauaggaucaaucagaaauggaacuuaugaccacgauguguacagagaugaagcauuaaacaaccgauuccagaucaagggaguugagcugaagucaggguacaaagauuggauccuauggauuuccuuugccauaucauguuuuuugcuuuguguugcuuuguugggguucaucaugugggccugccaaaaaggcaacauuaggugcaacauuugcauuuga

SEQ ID NO: 42941 - RNA, 1701 nt, Artificial Sequence; identical to SEQ ID NO: 42608
  derived and/or modified CDS sequence (wt) from hemagglutinin__InfluenzaA__AHC62518

SEQ ID NO: 42942 - RNA, 1701 nt, Artificial Sequence
  derived and/or modified CDS sequence (wt) from hemagglutinin__InfluenzaA__AHC62530
augaagacuaucauugcuuugagcuacauucuaugucugguuuucgcucaaaaaauuccuggaaaugacaacagcacggcaacgcugugccuugggcaccaugcagugccaaacggaacgauagugaaaacaaucacgaaugaccaaauugaaguuaccaaugcuacugagcugguucagaguuccucaacaggugaaauaugcaacaguccucaucagauccuugauggagaaaacugcacacuaauagaugcucuauugggagacccucagugugauggcuuccaaaacaagaaaugggaccuuuuuguugaacgaagcaaagcccacagcaacuguuacccuuaugaugugccggauuaugccucccuuaggucacuaguugccucauccggcacacuggaguuuaacaaugaaagcuucaauuggacuggagucacucaaaacggaacaagcucugcuugcauaaggagaucuaauaauaguuucuuuaguagauugaauugguugacccacuuaaacuucaaauacccagcauugaacgugacuaugccaaacaaugaacaauuugacaaauuguacauuugggggguucaccacccggguacggacaaggaccaaaucuuccuguaugcucaagcaucaggaagaaucacaguaucuaccaaaagaagccaacaagcuguaauuccgaauaucggaucuagacccagaguaaggaauaucccuagcagaguaagcaucuauuggacaauaguaaaaccgggagacauacuuuugauuaacagcacagggaaucuaauugcuccuagggguuacuucaaaauacgaagugggaaaagcucaauaaugagaucagaugcacccauuggcaaaugcaauucugcaugcaucacuccaaauggaagcauucccaaugacaaaccauuccaaaauguaaacaggaucacauacggggccugucccagauauguuaagcaaaacacucugaaauuggcaacaggaaugagaaauguaccagagaaacaaacuagaggcauauuuggcgcaauagcggguuucauagaaaauggcugggagggaaugguggaugguugguacgguuucaggcaucaaaauucugagggaaggggacaagcagcagaucucaaaagcacucaagcagcaaucgaucaaaucaaugggaagcugaauagauugaucgggaaaaccaacgagaaauuccaucagauugaaaaagaauucucagaagucgaagggagaauucaggaccuugagaaauauguugaggacacuaaaauagaucucuggucauacaacgcggagcuucuuguugcccuggagaaccaacacacaauugaucuaacugacucagaaaugaacaaacuguuugaaaaaacaaagaagcaacugagggaaaaugcugaggauaugggcaaugguuguuucaaaauauaucacaaaugugacaaugccugcauaggaucaaucagaaauggaacuuaugaccacgauguguacagagaugaagcauuaaacaaccgauuccagaucaagggaguugagcugaagucaggguacaaagauuggauccuauggauuuccuuugccauaucauguuuuuugcuuuguguugcuuuguugggguucaucaugugggccugccaaaaaggcaacauuaggugcaacauuugcauuuga

SEQ ID NO: 42943 - RNA, 1701 nt, Artificial Sequence; identical to SEQ ID NO: 42663
  derived and/or modified CDS sequence (wt) from hemagglutinin__InfluenzaA__AHC62542

SEQ ID NO: 42944 - RNA, 1701 nt, Artificial Sequence; identical to SEQ ID NO: 42703
  derived and/or modified CDS sequence (wt) from hemagglutinin__InfluenzaA__AHC62554

SEQ ID NO: 42945 - RNA, 1701 nt, Artificial Sequence
  derived and/or modified CDS sequence (wt) from hemagglutinin__InfluenzaA__AHC62566
augaagacuaucauugcuuugagcuacauucuaugucugguuuucgcucaaaaacuuccuggaaaugacaacagcacggcaacgcugugccuugggcaccaugcaguaccaaacggaacgauggugaaaacaaucacgaaugaccaaauugaaguuacuaaugcuacugagcugguucagaauuccucaacaggugaaauaugcgacaguccucaucagauccuugauggagaaaacugcacacuaauagaugcucuauugggagacccucagugugauggcuuccaaaauaagaaaugggaccuuuuuguugaacgaagcaaagccuacagcaacuguuacccuuaugaugugccggauuaugccucccuuaggucacuaguugccucauccggcacacuggaguuuaacaaugaaagcuucaauuggacuggagucacucaaaacggaacaagcucugcuugcauaaggagaucuaauaauaguuucuuuaguagauugaauugguugacccacuuaaacuucaaauacccagcauugaacgugacuaugccaaacaaugaacaauuugacaaauuguacauuugggggguucaccacccggguacggacaaggaccaaaucuuccuguaugcucaagcaucaggaagaaucacaguaucuaccaaaagaagccaacaagcuguaaucccgaauaucggaucuagacccagaguaaggaauaucccuagcagaauaagcaucuauuggacaauaguaaaaccgggagacauacuuuugauuaacagcacagggaaucuaauugcuccuagggguuacuucaaaauacgaagugggaaaagcucaauaaugagaucagaugcacccauuggcaaaugcaauucugaaugcaucacuccaaauggaagcauucccaaugacaaaccauuccaaaauguaaacaggaucacauacggggccugucccagauauguuaagcaaaacacucugaaauuggcaacaggaaugcgaaauguaccagagaaacaaacuagaggcauauuuggcgcaauagcggguuucauagaaaaugguugggagggaaugguggaugguugguacgguuucaggcaucaaaauucugagggaagaggacaagcagcagaucucaaaagcacucaagcagcaaucgaucaaaucaaugggaagcugaauagauugaucgggaaaaccaacgagaaauuccaucagauugaaaaagaauucucagaagucgaagggagaauucaggaccuugagaaauauguugaggacacuaaaauagaucucuggucauacaacgcggagcuucuuguugcccuggagaaccaacauacaauugaucuaacugacucagaaaugaacaaacuguuugaaaaaacaaagaagcaacugagggaaaaugcugaggauaugggcaaugguuguuucaaaauauaccacaaaugugacaaugccugcauaggaucaaucagaaauggaacuuaugaccacgauguauacagagaugaagcauuaaacaaccgguuccagaucaagggaguugagcugaagucaggauacaaagauuggauccuauggauuuccuuugccauaucauguuuuuugcuuuguguugcuuuguugggguucaucaugugggccugccaaaaaggcaacauuaggugcaacauuugcauuuga

SEQ ID NO: 42946 - RNA, 1701 nt, Artificial Sequence; identical to SEQ ID NO: 42703
  derived and/or modified CDS sequence (wt) from hemagglutinin__InfluenzaA__AHC62578

SEQ ID NO: 42947 - RNA, 1701 nt, Artificial Sequence
  derived and/or modified CDS sequence (wt) from hemagglutinin__InfluenzaA__AHC62590
augaagacuaucauugcuuugagcuacauucuaugucugguuuucgcucaaaaacuuccuggaaaugacaacagcacggcaacgcugugccuugggcaccaugcagugccaaacggaacgauagugaaaacaaucacgaaugaccaaauugaaguuacuaaugcuacugagcugguucagaguuccucaacaggugaaauaugcaacaguccucaucagauccuugauggagaaaacugcacacuaauagaugcucuauugggagacccucagugugauggcuuccaaaacaagaaaugggaccuuuuuguugaacgaagcaaagcccacagcaacuguuacccuuaugaugugccggauuaugccucccuuaggucacuaguugccucauccggcacacuggaguuuaacaaugaaagcuucaauuggacuggagucacucaaaacggaacaagcucugcuugcauaaggagaucuaauaauaguuucuuuaguagauugaauugguugacccacuuaaacuucaaauacccagcauugaacgugacuaugccaaacaaugaacaauuugacaaauuguacauuugggggguucaccacccggguacggacaaggaccaaaucuuccuguaugcucaagcagcaggaagaaucacaguaucuaccaaaagaagccaacaagcuguaauuccgaauaucggaucuagacccagaguaaggaauaucccuagcagaguaagcaucuauuggacaauaguaaaaccgggagacauacuuuugauuaacagcacagggaaucuaauugcuccuagggguuacuucaaaauacgaagugggaaaagcucaauaaugagaucagaugcacccauuggcaaaugcaauucugcaugcaucacuccaaauggaagcauucccaaugacaaaccauuccaaaauguaaacaggaucacauacggggccugucccagauauguuaagcaaaacacucugaaauuggcaacaggaaugagaaauguaccagagaaacaaacuagaggcauauuuggugcaauagcugguuucauagaaaaugguugggagggaaugguggaugguugguacgguuucaggcaucaaaauucugagggaaggggacaagcagcagaucucaaaagcacucaagcagcaaucgaucaaaucaaugggaagcugaauagauugaucgggaaaaccaacgagaaauuccaucagauugaaaaagaauucucagaagucgaagggagaauucaggaccuugagaaauauguugaggacacuaaaauagaucucuggucauacaacgcggagcuucuuguugcccuggagaaccaacacacaauugaucuaacugacucagaaaugaacaaacuguuugaaaaaacaaagaagcaacugagggaaaaugcugaggauaugggcaaugguuguuucaaaauauaccacaaaugugacaaugccugcauaggaucaaucagaaauggaacuuaugaccacgauguguacagagaugaagcauuaaacaaccgauuccagaucaagggaguugagcugaagucaggguacaaagauuggauccuauggauuuccuuugccauaucauguuuuuugcuuuguguugcuuuguugggguucaucaugugggccugccaaaaaggcaacauuaggugcaacauuugcauuuga

SEQ ID NO: 42948 - RNA, 1701 nt, Artificial Sequence; identical to SEQ ID NO: 42723
  derived and/or modified CDS sequence (wt) from hemagglutinin__InfluenzaA__AHC62602

SEQ ID NO: 42949 - RNA, 1701 nt, Artificial Sequence
  derived and/or modified CDS sequence (wt) from hemagglutinin__InfluenzaA__AHC62614
augaagacuaucauugcuuugagcuacauucuaugucugguuuucgcucaaaaacuuccugggaaugacaacagcacggcaacgcugugccuugggcaccaugcagugccaaacggaacgauagugaaaacaaucacgaaugaccaaauugaaguuacuaaugcuacugaacugguucagaguuccucaacaggugaaauaugcaacaguccucaucagaucauugauggagaaaacugcacacuaauagaugcucuauugggagacccucagugugauggcuuccaaaacaagaaaugggaccuuuuuguugaacgaagcaaagcccacagcaacuguuacccuuaugaugugccggauuaugccucccuuaggucacuaguugccucauccggcacacuggaguuuaacaaugaaagcuucaauuggacuggagucacucaaaacggaacaagcucugcuugcauaaggggaucuaauaauaguuucuuuaguagauugaauugguugacccacuuaaacuucaaauacccagcauugaacgugacuaugccaaacaaugaacaauuugacaaauuguacauuugggggguucaccacccagguacagacaaggaccaaaucuuccuguaugcucaagcaucaggaagaaucacaguaucuacuaaaagaagccaacaagcuguaauuccgaauaucggaucuagacccagaguaaggaauaucccuagcagaguaagcaucuauuggacaauaguaaaaccgggagacauacuuuugauuaacagcacagggaaucuaauugcuccuagggguuacuucaaaauacgaagugggaaaagcucaauaaugagaucagaugcacccaucggcaaaugcaauucugcaugcaucacuccaaauggaagcauucccaaugacaaaccauuccaaaauguaaacaggaucacauacggggccugucccagauauguuaagcaaaacacucugaaauuggcaacaggaaugagaaauguaccagagaaacaaacuagaggcauauuuggcgcaauagcggguuucauagaaaaugguugggagggaaugguggaugguugguacgguuucaggcaucaaaauucugagggaaggggacaagcagcagaucucaaaagcacucaagcagcaaucgaucaaaucaaugggaagcugaauagauugaucgggaaaaccaacgagaaauuccaucagauugaaaaagaauucucagaagucgaagggagaauucaggaccuugagaaauauguugaggacacuaaaauagaucucuggucauacaacgcggagcuucuuguugcccuggagaaccaacacacaauugaucuaacugacucagaaaugaacaaacuguuugaaaaaacaaagaagcaacugagggaaaaugcugaggauaugggcaaugguuguuucaaaauauaccacaaaugugacaaugccugcauaggaucaaucagaaauggaacuuaugaccacgauguguacagagaugaagcauuaaacaaccgauuccagaucaagggaguugagcugaagucaggguacaaagauuggauccuauggauuuccuuugccauaucauguuuuuugcuuuguguugcuuuguugggguucaucaugugggccugccaaaaaggcaacauuaggugcaacauuugcauuuga

SEQ ID NO: 42950 - RNA, 1701 nt, Artificial Sequence
  derived and/or modified CDS sequence (wt) from hemagglutinin__InfluenzaA__AHC62626
augaagacuaucauugcuuugagcuacauucuaugucugguuuucgcucaaaaacuuccugggaaugacaacagcacggcaacgcugugccuugggcaccaugcagugccaaacggaacgauagugaaaacaaucacgaaugaccaaauugaaguuacuaaugcuacugaacugguucagaguuccucaacaggugaaauaugcaacaguccucaucagauccuugauggagaaaacugcacacuaauagaugcucuauugggagacccucagugugauggcuuccaaaacaagaaaugggaccuuuuuguugaacgaagcaaagcccacagcaacuguuacccuuaugaugugccggauuaugccucccuuaggucacuaguugccucauccggcacacuggaguuuaacaaugaaagcuucaauuggacuggagucacucaaaacggaacaagcucugcuugcauaaggggaucuaauaauaguuucuuuaguagauugaauugguugacccacuuaaacuucaaauacccagcauugaacgugacuaugccaaacaaugaacaauuugacaaauuguacauuugggggguucaccacccggguacggacaaggaccaaaucuuccuguaugcucaagcaucaggaagaaucacaguaucuaccaaaagaagccaacaagcuguaauuccgaauaucggaucuagacccagaguaaggaauaucccuagcagaguaagcaucuauuggacaauaguaaaaccgggagacauacuuuugauuaacagcacagggaaucuaauugcuccuagggguuacuucaaaauacgaagugggaaaagcucaauaaugagaucagaugcacccauuggcaaaugcaauucugcaugcaucacuccaaauggaagcauucccaaugacaaaccauuccaaaauguaaacaggaucacauacggggccugucccagauauguuaagcaaaacacucugaaauuggcaacaggaaugagaaauguaccagagaaacaaacuagaggcauauuuggcgcaauagcggguuucauagaaaaugguugggaaggaaugguggaugguugguacgguuucaggcaucaaaauucugagggaaggggacaagcagcagaucucaaaagcacucaagcagcaaucgaucaaaucaaugggaagcugaauagauugaucgggaaaaccaacgagaaauuccaucagauugaaaaagaauucucagaagucgaagggagaauucaggaccuugagaaauauguugaggacacuaaaauagaucucuggucauacaacgcggagcuucuuguugcccuggagaaccaacacacaauugaucuaacugacucagaaaugaacaaacuguuugaaaaaacaaagaagcaacugagggaaaaugcugaggauaugggcaaugguuguuucaaaauauaccacaaaugugacaaugccugcauaggaucaaucagaaauggaacuuaugaccacgauguguacagagaugaagcauuaaacaaccgauuccagaucaagggaguugagcugaagucaggguacaaagauuggauccuauggauuuccuuugccauaucauguuuuuugcuuuguguugcuuuguugggguucaucaugugggccugccaaaaaggcaacauuaggugcaacauuugcauuuga

SEQ ID NO: 42951 - RNA, 1701 nt, Artificial Sequence; identical to SEQ ID NO: 42627
  derived and/or modified CDS sequence (wt) from hemagglutinin__InfluenzaA__AHC62638

SEQ ID NO: 42952 - RNA, 1701 nt, Artificial Sequence
  derived and/or modified CDS sequence (wt) from hemagglutinin__InfluenzaA__AHC62650
augaagacuaucauugcuuugagcuacauucuaugucugguuuucgcucaaaaacuuccuggaaaugacaacagcacggcaacgcugugccuugggcaccaugcagugccaaacggaacgauagugaaaacaaucacgaaugaucaaauugaaguuacuaaugcuacugagcugguucagaguuccucaacaggugaaauaugcaacaguccucaucagauccuugauggagaaaacugcacacuaauagaugcucuauugggagacccucagugugauggcuuccaaaacaaggaaugggaccuuuuuguugaacgaagcaaagcccacagcaacuguuacccuuaugaugugccggauuaugccucccuuaggucacuaguugccucauccggcacacuggaguuuaacaaugaaagcuucaauuggacuggagucacucaaaacggaacaagcucugcuugcauaaggagaucuaauaauaguuucuuuaguagauugaauugguugacccacuuaaacuucaaauacccagcauugaacgugacuaugccaaacaaugaacaauuugacaaauuguacauuugggggguucaccacccggguacggacaaggaccaaaucuuccuguaugcucaagcaucaggaagaaucacaguaucuaccaaaagaagccaacaagcuguaauuccgaauaucggaucuagacccagaguaaggaauaucccuagcagaguaagcaucuauuggacaauaguaaaaccgggagacauacuuuugauuaacagcacagggaaucuaauugcuccuagggguuacuucaaaauacgaagugggaaaagcucaauaaugagaucagaugcacccauuggcaaaugcaauucugcaugcaucacuccaaauggaagcauucccaaugacaaaccauuccaaaauguaaacaggaucacauacggggccugucccagauauguuaagcaaaacacucugaaauuggcaacaggaaugagaaauguaccagagaaacaaacuagaggcauauuuggcgcaauagcggguuucauagaaaaugguugggagggaaugguggaugguugguacgguuucaggcaucaaaauucugagggaaggggacaagcagcagaucucaaaagcacucaagcagcaaucgaucaaaucaaugggaagcugaauagauugaucgggaaaaccaacgagaaauuccaucagauugaaaaagaauucucagaagucgaagggagaauucaggaccuugagaaauauguugaggacacuaaaauagaucucuggucauacaacgcggagcuucuuguugcccuggagaaccaacacacaauugaucuaacugacucagaaaugaacaaacuguuugaaaaaacaaagaagcaacugagggaaaaugcugaggauaugggcaaugguuguuucaaaauauaccacaaaugugacaaugccugcauaggaucaaucagaaauggaacuuaugaccacgauguguacagagaugaagcauuaaacaaccgauuccagaucaagggaguugagcugaagucaggguacaaagauuggauccuauggauuuccuuugccauaucaugcuuuuugcuuuguguugcuuuguugggguucaucaugugggccugccaaaaaggcaacauuaggugcaacauuugcauuuga

SEQ ID NO: 42953 - RNA, 1701 nt, Artificial Sequence
  derived and/or modified CDS sequence (wt) from hemagglutinin__InfluenzaA__AHC62662
augaagacuaucauugcuuugagcuacauucuaugucugguuuucgcucaaaaacuuccugggaaugacaacagcacggcaacgcugugccuugggcaccaugcagugccaaacggaacgauagugaaaacaaucacgaaugaccaaauugaaguuacuaaugcuacugaacugguucagaguuccucaacaggugaaauaugcaacaguccucaucagauccuugauggagaaaacugcacacuaauagaugcucuauugggagacccucagugugauggcuuccaaaacaagaaaugggaccuuuuuguugaacgaagcaaagcccacagcagcuguuacccuuaugaugugccggauuaugccucccuuaggucacuaguugccucauccggcacacuggaguuuaacaaugaaagcuucaauuggacuggagucacucaaaacggaacaagcucugcuugcauaaggggaucuaauaauaguuucuuuaguagauugaauugguugacccacuuaaacuucaaauacccagcacugaacgugacuaugccaaacaaugaacaauuugacaaauuguacauuugggggguucaccacccggguacggacaaggaccaaaucuuccuguaugcucaagcaucaggaagaaucacaguaucuaccaaaagaagccaacaagcuguaauuccgaauaucggaucuagacccagaguaaggaauaucccuagcagaguaagcaucuauuggacaauaguaaaaccgggagacauacuuuugauuaacagcacagggaaucuaauugcuccuagggguuacuucaaaauacgaagugggaaaagcucaauaaugagaucagaugcacccauuggcaaaugcaauucugcaugcaucaccccaaauggaagcauucccaaugacaaaccauuccaaaauguaaacaggaucacauacggggccugucccagauaugucaagcaaaacacucugaaauuggcaacaggaaugagaaauguaccagagaaacaaacuagaggcauauuuggcgcaauagcggguuucauagaaaaugguugggagggaaugguggaugguugguacgguuucaggcaucaaaauucugagggaaggggacaagcagcagaucucaaaagcacucaagcagcaaucgaucaaaucaaugggaagcugaauagauugaucgggaaaaccaacgagaaauuccaucagauugaaaaagaauucucagaagucgaaggaagaauucaggaccuugagaaauauguugaggacacuaaaauagaucucuggucauacaacgcggagcuucuuguugcccuggagaaccaacacacaauugaucuaacugacucagaaaugaacaaacuguuugaaaaaacaaagaagcaacugagggaaaaugcugaggauaugggcaaugguuguuucaaaauauaccacaaaugugacaaugccugcauaggaucaaucagaaauggaacuuaugaccacgauguguacagagaugaagcauuaaacaaccgauuccagaucaagggaguugagcugaagucaggguacaaagauuggauccuauggauuuccuuugccauaucauguuuuuugcuuuguguugcuuuguugggguucaucaugugggccugccaaaaaggcaacauuaggugcaacauuugcauuuga

SEQ ID NO: 42954 - RNA, 1701 nt, Artificial Sequence
  derived and/or modified CDS sequence (wt) from hemagglutinin__InfluenzaA__AHC62674
augaagacuaucauugcuuugagcuacauucuaugucugguuuucgcucaaaaacuuccugggaaugacaacagcacggcaacgcugugccuugggcaccaugcagugccaaacggaacgauagugaaaacaaucacgaaugaccaaauugaaguuacuaaugcuacugaacugguucagaguuccucaacaggugaaauaugcaacaguccucaucagauccuugauggagaaaacugcacacuaauagaugcucuauugggagacccucagugugauggcuuccaaaacaagaaaugggaccuuuuuguugaacgaagcaaagcccacagcaacuguuacccuuaugaugugccggauuaugcuucccuuaggucacuaauugccucauccggcacacuggaguuuaacaaugaaagcuucaauuggacuggagucacucaaaacggaacaagcucugcuugcauaaggggaucuaauaauaguuucuuuaguagauugaauugguugacccacuuaaacuucaaauacccagcauugaacgugacuaugccaaacaaugaacaauuugacaaauuguacauuugggggguucaccacccggguacggacaaggaccaaaucuuccuguaugcucaagcaucaggaagaaucacaguaucuaccaaaagaagccaacaagcuguaauuccgaauaucggaucuagacccagaguaaggaauaucccuagcagaguaagcaucuauuggacaauaguaaaaccgggagacauacuuuugauuaacagcacagggaaucuaauugcuccuagggguuacuucaaaauacgaagugggaaaagcucaauaaugagaucagaugcacccauuggcaaaugcaauucugcaugcaucaccccaaauggaagcauucccaaugacaaaccauuccaaaauguaaacaggaucacauacggggccugucccagauauguuaagcaaaacacucugaaauuggcaacaggaaugagaaauguaccagagaaacaaacuagaggcauauuuggcgcaauagcggguuucauagaaaaugguugggagggaaugguggaugguugguacgguuucaggcaucaaaauucugagggaagaggacaagcagcagaucucaaaagcacucaagcagcaaucgaucaaaucaaugggaagcugaauagauugaucgggaaaaccaacgagaaauuccaucagauugaaaaagaauucucagaagucgaagggagaauucaggaccuugagaaauauguugaggacacuaaaauagaucucuggucauacaacgcggagcuucuuguugcccuggagaaccaacacacaauugaucuaacugacucagaaaugaacaaacuguuugaaaaaacaaagaagcaacugagggaaaaugcugaggauaugggcaaugguuguuucaaaauauaccacaaaugugacaauaccugcauagaaucaaucagaaauggaacuuaugaccacgauguguacagagaugaagcauuaaacaaccgauuccagaucaagggaguugagcugaagucaggguacaaagauuggauccuauggauuuccuuugccauaucauguuuuuugcuuuguguugcuuuguugggguucaucaugugggccugccaaaaaggcaacauuaggugcaacauuugcauuuga

SEQ ID NO: 42955 - RNA, 1701 nt, Artificial Sequence
  derived and/or modified CDS sequence (wt) from hemagglutinin__InfluenzaA__AHE37972
augaaggcaauacuaguaguuaugcuauauacauuugcaaccgcaaaugcagacacauuauguauagguuaucaugcgaacaauucaacagacacuguagacacaguacuagaaaagaauguaacaguaacacacucuguuaaucuucuagaagacaagcauaacgggaaacuaugcaaacuaagagggguagccccauugcauuuggguaaauguaacauugcuggcuggauccugggaaauccagagugugaaucacucuccacagcaagcucaugguccuacauuguggaaacaucugguucagacaauggaacguguuacccaggagauuucaucgauuaugaggagcuaagagagcaguugagcucagugucaucauuugaaagguuugagauauuccccaaaacaaguucauggccaaaucaugacucgaacaaagguguaacggcagcauguccucaugcuggagcaaaaggcuucuacaaaaauuuaauauggcuaguuaaaaaaggaaauucauacccaaagcucagcauauccuacauuaaugacaaagggaaagaaguccucgugcuauggggcauucaccauccaucuacuacugcugaccaacaaagucucuaucagaaugcagauacauauguuuuuguggggacaucaagauacagcaagaaguucaagccggaaauagcaauaagacccaaagugagggaucaagaagggagaaugaacuauuacuggacacuaguagagccgggagacaaaauaacauucgaagcaacuggaaaucuagugguaccgagauaugcauuugcaauggaaagaaaugcuggaucugguauuaucauuucagauacaccaguucacgauugcaauacaacuugucagacacccaagggugcuauaaacaccagccucccauuucagaauauacauccgaucacaauuggaaaauguccaaaauauguaaaaagcacaaaauugagacuggccacaggauugaggaaugucccgucuauucaaucuagaggccuauuuggggccauugcuggcuucauugaagggggguggacaggaaugguagauggaugguacgguuaucaccaucaaaaugagcaggggucaggauaugcagccgaccugaagagcacacagaaugccauugacaagauuacuaacaaaguaaauucuguuauugaaaagaugaauacacaguucacagcaguagguaaagaguucaaccaccuggaaaaaagaauagagaauuuaaauaaaaaaguugaugaugguuuccuggacauuuggacuuacaaugccgaacuguugguucuauuggaaaaugaaagaacuuuggacuaccacgauucaaaugugaagaacuuauaugaaaagguaagaaaccaguuaaaaaacaaugccaaggaaauuggaaauggcugcuuugaauuuuaccacaaaugcgauaacacgugcauggaaagugucaaaaaugggacuuaugauuacccaaaauacucagaggaagcaaaauuaaacagagaagaaauagaugggguaaagcuggaaucaacaaggauuuaccagauuuuggcgaucuauucaacugccgcuaguucauugguacugguagucucucugggggcaaucaguuuuuggaugugcucuaaugggucucuacaguguagaauauguauuuaa

SEQ ID NO: 42956 - RNA, 1701 nt, Artificial Sequence
  derived and/or modified CDS sequence (wt) from hemagglutinin__InfluenzaA__AHE37973
augaaggcaauacuaguaguucugcuauacacauuugcaaccgcaaaugcagacacauuauguauagguuaucaugcgaacaauucaacagacacuguagacacaguacuagaaaagaauguaacaguaacacacucuguuaaccuucuagaagacaaacauaacgggaaacuaugcaaacuaagagggguagccccauugcauuuggguaaauguaacauugcuggcuggauccugggaaauccagagugugaaucacucuccacagcaaguucaugguccuacauuguggaaacaucuaguucagacaauggaacguguuacccaggagauuucaucaauuaugaggagcuaagagagcaauugagcucagugucaucauuugaaagguuugagauauuccccaagacaaguucauggcccaaucaugacucgaacaaagguguaacggcagcauguccucaugcuggaacaaaaagcuucuacaaaaauuuaauauggcuaguuaaaaaaggaaauucauacccaaagcucagcaaauccuacauuaaugauaaagggaaagaaguccucgugcuguggggcauucaccauccaucuacuacugcugaccaacaaagucucuaucagaaugcagaugcauauguuuuuguggggacaucaagauacagcaagaaguucaagccggaaauagcaauaagacccaaagugagggaucaagaagggagaauaaacuauuacuggacacuaauagagccaggagacaaaauaacauucgaagcaacuggaaaucuagugguaccgagauaugcauucgcaauggaaagaaaugcuggaucugguauuaucauuucagauacaccaguccacgauugcaauacaacuugucagacacccgagggugcuauaaacaccagccucccauuucagaauauacauccgaucacaauuggaaaauguccaaaguauguaaaaagcacaaaauugagacuggccacaggauugaggaaugucccgucuauucaaucuagaggccuauucggggccauugccggcuucauugaagggggguggacagggaugguagauggaugguacgguuaucaccaucaaaaugagcaggggucaggauaugcagccgaccugaagagcacacaaaaugccauugacaagauuacuaacaaaguaaauucuguuauugaaaagaugaauacacaguucacagcaguggguaaagaguucaaccaccuggaaaaaagaauagagaauuuaaauaaaaaaguugaugaugguuuccuggacauuuggacuuacaaugccgaacuguugguucuauuggaaaaugaaagaacuuuggacuaccacgauucaaaugugaagaacuuguaugaaaagguaagaaaccaguuaaaaaacaaugccaaggaaauuggaaacggcugcuuugaauuuuaccacaaaugcgauaacacgugcauggaaagugucaaaaaugggacuuaugacuacccaaaauacucagaggaagcaaaauuaaacagagaaaaaauagaugggguaaagcuggaaucaacaaggauuuaccagauuuuggcgaucuauucaacugucgccaguucauugguacugguagucucccugggggcaaucaguuucuggaugugcucuaaugggucucuacaguguagaauauguauuuaa

SEQ ID NO: 42957 - RNA, 1701 nt, Artificial Sequence
  derived and/or modified CDS sequence (wt) from hemagglutinin__InfluenzaA__AHE37974
augaaggcaauacuaguaguucugcuauacacauuugcaaccgcaaaugcagacacauuauguauagguuaucaugcgaacaauucaacagacacuguagacacaguacuagaaaagaauguaacaguaacacacucuguuaaccuucuagaagacaagcauaacgggaaacuaugcaaacuaagagggguagccccauugcauuuggguaaauguaacauugcuggcuggauccugggaaauccagagugugaaucacucuccacagcaaguucaugguccuacauuguggaaacaucuaguucagacaauggaacguguuacccaggagauuucaucaauuaugaggagcuaagagagcaauugagcucagugucaucauuugaaagguuugagauguuccccaagacaaguucauggcccaaucaugacucgaacaaagguguaacggcagcauguccucaugcuggagcaaaaagcuucuacaaaaauuuaauauggcuaguuaaaaaaggaaauucauacccaaagcucagcaaauccuacauuaaugauaaagggaaagaaguccucgugcuguggggcauucaccauccaucuacuacugcugaccaacaaagucucuaucagaaugcagaugcauauguuuuuguggggacaucaaaauacagcaagaaguucaagccggaaauagcaauaagacccaaagugagggaucaagaagggagaaugaacuauuacuggacacuaauagagccgggagacaaaauaacauucgaagcaacuggaaaucuagugguaccgagauaugcauucgcaauggaaagaaaugcuggaucugguauuaucauuucagauacaccaguccacgauugcaauacaacuugucagacacccgagggugcuauaaacaccagccucccauuucagaauauacauccgaucacaauuggaaaauguccaaaguauguaaaaagcacaaaauugagacuggccacaggauugaggaaugucccgucuauucaaucuagaggccuauucggggccauugccggcuucauugaagggggguggacagggaugguagauggaugguacgguuaucaccaucaaaaugagcaggggucaggauaugcagccgaccugaagagcacacaaaaugccauugacaagauuacuaacaaaguaaauucuguuauugaaaagaugaauacacaguucacagcaguggguaaagaguucaaccaccuggaaaaaagaauagagaauuuaaauaaaaaaguugaugaugguuuccuggacauuuggacuuacaaugccgaacuguugguucuauuggaaaaugaaagaacuuuggacuaccacgauucaaaugugaagaacuuguaugaaaagguaagaaaccaguuaaaaaacaaugccaaggaaauuggaaacggcugcuuugaauuuuaccacaaaugcgauaacacgugcauggaaagugucaaaaaugggacuuaugacuacccaaaauacucagaggaagcaaaauuaaacagagaaaaaauagaugggguaaagcuggaaucaacaaggauuuaccagauuuuggcgaucuauucaacugucgccaguucauugguacugguagucucccugggggcaaucaguuucuggaugugcucuaaugggucucuacaguguagaauauguauuuaa

SEQ ID NO: 42958 - RNA, 1701 nt, Artificial Sequence
  derived and/or modified CDS sequence (wt) from hemagglutinin__InfluenzaA__AHE37975
augaaggcaauacuaguaguucugcuauauacauuugcaaccgcaaaugcagacacauuauguauagguuaucaugcgaacaauucaacagacacuguagacacagugcuagaaaagaauguaacaguaacacacucuguuaaccuucuagaagacaagcauaacgggaaacuaugcaaacuaagagggguagccccauugcauuuggguaaauguaacauugcuggcuggauccugggaaauccagagugugaaucacucuccacagcaaguucaugguccuacauuguggaaacaucuaguucagacaauggaacguguuacccaggagauuucaucaauuaugaggagcuaagagagcaauugagcucagugucaucauuugaaagguuugagauauuccccaagacaaguucauggcccaaucaugacucgaacaaagguguaacggcagcauguccucacgcuggagcaaaaagcuucuacaaaaauuuaauauggcuaguuaaaaaaggaaauucauacccaaagcucagccaauccuacauuaaugauaaagggaaagaaguccucgugcuguggggcauccaccauccaucuacuacugcugaccaacaaagucucuaucagaaugcagaugcauauguuuuuguggggacaucaagauacagcaaaaaguucaagccggaaauagcaauaagacccaaagugagggaucaagaagggagaaugaacuauuacuggacacuaguagagccgggagacaaaauaacauucgaagcaacuggaaaucuagugguaccgagauaugcauucacaauggaaagaaaugcuggaucugguauuaucauuucagauacaccaguccacgauugcaauacaacuugucagacacccgagggugcuauaaacaccagccucccauuucagaauauacauccgaucacaauuggaaaauguccaaaguauguaaaaagcacaaaauugagacuggccacaggauugaggaaugucccgucuauucaaucuagaggccuauucggggccauugccggcuucauugaagggggguggacagggaugguagauggaugguacgguuaucaccaucaaaaugagcaggggucaggauaugcagccgaccugaagagcacacaaaaugccauugacaagauuacuaacaaaguaaauucuguuauugaaaagaugaauacacaguucacagcaguggguaaagaguucaaccaccuggaaaaaagaauagagaauuuaaauaaaaaaguugaugaugguuuccuggacauuuggacuuacaaugccgaacuguugguucuauuggaaaaugaaagaacuuuggacuaccacgauucaaaugugaagaacuuguaugaaaagguaagaaaccaguuaaaaaacaaugccaaggaaauuggaaacggcugcuuugaauuuuaccacaaaugcgauaacacgugcauggaaagugucaaaaaugggacuuaugacuacccaaaauacucagaggaagcaaaauuaaacagagaaaaaauagaugggguaaagcuggaaucaacaaggauuuaccagauuuuggcgaucuauucaacugucgccaguucauugguacugguagucucccugggggcaaucagcuucuggaugugcucuaaugggucucuacaauguagaauauguauuuaa

SEQ ID NO: 42959 - RNA, 1701 nt, Artificial Sequence
  derived and/or modified CDS sequence (wt) from hemagglutinin__InfluenzaA__AHE37976
augaaggcaauacuaguaguucugcuauacacauuugcaaccgcaaaugcagacacauuauguauagguuaucaugcgaacaauucaacagacacuguagacacaguacuagaaaagaauguaacaguaacacacucuguuaaccuucuagaagacaagcauaacgggaaacuaugcaaacuaagagggguagccccauugcauuuggguaaauguaacauugcuggcuggauccugggaaauccagagugugaaucacucuccgcagcaaguucaugguccuacauuguggaaacaucuaguucaaacaauggaacguguuacccaggagauuucaucaauuaugaggagcuaagagagcaauugagcucagugucaucauuugaaagguuugagauauuccccaagacaaguucauggcccaaucaugacucgaacaaagguguaacggcagcauguccucaugcuggagcaaaaagcuucuacaaaaauuuaauauggcuaguuaaaaaaggaaauucauacccaaagcucagcaaauccuacauuaaugauaaagggaaagaaauccucgugcuguggggcauucaccauccaucuacuacuacugaccaacaaagucucuaucagaaugcggaugcauauguuuuuguggggacaucaagauacagcaagaaguucaagccggaaauagcaauaagacccaaagugagggaucaagaagggagaaugaacuauuacuggacacuaauagagccgggagacaaaauaacauuugaagcaacuggaaaucuagugguaccgagauaugcauucgcaauggaaagaaaugcuggaucugguauuaucauuucagauacaccaguccacgauuguaauacaacuugucagacacccgagggugcuauaaacaccagccucccauuucagaauauacauccgaucacaauuggaaaauguccaaaguauguaaaaagcacaaaauugagacuggccacaggauugaggaaugucccgucuauucaaucuagaggccuauucggggccauugccggcuucauugaagggggguggacagggaugguagauggaugguacgguuaucaccaucaaaaugagcaggggucaggauaugcagccgaccugaagagcacacaaaaugccauugacaagauuacuaacaaaguaaauucuguuauugaaaagaugaauacacaguucacagcaguggguaaagaguucaaccaccuggaaaaaagaauagagaauuuaaauaaaaaaguugaugaugguuuccuggacauuuggacuuacaaugccgaacuguugguucuauuggaaaaugaaagaacuuuggacuaccacgauucaaaugugaagaacuuguaugaaaagguaagaaaccaguuaaaaaacaaugccaaggaaauuggaaacggcugcuuugaauuuuaccacaaaugcgauaacacgugcauggaaagugucaaaaaugggacuuaugacuacccaaaauacucagaggaagcaaaauuaaacagaggaaaaauagaugggguaaagcuggaaucaacaaggauuuaccagauuuuggcgaucuauucaacugucgccaguucauugguacugguagucucccugggggcaaucaguuucuggaugugcucuaaugggucucuacaguguagaauauguauuuaa

SEQ ID NO: 42960 - RNA, 1701 nt, Artificial Sequence; identical to SEQ ID NO: 42086
  derived and/or modified CDS sequence (wt) from hemagglutinin__InfluenzaA__AHE37977

SEQ ID NO: 42961 - RNA, 1701 nt, Artificial Sequence
  derived and/or modified CDS sequence (wt) from hemagglutinin__InfluenzaA__AHE37978
augaaggcaauacuaguaguuaugcuauauacauuugcaaccgcaaaugcagacacauuauguauagguuaucaugcgaacaauucaacagacacuguagacacaguacuagaaaagaauguaacaguaacacacucuguuaaucuucuagaagacaagcauaacgggaaacuaugcaaacuaagagggguagccccauugcauuuggguaaauguaacauugcuggcuggauccugggaaauccagagugugaaucacucuccacagcaagcucaugguccuacauuguggaaacaucugguucagacaauggaacguguuacccaggagauuucaucgauuaugaggagcuaagagagcaauugagcucagugucaucauuugaaagguuugagauauuccccaaaacaaguucauggccaaaucaugacucgaacaaagguguaacggcagcauguccucaugcuggagcaaaaggcuucuacaaaaauuuaauauggcuaguuaaaaaaggaaauucauacccaaagcucagcauauccuacauuaaugacaaagggaaagaaguccucgugcuauggggcauucaccauccaucuacuacugcugaccaacaaagucucuaucagaaugcagauacauauguuuuuguggggacaucaagauacagcaagaaguucaagccggaaauagcaauaagacccaaagugagggaucaagaagggagaaugaacuauuacuggacacuaguagagccgggagacaaaauaacauucgaagcaacuggaaaucuagugguaccgagauaugcauuugcaauggaaagaaaugcuggaucugguauuaucauuucagauacaccaguucacgauugcaauacaacuugucagacacccaagggugcuauaaacaccagccucccauuucagaauauacauccgaucacaauuggaaaauguccaaaauauguaaaaagcacaaaauugagacuggccacaggauugaggaaugucccgucuauucaaucuagaggccuauuuggggccauugcuggcuucauugaagggggguggacaggaaugguagauggaugguacgguuaucaccaucaaaaugagcaggggucaggauaugcagccgaccugaagagcacacagaaugccauugacaagauuacuaacaaaguaaauucuguuauugaaaagaugaauacacaguucacagcaguagguaaagaguucaaccaccuggaaaaaagaauagagaauuuaaauaaaaaaguugaugaugguuuccuggacauuuggacuuacaaugccgaacuguugguucuauuggaaaaugaaagaacuuuggacuaccacgauucaaaugugaagaacuuauaugaaaagguaagaaaccaguuaaaaaacaaugccaaggaaauuggaaauggcugcuuugaauuuuaccacaaaugcgauaacacgugcauggaaagugucaaaaaugggacuuaugauuacccaaaauacucagaggaagcaaaauuaaacagagaagaaauagaugggguaaagcuggaaucaacaaggauuuaccagauuuuggcgaucuauucaacugccgcuaguucauugguacugguagucucucugggggcaaucaguuuuuggaugugcucuaaugggucucuacaguguagaauauguauuuaa

SEQ ID NO: 42962 - RNA, 1701 nt, Artificial Sequence
  derived and/or modified CDS sequence (wt) from hemagglutinin__InfluenzaA__AHE37979
augaaggcaauacuaguaguucugcuauauacauuugcaaccgcaaaugcagacacauuauguauagguuaucaugcgaacaauucaacagacacuguagacacaguacuagaaaagaauguaacaguaacacacucuguuaaccuucuagaagacaagcauaacgggaaacuaugcaaacuaagagggguagccccauugcauuuggguaaauguaacauugcuggcuggauccugggaaauccagagugugaaucacucuccacagcaaguucaugguccuacauuguggaaacaucuaguucagacaauggaacguguuacccaggagauuucaucaauuaugaggagcuaagagagcaauugagcucagugucaucauuugaaagguuugagauauuccccaagacaaguucauggcccaaucaugacucgaacaaagguguaacggcagcauguccucacgcuggagcaaaaagcuucuacaaaaauuuaauauggcuaguuaaaaaaggaaauucauacccaaagcucagccaauccuacauuaaugauaaagggaaagaaguccucgugcuguggggcauccaccauccaucuacuacugcugaccaacaaagucucuaucagaaugcagaugcauauguuuuuguggggacaucaagauacagcaaaaaguucaagccggaaauagcaauaagacccaaagugagggaucaagaagggagaaugaacuauuacuggacacuaguagagccgggagacaaaauaacauucgaagcaacuggaaaucuagugguaccgagauaugcauucacaauggaaagaaaugcuggaucugguauuaucauuucagauacaccaguccacgauugcaauacaacuugucagacacccgagggugcuauaaacaccagccucccauuucagaauauacauccgaucacaauuggaaaauguccaaaguauguaaaaagcacaaaauugagacuggccacaggauugaggaaugucccgucuauucaaucuagaggccuauucggggccauugccggcuucauugaagggggguggacagggaugguagauggaugguacgguuaucaccaucaaaaugagcaggggucaggauaugcagccgaccugaagagcacacaaaaugccauugacaagauuacuaacaaaguaaauucuguuauugaaaagaugaauacacaguucacagcaguggguaaagaguucaaccaccuggaaaaaagaauagagaauuuaaauaaaaaaguugaugaugguuuccuggacauuuggacuuacaaugccgaacuguugguucuauuggaaaaugaaagaacuuuagacuaccacgauucaaaugugaagaacuuguaugaaaagguaagaaaccaguuaaaaaacaaugccaaggaaauuggaaacggcugcuuugaauuuuaccacaaaugcgauaacacgugcauggaaagugucaaaaaugggacuuaugacuacccaaaauacucagaggaagcaaaauugaacagagaaaaaauagauggggugaagcuggaaucaacaaggauuuaccagauuuuggcgaucuauucaacugucgccaguucauugguacugguagucucccugggggcaaucagcuucuggaugugcucuaaugggucucuacaauguagaauauguauuuaa

SEQ ID NO: 42963 - RNA, 1701 nt, Artificial Sequence
  derived and/or modified CDS sequence (wt) from hemagglutinin__InfluenzaA__AHE37980
augaaggcaauacuaguaguucugcuauacacauuugcaaccgcaaaugcagacacauuauguauagguuaucaugcgaacaauucaacagacacuguagacacaguacuagaaaagaauguaacaguaacacacucuguuaaccuucuagaagacaagcauaacgggaaacuaugcaaacuaagagggguaaccccauugcauuuggguaaauguaacauugcuggcuggauccugggaaauccagagugugaaucacucuccacagcaaguucaugguccuacauuguggaaacaucuaguucagacaauggaacguguuacccaggagauuucaucaauuaugaggagcuaagagagcaauugagcucagugucaucauuugaaagguuugagauauuccccaagacaaguucauggcccaaucaugacucgaacaaagguguaacagcagcauguccucaugcuggagcaaaaagcuucuacaaaaauuuaauauggcuaguuaaaaaaggaaauucauacccaaagcucagcaaauccuacauuaaugauaaagggaaagaaguccucgugcuguggggcauucaccauccaucuacuacugcugaccaacaaagucucuaucagaaugcagaugcauauguuuuuguggggacaucaagauacagcaagaaguucaagccggaaauagcaauaagacccaaagugagggaucaagaagggagaaugaacuauuacuggacacuaauagagccgggagacaaaauaacauucgaagcaacuggaaaucuagugguaccgagauaugcauucgcaauggaaagaaaugcuggaucugguauuaucauuucagauacaccaguccacgauugcaauacaacuugucagacacccgagggugcuauaaacaccagccucccauuucagaauauacauccgaucacaauuggaaaauguccaaaguauguaaaaagcacaaaauugagacuggccacaggauugaggaaugucccgucuauucaaucuagaggccuauucggggccauugccggcuucauugaagggggguggacagggaugguagauggaugguacgguuaucaccaucaaaaugagcaggggucaggauaugcagccgaccugaagagcacacaaaaugccauugacaagauuacuaacaaaguaaauucuguuauugaaaagaugaauacacaguucacagcaguggguaaagaguucaaccaccuggaaaaaagaauagagaauuuaaauaaaaaaguugaugaugguuuccuggacaucuggacuuacaaugccgaauuguugguucuauuggaaaaugaaagaacuuuggauuaucacgauucaaaugugaagaacuuguaugaaaagguaagaaaccaguuaaaaaacaaugccaaggaaauuggaaacggcugcuuugaauuuuaccacaaaugcgauaacacgugcauggaaagugucaaaaaugggacuuaugacuacccaaaauacucagaggaagcaaaauuaaacagagaaaaaauagaugggguaaagcuggaaucaacaaggauuuaccagauuuuggcgaucuauucaacugucgccaguucauugguacugguagucucccugggggcaaucaguuucuggaugugcucuaaugggucucuacaguguagaauauguauuuaa

SEQ ID NO: 42964 - RNA, 1701 nt, Artificial Sequence
  derived and/or modified CDS sequence (wt) from hemagglutinin__InfluenzaA__AHE37981
augaaggcaauacuaguaguucugcuauacacauuugcaaccgcaaaugcagacacauuauguauagguuaucaugcgaacaauucaacagacacuguagacacaguacuagaaaagaauguaacaguaacacacucuguuaaccuucuagaagacaagcauaacgggaaacuaugcaaacuaagagggguagccccauugcauuuggguaaauguaacauugcuggcuggauccugggaaauccagagugugaaucacucuccacagcaaguucaugguccuacauuguggaaacaucuaguucagacaauggaacguguuacccaggagauuucaucaauuaugaggagcuaagagagcaauugagcucagugucaucauuugaaagguuugagauguuccccaagacaaguucauggcccaaucaugacucgaacaaagguguaacggcagcauguccucaugcuggagcaaaaagcuucuacaaaaauuuaauauggcuaguuaaaaaaggaaauucauacccaaagcucagcaaauccuacauuaaugauaaagggaaagaaguccucgugcuguggggcauucaccauccaucuacuacugcugaccaacaaagucucuaucagaaugcagaugcauauguuuuuguggggacaucaaaauacagcaagaaguucaagccggaaauagcaauaagacccaaagugagggaucaagaagggagaaugaacuauuacuggacacuaaucgagccgggagacaaaauaacauucgaagcaacuggaaaucuagugguaccgagauaugcauucgcaauggaaagaaaugcuggaucugguauuaucauuucagauacaccaguccacgauugcaauacaacuugucagacacccgagggugcuauaaacaccagccucccauuucagaauauacauccgaucacaauuggaaaauguccaaaguauguaaaaagcacaaaauugagacuggccacaggauugaggaaugucccgucuauucaaucuagaggccuauucggggccauugccggcuucaucgaagggggguggacagggaugguagauggaugguacgguuaucaccaucaaaaugagcaggggucaggauaugcagccgaccugaagagcacacaaaaugccauugacaagauuacuaacaaaguaaauucuguuauugaaaagaugaauauacaguucacagcaguggguaaagaguucaaccaccuggaaaaaagaauagagaauuuaaauaaaaaaguugaugaugguuuccuggacauuuggacuuacaaugccgaacuguugguucuauuggaaaaugaaagaacuuuggacuaccacgauucaaaugugaagaacuuguaugaaaagguaagaaaccaguuaaaaaacaaugccaaggaaauuggaaacggcugcuuugaauuuuaccacaaaugcgauaacacgugcauggaaagugucaaaaaugggacuuaugacuacccaaaauacucagaggaagcaaaauuaaacagagaaaaaauagaugggguaaagcuggaaucaacaaggauuuaccagauuuuggcgaucuauucaacugucgccaguucauugguacugguagucucccugggggcaaucaguuucuggaugugcucuaaugggucucuacaguguagaauauguauuuaa

SEQ ID NO: 42965 - RNA, 1701 nt, Artificial Sequence
  derived and/or modified CDS sequence (wt) from hemagglutinin__InfluenzaA__AHE37982
augaaggcaauacuaguaguucugcuauacacauuugcaaccgcaaaugcagacacauuauguauagguuaucaugcgaacaauucaacagacacuguagacacaguacuagaaaagaauguaacaguaacacacucuguuaaccuucuagaagacaagcauaacgggaaacuaugcaaacuaagagggguagccccauugcauuuggguaaauguaacauugcuggcuggauccugggaaauccagagugugaaucacucuccacagcaaguucaugguccuacauuguggaaacaucuaguucagacaauggaacguguuacccaggagauuucaucaauuaugaggagcuaagagagcaauugagcucagugucaucauuugaaagguuugagauauuccccaagacaaguucauggcccaaucaugacucgaacaaagguguaacggcagcauguccucacgcuggagcaaaaagcuucuacaaaaauuuaauauggcuaguuaaaaaaggaaauucauacccaaagcucagccaauccuacauuaaugauaaagggaaagaaguccucgugcuguggggcauucaccauccaucuacuacugcugaccaacaaagucucuaucagaaugcagaugcauauguuuuuguggggacaucaagauacagcaagaaguucaagccggaaauagcaauaagacccaaagugagggaucaagaagggagaaugaacuauuacuggacacuaguagagccgggagacaaaauaacauucgaagcaacuggaaaucuagugguaccgagauaugcauucacaauggaaagaaaugcuggaucugguauuaucauuucagauacaccaguccacgauugcaauacaacuugucagacacccgagggugcuauaaacaccagccucccauuucagaauauacauccgaucacaauuggaaaauguccaaaguauguaaaaagcacaaaauugagacuggccacaggauugaggaaugucccgucuauucaaucuagaggccuauucggggccauugccggcuucauugaagggggguggacagggaugguagauggaugguacgguuaucaccaucaaaaugagcaggggucaggauaugcagccgaccugaagagcacacaaaaugccauugacaagauuacuaacaaaguaaauucuguuauugaaaagaugaauacacaguucacagcaguggguaaagaguucaaccaccuggaaaaaagaauagagaauuuaaauaaaaaaguugaugaugguuuccuggacauuuggacguacaaugccgaacuguugguucuauuggaaaaugaaagaacuuuggacuaccacgauucaaaugugaagaacuuguaugaaaagguaagaaaccaguuaaaaaacaaugccaaggaaauuggaaacggcugcuuugaauuuuaccacaaaugcgauaacacgugcauggaaagugucaaaaaugggacuuaugacuacccaaaauacucagaggaagcaaaauuaaacagagaaaaaauagaugggguaaagcuggaaucaacaaggauuuaccagauuuuggcgaucuauucaacugucgccaguucauugguacugguagucucccugggggcaaucagcuucuggaugugcucuaauggaucucuacaguguagaauauguauuuaa

SEQ ID NO: 42966 - RNA, 1701 nt, Artificial Sequence
  derived and/or modified CDS sequence (wt) from hemagglutinin__InfluenzaA__AHE37983
augaaggcaauacuaguaguucugcuauacacauuugcaaccgcaaaugcagacacauuauguauagguuaucaugcgaacaauucaacagacacuguagacacaguacuagaaaagaauguaacaguaacacacucuguuaaccuucuagaagacaaacauaacgggaaacuaugcaaacuaagagggguagccccauugcauuuggguaaauguaacauugcuggcuggauccugggaaauccagagugugaaucacucuccacagcaaguucaugguccuacauuguggaaacaucuaguucagacaauggaacguguuacccaggagauuucaucaauuaugaggagcuaagagagcaauugagcucagugucaucauuugaaagguuugagauauuccccaagacaaguucauggcccaaucaugacucgaacaaagguguaacggcagcauguccucaugcuggagcaaaaagcuucuacaaaaauuuaauauggcuaguuaaaaaagggaauucauacccaaagcucagcgaauccuacauuaaugauaaagggaaagaaguccucgugcuguggggcauucaccauccaucuacuacugcugaccaacaaagucucuaucagaaugcagaugcauauguuuuuguggggacaucaagauacagcaagaaguucaagccggaaauagcaauaagacccaaagugagggaucaagaagggagaaugaacuauuacuggacacuaauagagccgggagacaaaauaacauucgaagcaacuggaaaucuagugguaccgagauaugcauucgcaauggaaagaaaugcuggaucugguauuaucauuucagauacaccaguccacgauugcaauacaacuugucagacacccgagggugcuauaaacaccagccucccauuucagaauauacauccgaucacaauuggaaaauguccaaaguauguaaaaagcacaaaauugagacuggccacaggauugaggaaugucccgucuauucaaucuagaggccuauucggggccauugccggcuucauugaagggggguggacaggaaugguagauggaugguacgguuaucaccaucaaaaugagcaggggucaggauaugcagccgaccugaagagcacacaaaaugccauugacaagauuacuaacaaaguaaauucuguuauugaaaagaugaauacacaauucacagcaguggguaaagaguucaaccaccuggaaaaaagaauagagaauuuaaauaaaaaaguugaugaugguuuccuggacauuuggacuuacaaugccgaacuguugguucuauuggaaaaugaaagaacuuuggacuaccacgauucaaaugugaagaacuuguaugaaaagguaagaaaccaguuaaaaaacaaugccaaggaaauuggaaacggcugcuuugaauuuuaccacaaaugcgauaacacgugcauggaaagugucaaaaaugggacuuaugacuacccaaaauacucagaggaagcaaaauuaaacagagaaaaaauagaugggguaaagcuggaaucaacaaggauuuaccagauuuuggcgaucuauucaacugucgccaguucauugguacugguagucucccugggggcaaucaguuucuggaugugcucuaaugggucucuacaguguagaauauguauuuaa

SEQ ID NO: 42967 - RNA, 1701 nt, Artificial Sequence
  derived and/or modified CDS sequence (wt) from hemagglutinin__InfluenzaA__AHE37984
auggaggcaauacuaguaguucugcuauacacauuugcaaccgcaaaugcagacacauuauguauagguuaucaugcgaacaauucaacagacacuguagacacaguacuagaaaagaauguaacaguaacccacucuguuaaccuucuagaagacaaacauaacgggaaacuaugcaaacuaagagggguagccccauugcauuuggguaaauguaacauugcuggcuggauccugggaaauccagagugugaaucacucuccacagcaaguucaugguccuacauuguggaaacaucuaguucagacaauggaacguguuacccaggagauuucaucaauuaugaggagcuaagagagcaauugagcucagugucaucauuugaaagguuugagauauuccccaagacaaguucauggcccaaucaugacucgaacaaagguguaacggcagcauguccucaugcuggagcaaaaagcuucuacaaaaauuuaauauggcuaguuaaaaaaggaaauucauacccaaagcucagcaaauccuacauuaaugauaaagggaaagaaguccucgugcuguggggcauucaccauccaucuacuacugcugaccaacaaagucucuaucagaaugcagaugcauauguuuuuguggggacaucaagauacagcaagaaguucaagccggaaauagcaauaagacccaaagugagggaucaagaagggagaaugaacuauuacuggacacuaauagagccaggagacaaaauaacauucgaagcaacuggaaaucuagugguaccgagauaugcauucgcaauggaaagaaaugcuggaucugguauuaucauuucagauacaccaguccacgauugcaauacaacuugucagacacccgagggugcuauaaacaccagccucccauuucagaauauacauccgaucacaauuggaaaauguccaaaguauguaaaaagcacaaaauugagacuggccacaggauugaggaaugucccgucuauucaaucuagaggccuauucggggccauugccggcuucauugaagggggguggacagggaugguagauggaugguacgguuaucaccaucaaaaugagcaggggucaggauaugcagccgaccugaagagcacacaaaaugccauugacaagauuacuaacaaaguaaauucuguuauugaaaagaugaauacacaguucacagcaguggguaaagaguucaaccaccuggaaaaaagaauagagaauuuaaauaaaaagguugaugaugguuuccuggacauuuggacuuacaaugccgaacuguugguucuauuggaaaaugaaagaacuuuggacuaccacgauucaaaugugaagaacuuguaugaaaagguaagaaaccaguuaaaaaacaaugccaaggaaauuggaaacggcugcuuugaauuuuaccacaaaugcgauaacacgugcauggaaagugucaaaaaugggacuuaugacuacccaaaauacucagaggaagcaaaauuaaacagagaaaaaauagaugggguaaagcuggaaucaacaaggauuuaccagauuuuggcgaucuauucaacugucgccaguucauugguacugguagucucccugggggcaaucaguuucuggaugugcucuaaugggucucuacaguguagaauauguauuuaa

SEQ ID NO: 42968 - RNA, 1701 nt, Artificial Sequence
  derived and/or modified CDS sequence (wt) from hemagglutinin__InfluenzaA__AHE37985
augaagaccaucauugcuuugagcuacauucuaugucuaguuuucgcucaagaacuuccuggaaaugacgacagcacggcaacacugugccuugggcaccaugcagugccaaacggaacgauagugaaaacaaucacgaaugaccaaauugaaguuacuaaugcuacugagcugguucagaguuccucaacaggugaaauaugcaacaguccucaucagauccuugauggagaaaacugcacacuaauagaugcucuauugggagacccucagugugauggcuuccaaaacaagaaaugggaccuuuuuguugaacgaagcaaagcccacagcaacuguuacccuuaugaugugccggauuaugccucccuuaggucacuaguugccucauccggcacacuggaguuuaacaaugaaagcuucaauuggacuggagucacucaaaacggaacaagcucugcuugcauaaggagaucuaauaauaguuucuuuaguagauugaauugguugacccacuuaaacuucaaauacccagcauugaacgugacuaugccaaacaaugaacaauuugacaaauuguacauuugggggguucaccacccggguacggacaaggaccaaaucuuccuguaugcucaagcaucaggaagaaucacaguaucuaccaaaagaagccaacaagcuguaauuccgaauaucggaucuagacccagaguaaggaauaucccuagcagaguaagcaucuauuggacaauaguaaaaccaggagacauacuuuugauuaacagcacagggaaucuaauugcuccuagggguuacuucaaaauacgaagugggaaaagcucaauaaugaaaucagaugcacccauuggcaaaugcaauucugcaugcaucacuccaaauggaagcauucccaaugacaaaccauuccaaaauguaaacaggaucacauauggggccugucccagauaugucaagcaaaacacucugaaauuggcaacaggaaugagaaaugugccagagaaacaaacuagaggcauauuuggcgcaauagcggguuucauagaaaaugguugggagggaaugguggaugguugguacgguuucaggcaucaaaauucugagggaaggggacaagcagcagaucucaaaagcacucaagcagcaaucgaucaaaucaaugggaagcugaauagauugaucgggaaaaccaacgagaaauuccaucagauugaaaaagaauucucagaagucgaggggagaauucaggaccuugagaaauauguugaggacacuaaaauagaucucuggucauacaacgcggagcuucuuguugcccuggagaaccaacacacaauugaucuaacugacucagaaaugaacaaacuguuugaaaaaacaaagaagcaacugagggaaaaugcugaggauaugggcaaugguuguuucaaaauauaccacaaaugugacaaugccugcauaggaucaaucagaaauggaacuuaugaucacgauguguacagagaugaagcauuaaacaaccgauuccagaucaaaggaguugagcugaagucaggguacaaagauuggauccuauggauuuccuuugccauaucauguuuuuugcuuuguguugcuuuguugggguucaucaugugggccugccaaaaaggcaacauuaggugcaacauuugcauuuga

SEQ ID NO: 42969 - RNA, 1701 nt, Artificial Sequence
  derived and/or modified CDS sequence (wt) from hemagglutinin__InfluenzaA__AHE37986
augaagaccaucauugcuuugagcuacauucuaugucuaguuuucgcucaagaacuuccuggaaaugacgacagcacggcaacgcugugccuugggcaccaugcagugccaaacggaacgauagugaaaacaaucacgaaugaccaaauugaaguuacuaaugcuacugagcugguucagaguuccucaacaggugaaauaugcaacaguccucaucagauccuugauggagaaaacugcacacuaauagaugcucuauugggagacccucagugugauggcuuccaaaacaagaaaugggaccuuuuuguugaacgaagcaaagcccacagcaacuguuacccuuaugaugugccggauuaugccucccuuaggucacuaguugccucauccggcacacuggaguuuaacaaugaaagcuucaauuggacuggagucacucaaaacggaacaagcucugcuugcauaaggagaucuaauaauaguuucuuuaguagauugaauugguugacccacuuaaacuucaaauacccagcauugaacgugacuaugccaaacaaugaacaauuugacaaauuguauauuugggggguucaccacccggguacggacaaggaccaaaucuuccuguaugcucaagcaucaggaagaaucacaguaucuaccaaaagaagccaacaagcuguaauuccgaauaucggaucuagacccagaguaaggaauaucccuagcagaguaagcaucuauuggacaauaguaaaaccgggagacauacuuuugauuaacagcacagggaaucuaauugcuccuagggguuacuucaaaauacgaagugggaaaagcucaauaaugagaucagaugcacccauuggcaaaugcaauucugcaugcaucacuccaaauggaagcauucccaaugacaaaccauuccaaaauguaaacaggaucacauacggggccugucccagauaugucaagcaaaacacucugaaauuggcaacaggaaugagaaauguaccagagaaacaaacuagaggcauauuuggcgcaauagcggguuucauagaaaaugguugggagggaaugguggaugguugguacgguuucaggcaucaaaauucugagggaaggggacaagcagcagaucucaaaagcacucaagcagcaaucgaucaaaucaaugggaagcugaauagauugaucgggaaaaccaacgagaaauuccaucagauugaaaaagaauucucagaagucgaagggagaauucaggaccuugagaaauauguugaggacacuaaaauagaucucuggucauacaacgcggagcuucuuguugcccuggagaaccaacacacaauugaucuaacugacucagaaaugaacaaacuguuugaaaaaacaaagaagcaacugagggaaaaugcugaggauaugggcaaugguuguuucaaaauauaccacaaaugugacaaugccugcauaggaucaaucagaaauggaacuuaugaucacgauguguacagagaugaagcauuaaacaaccgauuccagaucaagggaauugagcugaagucaggguacaaagauuggauccuauggauuuccuuugccauaucauguuuuuugcuuuguguugcuuuguugggguucaucaugugggccugccaaaaaggcaacauuaggugcaacauuugcauuuga

SEQ ID NO: 42970 - RNA, 1701 nt, Artificial Sequence
  derived and/or modified CDS sequence (wt) from hemagglutinin__InfluenzaA__AHE37987
augaagacuaucauugcuuugagcuacauucuaugucugguuuucgcucaaaaacuuccuggaaaugacaauagcacggcaacgcugugccuugggcaccaugcaguaccaaacggaacgauagugaaaacaaucacgaaugaccgaauugaaguuacuaaugcuacugagcugguucagaauuccucaauaggugaaauaugcgacaguccucaucagauccuugauggagaaaauugcacacuaauagaugcucuauugggagacccucagugugauggcuuucaaaauaagaaaugggaccuuuuuguugaacgaagcaaagccuacagcaacuguuacccuuaugaugugccggauuaugccucccuuaggucacuaguugccucauccggcacacuggaguuuaacaaugaaagcuucaauuggacuggagucacucaaaacggaacaaguucugcuugcauaaggagaucuaauaguaguuucuuuaguagauuaaauugguugacccacuuaaacuucaaauacccagcauugaacgugacuaugccaaacaaugaacaauuugacaaauuguacauuuggggaguucaccacccggguacggacaaggaccaaaucuuccuguaugcucaaucaucaggaagaaucacaguaucuaccaaaagaagccaacaagcuguaaucccaaauaucggaucuagacccagaauaaggaauaucccuagcagaauaagcaucuauuggacaauaguaaaaccaggagacauacuuuugauuaacagcacagggaaucuaauugcuccuagggguuacuucaaaauacgaagugggaaaagcucaauaaugagaucagaugcacccauuggcaaaugcaagucugaaugcaucacuccaaauggaagcauucccaaugacaaaccauuccaaaauguaaacaggaucacauacggggccugucccagauauguuaagcaaagcacucugaaauuggcaacaggaaugcgaaauguaccagagaaacaaacuagaggcauauuuggcgcaauagcggguuucauagaaaaugguugggagggaaugguggaugguugguacgguuucaggcaucaaaauucugagggaagaggacaagcagcagaucucaaaagcacucaagcagcaaucgaucaaaucaaugggaagcugaaucgauugaucgggaaaaccaacgagaaauuccaucagauugaaaaagaauucucagaaguagaagggagaauucaggaccuugagaaauauguugaggacacuaaaauagaucucuggucauacaacgcggagcuucuuguugcccuggagaaucaacauacaauugaucuaacugacucagaaaugaacaaacuguuugaaaaaacaaagaagcaacugagggaaaaugcugaggauaugggcaaugguuguuucaaaauauaccacaaaugugacaaugccugcauaggaucaaucagaaauggaacuuaugaccacaauguguacagggaugaagcauuaaacaaccgguuccagaucaagggaguugagcuuaagucaggguacaaagauuggauccuauggauuuccuuugccauaucauguuuuuugcuuuguguugcuuuguugggguucaucaugugggccugccaaaagggcaacauuaggugcaacauuugcauuuga

SEQ ID NO: 42971 - RNA, 1701 nt, Artificial Sequence
  derived and/or modified CDS sequence (wt) from hemagglutinin__InfluenzaA__AHE37988
augaagacuaucauugcuuugagcuacauucuaugucugguuuucgcucaaaaacuuccuggaaaugacaauagcacggcaacgcugugccuugggcaccaugcaguaccaaacggaacgauagugaaaacaaucacgaaugaccgaauugaaguuacuaaugcuacugagcugguucagaauuccucaauaggugaaauaugcgacaguccucaucagauucuugauggagaaaacugcacacuaauagaugcucuauugggagacccucagugugauggcuuucaaaauaagaaaugggaccuuuuuguugaacgaagcaaagccuacagcaacuguuacccuuaugaugugccggauuaugccucccuuaggucacuaguugccucauccggcacacuggaguuuaacaaugaaagcuucaauuggacuggagucacucaaaacgggacaaguucugcuugcauaaggagaucuaauaguaguuucuuuaguagauuaaauugguugacccacuuaaacuucaaauacccagcauugaacgugaccaugccaaacaaugaacaauuugacaaauuguacauuugggggguucaccacccagguacggacaaggaccaaaucuuccuguaugcucaaucaucaggaagaaucacaguaucuaccaaaagaagccaacaagcuguaaucccaaauaucggaucuagacccagaauaaggaauaucccuagcagaauaagcaucuauuggacaauaguaaaaccgggagacauacuuuugauuaacagcacagggaaucuaauugcuccuagggguuacuucaaaauacgaagugggaaaagcucaauaaugagaucagaugcacccauuggcaaaugcaagucugaaugcaucacuccaaauggaagcauucccaaugacaaaccauuccaaaauguaaacaggaucacauacggggccugucccagauauguuaagcaaagcacucugaaauuggcaacaggaaugcgaaauguaccagagaaacaaacuagaggcauauuuggcgcaauagcagguuucauagaaaaugguugggagggaaugauggaugguugguacgguuucaggcaucaaaauucugagggaagaggacaagcagcagaucucaaaagcacccaagcagcaaucgaucaaaucaaugggaagcugaaucgauugaucgggaaaaccaacgagaaauuccaucagauugaaaaagaauucucagaaguagaagggagaauucagaaccuugagaaauauguugaggacacuaaaauagaucucuggucauacaacgcggagcuucuuguugcccuggagaaccaacauacaauugaucuaacugacucagaaaugaacaaacuguuugaaaaaacaaagaagcaacugagggaaaaugcugaggauaugggcaaugguuguuucaaaauauaccacaaaugugacaaugccugcauaggaucaauaagaaauggaacuuaugaccacaauguguacagggaugaagcauuaaacaaccgguuccagaucaagggaguugagcugaagucaggguacaaagauuggauccuauggauuuccuuugccauaucauguuuuuugcuuuguguugcuuuguugggguucaucaugugggccugccaaaagggcaacauuaggugcaacauuugcauuuga

SEQ ID NO: 42972 - RNA, 1701 nt, Artificial Sequence
  derived and/or modified CDS sequence (wt) from hemagglutinin__InfluenzaA__AHE37989
augaaaacuaucauugcuuugagcuacauucuaugucugguuuucgcucaaaaacuuccuggaaaugacaauagcacggcaacgcugugccuugggcaccaugcaguaccaaacggaacgauagugaaaacaaucacgaaugaccgaauugaaguuacuaaugcuacugagcugguucagaauuccucaauaggugaaauaugcgacaguccucaucagauccuugauggagaaaacugcacacuaauagaugcucuauugggagacccucagugugauggcuuucaaaauaagaaaugggaccuuuuuguugaacgaagcaaagccuacagcaacuguuacccuuaugaugugccggauuaugccucccuuaggucacuaguugccucauccggcacacuggaguuuaacaaugaaagcuucaauugggcuggagucacucaaaacggaacaaguucugcuugcauaaggggaucuaauaguaguuucuuuaguagauuaaauugguugacccacuuaaacuucaaauacccagcauugaacgugacuaugccaaacaaugaacaauuugacaaauuguacauuugggggguucaccacccggguacggacaaggaccaaaucuuccuguaugcucaaucaucaggaagaaucacaguaucuaccaaaagaagccaacaagcuguaaucccgaauaucggaucuagacccagaauaaggaauaucccuagcagaauaagcaucuauuggacaauaguaaaaccgggagacauacuuuugauuaacagcacagggaaucuaauugcuccuagggguuacuucaaaauacgaagugggaaaagcucaauaaugagaucagaugcacccauuggcaaaugcaagucugaaugcaucacuccaaauggaagcauucccaaugacaaaccauuccaaaauguaaacaggaucacauacggggccugucccagauauguuaagcaaagcacucugaaauuggcaacaggaaugcgaaauguaccagagaaacaaacuagaggcauauuuggcgcaauagcggguuucauagaaaaugguugggagggaaugguggaugguugguacgguuucaggcaucaaaauucugagggaagaggacaagcagcagaucucaaaagcacucaagcagcaaucgaucaaaucaaugggaagcugaaucgauugaucgggaaaaccaacgagaaauuccaucagauugaaaaagaauucucagaaguagaagggagaauucaggaccuugagaaauauguugaggacacaaaaauagaucucuggucauacaacgcggagcuucuuguugcccuggagaaccaacauacaauugaucuaacugacucagaaaugaacaaacuguuugaaaaaacaaagaagcaacugagggaaaaugcugaggauaugggcaaugguuguuucaaaauauaccacaaaugugacaaugccugcauaggaucaaucagaaauggaacuuaugaccacgauguauacagggaugaagcauuaaacaaccgguuccagaucaagggaguugagcugaagucaggguacaaagauuggauccuauggauuuccuuugccauaucauguuuuuugcuuuguguugcuuuguugggguucaucaugugggccugccaaaagggcaacauuaggugcaacauuugcauuuga

SEQ ID NO: 42973 - RNA, 1701 nt, Artificial Sequence; identical to SEQ ID NO: 42148
  derived and/or modified CDS sequence (wt) from hemagglutinin__InfluenzaA__AHE37990

SEQ ID NO: 42974 - RNA, 1701 nt, Artificial Sequence
  derived and/or modified CDS sequence (wt) from hemagglutinin__InfluenzaA__AHE37991
augaagacuaucauugcuuugagcuacauucuaugucugguuuucgcucaaaaacuuccuggaaaugacaauagcacggcaacgcugugccuugggcaccaugcaguaccaaacggaacgauagugaaaacaaucacgaaugaccgaauugaaguuacuaaugcuacugagcugguucagaauuccucgauaggugaaauaugcgacaguccucaucagauccuugauggagaaaacugcacacuaauagaugcucuauugggagacccucagugugauggcuuucaaaauaagaaaugggaccuuuuuguugaacgaagcaaagccuacagcaacuguuacccuuaugaugugccggauuaugccucccuuaggucacuaguugccucauccggcacacuggaguuuaacaaugaaagcuucaauuggacuggagucacucaaaauggaacaaguucugcuugcauaaggagaucuaauaguaguuucuuuaguagauuaaauugguugacccacuuaaacuucaaauacccagcauugaacgugacuaugccaaacaaugaacaauuugacaaauuguauauuugggggguucaccacccggguacggacaaggaccaaaucuuccuguaugcucaaucaucaggaagaaucacaguaucuaccaaaagaagccaacaagcuguaaucccaaauaucggaucuagacccagaauaaggaauaucccuagcagaauaagcaucuauuggacaauaguaaaaccgggagacauacuuuugauuaacagcacagggaaccuaauugcuccuagggguuacuucaaaauacgaagugggaaaagcucaauaaugagaucagaugcacccauuggcaaaugcaagucugaaugcaucacuccaaauggaagcauucccaaugacaaaccauuccaaaauguaaacaggauaacauacggggccugucccagauauguuaagcaaagcacucugaaauuggcaacaggaaugcgaaauguaccagagaaacaaacuagaggcauauuuggcgcaauagcggguuucauagaaaaugguugggaggggaugguggaugguugguacgguuucaggcaucaaaauucugagggaagaggacaagcagcagaucucaaaagcacucaagcagcaaucgaucaaaucaaugggaagcugaaucgauugaucgggaaaaccaacgagaaauuccaucagauugaaaaagaauucucagaaguagaagggagaauucaggaccuugagaaauauguugaggacacuaaaauagaucucuggucauacaacgcggagcuucuuguugcccuggagaaccaacauacaauugaucuaacugacucagaaaugaacaaacuguuugaaaaaacaaagaagcaacugagggaaaaugcugaggauaugggcaaugguuguuucaaaauauaccacaaaugugacaaugccugcauaggaucaauaagaaauggaacuuaugaccacaauguguacagggaugaagcauuaaacaaccgguuccagaucaagggaguugagcugaagucaggguacaaagauuggauccuauggauuuccuuugccauaucauguuuuuugcuuuguguugcuuuguugggguucaucaugugggccugccaaaagggcaacauuaggugcaacauuugcauuuga

SEQ ID NO: 42975 - RNA, 1701 nt, Artificial Sequence
  derived and/or modified CDS sequence (wt) from hemagglutinin__InfluenzaA__AHE37992
augaagaccaucauugcuuugagcuacauucuaugucuaguuuucgcucaagaacuuccuggaaaugacgacagcacggcaacgcugugccuugggcaccaugcagugccaaacggaacgauagugaaaacaaucacgaaugaccaaauugaaguuacuaaugcuacugagcugguucagaguuccucaacaggugaaauaugcaacaguccucaucagauccuugauggagaaaacugcacacuaauagaugcucuauugggagacccucagugugauggcuuccaaaacaagaaaugggaccuuuuuguugaacgaagcaaagcccacagcaacuguuacccuuaugaugugccggauuaugccucccuuaggucacuaguugccucauccggcacacuggaguuugacaaugaaagcuucaauuggacuggagucacucaaaacggaacaagcucugcuugcauaaggagaucuaauaauaguuucuuuaguagauugaauugguugacccacuuaaacuucaaauacccagcauugaacgugacuaugccaaacaaugaacaauuugacaaauuguacauuugggggguucaccacccggguacggacaaggaccaaaucuuccuguaugcucaagcaucaggaagaaucacaguaucuaccaaaagaagccaacaagcuguaauuccgaauaucggaucuagacccagaguaaggaauaucccuagcagaguaagcaucuauuggacaauaguaaaaccaggagacauacuuuugauuaacagcacagggaaucuaauugcuccuagggguuacuucaaaauacgaagugggaaaagcucaauaaugagaucagaugcacccauuggcaaaugcaauucugcaugcaucacuccaaauggaagcauucccaaugacaaaccauuccaaaauguaaacaggaucacauauggggccugucccagauaugucaagcaaaacacucugaaauuggcaacaggaaugagaaaugugccagagaaacaaacuagaggcauauuuggcgcaauagcggguuucauagaaaaugguugggagggaaugguggaugguugguacgguuucaggcaucaaaauucugagggaaggggacaagcagcagaucucaaaagcacucaagcagcaaucgaucaaaucaaugggaagcugaauagauugaucgggaaaaccaacgagaaauuccaucagauugaaaaagaauucucagaagucgaggggagaauucaggaccuugagaaauauguugaggacacuaaaauagaucucuggucauacaacgcggagcuucuuguugcccuggagaaccaacacacaauugaucuaacugacucagaaaugaacaaacuguuugaaaaaacaaagaagcaacugagggaaaaugcugaggauaugggcaaugguuguuucaaaauauaccacaaaugugacaaugccugcauaggaucaaucagaaauggaacuuaugaucacgauguguacagagaugaagcauuaaacaaccgauuccagaucaagggaguugagcugaagucaggguacaaagauuggauccuauggauuuccuuugccauaucauguuuuuugcuuuguguugcuuuguugggguucaucaugugggccugccaaaaaggcaacauuaggugcaacauuugcauuuga

SEQ ID NO: 42976 - RNA, 1701 nt, Artificial Sequence
  derived and/or modified CDS sequence (wt) from hemagglutinin__InfluenzaA__AHE38023
augaaggcaauacuaguaguucugcuauauacauuugcaaccgcaaaugcagacacauuauguauagguuaucaugcgaacaauucaacagacacuguagacacaguacuagaaaagaauguaacaguaacacacucuguuaaccuucuagaagacaagcauaacgggaaacuaugcaaacuaagagggguagccccauugcauuuggguaaauguaacauugcuggcuggauccugggaaauccagagugugaaucacucuccacagcaaguucaugguccuacauuguggaaacaucuaguucagacaauggaacguguuacccaggagauuucaucaauuaugaggagcuaagagagcaauugagcucagugucaucauuugaaagguuugagauauuccccaagacaaguucauggcccaaucaugacucgaacaaagguguaacagcagcauguccucacgcuggagcaaaaagcuucuacaaaaauuuaauauggcuaguuaaaaaaggaaauucauacccaaagcucagccaauccuacauuaaugauaaagggaaagaaguccucgugcuguggggcauucaccauccaucuacuacugcugaccaacaaagucucuaucagaaugcagaugcauauguuuuuguggggacaucaagauacagcaagaaguucaagccggaaauagcaauaagacccaaagugagggaucaagaagggagaaugaacuauuacuggacacuaguagagccgggagacaaaauaacauucgaagcaacuggaaaucuagugguaccgagauaugcauucacaauggaaagaaaugcuggaucugguauuaucauuucagauacaccaguccacgauugcaauacaacuugucagacacccgagggugcuauaaacaccagccucccauuucagaauauacauccgaucacaauuggaaaauguccaaaguauguaaaaagcacaaaauugagacuggccacaggauugaggaaugucccgucuauucaaucuagaggccuauucggggccauugccggcuucauugaagggggguggacagggaugguagauggaugguacgguuaucaccaucaaaaugagcaggggucaggauaugcagccgaccugaagagcacacaaaaugccauugacaagauuacuaacaaaguaaauucuguuauugaaaagaugaauacacaguucacagcaguggguaaagaguucaaccaccuggaaaaaagaauagagaauuuaaauaaaaaaguugaugaugguuuccuggacauuuggacuuacaaugccgaacuguugguucuauuggaaaaugaaagaacuuuggacuaccacgauucaaaugugaagaacuuguaugaaaagguaagaaaccaguuaaaaaacaaugccaaggaaauuggaaacggcugcuuugaauuuuaccacaaaugcgauaacacgugcauggaaagugucaaaaaugggacuuaugacuacccaaaauacucagaggaagcaaaauuaaacagagaaaaaauagaugggguaaagcuggaaucaacaaggauuuaccagauuuuggcgaucuauucaacugucgccaguucauugguacugguagucucccugggggcaaucagcuucuggaugugcucuaaugggucucuacaguguagaauauguauuuaa

SEQ ID NO: 42977 - RNA, 1701 nt, Artificial Sequence
  derived and/or modified CDS sequence (wt) from hemagglutinin__InfluenzaA__AHE38024
augaaggcaauacuaguaguucugcuauauacauuugcaaccgcaaaugcagacacauuauguauagguuaucaugcgaacaauucaacagacacuguagacacaguacuagaaaagaauguaacaguaacacacucuguuaaccuucuagaagacaagcauaacgguaaacuaugcaaacuaagagggguagccccauugcauuuggguaaauguaacauugcuggcuggauccugggaaauccagagugugaaucacucuccacagcaaguucaugguccuacauuguggaaacaucuaguucagacaauggaacguguuacccaggagauuucaucaauuaugaggagcuaagagagcaauugagcucagugucaucauuugaaagguuugagauauuccccaagacaaguucauggcccaaucaugacucgaacaaagguguaacggcagcauguccucacgcuggagcaaaaagcuucuacaaaaauuuaauauggcuaguuaaaaaaggaaauucauacccaaagcucagucaauccuacauuaaugauaaagggaaagaaguccucgugcuguggggcauucaccauccaucuacuacugcugaccaacaaagucucuaucagaaugcagaugcauauguuuuuguggggacaucaagauacagcaagaaguucaagccggaaauagcaacaagacccaaagugagggaucaagaagggagaaugaacuauuacuggacacuaguagagccgggagacaaaauaacauucgaagcaacuggaaaucuagugguaccgagauaugcauucacaauggaaagaaaugcuggaucugguauuaucauuucagauacaccaguccacgauugcaauacaacuugucagacacccgagggugcuauaaacaccagccucccauuucagaauauacauccgaucacaauuggaaaauguccaaaguauguaaaaagcacaaaauugagacuggcaacaggauugaggaaugucccgucuauucaaucuagaggccuauucggggccauugccggcuucauugaagggggguggacagggaugguagauggaugguacgguuaucaccaucaaaaugagcaggggucaggauaugcagccgaccugaagagcacacaaaaugccauugacaagauuacuaacaaaguaaacucuguuauugaaaagaugaauacacaguucacagcaguggguaaagaguucaaccaccuggaaaaaagaauagagaauuuaaauaaaaaaguugaugaugguuuccuggacauuuggacuuacaaugccgaacuguugguucuauuggaaaaugaaagaacuuuggacuaccacgauucaaaugugaagaacuuguaugaaaagguaagaaaccaguuaaaaaacaaugccaaggaaauuggaaacggcugcuuugaauuuuaccacaaaugcgauaacacgugcauggaaagugucaaaaaugggacuuaugacuacccaaaauacucagaggaagcaaaauuaaacagagaaaaaauagaugggguaaagcuggaaucaacaaggauuuaccagauuuuggcgaucuauucaacugucgccaguucauugguacugguagucucccugggggcaaucagcuucuggaugugcucuaaugggucucuacaguguagaauauguauuuaa

SEQ ID NO: 42978 - RNA, 1701 nt, Artificial Sequence
  derived and/or modified CDS sequence (wt) from hemagglutinin__InfluenzaA__AHE38026
augaaggcaauacuaguaguucugcuauauacauuugcaaccgcaaaugcagacacauuauguauagguuaucaugcgaacaauucaacagacacuguagacacaguacuagaaaagaauguaacaguaacacacucuguuaaccuucuagaagacaagcauaacgggaaacuaugcaaacuaagagggguagccccauugcauuuggguaaauguaacauugcuggcuggauccugggaaauccagagugugaaucacucuccacagcaaguucaugguccuacauuguggaaacaucuaguucagacaauggaacguguuacccaggagauuucaucaauuaugaggagcuaagagagcaauugagcucagugucaucauuugaaagguuugagauauuccccaagacaaguucauggcccaaucaugacucgaacaaagguguaacggcagcauguccucacgcuggagcaaaaagcuucuacaaaaauuuaauauggcuaguuaaaaaaggaaauucauacccaaagcucagccaauccuacauuaaugaaaaagggaaagaaguccucgugcuguggggcauucaccauccaucuacuacugcugaccaacaaagucucuaucagaaugcagaugcauauguuuuuguggggacaucaagauacagcaagaaguucaagccggaaauagcaauaagacccaaagugagggaucaagaagggagaaugaacuauuacuggacacuaguagagccgggagacaaaauaacauucgaagcaacuggaaaucuagugguaccgagauaugcauucacaauggaaagaaaugcuggaucugguauuaucauuucagauacaccaguccacgauugcaauacaacuugucagacacccgagggugcuauaaacaccagccucccauuucagaauauacauccgaucacaauuggaaaauguccaaaguauguaaaaagcacaaaauugagacuggccacaggauugaggaaugucccgucuauucaaucuagaggccuauucggggccauugccggcuucauugaagggggguggacagggaugguagauggaugguacgguuaucaucaucaaaaugagcaggggucaggauaugcagccgaccugaagagcacacaaaaugccauugacaagauuacuaacaaaguaaauucuguuauugaaaagaugaauacacaguucacagcaguggguaaagaguucaaccaccuggaaaaaagaauagagaauuuaaauaaaaaaguugaugaugguuuccuggacauuuggacuuacaaugccgaacuguugguucuauuggaaaaugaaagaacuuuggacuaccacgauucaaaugugaagaacuuguaugaaaagguaagaaaccaguuaaaaaacaaugccaaggaaauuggaaacggcugcuuugaauuuuaccacaaaugcgauaacacgugcauggaaagugucaaaaaugggacuuaugacuacccaaaauacucagaggaagcaaaauuaaacagagaaaaaauagaugggguaaagcuggaaucaacaaggauuuaccagauuuuggcgaucuauucaacugucgccaguucauugguacugguagucucccugggggcaaucagcuucuggaugugcucuaaugggucucuacaguguagaauauguauuuaa

SEQ ID NO: 42979 - RNA, 1701 nt, Artificial Sequence; identical to SEQ ID NO: 41901
  derived and/or modified CDS sequence (wt) from hemagglutinin__InfluenzaA__AHE38027

SEQ ID NO: 42980 - RNA, 1683 nt, Artificial Sequence
  derived and/or modified CDS sequence (wt) from hemagglutinin__InfluenzaA__AHF20558
augaacacucaaauccugguauucgcucugauugcgaucauuccaacaaaugcagacaaaaucugccucggacaucaugccgugucaaacggaaccaaaguaaacacauuaacugaaagaggaguggaagucgucaaugcaacugaaacaguggaacgaacaaacauccccaggaucugcucaaaagggaaaaggacaguugaccucggucaauguggacuccuggggacaaucacuggaccaccucaaugugaccaauuccuagaauuuucagccgauuuaauuauugagaggcgagaaggaagugaugucuguuauccugggaaauucgugaaugaagaagcucugaggcaaauucucagagaaucaggcggaauugacaaggaagcaaugggauucacauacaguggaauaagaacuaauggagcaaccagugcauguaggagaucaggauccucauucuaugcagaaaugaaauggcuccugucaaacacagauaaugcugcauucccgcagaugacuaagucauauaaaaauacaagaaaaagcccagcucuaauaguaugggggauccaucauuccguaucaacugcagagcaaaccaagcuauaugggaguggaaacaaacuggugacaguugggaguucuaauuaucaacaaucuuuuguaccgaguccaggagcgagaccacaaguuaauggucuaucuggaagaauugacuuucauuggcuaaugcuaaaucccaaugauacagucacuuucaguuucaauggggcuuucauagcuccagaccgugcaagcuuccugagaggaaaaucuaugggaauccagaguggaguacagguugaugccaauugugaaggggacugcuaucauaguggagggacaauaauaaguaacuugccauuucagaacauagauagcagggcaguuggaaaauguccgagauauguuaagcaaaggagucugcugcuagcaacagggaugaagaauguuccugagauuccaaagggaagaggccuauuuggugcuauagcggguuucauugaaaauggaugggaaggccuaauugaugguugguauggcuucagacaccagaaugcacagggagagggaacugcugcagauuacaaaagcacucaaucggcaauugaucaaauaacaggaaaauuaaaccggcuuauagaaaaaaccaaccaacaauuugaguugauagacaaugaauucaaugagguagagaagcaaaucgguaaugugauaaauuggaccagagauucuauaacagaaguguggucauacaaugcugaacucuugguagcaauggagaaccagcauacaauugaucuggcugauucagaaauggacaaacuguacgaacgagugaaaagacagcugagagagaaugcugaagaagauggcacugguugcuuugaaauauuucacaagugugaugaugacuguauggccaguauuagaaauaacaccuaugaucacagcaaauacagggaagaggcaaugcaaaauagaauacagauugacccagucaaacuaagcagcggcuacaaagaugugauacuuugguuuagcuucggggcaucauguuucauacuucuagccauuguaaugggccuugucuucauauguguacagaauggaaacaugcggugcacuauugguauauaa

SEQ ID NO: 42981 - RNA, 1683 nt, Artificial Sequence
  derived and/or modified CDS sequence (wt) from hemagglutinin__InfluenzaA__AHF20568
augaacacucaaauccugguauucgcucugauugcgaucauuccaacaaaugcagacaaaaucugccucggacaucaugccgugucaaacggaaccaaaguaaacacauuaacugaaagaggaguggaagucgucaaugcaacugaaacaguggaacgaacaaacauccccaggaucugcucaaaagggaaaaggacaguugaccucggucaauguggacuccuggggacaaucacuggaccaccucaaugugaccaauuccuagaauuuucagccgauuuaauuauugagaggcgagaaggaagugaugucuguuauccugggaaauucgugaaugaagaagcucugaggcaaauucucagagaaucaggcggaauugacaaggaagcaaugggauucacauacaguggaauaagaacuaauggagcaaccagugcauguaggagaucaggaucuucauucuaugcagaaaugaaauggcuccugucaaacacagauaaugcugcauucccgcagaugacuaagucauauaaaaauacaagaaaaagcccagcucuaauaguaugggggauccaucauuccguaucaacugcagagcaaaccaagcuauaugggaguggaaacaaacuggugacaguugggaguucuaauuaucaacaaucuuuuguaccgaguccaggagcgagaccacaaguuaauggucuaucuggaagaauugacuuucauuggcuaaugcuaaaccccaaugauacagucacuuucaguuucaauggggcuuucauagcuccagaccgugcaagcuuccugagaggaaaaucuaugggaauccagaguggaguacagguugaugccaauugugaaggggacugcuaucauaguggagggacaauaaugaguaacuugccauuucagaauauagauagcagggcaguuggaaaauguccgagauauguuaagcaaaggagucugcugcuagcaacagggaugaagaauguuccugagauuccaaagggaagaggccuauuuggugcuauagcggguuucauugaaaauggaugggaaggccuaauugaugguugguaugguuucagacaccagaaugcacagggagagggaacugcugcagauuacaaaagcacucaaucggcaauugaucaaauaacaggaaaauuaaaccggcuuauagaaaaaaccaaccaacaauuugaguugauagacaaugaauucaaugagguagagaagcaaaucgguaaugugauaaauuggaccagagauucuauaacagaaguguggucauacaaugcugaacucuugguagcaauggagaaccagcauacaauugaucuggcugauucagaaauggacaaacuguacgaacgagugaaaagacagcugagagagaaugcugaagaagauggcacugguugcuuugaaauauuucacaagugugaugaugacuguauggccaguauuagaaauaacaccuaugaucacagcaaauacagggaagaggcaaugcaaaauagaauacagauugacccagucaaacuaagcagcggcuacaaagaugugauacuuugguuuagcuucggggcaucauguuucauacuucuagccauuguaaugggccuugucuucauauguguaaagaauggaaacaugcggugcacuauuuguauauaa

SEQ ID NO: 42982 - RNA, 1698 nt, Artificial Sequence; identical to SEQ ID NO: 39805
  derived and/or modified CDS sequence (wt) from hemagglutinin__InfluenzaA__AHG96108

SEQ ID NO: 42983 - RNA, 1698 nt, Artificial Sequence; identical to SEQ ID NO: 39805
  derived and/or modified CDS sequence (wt) from hemagglutinin__InfluenzaA__AHG96120

SEQ ID NO: 42984 - RNA, 1698 nt, Artificial Sequence; identical to SEQ ID NO: 39805
  derived and/or modified CDS sequence (wt) from hemagglutinin__InfluenzaA__AHG96132

SEQ ID NO: 42985 - RNA, 1698 nt, Artificial Sequence
  derived and/or modified CDS sequence (wt) from hemagglutinin__InfluenzaA__AHG96144
augaaaguaaaacuacugguccuguuaugcacauuuacagcuacauaugcagacacaauauguauaggcuaccaugcuaacaacucgaccgacacuguugacacaguacuugaaaagaaugugacagugacacacucugucaaccugcuugagaacagucacaauggaaaacuaugucuauuaaaaggaauagccccacuacaauuggguaauugcagcguugccggguggaucuuaggaaacccagaaugcgaauuacugauuuccaaggagucaugguccuacauuguagaaaaaccaaauccugagaauggaacauguuacccagggcauuucgcugacuaugaggaacugagggagcaauugaguucaguaucuucauuugagagguucgaaauauuccccaaagaaagcucauggcccaaccacaccguaaccggagugucagcaucaugcucccauaauggggaaagcaguuuuuacagaaauuugcuauggcugacggggaagaaugguuuguacccaaaccugagcaaguccuaugcaaacaacaaagaaaaagaaguccuuguacuaugggguguucaucacccgccaaacauagguguccaaaaggcccucuaucauacagaaaaugcuuaugucucuguagugucuucacauuauagcagaaaauucaccccagaaauagccaaaagacccaaaguaagagaucaagaaggaagaaucaauuacuacuggacucugcuugaacccggggauacaauaauauuugaggcaaauggaaaucuaauagcgccaagauaugcuuucgcacugaguagaggcuuuggaucaggaaucaucaacucaaaugcaccaauggauaaaugugaugcgaagugccaaacaccucagggagcuauaaacagcagucuuccuuuccagaacguacacccagucacaauaggagaguguccaaaguaugucaggagugcaaaauuaaggaugguuacaggacuaaggaacaucccauccauucaauccagagguuuguuuggagccauugccgguuucauugaagggggguggacuggaaugguagaugguugguaugguuaucaucaucagaaugagcaaggaucuggcuaugcugcagaucaaaaaagcacacaaaaugccauuaaugggauuacaaacaaggugaauucuguaauugagaaaaugaacacucaauucacagcagugggcaaagaauucaacaaauuggaaagaaggauggaaaacuugaauaaaaaaguugaugauggguuuauagacauuuggacauauaaugcagaacuguugguucuacuggaaaaugaaaggacuuuggauuuccaugacuccaaugugaagaaucuguaugagaaaguaaaaagccaguuaaagaauaaugcuaaagaaauaggaaauggguguuuugaauucuaucacaaguguaacgaugaaugcauggagaguguaaagaauggaacuuaugacuauccaaaauauuccgaagaaucaaaguuaaacagggagaaaauugauggagugaaauuggaaucaaugggagucuaucagauucuggcgaucuacucaacagucgccaguucucugguucuuuuggucucccugggggcaaucagcuucuggauguguuccaaugggucuuuacaguguagaauaugcaucuaa

SEQ ID NO: 42986 - RNA, 1698 nt, Artificial Sequence; identical to SEQ ID NO: 39805
  derived and/or modified CDS sequence (wt) from hemagglutinin__InfluenzaA__AHG96156

SEQ ID NO: 42987 - RNA, 1698 nt, Artificial Sequence; identical to SEQ ID NO: 39805
  derived and/or modified CDS sequence (wt) from hemagglutinin__InfluenzaA__AHG96168

SEQ ID NO: 42988 - RNA, 1698 nt, Artificial Sequence; identical to SEQ ID NO: 39805
  derived and/or modified CDS sequence (wt) from hemagglutinin__InfluenzaA__AHG96180

SEQ ID NO: 42989 - RNA, 1698 nt, Artificial Sequence; identical to SEQ ID NO: 39805
  derived and/or modified CDS sequence (wt) from hemagglutinin__InfluenzaA__AHG96192

SEQ ID NO: 42990 - RNA, 1698 nt, Artificial Sequence; identical to SEQ ID NO: 39805
  derived and/or modified CDS sequence (wt) from hemagglutinin__InfluenzaA__AHG96204

SEQ ID NO: 42991 - RNA, 1698 nt, Artificial Sequence; identical to SEQ ID NO: 39805
  derived and/or modified CDS sequence (wt) from hemagglutinin__InfluenzaA__AHG96216

SEQ ID NO: 42992 - RNA, 1698 nt, Artificial Sequence
  derived and/or modified CDS sequence (wt) from hemagglutinin__InfluenzaA__AHG96228
augaaaguaaaacuacugguccuguuaugcacauuuacagcuacauaugcagacacaauauguauaggcuaccaugcuaacaacucgaccgacacuguugacacaguacuugaaaagaaugugacagugacacacucugucaaccugcuugagaacagucacaauggaaaacuaugucuauuaaaaggaauagccccacuacaauuggguaauugcagcguugccggguggaucuuaggaaacccagaaugcgaauuacugauuuccaaggagucaugguccuacauuguagaaaaaccaaauccugagaauggaacauguuacccagggcauuucgcugacuaugaggaacugagggagcaauugaguucaguaucuucauuugagagguucgaaauauuccccaaagaaagcucauggcccaaccacaccguaaccggagugucagcaucaugcucccauaauggggaaagcaguuuuuacagaaauuugcuauggcugacggggaagaaugguuuguacccaaaccuaagcaaguccuaugcaaacaacaaagaaaaagaaguccuuguacuaugggguguucaucacccgccaaacauagguaaccaaaaggcccucuaucauacagaaaaugcuuaugucucuguagugucuucacauuauagcagaaaauucaccccagaaauagccaaaagacccaaaguaagagaucaagaaggaagaaucaauuacuacuggacucugcuugaacccggggauacaauaauauuugaggcaaauggaaaucuaauagcgccaagauaugcuuucgcacugaguagaggcuuuggaucaggaaucaucaacucaaaugcaccaauggauaaaugugaugcgaagugccaaacaccucagggagcuauaaacagcagucuuccuuuccagaacguacacccagucacaauaggagaguguccaaaguaugucaggagugcaaaauuaaggaugguuacaggacuaaggaacaucccauccauucaauccagagguuuguuuggagccauugccgguuucauugaagggggguggacuggaaugguagaugguugguaugguuaucaucaucagaaugagcaaggaucuggcuaugcugcagaucaaaaaagcacacaaaaugccauuaaugggauuacaaacaaggugaauucuguaauugagaaaaugaacacucaauucacagcagugggcaaagaauucaacaaauuggaaagaaggauggaaaacuugaauaaaaaaguugaugauggguuuauagacauuuggacauauaaugcagaacuguugguucuacuggaaaaugaaaggacuuuggauuuccaugacuccaaugugaagaaucuguaugagaaaguaaaaagccaguuaaagaauaaugcuaaagaaauaggaaauggguguuuugaauucuaucacaaguguaacgaugaaugcauggagaguguaaagaauggaacuuaugacuauccaaaauauuccgaagaaucaaaguuaaacagggagaaaauugauggagugaaauuggaaucaaugggagucuaucagauucuggcgaucuacucaacagucgccaguucucugguucuuuuggucucccugggggcaaucagcuucuggauguguuccaaugggucuuuacaguguagaauaugcaucuaa

SEQ ID NO: 42993 - RNA, 1698 nt, Artificial Sequence; identical to SEQ ID NO: 42985
  derived and/or modified CDS sequence (wt) from hemagglutinin__InfluenzaA__AHG96240

SEQ ID NO: 42994 - RNA, 1698 nt, Artificial Sequence; identical to SEQ ID NO: 39805
  derived and/or modified CDS sequence (wt) from hemagglutinin__InfluenzaA__AHG96252

SEQ ID NO: 42995 - RNA, 1698 nt, Artificial Sequence; identical to SEQ ID NO: 39805
  derived and/or modified CDS sequence (wt) from hemagglutinin__InfluenzaA__AHG96264

SEQ ID NO: 42996 - RNA, 1698 nt, Artificial Sequence; identical to SEQ ID NO: 39805
  derived and/or modified CDS sequence (wt) from hemagglutinin__InfluenzaA__AHG96276

SEQ ID NO: 42997 - RNA, 1698 nt, Artificial Sequence; identical to SEQ ID NO: 39805
  derived and/or modified CDS sequence (wt) from hemagglutinin__InfluenzaA__AHG96288

SEQ ID NO: 42998 - RNA, 1698 nt, Artificial Sequence; identical to SEQ ID NO: 39805
  derived and/or modified CDS sequence (wt) from hemagglutinin__InfluenzaA__AHG96300

SEQ ID NO: 42999 - RNA, 1701 nt, Artificial Sequence
  derived and/or modified CDS sequence (wt) from hemagglutinin__InfluenzaA__AHG96312
augaaggcaauacuaguaguucugcuauauacauuugcaaccgcaaaugcagacacauuauguauagguuaucaugcgaacaauucaacagacacuguagacacaguacuagaaaagaauguaacaguaacacacucuguuaaccuucuagaagacaagcauaacgggaaacuaugcaaacuaagagggguagucccauugcauuuggguaaauguaacauugcuggcuggauccugggaaauccagagugugaaucacucuccacagcaaguucaugguccuacauuguggaaacaucuaguucagacaauggaacguguuacccaggagauuucaucaauuaugaggagcuaagagagcaauugagcucagugucaucauuugaaagguuugagauauuccccaagacaaguucauggcccaaucaugacucgaacaaagguguaacggcagcauguccucacgcuggagcaaaaagcuucuacaaaaauuuaauauggcuaguuaaaaaagggaauucauacccaaagcucagccaauccuacauuaaugauaaagggaaagaaguccucgugcuguggggcauucaccacccaucuacuacugcugaccaacaaagucucuaucagaaugcagaugcauauguuuuuguggggacaucaagauacagcaagaaguucaagccggaaauagcaauaagacccaaagugagggaucaagaagggagaaugaacuauuacuggacacuaguagagccgggagacaaaauaacauucgaagcaacuggaaaucuagugguaccgagauaugcauucacaauggaaagaaaugcuggaucugguauuaucauuucagauacaccaguccacgauugcaauacaacuugucagacacccgagggugcuauaaacaccagccucccauuucagaauauacauccgaucacaauuggaaaauguccaaaguauguaaaaagcacaaaauugagacuggccacaggauugaggaaugucccgucuauucaaucuagaggccuauucggggccauugccggcuucauugaagggggguggacagggaugguagauggaugguacgguuaucaccaucaaaaugagcaggggucaggauaugcagccgaccugaagagcacacaaaaugccauugacaagauuacuaacaaaguaaauucuguuauugaaaagaugaauacacaguucacagcaguggguaaagaguucaaccaccuggaaaaaagaauagagaauuuaaauaaaaaaguugaugaugguuuccuggacauuuggacuuacaaugccgaacuguugguucuauuggaaaaugaaagaacuuuggacuaccacgauucaaaugugaagaacuuguaugaaaagguaagaaaccaguuaaaaaacaaugccaaggaaauuggaaacggcugcuuugaauuuuaccacaaaugcgauaacacgugcauggaaagugucaaaaaugggacuuaugacuacccaaaauacucagaggaagcuaaauuaaacagagaaaaaauagaugggguaaaacuggaaucaacaaggauuuaccagauuuuggcgaucuauucaacugucgccaguucauugguacugguagucucccugggggcaaucagcuucuggaugugcucuaaugggucucuacaguguagaauauguauuuaa

SEQ ID NO: 43000 - RNA, 1701 nt, Artificial Sequence
  derived and/or modified CDS sequence (wt) from hemagglutinin__InfluenzaA__AHG96313
augaaggcaauacuaguaguucugcuauauacauuugcaaccgcaaaugcagacacauuauguauagguuaucaugcgaacaauucaacagacacuguagacacaguacuagaaaagaauguaacaguaacacacucuguuaaccuucuagaagacaagcauaacgggaaacuaugcaaacuaagagggguagccccauugcauuuggguaaauguaacauugcuggcuggauccugggaaauccagagugugaaucacucuccacagcaaguucaugguccuacauuguggaaacaucuaguucagacaauggaacguguuacccaggagauuucaucaauuaugaggagcuaagagagcaauugagcucagugucaucauuugaaagguuugagauauuccccaagacaaguucauggcccaaucaugacucgaacaaagguguaacggcagcauguccucacgcuggagcaaaaagcuucuacaaaaauuuaauauggcuaguuaaaaaaggaaauucauacccaaagcucagccaauccuacauuaaugauaaagggaaagaaguccucgugcuguggggcauucaccauccaucuacuacugcugaccaacaaagucucuaccagaaugcagaugcauauguuuuuguggggacaucaagauacagcaagaaguucaagccggaaauagcaauaagacccaaagugagggaucaagaagggagaaugaacuauuacuggacacuaguagagccgggagacaaaauaacauucgaagcaacuggaaaucuagugguaccgagauaugcauucacaauggaaagaaaugcuggaucugguauuaucauuucagauacaccaguccacgauugcaauacaacuugucagacacccgagggugcuauaaacaccagccucccauuucagaauauacauccgaucacaauuggaaaauguccaaaguauguaaaaagcacaaaauugagacuggccacaggauugaggaaugucccgucuauucaaucuagaggccuauucggggccauugccggcuuuauugaagggggguggacagggaugguagauggaugguacgguuaucaccaucaaaaugagcaggggucaggauaugcagccgaccugaagagcacacaaaaugccauugacaagauuacuaacaaaguaaauucuguuauugaaaagaugaauacacaguucacagcaguggguaaagaguucaaccaccuggaaaaaagaauagagaauuuaaauaaaaaaguugaugaugguuuccuggacauuuggacuuacaaugccgaacuguugguucuauuggaaaaugaaagaacuuuggacuaccacgauucaaaugugaagaacuuguaugaaaagguaagaaaccaguuaaaaaacaaugccaaggaaauuggaaacggcugcuuugaauuuuaccacaaaugcgauaacacgugcauggaaagugucaaaaaugggacuuaugacuacccaaaauacucagaggaagcaaaauuaaacagagaaaaaauagaugggguaaagcuggaaucaacaaggauuuaccagauuuuggcgaucuauucaacugucgccaguucauugguacugguagucucccugggggcaaucagcuucuggaugugcucuaaugggucucuacaguguagaauauguauuuaa

SEQ ID NO: 43001 - RNA, 1701 nt, Artificial Sequence
  derived and/or modified CDS sequence (wt) from hemagglutinin__InfluenzaA__AHG96314
augaaggcaauacuaguaguucugcuauauacauuugcaaccgcaaaugcagacacauuauguauagguuaucaugcgaacaauucaacagacacuguagacacaguacuagaaaagaauguaacaguaacacacucuguuaaccuucuagaagacaagcauaacgggaaacuaugcaaacuaagagggguagccccauugcauuuggguaaauguaacauugcuggcuggauccugggaaauccagagugugaaucacucuccacagcaaguucaugguccuacauuguggaaacaucuaguucagacaauggaacguguuacccaggagauuucaucaauuaugaggagcuaagagagcaauugagcucagugucaucauuugaaagguuugagauauuccccaagacaaguucauggcccaaucaugacucgaacaaagguguaacggcagcauguccucacgcuggagcaaaaagcuucuacaaaaauuuaauauggcuaguuaaaaaaggaaauucauacccaaagcucagccaauccuacauuaaugauaaagggaaagaaguccucgugcuguggggcauucaccacccaucuacuacugcugaccaacaaagucucuaucagaaugcagaugcauauguuuuuguggggacaucaagauacagcaagaaguucaagccggaaauagcaauaagacccaaagugagggaucaagaagggagaaugaacuauuacuggacacuaguagagccgggagacaaaauaacauucgaagcaacuggaaaucuagugguaccgagauaugcauucacaauggaaagaaaugcuggaucugguauuaucauuucagauacaccaguccacgauugcaauacaacuugucagacacccgagggugcuauaaacacuagccucccauuucagaauauacauccgaucacaauuggaaaauguccaaaguauguaaaaagcacaaaauugagacuggccacaggauugaggaaugucccgucuauucaaucuagaggccuauucggggccauugccggcuucauugaagggggguggacagggaugguagauggaugguacgguuaucaccaucaaaaugagcaggggucaggauaugcagccgaccugaagagcacacaaaaugccauugacaagauuacuaacaaaguaaauucuguuauugaaaagaugaauacacaguacacagcaguggguaaagaguucaaccaccuggaaaaaagaauagagaauuuaaauaaaaaaguugaugaugguuuccuggacauuuggacuuacaaugccgaacuguugguucuauuggaaaaugaaagaacuuuggacuaccacgauucaaaugugaagaacuuguaugaaaagguaagaaaccaguuaaaaaacaaugccaaggaaauuggaaacggcugcuuugaauuuuaccacaaaugcgauaacacgugcauggaaagugucaaaaaugggacuuaugacuacccaaaauacucagaggaagcaaaauuaaacagagaaaaaauagaugggguaaagcuggaaucaacaaggauuuaccagauuuuggcgaucuauucaacugucgccaguucauugguacugguagucucccugggggcaaucagcuucuggaugugcucuaaugggucucuacaguguagaauauguauuuaa

SEQ ID NO: 43002 - RNA, 1701 nt, Artificial Sequence
  derived and/or modified CDS sequence (wt) from hemagglutinin__InfluenzaA__AHG96315
augaaggcaauacuaguaguucugcuauacacauuugcaaccgcaaaugcagacacauuauguauagguuaucaugcgaacaauucaacagacacuguagacacaguacuagaaaagaauguaacaguaacacacucuguuaaccuucuagaagacaagcauaacgggaaacuaugcaaacuaagagggguagccccauugcauuuggguaaauguaacauugcuggcuggauccugggaaauccagagugugaaucacucuccacagcaaguucaugguccuacauuguggaaacaucuaguucagacaauggaacguguuacccaggagauuucaucaauuaugaggagcuaagagagcaauugagcucagugucaucauuugaaagauuugagauauuccccaagacaaguucauggcccaaucaugacucgaacaaagguguaacggcagcauguccucacgcuggagcaaaaagcuucuacaaaaauuuaauauggcuaguuaaaaaaggaaauucauacccaaagcucagccaauccuacauuaaugauaaagggaaagaaguccucgugcuguggggcauucaccauccaucuacuacugcugaccaacaaagucucuaucagaaugcagaugcauauguuuuuguggggacaucaagauacagcaagaaguucaagccggaaauagcaauaagacccaaagugagggaucaagaagggagaaugaacuauuacuggacacuaguagagccgggagacaaaauaacauucgaagcaacuggaaaucuagugguaccgagauaugcauucacaauggaaagaaaugcuggaucugguauuaucauuucagauacaccaguccacgauugcaauacaacuugucagacacccgagggugcuauaaacaccagccucccauuucagaauauacauccgaucacaauuggaaaauguccaaaguauguaaaaagcacaaaauugagacuggccacaggauugaggaaugucccaucuauucaaucuagaggccuauucggggccauugccggcuucauugaagggggguggacagggaugguagauggaugguacgguuaucaccaucaaaaugagcaggggucaggauaugcagccgaccugaagagcacacaaaaugccauugacaaaauuacuaacaaaguaaauucuguuauugaaaagaugaauacacaguucacagcaguggguaaagaguucaaccacuuggaaaaaagaauagagaauuuaaauaaaaaaguugaugaugguuuccuggacauuuggacuuacaaugccgaacugcugguucuauuggaaaaugaaagaacuuuggacuaccacgauucaaaugugaagaacuuguaugaaaagguaagaaaccaguuaaaaaacaaugccaaggaaauuggaaacggcugcuuugaauuuuaccacaaaugcgauaacacgugcauggaaagugucaaaaaugggacuuaugacuacccaaaauacucagaggaagcaaaauuaaacagagaaaaaauagaugggguaaagcuggaaucaacaaggauuuaccagauuuuggcgaucuauucaacugucgccaguucauugguacugguagucucccugggggcaaucagcuucuggaugugcucuaaugggucucuacaguguagaauauguauuuaa

SEQ ID NO: 43003 - RNA, 1701 nt, Artificial Sequence
  derived and/or modified CDS sequence (wt) from hemagglutinin__InfluenzaA__AHG96316
augaaggcaauacuaguaguucugcuauauacauuugcaaccgcaaaugcagacacauuauguauagguuaucaugcgaacaauucaacagacacuguagacacaguacuagaaaagaauguaacaguaacacacucuguuaaccuucuagaagacaagcauaacgggaaacuaugcaaacuaagagggguagccccauugcauuuggguaaauguaacauugcuggcuggauccugggaaauccagagugugaaucacucuccacagcaaguucaugguccuacauuguggaaacaucuaguucagacaauggaacguguuacccaggagauuucaucaauuaugaggagcuaagagagcaauugagcucagugucaucauuugaaagguuugagauauuccccaagacaaguucauggcccaaucaugacucgaacaaagguguaacggcagcauguccucacgcuggagcaaaaagcuucuacaaaaauuuaauauggcuaguuaaaaaaggaaauucauacccaaagcucagccaauccuacauuaaugauaaagggaaagaaguccucgugcuguggggcauucaccacccaucuacuacugcugaccaacaaagucucuaucagaaugcagaugcauauguuuuuguggggacaucaagauacagcaagaaguucaagccggaaauagcaauaagacccaaagugagggaucaagaagggagaaugaacuauuacuggacacuaguagagccgggagacaaaauaacauucgaagcaacuggaaaucuagugguaccgagauaugcauucacaauggaaagaaaugcuggaucugguauuaucauuucagauacaccaguccacgauugcaauacaacuugucagacacccgagggugcuauaaacaccagccucccauuucagaauauacauccgaucacaauuggaaaauguccaaaguauguaaaaagcacaaaauugagacuggccacaggauugaggaaugucccgucuauucaaucuagaggccuauucggggccauagccggcuucauugaaggaggguggacagggaugguagauggaugguacgguuaucaccaucaaaaugagcaggggucaggauaugcagccgaccugaagagcacacaaaaugccauugacaagauuacuaacaaaguaaauucuguuauugaaaagaugaauacacaguucacagcaguggguaaagaguucaaccaccuggaaaaaagaauagagaauuuaaauaaaaaaguugaugaugguuuccuggacauuuggacuuacaaugccgaacuguugguucuauuggaaaaugaaagaacuuuggacuaccacgauucaaaugugaagaacuuguaugaaaagguaagaaaccaguuaaaaaacaaugccaaggaaauuggaaacggcugcuuugaauuuuaccacaaaugcgauaacacgugcauggaaagugucaaaaaugggacuuaugacuacccaaaauacucagaggaagcaaaauuaaacagagaaaaaauagaugggguaaagcuggaaucaacaaggauuuaccagauuuuggcgaucuauucaacugucgccaguucauugguacugguagucucccugggggcaaucagcuucuggaugugcucuaaugggucucuacaguguagaauauguauuuaa

SEQ ID NO: 43004 - RNA, 1701 nt, Artificial Sequence
  derived and/or modified CDS sequence (wt) from hemagglutinin__InfluenzaA__AHG96317
augaaggcaauacuaguaguucugcuauauacauuugcaaccgcaaaugcagacacauuauguauagguuaucaugcgaacaauucaacagacacuguagacacaguacuagaaaagaauguaacaguaacacacucuguuaaccuucuagaagacaagcauaacgggaaacuaugcaaacuaagagggguagccccauugcauuuggguaaauguaacauugcuggcuggauccugggaaauccagagugugaaucacucuccacagcaaguucaugguccuacauuguggaaacaucuaguucagacaauggaacguguuacccaggagauuucaucaauuaugaggagcuaagagagcaauugagcucagugucaucauuugaaagguuugagauauuccccaagacaaguucauggcccaaucaugacucgaacaaagguguaacggcagcauguccucacgcuggagcaaaaagcuucuacaaaaauuuaauauggcuaguuaaaaaaggaaauucauacccaaagcucagccaauccuacauuaaugauaaagggaaagaaguccucgugcuguggggcauucaccauccaucuacuacugcugaccaacaaagucuuuaucagaaugcagaugcauauguuuuuguggggacaucaagauacagcaagaaguucaagccggaaauagcaauaagacccaaagugagggaucaagaagggagaaugaacuauuacuggacacuaguagagccgggagacaaaauaacauucgaagcaacuggaaaucuagugguaccgagauaugcauucacaauggaaagaaaugcuggaucugguauuaucauuucagauacaccaguccacgauugcaauacaacuugucagacacccgagggugcuauaaacaccagccucccauuucagaauauacauccgaucacaauuggaaaauguccaaaguauguaaaaagcacaaaauugagacuggccacaggauugaggaaugucccgucuauucaaucuagaggccuauucggggccauugccggcuucauugaagggggguggacagggaugguagauggaugguacgguuaucaccaucaaaaugagcaggggucaggauaugcagccgaccugaagagcacacaaaaugccauugacaagauuacuaauaaaguaaauucuguuauugaaaagaugaauacacaguucacagcaguggguaaagaguucaaccaccuggaaaaaagaauagagaauuuaaauaaaaaaguugaugaugguuuccuggacauuuggacuuacaaugccgaacuguugguucuauuggaaaaugaaagaacuuuggacuaccacgauucaaaugugaagaacuuguaugaaaagguaagaaaccaguuaaaaaacaaugccaaggaaauuggaaacggcugcuuugaauuuuaccacaaaugcgauaacacgugcauggaaagugucaaaaaugggacuuaugacuacccaaaauacucagaggaagcaaaauuaaacagagaaaaaauagaugggguaaagcuggaaucaacaaggauuuaccagauuuuggcgaucuauucaacugucgccaguucauugguacugguagucucccugggggcaaucagcuucuggaugugcucuaaugggucucuacaguguagaauauguauuuaa

SEQ ID NO: 43005 - RNA, 1701 nt, Artificial Sequence
  derived and/or modified CDS sequence (wt) from hemagglutinin__InfluenzaA__AHG96320
augaaggcaauacuaguaguucugcuauauacauuugcaaccgcaaaugcagacacauuauguauagguuaucaugcgaacaauucaacagacacuguagacacaguacuagaaaagaauguaacaguaacacacucuguuaaccuucuagaagacaagcauaacgggaaacuaugcaaacuaagagggguagccccauugcauuuggguaaauguaacauugcuggcuggauccugggaaauccagagugugaaucacucuccacagcaaguucaugguccuacauuguggaaacaucuaguucagacaauggaacguguuacccaggagauuucaucaauuaugaggagcuaagagagcaauugagcucagugucaucauuugaaagguuugagauauuccccaagacaaguucauggcccaaucaugacucgaacaaagguguaacggcagcauguccucacgcuggagcaaaaagcuucuacaaaaauuuaauauggcuaguuaaaaaaggaaauucauacccaaagcucagccaauccuacauuaaugauaaagggaaagaaguccucgugcuguggggcauucaccacccaucuacuacugcugaccaacaaagucucuaucagaaugcagaugcauauguuuuuguggggacaucaagauacagcaagaaguucaagccggaaauagcaauaagacccaaagugagggaucaagaagggagaaugaacuauuacuggacacuaguagagccgggagacaaaauaacauucgaagcaacuggaaaucuagugguaccgagauaugcauucacaauggaaagaaaugcuggaucugguauuaucauuucagauacaccaguccacgauugcaauacaacuugucagacacccgagggugcuauaaacaccagccucccauuucagaauauacauccgaucacaauuggaaaauguccaaaguauguaaaaagcacaaaauugagacuggccacaggauugaggaaugucccgucuauucaaucuagaggccuauucggggccauugccggcuucauugaaggaggguggacagggaugguagauggaugguacgguuaucaccaucaaaaugagcaggggucaggauaugcagccgaccugaagagcacacaaaaugccauugacaagauuacuaacaaaguaaauucuguuauugaaaagaugaauacacaguucacagcaguggguaaagaguucaaccaccuggaaaaaagaauagagaauuuaaauaaaaaaguugaugaugguuuccuggacauuuggacuuacaaugccgaacuguugguucuauuggaaaaugaaagaacuuuggacuaccacgauucaaaugugaagaacuuguaugaaaagguaagaaaccaguuaaaaaacaaugccaaggaaauuggaaacggcugcuuugaauuuuaccacaaaugcgauaacacgugcauggaaagugucaaaaaugggacuuaugacuacccaaaauacucagaggaagcaaaauuaaacagagaaaaaauagaugggguaaagcuggaaucaacaaggauuuaccagauuuuggcgaucuauucaacugucgccaguucauugguacugguagucucccugggggcaaucagcuucuggaugugcucuaaugggucucuacaguguagaauauguauuuaa

SEQ ID NO: 43006 - RNA, 1701 nt, Artificial Sequence
  derived and/or modified CDS sequence (wt) from hemagglutinin__InfluenzaA__AHG96321
augaaggcaauacuaguaguucugcuauacacauuugcaaccgcaaaugcagacacauuauguauagguuaucaugcgaacaauucaacagacacuguagacacaguacuagaaaagaauguaacaguaacacacucuguuaaccuucuagaagacaagcauaacgggaaacuaugcaaacuaagagggguagccccauugcauuuggguaaauguaacauugcuggcuggauccugggaaauccagagugugaaucacucuccacagcaaguucaugguccuacauuguggaaacaucuaguucagacaauggaacguguuacccaggagauuucaucaauuaugaggagcuaagagagcaauugagcucagugucaucauuugaaagauuugagauauuccccaagacaaguucauggcccaaucaugacucgaacaaagguguaacggcagcauguccucacgcuggagcaaaaagcuucuacaaaaauuuaauauggcuaguuaaaaaaggaaauucauacccaaagcucagccaauccuacauuaaugauaaagggaaagaaguccucgugcuguggggcauucaccauccaucuacuacugcugaccaacaaagucucuaucagaaugcagaugcauauguuuuuguggggacaucaagauacagcaagaaguucaagccggaaauagcaauaagacccaaagugagggaucaagaagggagaaugaacuauuacuggacacuaguagagccgggagacaaaauaacauucgaagcaacuggaaaucuagugguaccgagauaugcauucacaauggaaagaaaugcuggaucugguauuaucauuucagauacaccaguccacgauugcaauacaacuugucagacacccgagggugcuauaaacaccagccucccauuucagaauauacauccgaucacaauuggaaaauguccaaaguauguaaaaagcacaaaauugagacuggcaacaggauugaggaaugucccaucuauucaaucuagaggccuauucggggccauugccggcuucauugaagggggguggacagggaugguagauggaugguacgguuaucaccaucaaaaugagcaggggucaggauaugcagccgaccugaagagcacacaaaaugccauugacaaaauuacuaacaaaguaaauucuguuauugaaaagaugaauacacaguucacagcaguggguaaagaguucaaccaccuggaaaaaagaauagagaauuuaaauaaaaaaguugaugauggcuuccuggacauuuggacuuacaaugccgaacugcugguucuauuggaaaaugaaagaacuuuggacuaccacgauucaaaugugaagaacuuguaugaaaagguaagaaaccaguuaaaaaacaaugccaaggaaauuggaaacggcugcuuugaauuuuaccacaaaugcgauaacacgugcauggaaagugucaaaaaugggacuuaugacuacccaaaauacucagaggaagcaaaauuaaacagagaaaaaauagaugggguaaagcuggaaucaacaaggauuuaccagauuuuggcgaucuauucaacugucgccaguucauugguacugguagucucccugggggcaaucagcuucuggaugugcucuaaugggucucuacaguguagaauauguauuuaa

SEQ ID NO: 43007 - RNA, 1701 nt, Artificial Sequence
  derived and/or modified CDS sequence (wt) from hemagglutinin__InfluenzaA__AHG96322
augaaggcaauacuaguaguucugcuauauacauuugcaaccgcaaaugcagacacauuauguauagguuaucaugcaaacaauucaacagacacuguagacacaguacuagaaaagaauguaacaguaacacacucuguuaaccuucuagaagacaagcauaacgggaaacuaugcaaacuaagagggguagccccauugcauuuggguaaauguaacauugcuggcuggauccugggaaauccagagugugaaucacucuccacagcaaguucaugguccuacauuguggaaacaucuaguucagacaauggaacguguuacccaggagauuucaucaauuaugaggagcuaagagagcaauugagcucagugucaucauuugaaagguuugagauauuccccaaaacaaguucauggcccaaucaugacucgaacaaagguguaacggcagcauguccucacgcuggagcaaaaagcuucuacaaaaauuuaauauggcuaguuaaaaaaggaaauucauacccaaagcucagccaauccuacauuaaugauaaagggaaagaaguccucgugcuguggggcauucaccauccaucuacuacugcugaccaacaaagucucuaucagaaugcagaugcauauguuuuuguggggacaucaagauacagcaagaaguucaagccggaaauagcaauaagacccaaagugagggaucaagaagggagaaugaacuauuacuggacacuaguagagccgggagacaaaauaacauucgaagcaacuggaaaucuagugguaccgagauaugcauucacaauggaaagaaaugcuggaucugguauuaucauuucagauacaccaguccacgauugcaauacaacuugucagacacccgagggugcuauaaacaccagccucccauuucagaauauacauccgaucacaauuggaaaauguccaaaguauguaaaaagcacaaaauugagacuggccacaggauugaggaaugucccgucuauucaaucuagaggccuauucggggccauugccggcuucauugaagggggguggacagggaugguagauggaugguacgguuaucaccaucaaaaugagcaggggucaggauaugcagccgaccugaagagcacacaaaaugccauugacaagauuacuaacaaaguaaacucuguuauugaaaagaugaauacacaguucacagcaguggguaaagaguucaaccaccuggaaaaaagaauagagaauuuaaauaaaaaaguugaugaugguuuccuggacauuuggacuuacaaugccgaacuguugguucuauuggaaaaugaaagaacuuuggacuaccaugauucaaaugugaagaacuuguaugaaaagguaagaaaccaguuaaaaaacaaugccaaggaaauuggaaacggcugcuuugaauuuuaccacaaaugcgauaacacgugcauggaaagugucaaaaaugggacuuaugacuacccaaaauacucagaggaagcaaaauuaaacagagaaaaaauagaugggguaaagcuggaaucaacaaggauuuaccagauuuuggcgaucuauucaacugucgccaguucauuggugcugguagucucccugggggcaaucagcuucuggaugugcucuaaugggucucuacaguguagaauauguauuuaa

SEQ ID NO: 43008 - RNA, 1701 nt, Artificial Sequence; identical to SEQ ID NO: 43005
  derived and/or modified CDS sequence (wt) from hemagglutinin__InfluenzaA__AHG96324

SEQ ID NO: 43009 - RNA, 1701 nt, Artificial Sequence
  derived and/or modified CDS sequence (wt) from hemagglutinin__InfluenzaA__AHG96325
augaaggcaauacuaguaguucugcuauauacauuugcaaccgcaaaugcagacacauuauguauagguuaucaugcgaacaauucaacagacacuguagacacaguacuagaaaagaauguaacaguaacacacucuguuaaccuucuagaagacaagcauaacgggaaacuaugcaaacuaagagggguagccccauugcauuuggguaaauguaacauugcuggcuggauccugggaaauccagagugugaaucacucuccacagcaaguucaugguccuacauuguggaaacaucuaguucagacaauggaacguguuacccaggagauuucaucaauuaugaggagcuaagagagcaauugagcucagugucaucauuugaaagguuugagauauuccccaagacaaguucauggcccaaucaugacucgaacaaagguguaacggcagcauguccucacgcuggagcaaaaagcuucuacaaaaauuuaauauggcuaguuaaaaaaggaaauucauacccaaagcucagccaauccuacauuaaugauaaagggaaagaaguccucgugcuguggggcauucaccacccaucuacuacugcugaccaacaaagucucuaucagaaugcagaugcauauguuuuuguggggacaucaagauacagcaagaaguucaagccggaaauagcaauaagacccaaagugagggaucaagaagggagaaugaacuauuacuggacacuaguagagccgggagacaaaauaacauucgaagcaacuggaaaucuagugguaccgagauaugcauucacaauggaaagaaaugcuggaucugguauuaucauuucagauacaccaguccacgauugcaauacaacuugucagacacccgagggugcuauaaacaccagccucccauuucagaauauacauccgaucacaauuggaaaauguccaaaguauguaaaaagcacaaaauugagacuggccacaggauugaggaaugucccgucuauucaaucuagaggccuauucggggccauugccggcuucauugaaggaggguggacagggaugguagauggaugguacgguuaucaccaucaaaacgagcaggggucaggauaugcagccgaccugaagagcacacaaaaugccauugacaagauuacuaacaaaguaaauucuguuauugaaaagaugaauacacaguucacagcaguggguaaagaguucaaccaccuggaaaaaagaauagagaauuuaaauaaaaaaguugaugaugguuuccuggacauuuggacuuacaaugccgaacuguugguucuauuggaaaaugaaagaacuuuggacuaccacgauucaaaugugaagaacuuguaugaaaagguaagaaaccaguuaaaaaacaaugccaaggaaauuggaaauggcugcuuugaauuuuaccacaaaugcgauaacacgugcauggaaagugucaaaaaugggacuuaugacuacccaaaauacucagaggaagcaaaauuaaacagagaaaaaauagaugggguaaaguuggaaucaacaaggauuuaccagauuuuggcgaucuauucaacugucgccaguucauugguacugguagucucccugggggcaaucagcuucuggaugugcucuaaugggucucuacaguguagaauauguauuuaa

SEQ ID NO: 43010 - RNA, 1701 nt, Artificial Sequence
  derived and/or modified CDS sequence (wt) from hemagglutinin__InfluenzaA__AHG96326
augaaggcaauacuaguaguucugcuauauacauuugcaaccgcaaaugcagacacauuauguauagguuaucaugcgaacaauucaacagacacuguagacacaguacuagaaaagaauguaacaguaacacacucuguuaaccuucuagaagacaagcauaacgggaaacuaugcaaacuaagagggguagccccauugcauuuggguaaauguaacauugcuggcuggauccugggaaauccagagugugaaucacucuccacagcaaguucaugguccuacauuguggaaacaucuaauucagacaauggaacguguuacccaggagauuucaucaauuaugaggagcuaagagagcaauugagcucagugucaucauuugaaagguuugagauauuccccaagacaaguucauggcccaaucaugacucgaacaaagguguaacggcagcauguccucacgcuggagcaaaaagcuucuacaaaaauuuaauauggcuaguuaaaaaaggaaauucauacccaaagcucagccaauccuacauuaaugauaaagggaaagaaguccucgugcuguggggcauucaccacccaucuacuacugcugaccaacaaagucucuaucagaaugcagaugcauauguuuuuguggggacaucaagauacagcaagaaguucaagccggaaauagcaauaagacccaaagugagggaucaggaagggagaaugaacuauuacuggacacuaguagagccgggagacaaaauaacauucgaagcaacuggaaaucuagugguaccgagauaugcauucacaauggaaagaaaugcuggaucugguauuaucauuucagauacaccaguccacgauugcaauacaacuugucagacacccgagggugcuauaaacaccagccucccauuucagaauauacauccgaucacaauuggaaaauguccaaaguauguaaaaagcacaaaauugagacuggccacaggauugaggaaugucccgucuauucaaucuagaggccuauucggggccauugccggcuucauugaaggaggguggacagggaugguagauggaugguacgguuaucaccaucaaaaugagcaggggucaggauaugcagccgaccugaagagcacacaaaaugccauugacaagauuacuaacaaaguaaauucuguuauugaaaagaugaauacacaguucacagcaguggguaaagaguucaaccaccuggaaaaaagaauagagaauuuaaauaaaaaaguugaugaugguuuccuggacauuuggacuuacaaugccgaacuguugguucuauuggaaaaugaaagaacuuuggacuaccacgauucaaaugugaagaacuuguaugaaaagguaagaaaccaguuaaaaaacaaugccaaggaaauuggaaacggcugcuuugaauuuuaccacaaaugcgauaacacgugcauggaaagugucaaaaaugggacuuaugacuacccaaaauacucagaggaagcaaaauuaaacagagaaaaaauagaugggguaaagcuggaaucaacaaggauuuaccagauuuuggcgaucuauucaacugucgccaguucauugguacugguagucucccugggggcaaucagcuucuggaugugcucuaaugggucucuacaguguagaauauguauuuaa

SEQ ID NO: 43011 - RNA, 1701 nt, Artificial Sequence; identical to SEQ ID NO: 43005
  derived and/or modified CDS sequence (wt) from hemagglutinin__InfluenzaA__AHG96327

SEQ ID NO: 43012 - RNA, 1701 nt, Artificial Sequence
  derived and/or modified CDS sequence (wt) from hemagglutinin__InfluenzaA__AHG96329
augaaggcaauacuaguaguucugcuauauacauuuacaaccgcaaaugcagacacauuauguauagguuaucaugcgaacaauucaacagacacuguagacacaguacuagaaaagaauguaacaguaacacacucuguuaaccuucuagaagacaagcauaacgggaaacuaugcaaacuaagagggguagccccauugcauuuggguaaauguaacauugcuggcuggauccugggaaauccagagugugaaucacucuccacagcaaguucaugguccuacauuguggaaacaucuaguucagacaauggaacguguuacccaggagauuucaucaauuaugaggagcuaagagagcaauugagcucagugucaucauuugaaagguuugagauauuucccaagacaaguucauggcccaaucaugacucgaacaaagguguaacggcagcauguccucacgcuggagcaaaaagcuucuacaaaaauuuaauauggcuaguuaaaaaagggaauucauacccaaagcucagccaauccuacauuaaugauaaagggaaagaaguccucgugcuguggggcauucaccauccaucuacuacugcugaccaacaaagucucuaucagaaugcagaugcauauguuuuuguggggacaucaagauacagcaagaaguucaagccggaaauagcaauaagacccaaagugagggaucaagaagggagaaugaacuauuacuggacacuaguagagccgggagacaaaauaacauucgaagcaacuggaaaucuagugguaccgagauaugcauucacaauggaaagaaaugcuggaucugguauuauuauuucagauacaccaguccacgauugcaauacaacuugucagacacccgagggugcuauaaacaccagccucccauuucagaauauacauccgaucacaauuggaaaauguccaaaguauguaaaaagcacaaaauugagacuggccacaggauugaggaaugucccgucuauucaaucuagaggccuauucggggccauugccggcuucauugaagggggguggacagggaugguagauggaugguacgguuaucaccaucaaaaugagcaggggucaggauaugcagccgaccugaagagcacacaaaaugccauugacaagauuacuaacaaaguaaauucuguuauugaaaagaugaauacacaguucacagcaguggguaaagaguucaaccaccuggaaaaaagaauagagaauuuaaauaaaaaaguugaugaugguuuccuggacauuuggacuuacaaugccgaacuguugguucuauuggaaaaugaaagaacuuuggacuaccacgauucaaaugugaagaacuuguaugaaaagauaagaaaccaguuaaaaaacaaugccaaggaaauuggaaacggcugcuuugaauuuuaccacaaaugcgauaacacgugcauggaaagugucaaaaaugggacuuaugaauacccaaaauacucagaggaagcaaaauuaaacagagaaaaaauagaugguguaaagcuggaaucaacaaagauuuaccagauuuuggcgaucuauucaacugucgccaguucauugguacugguagucucccugggggcaaucagcuucuggaugugcucuaaugggucucuacaguguagaauauguauuuaa

SEQ ID NO: 43013 - RNA, 1701 nt, Artificial Sequence
  derived and/or modified CDS sequence (wt) from hemagglutinin__InfluenzaA__AHG96330
augaaggcaauacuaguaguucugcuauauacauuugcaaccgcaacugcagacacauuauguauagguuaucaugcaaacaauucaacagacacuguagacacaguacuagaaaagaauguaacaguaacacacucuguuaaccuucuagaagacaagcauaacgggaaacuaugcaaacuaagagggguagccccauugcauuuggguaaauguaacauugcuggcuggauccugggaaauccagagugugaaucacucuccacagcaaguucaugguccuacauuguggaaacaucuaguucagacaauggaacguguuacccaggagauuucaucaauuaugaggagcuaagagagcaauugagcucagugucaucauuugaaagguuugagauauuccccaaaacaaguucauggcccaaucaugacucgaacaaagguguaacggcagcauguccucacgcuggagcaaaaagcuucuacaaaaauuuaauauggcuaguuaaaaaaggaaauucauacccaaagcucagccaauccuacauuaaugauaaagggaaagaaguccucgugcuguggggcauucaccauccaucuacuacugcugaccaacaaagucucuaucagaaugcagaugcauauguuuuuguggggacaucaagauacagcaagaaguucaagccggaaauagcaauaagacccaaagugagggaucaagaagggagaaugaacuauuacuggacacuaguagagccgggagacaaaauaacauucgaagcaacuggaaaucuagugguaccgagauaugcauucacaauggaaagaaaugcuggaucugguauuaucauuucagauacaccaguccacgauugcaauacaacuugucagacacccgagggugcuauaaacaccagccucccauuucagaauauacauccgaucacaauuggaaaauguccaaaguauguaaaaagcacaaaauugagucuggccacaggauugaggaaugucccgucuauucaaucuagaggccuauucggggccauugccggcuucauugaagggggauggacagggaugguagauggaugguacgguuaucaccaucaaaaugagcaggggucaggauaugcagccgaccugaagagcacacaaaaugccauugacaagauuacuaacaaaguaaacucuguuauugaaaagaugaauacacaguucacagcaguggguaaagaguucaaccaccuggaaaaaagaauagagaauuuaaauaaaaaaguugaugaugguuuccuggacauuuggacuuacaaugcugaacuguugguucuauuggaaaaugaaagaacuuuggacuaccacgauucaaaugugaagaacuuguaugaaaagauaagaaaccaguuaaaaaacaaugccaaggaaauuggaaacggcugcuuugaauuuuaccacaaaugugauaacacgugcauggaaagugucaaaaaugggacuuaugacuacccaaaauacucagaggaagcaaaauuaaacagagaaaaaauagaugggguaaagcuggaaucaacaaggauuuaccagauuuuggcgaucuauucaacugucgccaguucauugguacugguagucucccugggggcaaucagcuucuggaugugcucuaaugggucucuacaguguagaauauguauuuaa

SEQ ID NO: 43014 - RNA, 1701 nt, Artificial Sequence
  derived and/or modified CDS sequence (wt) from hemagglutinin__InfluenzaA__AHG96332
augaaggcaauacuaguaguucugcuauauacauuugcaaccgcaaaugcagacacauuauguauagguuaucaugcgaacaauucaacagacacuguagacacaguacuagaaaagaauguaacaguaacacacucuguuaaccuucuagaagacaagcauaacgggaaacuaugcaaacuaagagggguagccccauugcauuuggguaaauguaacauugcuggcuggauccugggaaauccagagugugaaucacucuccacagcaaguucaugguccuacauuguggaaacaucuaguucagacaauggaacguguuacccaggagauuucaucaauuaugaggagcuaagagagcaauugagcucagugucaucauuugaaagguuugagauauuccccaagacaaguucauggcccaaucaugacucgaacaaagguguaacggcagcauguccucacgcuggagcaaaaagcuucuacaaaaauuuaauauggcuaguuaaaaaaggaaauucauacccaaagcucagccaauccuacauuaaugauaaagggaaagaaguccucgugcuguggggcauucaccacccaucuacuacugcugaccaacaaagucucuaucagaaugcagaugcauauguuuuuguggggacaucaagauacagcaagaaguucaagccggaaauagcaauaagacccaaagugagggaucaagaagggagaaugaacuauuacuggacacuaguagagccgggagacaaaauaacauucgaagcaacuggaaaucuagugguaccgagauaugcauucacaauggaaagaaaugcuggaucugguauuaucauuucagauacaccaguccacgauugcaauacaacuugucagacacccgagggugcuauaaacaccagccucccauuucagaauauacauccgaucacaauuggaaaauguccaaaguauguaaaaagcacaaaauugagacuggccacaggauugaggaaugucccgucuauucaaucuagaggccuauucggggccauugccggcuucauugaaggaggguggacagggaugguagauggaugguacgguuaucaccaucaaaaugagcaggggucaggauaugcagccgaccugaagagcacacaaaaugccauugacaagauuacuaacaaaguaaauucuguuauugaaaagaugaauacacaguucacagcaguggguaaagaguucaaccaccuggaaaaaagaauagagaauuuaaauaaaaaaguugaugaugguuuccuggacauuuggacuuacaaugccgaacuguugguucuauuggaaaaugaaagaacuuuggacuaccacgauucaaaugugaaaaacuuguaugaaaagguaagaaaccaguuaaaaaacaaugccaaggaaauuggaaacggcugcuuugaauuuuaccacaaaugcgauaacacgugcauggaaagugucaaaaaugggacuuaugacuacccaaaauacucagaggaagcaaaauuaaacagagaaaaaauagaugggguaaagcuggaaucaacaaggauuuaccagauuuuggcgaucuauucaacugucgccaguucauugguacugguagucucccugggggcaaucagcuucuggaugugcucuaaugggucucuacaguguagaauauguauuuaa

SEQ ID NO: 43015 - RNA, 1701 nt, Artificial Sequence
  derived and/or modified CDS sequence (wt) from hemagglutinin__InfluenzaA__AHG96334
augaaggcaauacuaguaguucugcuauauacacuugcaaccgcaaaugcagacacauuauguauagguuaucaugcgaacaauucaacagacacuguagacacaguacuagaaaagaauguaacaguaacacacucuguuaaccuucuagaagacaagcauaacgggaaacuaugcaaacuaagagggguagccccauugcauuuggguaaauguaacauugcuggcuggauccugggaaauccagagugugaaucacucuccacggcaaguucaugguccuacauuguggaaacaucuaguucagacaauggaacguguuacccaggagauuucaucaauuaugaggagcuaagagagcaauugagcucagugucaucauuugaaagguuugagauauuccccaagacaaguucauggcccaaucaugacucgaacaaagguguaacggcagcauguccucacgcuggagcaaaaagcuucuacaaaaauuuaauauggcuaguuaaaaaaggaaauucauacccaaagcucagccaauccuacauuaaugauaaagggaaagaaguccucgugcuguggggcauucaccacccaucuacuacugcugaccaacaaagucucuaucagaaugcagaugcauauguuuuuguggggacaucaagauacagcaagaaguucaagccggaaauagcaauaagacccaaagugagggaucaagaagggagaaugaacuacuacuggacacuaguagagccgggagacaaaauaacauucgaagcaacuggaaaucuagugguaccgagauaugcauucacaauggaaagaaaugcuggaucugguauuaucauuucagauacaccaguccacgauugcaauacaacuugucagacacccgagggugcuauaaacaccagccucccauuucagaauauacauccgaucacaauuggaaaauguccaaaguauguaaaaagcacaaaauugagacuggccacaggauugaggaaugucccgucuauucaaucuagaggccuauucggggccauugccggcuucauugaagggggguggacagggaugguagauggaugguacgguuaucaccaucaaaaugagcaggggucaggauaugcagccgaccugaagagcacacaaaaugccauugacaagauuacuaacaaaguaaauucuguuauugaaaagaugaauacacaguucacagcaguggguaaagaguucaaccaccuggaaaaaagaauagagaauuuaaauaaaaaaguugaugaugguuuccuggacauuuggacuuacaaugccgaacuguugguucuauuggaaaaugaaagaacuuuggacuaccacgauucaaaugugaagaacuuguaugaaaagguaagaaaccaguuaaaaaacaaugccaaggaaauuggaaacggcugcuuugaauuuuaccacaaaugcgauaacacgugcauggaaagugucaaaaaugggacuuaugacuacccaaaauacucagaggaagcaaaauuaaacagagaaaaaauagaugggguaaaacuggaaucaacaaggauuuaccagauuuuggcgaucuauucaacugucgccaguucauugguacugguagucucccugggggcaaucagcuucuggaugugcucuaaugggucucuacaguguagaauauguauuuaa

SEQ ID NO: 43016 - RNA, 1701 nt, Artificial Sequence
  derived and/or modified CDS sequence (wt) from hemagglutinin__InfluenzaA__AHG96335
augaaggcaauacuaguaguucugcuauauacauuugaaaccgcaaaugcagacacauuauguauagguuaucaugcgaacaauucaacagacacuguagacacaguacuagaaaagaauguaacaguaacacacucuguuaaccuucuagaagacaagcauaacgggaaacuaugcaaacuaaaagggguagccccauugcauuuggguaaauguaacauugcuggcuggauccugggaaauccagagugugaaucacucuccacagcaaguucaugguccuacauuguggaaacaucuaguucagacaauggaacguguuacccaggagauuucaucaauuaugaggagcuaagagagcaauugagcucagugucaucauuugaaagguuugagauauuccccaagacaaguucauggcccaaucaugacucgaacaaagguguaacggcagcauguccucacgcuggagcaaaaagcuucuacaaaaauuuaauauggcuaguuaaaaaaggaaauucauacccaaagcucagccaauccuacauuaaugauaaagggaaagaaguccucgugcuguggggcauucaccacccaucuacuacugcugaccaacaaagucucuaucagaaugcagaugcauauguuuuuguggggacaucaagauacagcaagaaguucaagccggaaauagcaauaagacccaaagugagggaucaagaagggagaaugaacuauuacuggacacuaguagagccgggagacaaaauaacauucgaagcaacuggaaaucuagugguaccgagauaugcauucacaauggaaagaaaugcuggaucugguauuaucauuucagauacaccaguccacgauugcaauacaacuugucagacacccgagggugcuauaaacaccagccucccauuucagaauauacauccgaucacaauuggaaaauguccaaaguauguaaaaagcacaaaauugagacuggccacaggauugaggaaugucccgucuauucaaucuagaggccuauucggggccauugccggcuucauugaaggaggguggacagggaugguagauggaugguacgguuaucaccaucaaaaugagcaggggucaggauaugcagccgaccugaagagcacacaaaaugccauugacaagauuacuaacaaaguaaauucuguuauugaaaagaugaauacacaguucacagcaguggguaaagaguucaaccaccuggaaaaaagaauagagaauuuaaauaaaaaaguugaugaugguuuccuggacauuuggacuuacaaugccgaacuguugguucuauuggaaaaugaaagaacuuuggacuaccacgauucaaaugugaagaacuuguaugaaaagguaagaaaccaguuaaaaaacaaugccaaggaaauuggaaacggcugcuuugaauuuuaccacaaaugcgauaacacgugcauggaaagugucaaaaaugggacuuaugacuacccaaaauacucagaggaagcaaaauuaaacagagaaaaaauagaugggguaaagcuggaaucaacaaggauuuaccagauuuuggcgaucuauucaacugucgccaguucauugguacugguagucucccugggggcaaucagcuucuggaugugcucuaaugggucucuacaguguagaauauguauuuaa

SEQ ID NO: 43017 - RNA, 1701 nt, Artificial Sequence
  derived and/or modified CDS sequence (wt) from hemagglutinin__InfluenzaA__AHG96336
augaaggcaauacuaguaguucugcuauauacauuugcaaccgcaaaugcagacacauuauguauagguuaucaugcgaacaauucaacagacacuguagacacaguacuagaaaagaauguaacaguaacacacucuguuaaccuucuagaagacaagcauaacgggaaacuaugcaaacuaagagggguagccccauugcauuuggguaaauguaacauugcuggcuggauccugggaaauccagagugugaaucacucuccacagcaaguucaugguccuacauuguggaaacaucuaguucagacaauggaacguguuacccaggagauuucaucaauuaugaggagcuaagagagcaauugagcucagugucaucauuugaaagguuugagauauuccccaagacaaguucauggcccaaucaugacucgaacaaagguguaacggcagcauguccucacgcuggagcaaaaagcuucuacaaaaauuuaauauggcuaguuaaaaaaggaaauucauacccaaagcucagccaauccuacauuaaugauaaagggaaagaaguccucgugcuguggggcauucaccacccaucuacuacugcugaccaacaaagucucuaucagaaugcagaugcauauguuuuuguggggacaucaagauacagcaagaaguucaagccggaaauagcaauaagacccaaagugagggaucaagaagggagaaugaacuauuacuggacacuaguagagccgggagacaaaauaacauucgaagcaacuggaaaucuagugguaccgagauaugcauucacaauggaaagaaaugcuggaucugguauuaucauuucagauacaccaguccgcgauugcaauacaacuugucagacacccgagggugcuauaaacaccagccucccauuucagaauauacauccgaucacaauuggaaaauguccaaaguauguaaaaagcacaaaauugagacuggccacaggauugaggaaugucccgucuauucaaucuagaggccuauucggggccauugccggcuucauugaaggaggguggacagggaugguagauggaugguacgguuaucaccaucaaaaugagcaggggucaggauaugcagccgaccugaagagcacacaaaaugccauugacaagauuacuaacaaaguaaauucuguuauugaaaagaugaauacacaguucacagcaguggguaaagaguucaaccaccuggaaaaaagaauagagaauuuaaauaaaaaaguugaugaugguuuccuggacauuuggacuuacaaugccgaacuguugguucuauuggaaaaugaaagaacuuuggacuaccacgauucaaaugugaagaacuuguaugaaaagguaagaaaccaguuaaaaaacaaugccaaggaaauuggaaacggcugcuuugaauuuuaccacaaaugcgauaacacgugcauggaaagugucaaaaaugggacuuaugacuacccaaaauacucagaggaagcaaaauuaaacagagaaaaaauagaugggguaaagcuggaaucaacaaggauuuaccagauuuuggcgaucuauucaacugucgccaguucauugguacugguagucucccugggggcaaucagcuucuggaugugcucuaaugggucucuacaguguagaauauguauuuaa

SEQ ID NO: 43018 - RNA, 1701 nt, Artificial Sequence
  derived and/or modified CDS sequence (wt) from hemagglutinin__InfluenzaA__AHG96338
augaaggcaauacuaguaguucugcuauauacauuugcaaccgcaaaugcagacacauuauguauagguuaucaugcgaacaauucaacagacacuguagacacaguacuagaaaagaauguaacaguaacacacucuguuaaccuucuagaagacaagcauaacgggaaacuaugcaaacuaagagggguagccccauugcauuuggguaaauguaacauugcuggcuggauccugggaaauccagagugugaaucacucuccacagcaaguucaugguccuacauuguggaaacaucuaguucagacaauggaacguguuacccaggagauuucaucaauuaugaggagcuaagagagcaacugagcucagugucaucauuugaaagguuugagauauuccccaagacaaguucauggcccaaucaugacucgaacaaagguguaacggcagcauguucucacgcuggagcaaaaagcuucuacaaaaauuuaauauggcuaguuaaaaaaggaaauucauacccaaagcucagccaauccuacauuaaugauaaagggaaagaaguccucgugcuguggggcauucaccacccaucuacuacugcugaccaacaaagucucuaucagaaugcagaugcauauguuuuuguggggacaucaagauacagcaagaaguucaagccggaaauagcaauaagacccaaagugagggaucaagaagggagaaugaacuauuacuggacacuaguagagccgggagacaaaauaacauucgaagcaacuggaaaucuagugguaccgagauaugcauucacaauggaaagaaaugcuggaucugguauuaucauuucagauacaccaguccacgauugcaauacaacuugucagacacccgagggugcuauaaacaccagccucccauuucagaauauacauccgaucacaauuggaaaauguccaaaguauguaaaaagcacaaaauugagacuggccacaggauugaggaaugucccgucuauucaaucuagaggccuauucggggccauugccggcuucauugaaggaggguggacagggaugguagauggaugguacgguuaucaccaucaaaaugagcaggggucaggauaugcagccgaccugaagagcacacaaaaugccauugacaagauuacuaacaaaguaaauucuguuauugaaaagaugaauacacaguucacagcaguggguaaagaguucaaccaccuggaaaaaagaauagagaauuuaaauaaaaaaguugaugaugguuuccuggacauuuggacuuacaaugccgaacuguugguucuauuggaaaaugaaagaacuuuggacuaccacgauucaaaugugaagaacuuguaugaaaagguaagaaaccaguuaaaaaacaaugccaaggaaauuggaaacggcugcuuugaauuuuaccacaaaugcgauaacacgugcauggaaagugucaaaaaugggacuuaugacuacccaaaauacucagaggaagcaaaauuaaacagagaaaaaauagaugggguaaagcuggaaucaacaaggauuuaccagauuuuggcgaucuauucaacugucgccaguucauugguacugguagucucccugggggcaaucagcuucuggaugugcucuaaugggucucuacaguguagaauauguauuuaa

SEQ ID NO: 43019 - RNA, 1701 nt, Artificial Sequence
  derived and/or modified CDS sequence (wt) from hemagglutinin__InfluenzaA__AHG96339
augaaggcaauacuaguaguucugcuauauacauuugcaaccgcaaaugcagacacauuauguauagguuaucaugcgaacaauucaacagacacuguagacacaguacuagaaaagaauguaacaguaacacacucuguuaaccuucuagaagacaagcauaacgggaaacuaugcaaacuaagagggguagccccauugcauuuggguaaauguaacauugcuggcuggauccugggaaauccagagugugaaucacucuccacagcaaguucaugguccuacauuguggaaacaucuaguucagacaauggaacguguuacccaggagauuucaucaauuaugaggagcuaagagagcaauugagcucagugucaucauuugaaagguuugagauauuccccaagacaaguucauggcccaaucaugacucgaacaaagguguaacggcagcauguccucacgcuggagcaaaaagcuucuacaaaaauuuaauauggcuaguuaaaaaaggaaauucauacccaaagcucagccaauccuacauuaaugauaaagggaaagaaauccucgugcuguggggcauucaccacccaucuacuacugcugaccaacaaagucucuaucagaaugcagaugcauauguuuuuguggggacaucaagauacagcaagaaguucaagccggaaauagcaauaagacccaaagugagggaucaagaagggagaaugaacuauuacuggacacuaguagagccgggagacaaaauaacauucgaagcaacuggaaaucuagugguaccgagauaugcauucacaauggaaagaaaugcuggaucugguauuaucauuucagauacaccaguccacgauugcaauacaacuugucagacacccgagggugcuauaaacaccagccucccauuucagaauauacauccgaucacaauuggaaaauguccaaaguauguaaaaagcacaaaauugagacuggccacaggcuugaggaaugucccgucuauucaaucuagaggccuauucggggccauugccggcuucauugaaggaggguggacagggaugguagauggaugguacgguuaucaccaucaaaacgagcaggggucaggauaugcagccgaccugaagagcacacaaaaugccauugacaagauuacuaacaaaguaaauucuguuauugaaaagaugaauacacaguucacagcaguggguaaagaguucaaccaccuggaaaaaagaauagagaauuuaaauaaaaaaguugaugaugguuuccuggacauuuggacuuacaaugccgaacuguugguucuauuggaaaaugaaagaacuuuggacuaccacgauucaaaugugaagaacuuguaugaaaagguaagaaaccaguuaaaaaacaaugccaaggaaauuggaaacggcugcuuugaauuuuaccacaaaugcgauaacacgugcauggaaagugucaaaaaugggacuuaugacuacccaaaauacucagaggaagcaaaauuaaacagagaaaaaauagaugggguaaagcuggaaucaacaaggauuuaccagauuuuggcgaucuauucaacugucgccaguucauugguacugguagucucccugggggcaaucagcuucuggaugugcucuaaugggucucuacaguguagaauauguauuuaa

SEQ ID NO: 43020 - RNA, 1701 nt, Artificial Sequence
  derived and/or modified CDS sequence (wt) from hemagglutinin__InfluenzaA__AHG96340
augaaggcaauacuaguaguucugcuauacacauuugcaaccgcaaaugcagacacauuauguauagguuaucaugcgaacaauucaacagacacuguagacacaguacuagaaaagaauguaacaguaacacacucuguuaaccuucuagaagacaagcauaacgggaaacuaugcaaacuaagagggguagccccauugcauuuggguaaauguaacauugcuggcuggauccugggaaauccagagugugaaucacucuccacagcaaguucaugguccuacauuguggaaacaucuaguucagacaauggaacguguuacccaggagauuucaucaauuaugaggagcuaagggagcaauugagcucagugucaucauuugaaagauuugagauauuccccaagacaaguucauggcccaaucaugacucgaacaaagguguaacggcagcauguccucacgcuggagcaaaaagcuucuacaaaaauuuaauauggcuaguuaaaaaaggaaauucauacccaaagcucagccaauccuacauuaaugauaaagggaaagaaguccucgugcuguggggcauucaccauccaucuacuacugcugaccaacaaagucucuaucagaaugcagaugcauauguuuuuguggggacaucaagauacagcaagaaguucaagccggaaauagcaauaagacccaaagugagggaucaagaagggagaaugaacuauuacuggacacuaguagagccgggagacaaaauaacauucgaagcaacuggaaaucuagugguaccgagauaugcauucacaauggaaagaaaugcuggaucugguauuaucauuucagauacaccaguccacgauugcaauacaacuugucagacacccgagggugcuauaaacaccagccucccauuucagaauauacauccgaucacaauuggaaaauguccaaaguauguaaaaagcacaaaauugagacuggccacaggauugaggaaugucccaucuauucaaucuagaggccuauucggggccauugccggcuucauugaagggggguggacagggaugguagauggaugguacgguuaucaccaucaaaaugagcaggggucaggauaugcagccgaccugaagagcacacaaaaugccauugacaaaauuacuaacaaaguaaauucuguuauugaaaagaugaauacacaguucacagcaguggguaaagaguucaaccacuuggaaaaaagaauagagaauuuaaauaaaaaaguugaugaugguuuccuggacauuuggacuuacaaugccgaacugcugguucuauuggaaaaugaaagaacuuuggacuaccacgauucaaaugugaagaacuuguaugaaaagguaagaaaccaguuaaaaaacaaugccaaggaaauuggaaacggcugcuuugaauuuuaccacaaaugcgauaacacgugcauggaaagugucaaaaaugggacuuaugacuacccaaaauacucagaggaagcaaaauuaaacagagaaaaaauagaugggguaaagcuggaaucaacaaggauuuaccagauuuuggcgaucuauucaacugucgccaguucauugguacugguagucucccugggggcaaucagcuucuggaugugcucuaaugggucucuacaguguagaauauguauuuaa

SEQ ID NO: 43021 - RNA, 1701 nt, Artificial Sequence
  derived and/or modified CDS sequence (wt) from hemagglutinin__InfluenzaA__AHG96341
augaaggcaauacuaguaguucugcuauauacauuugcaaccgcaaaugcagacacuuuauguauagguuaucaugcgaacaauucaacagacacuguagacacaguacuagaaaagaauguaacaguaacacacucuguuaaccuucuagaagacaagcauaacgguaaacuaugcaaacuaagagggguagccccauugcauuuggguaaauguaacauugcuggcuggauccugggaaauccagagugugaaucacucuccacagcaaguucaugguccuacauuguggaaacaucuaguucagacaauggaacguguuacccaggagauuucaucaauuaugaggagcuaagagagcaauugagcucagugucaucauuugaaagguuugagauauuccccaagacaaguucauggcccaaucaugacucgaacaaagguguaacggcagcauguccucacgcuggagcaaaaagcuucuacaaaaauuuaauauggcuaguuaaaaaaggaaauucauacccaaagcucagucaauccuacauuaaugauaaagggaaagaaguccucgugcuguggggcauucaccauccaucuacuacugcugaccaacaaagucucuaucagaaugcagaugcauauguuuuuguggggacaucaaaauacagcaagaaguucaagccggaaauagcaauaagacccaaagugagggaucaagaagggagaaugaacuauuacuggacacuaguagagccgggagacaaaauaacauucgaagcaacuggaaaucuagugguaccgagauaugcauucacaauggaaagaaaugcuggaucugguauuaucauuucagauacaccaguccacgauugcaauacaacuugucagacacccgagggugcuauaaacaccagccucccauuucagaauauacauccgaucacaauuggaaaauguccaaaguauguaaaaagcacaaaauugagacuggcaacaggauugaggaauaucccgucuauucaaucuagaggccuauucggggccauugccggcuucauugaagggggguggacagggaugguagauggaugguacgguuaucaccaucaaaaugagcaggggucaggauaugcagccgaccugaagagcacacaaaaugccauugacaagauuacuaacaaaguaaacucuguuauugaaaagaugaauacacaguucacagcaguggguaaagaguucaaccaccuggaaaaaagaauagagaauuuaaauaaaaaaguugaugaugguuuccuggacauuuggacuuacaaugccgaacuguugguucuauuggaaaaugaaagaacuuuggacuaccacgauucaaaugugaagaacuuguaugaaaagguaagaaaccaguuaaaaaacaaugccaaggaaauuggaaacggcugcuuugaauuuuaccacaaaugcgauaacacgugcauggaaagugucaaaaaugggacuuaugacuacccaaaauacucagaggaagcaaaauuaaacagagaaaaaauagaugggguaaagcuggaaucaacaaggauuuaccagauuuuggcgaucuauucaacugucgccaguucauugguacugguagucucccugggggcaaucagcuucuggaugugcucuaaugggucucuacaguguagaauauguauuuaa

SEQ ID NO: 43022 - RNA, 1701 nt, Artificial Sequence
  derived and/or modified CDS sequence (wt) from hemagglutinin__InfluenzaA__AHG96342
augaaggcaauacuaguaguucugcuauauacauuugcaaccgcaaaugcagacacuuuauguauagguuaucaugcgaacaauucaacagacacuguagacacaguacuagaaaagaauguaacaguaacacacucuguuaaccuucuagaagacaagcauaacgguaaacuaugcaaacuaagagggguagccccauugcauuuggguaaauguaacauugcuggcuggauccugggaaauccagagugugaaucacucuccacagcaaguucaugguccuacauuguggaaacaucuaguucagacaauggaacguguuacccaggagauuucaucaauuaugaggagcuaagagagcaauugagcucagugucaucauuugaaagguuugagauauuccccaagacaaguucauggcccaaucaugauucgaacaaagguguaacggcagcauguccucacgcuggagcaaaaagcuucuacaaaaauuuaauauggcuaguuaaaaaaggaaauucauacccaaagcucagucaauccuacauuaaugauaaagggaaagaaguccucgugcuguggggcauucaccauccaucuacuacugcugaccaacaaagucucuaucagaaugcagaugcauauguuuuuguggggacaucaagauacagcaagaaguucaagccggaaauagcaauaagacccaaagugagggaucaagaagggagaaugaacuauuacuggacacuaguagagccgggagacaaaauaacauucgaagcaacuggaaaucuagugguaccgagauaugcauucacaauggaaagaaaugcuggaucugguauuaucauuucagauacaccaguccacgauugcaauacaacuugucagacacccgagggugcuauaaacaccagccucccauuucagaauauacauccgaucacaauuggaaaauguccaaaguauguaaaaagcacaaaauugagacuggcaacaggauugaggaauaucccgucuauucaaucuagaggccuauucggggccauugccggcuucauugaagggggguggacagggaugguagauggaugguacgguuaucaccaucaaaaugagcaggggucaggauaugcagccgaccugaagagcacacaaaaugccauugacaagauuacuaacaaaguaaacucuguuauugaaaagaugaauacacaguucacagcaguggguaaagaguucaaccaccuggaaaaaagaauagagaauuuaaauaaaaaaguugaugaugguuuccuggacauuuggacuuacaaugccgaacuguugguuuuauuggaaaaugaaagaacuuuggacuaccacgauucaaaugugaagaacuuguaugaaaagguaagaaaccaguuaaaaaacaaugccaaggaaauuggaaacggcugcuuugaauuuuaccacaaaugcgauaacaugugcauggaaagugucaaaaaugggacuuaugacuacccaaaauacucagaggaagcaaaauuaaacagagaaaaaauagaugggguaaagcuggaaucaacaaggauuuaccagauuuuggcgaucuauucaacugucgccaguucauugguacugguagucucccugggggcaaucagcuucuggaugugcucuaaugggucucuacaauguagaauauguauuuaa

SEQ ID NO: 43023 - RNA, 1701 nt, Artificial Sequence
  derived and/or modified CDS sequence (wt) from hemagglutinin__InfluenzaA__AHG96343
augaaggcaauacuaguaguccugcuauauacauuugcaaccgcaacugcagacacauuauguauagguuaucaugcaaacaauucaacagacacuguagacacaguacuagaaaagaauguaacaguaacacacucuguuaaccuucuagaagacaagcauaacgggaaacuaugcaaacuaagagggguagccccauugcauuuggguaaauguaacauugcuggcuggauccugggaaauccagagugugaaucacucuccacagcaaguucaugguccuacauuguggaaacaucuaauucagacaauggaacguguuacccaggagauuucaucaauuaugaggagcuaagagagcaauugagcucagugucaucauuugaaagguuugagauauuccccaaaacaaguucauggcccaaucaugacucgaacaaagguguaacggcagcauguccucacgcuggagcaaaaagcuucuacaaaaauuuaauauggcuaguuaaaaaaggaaauucauacccaaagcucagccaauccuacauuaaugauaaagggaaagaaguccucgugcuguggggcauucaccauccaucuacuacugcugaccaacaaagucucuaucagaaugcagaugcauauguuuuuguggggacaucaagauacagcaagaaguucaagccggaaauagcaauaagacccaaagugagggaucaagaagggagaaugaacuauuacuggacacuaguagagccgggagacaaaauaacauucgaagcaacuggaaaucucgugguaccgagauaugcauucacaauggaaagaaaugcuggaucugguauuaucauuucagauacaccaguccacgauugcaauacaacuugucagacacccgagggugcuauaaacaccagccucccauuucagaauauacauccgaucacaauuggaaaauguccaaaguauguaaaaagcacaaaauugagacuggccacaggauugaggaaugucccgucuauucaaucuagaggccuauucggggccauugccggcuucauugaagggggguggacagggaugguagauggaugguacgguuaucaccaucaaaaugagcaggggucaggauaugcagccgaccugaagagcacacaaaaugccauugacaagauuacuaacaaaguaaacucuguuauugaaaagaugaauacacaguucacagcaguggguaaagaguucaaccaccuggaaaaaagaauagagaauuuaaauaaaaagguugaugaugguuuccuggacauuuggacuuacaaugccgaacuguugguucuauuggaaaaugaaagaacuuuggacuaccacgauucaaaugugaagaacuuguaugaaaagguaagaaaccaguuaaaaaacaaugccaaggaaauuggaaacggcugcuuugaauuuuaccacaaaugcgauaacacgugcauggaaagugucaaaaaugggacuuaugacuacccaaaauacucagaggaagcaaaauuaaacagagaaaaaauagaugggguaaagcuggaaucaacaaggauuuaccagauuuuggcgaucuauucaacugucgccaguucauugguacugguagucucccugggggcaaucagcuucuggaugugcucuaaugggucucuacaguguagaauauguauuuaa

SEQ ID NO: 43024 - RNA, 1701 nt, Artificial Sequence
  derived and/or modified CDS sequence (wt) from hemagglutinin__InfluenzaA__AHG96344
augaaggcaauacuaguaguucugcuauauacauuugcaaccgcaaaugcagacacauuauguauagguuaucaugcgaacaauucaacagacacuguagacacaguacuagaaaagaauguaacaguaacacacucuguuaaccuucuagaagacaagcauaacgggaaacuaugcaaacuaagagggguagccccauugcauuuggguaaauguaacauugcuggcuggauccugggaaauccagagugugaaucacucuccacagcaaguucaugguccuacauuguggaaacaucuaguucagacaauggaacguguuacccaggagauuucaucaauuaugaggagcuaagagagcaauugagcucagugucaucauuugaaagguuugagauauuccccaagacaaguucauggcccaaucaugacucgaacaaagguguaacggcagcauguccucacgcuggagcaaaaagcuucuacaaaaauuuaauauggcuaguuaaaaaaggaaauucauacccaaagcucagccaauccuacauuaaugauaaagggaaagaaguccucgugcuguggggcauucaccacccaucuacuacugcugaccaacaaagucucuaucagaaugcagaugcauauguuuuuguggggacaucaagauacagcaagaaguucaagccggaaauagcaauaagacccaaagugagggaucaagaagggagaaugaacuauuacuggacacuaguagagccgggagacaaaauaacauucgaagcaacuggaaaucuagugguaccgagauaugcauucacaauggaaagaaaugcuggaucugguauuaucauuucagauacaccaguccacgauugcaauacaacuugucagacacccgagggugcuauaaacaccagccucccauuucagaauauacauccgaucacaauuggaaaauguccaaaguauguaaaaagcacaaaauugagacuggccacaggauugaggaaugucccgucuauucaaucuagaggccuauucggggccauugccggcuucauugaaggaggguggacagggaugguagauggaugguacgguuaucaccaucaaaacgagcaggggucaggauaugcagccgaccugaagagcacacaaaaugccauugacaagauuacuaacaaaguaaauucuguuauugaaaagaugaauacacaguucacagcaguggguaaagaguucaaccaccuggaaaaaagaauagagaauuuaaauaaaaaaguugaugaugguuuccuggacauuuggacuuacaaugccgaacuguugguucuauuggaaaaugaaagaacuuuggacuaccacgauucaaaugugaagaacuuguaugaaaagguaagaaaccaguuaaaaaacaaugccaaggaaauuggaaacggcugcuuugaauuuuaccacaaaugcgauaacacgugcauggaaagugucaaaaauggaacuuaugacuacccaaaauacucagaggaagcaaaauuaaacagagaaaaaauagauggaguaaagcuggaaucaacaaggauuuaccagauuuuggcgaucuauucaacugucgccaguucauugguacugguagucucccugggggcaaucagcuucuggaugugcucuaaugggucucuacaguguagaauauguauuuaa

SEQ ID NO: 43025 - RNA, 1701 nt, Artificial Sequence
  derived and/or modified CDS sequence (wt) from hemagglutinin__InfluenzaA__AHG96345
augaaggcaauacuaguaguucugcuauauacacuugcaaccgcaaaugcagacacauuauguauagguuaucaugcgaacaauucaacagacacuguagacacaguacuagaaaagaauguaacaguaacacacucuguuaaccuucuagaagacaagcauaacgggaaacuaugcaaacuaagagggguagccccauugcauuuggguaaauguaacauugcuggcuggauccugggaaauccagagugugaaucacucuccacggcaaguucaugguccuacauuguggaaacaucuaguucagacaauggaacguguuacccaggagauuucaucaauuaugaggagcuaagagagcaauugagcucagugucaucauuugaaagguuugagauauuccccaagacaaguucauggcccaaucaugacucgaacaaagguguaacggcagcauguccucacgcuggagcaaaaagcuucuacaaaaauuuaauauggcuaguuaaaaaaggaaauucauacccaaagcucagccaauccuacauuaaugauaaagggaaagaaguccucgugcuguggggcauucaccacccaucuacuacugcugaccaacaaagucucuaucagaaugcagaugcauauguuuuuguggggacaucaagauacagcaagaaguucaagccggaaauagcaauaagacccaaagugagagaucaagaagggagaaugaacuacuacuggacacuaguagagccgggagacaaaauaacauucgaagcaacuggaaaucuagugguaccgagauaugcauucacaauggaaagaaaugcuggaucugguauuaucauuucagauacaccaguccacgauugcaauacaacuugucagacacccgagggugcuauaaacaccagccucccauuucagaauauacauccgaucacaauuggaaaauguccaaaguauguaaaaagcacaaaauugagacuggccacaggauugaggaaugucccgucuauucaaucuagaggccuauucggggccauugccggcuucauugaagggggguggacagggaugguagauggaugguacgguuaucaccaucaaaaugagcaggggucaggauaugcagccgaccugaagagcacacaaaaugccauugacaagauuacuaacaaaguaaauucuguuauugaaaagaugaauacacaguucacagcaguggguaaagaguucaaccaccuggaaaaaagaauagagaauuuaaauaaaaaaguugaugaugguuuccuggacauuuggacuuacaaugccgaacuguugguucuauuggaaaaugaaagaacuuuggacuaccacgauucaaaugugaagaacuuguaugaaaagguaagaaaccaguuaaaaaacaaugccaaggaaauuggaaacggcugcuuugaauuuuaccacaaaugcgauaacacgugcauggaaagugucaaaaaugggacuuaugacuacccaaaauacucagaggaagcaaaauuaaacagagaaaaaauagaugggguaaaacuggaaucaacaaggauuuaccagauuuuggcgaucuauucaacugucgccaguucauugguacugguagucucccugggggcaaucagcuucuggaugugcucuaaugggucucuacaguguagaauauguauuuaa

SEQ ID NO: 43026 - RNA, 1701 nt, Artificial Sequence
  derived and/or modified CDS sequence (wt) from hemagglutinin__InfluenzaA__AHG96346
augaaggcaauacuaguaguucugcuauauacauuugcaaccgcaaaugcagacacauuauguauagguuaucaugcgaacaauucaacagacacuguagacacaguacuagaaaagaauguaacaguaacacacucuguuaaccuucuagaagacaagcauaacgggaaacuaugcaaacuaagagggguagccccauugcauuuggguaaauguaacauugcuggcuggauccugggaaauccagagugugaaucacucuccacagcaaguucaugguccuacauuguggaaacaucuaguucagacaauggaacguguuacccaggagauuucaucaauuaugaggagcuaagagagcaauugagcucagugucaucauuugaaagguuugagauauuccccaagacaaguucauggcccaaucaugacucgaacaaagguguaacggcagcauguccucacgcuggagcaaaaagcuucuacaaaaauuuaauauggcuaguuaaaaaaggaaauucauacccaaagcucagccaauccuacauuaaugauaaagggaaagaaguccucgugcuguggggcauucaccacccaucuacuacugcugaccaacaaagucucuaucagaaugcagaugcauauguuuuuguggggacaucaagauacagcaagaaguucaagccggaaauagcaauaagacccaaagugagggaucaagaagggagaaugaacuauuacuggacacuaguagagccgggagacaaaauaacauucgaagcaacuggaaaucuagugguaccgagauaugcauucacaauggaaagaaaugcuggaucugguauuaucauuucagauacaccaguccacgauugcaauacaacuugucagacacccgagggugcuauaaacaccagccucccauuucagaauauacauccgaucacaauuggaaaauguccaaaguauguaaaaagcacaaaauugagacuggccacaggauugaggaaugucccgucuauucaaucuagaggccuauucggggccauugccggcuucauugaagggggguggacagggaugguagauggaugguacgguuaucaccaucaaaaugagcaggggucaggauaugcagccgaccugaagagcacacaaaaugccauugacaagauuacuaacaaaguaaauucuguuauugaaaagaugaauacacaguucacagcaguggguaaagaguucaaccaccuggaaaaaagaauagagaauuuaaauaaaaaaguugaugaugguuuccuggacauuuggacuuacaaugccgaacuguugguucuauuggaaaaugaaagaacuuuggacuaccacgauucaaaugugaagaacuuguaugaaaagguaagaaaccaguuaaaaaacaaugccaaggaaauuggaaacggcugcuuugaauuuuaccacaaaugcgauaacacgugcauggaaagugucaaaaaugggacuuaugacuacccaaaauacucagaggaagcaaaauuaaacagagaaaaaauagaugggguaaaacuggaaucaacaaggauuuaccagauuuuggcgaucuauucaacugucgccaguucauugguacugguagucucccugggggcaaucagcuucuggaugugcucuaaugggucucuacaguguagaauauguauuuaa

SEQ ID NO: 43027 - RNA, 1701 nt, Artificial Sequence
  derived and/or modified CDS sequence (wt) from hemagglutinin__InfluenzaA__AHG96347
augaaggcaauacuaguaguucugcuauacacauuugcaaccgcaaaugcagacacauuauguauagguuaucaugcgaacaauucaacagacacuguagacacaguacuagaaaagaauguaacaguaacacacucuguuaaccuucuagaagacaagcauaacgggaaacuaugcaaacuaagagggguagccccauugcauuuggguaaauguaacauugcuggcuggauccugggaaauccagagugugaaucacucuccacagcaaguucaugguccuacauuguggaaacaucuaguucagacaauggaacguguuacccaggagauuucaucaauuaugaggagcuaagagagcaauugagcucagugucaucauuugaaagauuugagauauuccccaagacaaguucauggcccaaucaugacucgaacaaagguguaacggcagcauguccucacgcuggagcaaaaagcuucuacaaaaauuuaauauggcuaguuaaaaaaggaaauucauacccaaagcucagccaauccuacauuaaugauaaagggaaagaaguccucgugcuguggggcauucaccauccaucuacuacugcugaccaacaaagucucuaucagaaugcagaugcauauguuuuuguggggacaucaagauacagcaagaaguucaagccggaaauagcaauaagacccaaagugagggaucaagaagggagaaugaacuauuacuggacacuaguagagccgggagacaaaauaacauucgaagcaacuggaaaucuagugguaccgagauaugcauucacaauggaaagaaaugcuggaucugguauuaucauuucagauacaccaguccacgauugcaauacaacuugucagacacccgagggugcuauaaacaccagccucccauuucagaauauacauccgaucacaauuggaaaauguccaaaguauguaaaaagcacaaaauugagacuggccacaggauugaggaaugucccaucuauucaaucuagaggccuauucggggccauugccggcuucauugaagggggguggacagggaugguagauggaugguacgguuaucaccaucaaaaugagcaggggucaggauaugcagccgaccugaagagcacacaaaaugccauugacaaaauuacuaacaaaguaaauucuguuauugaaaagaugaauacacaguucacagcaguggguaaagaguucaaccacuuggaaaaaagaauagagaauuuaaauaaaaaaguugaugaugguuuccuggacauuuggacuuacaaugccgaacugcugguucuauuggaaaaugaaagaacuuuggacuaccacgauucaaaugugaagaacuuguaugaaaagguaagaaaccaguuaaaaaacaaugccaaggaaauuggaaacggcugcuuugaauuuuaccacaaaugcgauaacacgugcauggaaagugucaaaaaugggacuuaugacuacccaaaauacucagaggaagcaaaauuaaacagagaaaaaauagaugggguaaaacuggaaucaacaaggauuuaccagauuuuggcgaucuauucaacugucgccaguucauugguacugguagucucccugggggcaaucagcuucuggaugugcucuaaugggucucuacaguguagaauauguauuuaa

SEQ ID NO: 43028 - RNA, 1701 nt, Artificial Sequence; identical to SEQ ID NO: 43002
  derived and/or modified CDS sequence (wt) from hemagglutinin__InfluenzaA__AHG96348

SEQ ID NO: 43029 - RNA, 1701 nt, Artificial Sequence
  derived and/or modified CDS sequence (wt) from hemagglutinin__InfluenzaA__AHG96349
augaaggcaauacuaguaguucugcuauauacauuugcaaccgcaaaugcagacacauuauguauagguuaucaugcgaacaauucaacagacacuguagacacaguacuagaaaagaauguaacaguaacacacucuguuaaccuucuagaagacaagcauaacgggaaacuaugcaaacuaagagggguagccccauugcauuuggguaaauguaacauugcuggcuggauccugggaaauccagagugugaaucacucuccacagcaaguucaugguccuacauuguggaaacauccaguucagacaauggaacguguuacccaggagauuucaucaauuaugaggagcuaagagagcaauugagcucagugucaucauuugaaagguuugagauauuccccaagacaaguucauggcccaaucaugacucgaacaaagguguaacggcagcauguccucacgcuggagcaaaaagcuucuacaaaaauuuaauauggcuaguuaaaaaaggaaauucauacccaaagcucagccaauccuacauuaaugauaaagggaaagaaguccucgugcuguggggcauucaccacccaucuacuacugcugaccaacaaagucucuaucagaaugcagaugcauauguuuuuguggggacaucaagauacagcaagaaguucaagccggaaauagcaauaagacccaaagugagggaucaagaagggagaaugaacuauuacuggacacuaguagagccgggagacaaaauaacauucgaagcaacuggaaaucuagugguaccgagauaugcauucacaauggaaagaaaugcuggaucugguauuaucauuucagauacaccaguccacgauugcaauacaacuugucagacacccgagggugcuauaaacaccagccucccauuucagaauauacauccgaucacaauuggaaaauguccaaaguauguaaaaagcacaaaauugagacuggccacaggauugaggaaugucccgucuauucaaucuagaggccuauucggggccauugccggcuucauugaaggaggguggacagggaugguagauggaugguacgguuaucaccaucaaaacgagcaggggucaggauaugcagccgaccugaagagcacacaaaaugccauugacaagauuacuaacaaaguaaauucuguuauugaaaagaugaauacacaguucacagcaguggguaaagaguucaaccaccuggaaaaaagaauagagaauuuaaauaaaaaaguugaugaugguuuccuggacauuuggacuuacaaugccgaacuguugguucuauuggaaaaugaaagaacuuuggacuaccacgauucaaaugugaagaacuuguaugaaaagguaagaaaccaguuaaaaaacaaugccaaggaaauuggaaacggcugcuuugaauuuuaccacaaaugcgauaacacgugcauggaaagugucaaaaaugggacuuaugacuacccaaaauacucagaggaagcaaaauuaaacagagaaaaaauagaugggguaaagcuggaaucaacaaggauuuaccagauuuuggcgaucuauucaacugucgccaguucauugguacugguagucucccugggggcaaucagcuucuggaugugcucuaaugggucucuacaguguagaauauguauuuaa

SEQ ID NO: 43030 - RNA, 1701 nt, Artificial Sequence
  derived and/or modified CDS sequence (wt) from hemagglutinin__InfluenzaA__AHG96350
augaaggcaauacuaguaguucugcuauauacauuugcaaccgcaaaugcagacacauuauguauagguuaucaugcgaacaauucaacagacacuguagacacaguacuagaaaagaauguaacaguaacacacucuguuaaccuucuagaagacaagcauaacgggaaacuaugcaaacuaagagggguagccccauugcauuuggguaaauguaacauugcuggcuggauccugggaaauccagagugugaaucacucuccacagcaaguucaugguccuacauuguggaaacaucuaguucagacaauggaacguguuacccaggagauuucaucaauuaugaagagcuaagagagcaauugagcucagugucaucauuugaaagguuugagauauuccccaagacaaguucauggcccaaucaugacucgaacaaagguguaacggcagcauguccucacgcuggagcaaaaagcuucuacaaaaauuuaauauggcuaguuaaaaaaggaaauucauacccaaagcucagccaauccuacauuaaugauaaagggaaagaaguccucgugcuguggggcauucaccacccaucuacuacugcugaccaacaaagucucuaucagaaugcagaugcauauguuuuuguggggacaucaagauacagcaagaaguucaagccggaaauagcaauaagacccaaagugagggaucaagaagggagaaugaacuacuacuggacacuaguagagccgggagacaaaauaacauucgaagcaacuggaaaucuagugguaccgagauaugcauucacaauggaaagaaaugcuggaucugguauuaucauuucagauacaccaguccacgauugcaauacaacuugucagacacccgagggugcuauaaacaccagccucccauuucagaauauacauccgaucacaauuggaaaauguccaaaguauguaaaaagcacaaaauugagacuggccacaggauugaggaaugucccgucuauucaaucuagaggccuauucggggccauugccggcuucauugaagggggguggacagggaugguagauggaugguacgguuaucaccaucaaaaugagcaggggucaggauaugcagccgaccugaagagcacacaaaaugccauugacaagauuacuaacaaaguaaauucuguuauugaaaagaugaauacacaguucacagcaguggguaaagaguucaaccaccuggaaaaaagaauagagaauuuaaauaaaaaaguugaugaugguuuccuggacauuuggacuuacaaugccgaacuguugguucuauuggaaaaugaaagaacuuuggacuaccacgauucaaaugugaagaacuuguaugaaaagguaagaaaccaguuaaaaaacaaugccaaggaaauuggaaacggcugcuuugaauuuuaccacaaaugcgauaacacgugcauggaaagugucaaaaaugggacuuaugacuacccaaaauacucagaggaagcaaaauuaaacagagaaaaaauagaugggguaaaacuggaaucaacaaggauuuaccagauuuuggcgaucuauucaacugucgccaguucauugguacugguagucucccugggggcaaucagcuucuggaugugcucuaaugggucucuacaguguagaauauguauuuaa

SEQ ID NO: 43031 - RNA, 1701 nt, Artificial Sequence
  derived and/or modified CDS sequence (wt) from hemagglutinin__InfluenzaA__AHG96351
augaaggcaauacuaguaguucugcuauauacauuugcaaccgcaaaugcagacacauuauguauagguuaucaugcgaacaauucaacagacacuguagacacaguacuagaaaagaauguaacaguaacacacucuguuaaccuucuagaagacaagcauaacgggaaacuaugcaaacuaagagggguagccccauugcauuuggguaaauguaacauugcuggcuggauccugggaaauccagagugugaaucacucuccacagcaaguucaugguccuacauuguggaaacaucuaguucagacaauggaacguguuacccaggagauuucaucaauuaugaggagcuaagagagcaauugagcucagugucaucauuugaaagguuugagauauuccccaagacaaguucauggcccaaucaugacucgaacaaagguguaacggcagcauguccucacgcuggagcaaaaagcuucuacaaaaauuuaauauggcuaguuaaaaaaggaaauucauacccaaagcucagccaauccuacauuaaugauaaagggaaagaaguccucgugcuguggggcauucaccauccaucuacuacugcugaccaacaaagucucuaucagaaugcagaugcauauguuuuuguggggacaucaagauacagcaagaaguucaagccggaaauagcaauaagacccaaagugagggaucaagaagggagaaugaacuauuacuggacacuaguagagccgggagacaaaauaacauucgaagcaacuggaaaucuagugguaccgagauaugcauucacaauggaaagaaaugcuggaucugguauuaucauuucagauacaccaguccacgauugcaauacaacuugucagacacccgagggugcuauaaacaccagccucccauuucagaauauacauccgaucacaauuggaaaauguccaaaguauguaaaaagcacaaaauugagacuggccacaggauugaggaaugucccgucuauucaaucuagaggccuauucggggccauugccggcuucauugaagggggguggacagggaugguagauggaugguacgguuaucaccaucaaaaugagcaggggucaggauaugcagccgaccugaagagcacacaaaaugccauugacaagauuacuaacaaaguaaauucuguuauugaaaagaugaauacacaguucacagcaguggguaaagaguucaaccaccuggaaaaaagaauagagaauuuaaauaaaaaaguugaugaugguuuccuggacauuuggacuuacaaugccgaacuguugguucuauuggaaaaugaaagaacuuuggacuaccacgauucaaaugugaagaacuuguaugaaaagguaagaaaccaguuaaaaaacaaugccaaggaaauuggaaacggcugcuuugaauuuuaccacaaaugcgauaacacgugcauggaaagugucaaaaaugggacuuaugacuacccaaaauacucagaggaagcaaaauuaaacagagaaaaaauagaugggguaaagcuggaaucaacaaggauuuaccagauuuuggcgaucuauucaacugucgccaguucauugguacugguagucucccugggggcaaucagcuucuggaugugcucuaaugggucucuacaguguagaauauguauuuaa

SEQ ID NO: 43032 - RNA, 1701 nt, Artificial Sequence
  derived and/or modified CDS sequence (wt) from hemagglutinin__InfluenzaA__AHG96352
augaaggcaauacuaguaguucugcuauauacauuugcaaccgcaaaugcagacacauuauguauagguuaucaugcgaacaauucaacagacacuguagacacaguacuagaaaagaauguaacaguaacacacucuguuaaccuucuagaagacaagcauaacgggaaacuaugcaaacuaagagggguagccccauugcauuuggguaaauguaacauugcuggcuggauccugggaaauccagagugugaaucacucuccacagcaaguucaugguccuacauuguggaaacaucuaguucagacaauggaacguguuacccaggagauuucaucaauuaugaggagcuaagagagcaauugagcucagugucaucauuugaaagguuugagauauuccccaagacaaguucauggcccaaucaugacucgaacaaagguguaacggcagcauguccucacgcuggagcaaaaagcuucuacaaaaauuuaauauggcuaguuaaaaaaggaaauucauacccaaagcucagccaauccuacauuaaugauaaagggaaagaaguccucgugcuguggggcauucaccauccaucuacuacugcugaccaacaaagucucuaucagaaugcagaugcauauguuuuuguggggacaucaagauacagcaagaaguucaagccggaaauagcaauaagacccaaagugagggaucaagaagggagaaugaacuauuacuggacacuaguagagccgggagacaaaauaacauucgaagcaacuggaaaucuagugguaccgagauaugcauucacaauggaaagaaaugcuggaucugguauuaucauuucagauacaccaguccacgauugcaauacaacuugucagacacccgagggugcuauaaacaccagccucccauuucagaauauacauccgaucacaauuggaaaauguccaaaguauguaaaaagcacaaaauugagacuggccacaggauugaggaaugucccgucuauucaaucuagaggccuauucggggccauugccggcuucauugaagggggguggacagggaugguagauggaugguacgguuaucaccaucaaaaugagcaggggucaggauaugcagccgaccugaagagcacacaaaaugccauugacaagauuacuaacaaaguaaauucuguuauugaaaagaugaauacacaguucacagcaguggguaaagaguucaaccaccuggaaaaaagaauagagaauuuaaauaaaaaaguugaugaugguuuccuggacauuuggacuuacaaugccgaacuguugguucuauuggaaaaugaaagaacuuuggacuaccacgauucaaaugugaaaaacuuguaugaaaagguaagaaaccaguuaaaaaacaaugccaaggaaauuggaaacggcugcuuugaauuuuaccacaaaugcgauaacacgugcauggaaagugucaaaaaugggacuuaugacuacccaaaauacucagaggaagcaaaauuaaacagagaaaaaauagaugggguaaagcuggaaucaacaaggauuuaccagauuuuggcgaucuauucaacugucgccaguucauugguacugguagucucccugggggcaaucagcuucuggaugugcucuaaugggucucuacaguguagaauauguauuuaa

SEQ ID NO: 43033 - RNA, 1701 nt, Artificial Sequence
  derived and/or modified CDS sequence (wt) from hemagglutinin__InfluenzaA__AHG96353
augaaggcaauacuaguaguucugcuauauacauuugcaaccacaaaugcagacacauuauguauagguuaucaugcgaacaauucaacagacacuguagacacaguacuagaaaagaauguaacaguaacacacucuguuaaccuucuagaagacaagcauaacgggaaacuaugcaaacuaagagggguagccccauugcauuuggguaaauguaacauugcuggcuggauccugggaaauccagagugugaaucacucuccacagcaaguucaugguccuacauuguggaaacaucuaguucagacaauggaacguguuacccaggagauuucaucaauuaugaggagcuaagagagcaauugagcucagugucaucauuugaaagguuugagauauuccccaagacaaguucauggcccaaucaugacucgaacaaagguguaacggcagcauguccucacgcuggagcaaaaagcuucuacaaaaauuuaauauggcuaguuaaaaaaggaaauucauacccaaagcucagccaauccuacauuaaugauaaagggaaagaaguccucgugcuguggggcauucaccauccaucuacuacugcugaccaacaaagucucuaucagaaugcagaugcauauguuuuuguggggacaucaagauacagcaagaaguucaagccggaaauagcaauaagacccaaagugagggaucaagaagggagaaugaacuauuacuggacacuaguagagccgggagacaaaauaacauucgaagcaacuggaaaucuagugguaccgagauaugcauucacaauggaaagaaaugcuggaucugguauuaucauuucagauacaccaguccacgauugcaauacaacuugucagacacccgagggugcuauaaacaccagccucccauuucagaauauacauccgaucacaauuggaaaauguccaaaguauguaaaaagcacaaaauugagacuggccacaggauugaggaaugucccgucuauucaaucuagaggccuauucggggccauugccggcuucauugaagggggguggacagggaugguagauggaugguacgguuaucaccaucaaaaugagcaggggucaggauaugcagccgaccugaagagcacacaaaaugccauugacaagauuacuaacaaaguaaauucuguuauugaaaagaugaauacacaguucacagcaguggguaaagaguucaaccaccuggaaaaaagaauagagaauuuaaauaaaaaaguugaugaugguuuccuggacauuuggacuuacaaugccgaacuguugguucuauuggaaaaugaaagaacuuuggacuaccacgauucaaaugugaagaacuuguaugaaaagguaagaaaccaguuaaaaaacaaugcaaaggaaauuggaaacggcugcuuugaauuuuaccacaaaugcgauaacacgugcauggaaagugucaaaaaugggacuuaugacuacccaaaauacucagaggaagcaaaauuaaacagagaaaaaauagaugggguaaagcuggaaucaacaaggauuuaccagauuuuggcgaucuauucaacugucgccaguucauugguacugguagucucccugggggcaaucagcuucuggaugugcucuaaugggucucuacaguguagaauauguauuuaa

SEQ ID NO: 43034 - RNA, 1701 nt, Artificial Sequence
  derived and/or modified CDS sequence (wt) from hemagglutinin__InfluenzaA__AHG96354
augaaggcaauacuaguaguucugcuauauacauuugcaaccgcaaaugcagacacauuauguauagguuaucaugcgaacaauucaacagacacuguagacacaguacuagaaaagaauguaacaguaacacacucuguuaaccuucuagaagacaagcauaacgggaaacuaugcaaacuaagagggguagccccauugcauuuggguaaauguaacauugcuggcuggauccugggaaauccagagugugaaucacucuccacagcaaguucaugguccuacauuguggaaacaucuaguucagacaauggaacguguuacccaggagauuucaucaauuaugaggagcuaagagagcaauugagcucagugucaucauuugaaagguuugagauauuccccaagacaaguucauggcccaaucaugacucgaacaaagguguaacggcagcauguccucacgcuggagcaaaaagcuucuacaaaaauuuaauauggcuaguuaaaaaaggaaauucauacccaaagcucagccaauccuacauuaaugauaaagggaaagaaguccucgugcuguggggcauucaccacccaucuacuacugcugaccaacaaagucucuaucagaaugcagaugcauauguuuuuguggggacaucaagauacagcaagaaguucaagccggaaauagcaauaagacccaaagugagggaucaagaagggagaaugaacuacuacuggacacuaguagagccgggagacaaaauaacauucgaagcaacuggaaaucuagugguaccgagauaugcauucacaauggaaagaaaugcuggaucugguauuaucauuucagauacaccaguccacgauugcaauacaacuugucagacacccgagggugcuauaaacaccagccucccauuucagaauauacauccgaucacaauuggaaaauguccaaaguauguaaaaagcacaaaauugagacuggccacaggauugaggaaugucccgucuauucaaucuagaggccuauucggggccauugccggcuucauugaagggggguggacagggaugguagauggaugguacgguuaucaccaucaaaaugagcaggggucaggauaugcagccgaccugaagagcacacaaaaugccauugacaagauuacuaacaaaguaaauucuguuauugaaaagaugaauacacaguucacagcaguggguaaagaguucaaccaccuggaaaaaagaauagagaauuuaaauaaaaaaguugaugaugguuuccuggacauuuggacuuacaaugccgaacuguugguucuauuggaaaaugaaagaacuuuggacuaccacgauucaaaugugaagaacuuguaugaaaagguaagaaaccaguuaaaaaacaaugccaaggaaauuggaaacggcugcuuugaauuuuaccacaaaugcgauaacacgugcauggaaagugucaaaaaugggacuuaugacuacccaaaauacucagaggaggcaaaauuaaacagagaaaaaauagaugggguaaaacuggaaucaacaaggauuuaccagauuuuggcgaucuauucaacugucgccaguucauugguacugguagucucccugggggcaaucagcuucuggaugugcucuaaugggucucuacaguguagaauauguauuuaa

SEQ ID NO: 43035 - RNA, 1701 nt, Artificial Sequence
  derived and/or modified CDS sequence (wt) from hemagglutinin__InfluenzaA__AHG96355
augaaggcaauacuaguaguucugcuauauacacuugcaaccgcaaaugcagacacauuauguauagguuaucaugcgaacaauucaacagacacuguagacacaguacuagaaaagaauguaacaguaacacacucuguuaaccuucuagaagacaagcauaacgggaaacuaugcaaacuaagagggguagccccauugcauuuggguaaauguaacauugcuggcuggauccugggaaauccagagugugaaucacuauccacggcaaguucaugguccuacauuguggaaacaucuaguucagacaauggaacguguuacccaggagauuucaucaauuaugaggagcuaagagagcaauugagcucagugucaucauuugaaagguuugagauauuccccaagacaaguucauggcccaaucaugacucgaacaaagguguaacggcagcauguccucacgcuggagcaaaaagcuucuacaaaaauuuaauauggcuaguuaaaaaaggaaauucauacccaaagcucagccaauccuacauuaaugauaaagggaaagaaguccucgugcuguggggcauucaccacccaucuacuacugcugaccaacaaagucucuaucagaaugcagaugcauauguuuuuguggggacaucaagauacagcaagaaguucaagccggaaauagcaauaagacccaaagugagggaucaagaagggagaaugaacuacuacuggacacuaguagagccgggagacaaaauaacauucgaagcaacuggaaaucuagugguaccgagauaugcauucacaauggaaagaaaugcuggaucugguauuaucauuucagauacaccaguccacgauugcaauacaacuugucagacacccgagggugcuauaaacaccagccucccauuucagaauauacauccgaucacaauuggaaaauguccaaaguauguaaaaagcacaaaauugagacuggccacaggauugaggaaugucccgucuauucaaucuagaggccuauucggggccauugccggcuucauugaagggggguggacagggaugguagauggaugguacgguuaucaccaucaaaaugagcaggggucaggauaugcagccgaccugaagagcacacaaaaugccauugacaagauuacuaacaaaguaaauucuguuauugaaaagaugaauacacaguucacagcaguggguaaagaguucaaccagcuggaaaaaagaauagagaauuuaaauaaaaaaguugaugaugguuuccuggacauuuggacuuacaaugccgaacuguugguucuauuggaaaaugaaagaacuuuggacuaccacgauucaaaugugaagaacuuguaugaaaagguaagaaaccaguuaaaaaacaaugccaaggaaauuggaaacggcugcuuugaauuuuaccacaaaugcgauaacacgugcauggaaagugucaaaaaugggacuuaugacuacccaaaauacucagaggaagcaaaauuaaacagagaaaaaauagaugggguaaaacuggaaucaacaaggauuuaccagauuuuggcgaucuauucaacugucgccaguucauugguacugguagucucccugggggcaaucagcuucuggaugugcucuaaugggucucuacaguguagaauauguauuuaa

SEQ ID NO: 43036 - RNA, 1701 nt, Artificial Sequence
  derived and/or modified CDS sequence (wt) from hemagglutinin__InfluenzaA__AHG96356
augaagacuaucauugcuuugagcuacauucuauguuugguuuucgcucaaaaacuuccuggaaaugacaauagcacggcaacgcugugccuugggcaccaugcaguaccaaauggaacgauagugaaaacaaucacgaaugaccgaauugaaguuacuaaugcuacugagcugguucagaauuccucaauaggugaaauaugcgacaguccucaucagauccuugauggagaaaacugcacacuaauagaugcucuauugggagacccucagugugauggcuuucaaaauaagaaaugggaccuuuuuguugaacgaagcaaagccuacagcaacuguuacccuuaugaugugccggauuaugccucccuuaggucacuaguugccucauccggcacacuggaguuuaacaaugaaagcuucaauuggacuggagucacucaaaacggaacaaguucugcuugcauaaggagaucuaauaguaguuucuuuaguagauuaaauugguugacccacuuaaacuucaaauacccagcauuaaacgugacuaugccaaacaaugaacaauuugacaaauuguacauuugggggguucaccacccggguacggacaaggaccaaaucuuccuguaugcucaaucaucaggaagaaucacaguaucuaccaaaagaagccaacaagcuguaaucccaaauaucggaucuagacccagaauaaggaauaucccuagcagaauaagcaucuauuggacaauaguaaaaccgggagacauacuuuugauuaacagcacagggaaucuaauugcuccuagggguuacuucaaaauacgaagugggaaaagcucaauaaugagaucagaugcacccauuggcaaaugcaagucugaaugcaucacuccaaauggaagcauucccaaugacaaaccauuccaaaauguaaacaggaucacauacggggccugucccagauauguuaagcaaagcacucugaaacuggcaacaggaaugcgaaauguaccagagaaacaaacuagaggcauauuuggcgcaauagcggguuucauagaaaaugguugggagggaaugguggaugguugguacgguuucaggcaucaaaauucugagggaagaggacaagcagcagaucucaaaagcacucaagcagcaaucgaucaaaucaaugggaagcugaaucgauugaucgggaaaaccaacgagaaauuccaucagauugaaaaagaauucucagaaguagaagggagaauucaggaccuugagaaauauguugaggacacuaaaauagaucucuggucauacaacgcggagcuucuuguugcccuggagaaccaacauacaauugaucuaacugacucagaaaugaacaaacuguuugaaaaaacaaagaagcaacugagggaaaaugcugaggauaugggcaaugguuguuucaaaauauaccacaaaugugacaaugccugcauaggaucaauaagaaauggaacuuaugaccacaauguguacagggaugaagcauuaaacaaccgguuccagaucaagggaguugagcugaagucaggguacaaagauuggauccuauggauuuccuuugccauaucauguuuuuugcuuuguguugcuuuguugggguucaucaugugggccugccaaaagggcaacauuaggugcaacauuugcauuuga

SEQ ID NO: 43037 - RNA, 1701 nt, Artificial Sequence
  derived and/or modified CDS sequence (wt) from hemagglutinin__InfluenzaA__AHG96359
augaagacuaucauugcuuugagcuacauucuaugucugguuuucgcucaaaaacuucccggaaaugacaacagcacggcaacgcugugccuugggcaccaugcaguaccaaacggaacgauagugaaaacaaucacgaaugaccaaauugaaguuacuaaugcuacugagcugguucagaguuccucaacagguggaauaugcgacaguccucaucagauccuugauggagaaaacugcacacuaauagaugcucuauugggagacccucagugugauggcuuccaaaauaagaaaugggaccuuuuuguugaacgcagcaaagccuacagcaacuguuacccuuaugaugugccggauuaugccucccuuaggucacuaguugccucauccggcacacuggaguuuaacgaugaaagcuucaauuggacuggagucacucaaaauggaacaagcucuucuugcaaaaggagaucuaauaacaguuucuuuaguagauugaauugguugacccacuuaaaauucaaauacccagcauugaacgugacuaugccaaacaaugaaaaauuugacaaauuguacauuugggggguucaccacccgguuacggacaaugaccaaaucuuccuguaugcucaagcaucaggaagaaucacagucucuaccaaaagaagccaacaaacuguaaucccgaauaucggaucuagacccagaauaaggaauauccccagcagaauaagcaucuauuggacaauaguaaaaccgggagacauacuuuugauuaacagcacagggaaucuaauugcuccuagggguuacuucaaaauacgaagugggaaaagcucaauaaugagaucagaugcacccauuggcaaaugcaauucugaaugcaucacuccaaauggaagcauucccaaugacaaaccauuucaaaauguaaacaggaucacauauggggccugucccagauauguuaagcaaaacacucugaaauuggcaacagggaugcgaaauguaccagagaaacaaacuagaggcauauuuggcgcaaucgcggguuucauagaaaaugguugggagggaaugguggaugguugguacgguuucaggcaucaaaauucugagggaauaggacaagcagcagaucucaaaagcacucaagcagcaaucaaucaaaucaaugggaagcugaauagguugaucgggaaaaccaacgagaaauuccaucagauugaaaaagaauucucagaaguagaagggagaauucaggaccucgagaaauauguugaggacacuaaaauagaucucuggucauacaacgcggagcuucuuguugcccuggagaaccaacauacaauugaucuaacugacucagaaaugaacaaacuguuugaaagaacaaagaagcaacugagggaaaaugcugaggauaugggcaaugguuguuucaaaauauaccacaaaugugacaaugccugcauaggaucaaucagaaauggaacuuaugaccaugauguauacagagaugaagcauuaaacaaccgguuccagaucaaaggcguugagcugaagucaggauacaaagauuggauccuauggauuuccuuugccauaucauguuuuuugcuuuguguugcuuuguugggguucaucaugugggccugccaaaaaggcaacauuaggugcaacauuugcauuuga

SEQ ID NO: 43038 - RNA, 1701 nt, Artificial Sequence; identical to SEQ ID NO: 43037
  derived and/or modified CDS sequence (wt) from hemagglutinin__InfluenzaA__AHG96371

SEQ ID NO: 43039 - RNA, 1701 nt, Artificial Sequence; identical to SEQ ID NO: 43037
  derived and/or modified CDS sequence (wt) from hemagglutinin__InfluenzaA__AHG96383

SEQ ID NO: 43040 - RNA, 1698 nt, Artificial Sequence; identical to SEQ ID NO: 39805
  derived and/or modified CDS sequence (wt) from hemagglutinin__InfluenzaA__AHG96395

SEQ ID NO: 43041 - RNA, 1701 nt, Artificial Sequence; identical to SEQ ID NO: 43037
  derived and/or modified CDS sequence (wt) from hemagglutinin__InfluenzaA__AHG96407

SEQ ID NO: 43042 - RNA, 1701 nt, Artificial Sequence; identical to SEQ ID NO: 43037
  derived and/or modified CDS sequence (wt) from hemagglutinin__InfluenzaA__AHG96419

SEQ ID NO: 43043 - RNA, 1701 nt, Artificial Sequence; identical to SEQ ID NO: 43037
  derived and/or modified CDS sequence (wt) from hemagglutinin__InfluenzaA__AHG96431

SEQ ID NO: 43044 - RNA, 1701 nt, Artificial Sequence; identical to SEQ ID NO: 43037
  derived and/or modified CDS sequence (wt) from hemagglutinin__InfluenzaA__AHG96443

SEQ ID NO: 43045 - RNA, 1701 nt, Artificial Sequence; identical to SEQ ID NO: 43037
  derived and/or modified CDS sequence (wt) from hemagglutinin__InfluenzaA__AHG96455

SEQ ID NO: 43046 - RNA, 1701 nt, Artificial Sequence; identical to SEQ ID NO: 43037
  derived and/or modified CDS sequence (wt) from hemagglutinin__InfluenzaA__AHG96467

SEQ ID NO: 43047 - RNA, 1701 nt, Artificial Sequence; identical to SEQ ID NO: 43037
  derived and/or modified CDS sequence (wt) from hemagglutinin__InfluenzaA__AHG96479

SEQ ID NO: 43048 - RNA, 1701 nt, Artificial Sequence; identical to SEQ ID NO: 43037
  derived and/or modified CDS sequence (wt) from hemagglutinin__InfluenzaA__AHG96491

SEQ ID NO: 43049 - RNA, 1701 nt, Artificial Sequence; identical to SEQ ID NO: 34368
  derived and/or modified CDS sequence (wt) from hemagglutinin__InfluenzaA__AHG96503

SEQ ID NO: 43050 - RNA, 1698 nt, Artificial Sequence; identical to SEQ ID NO: 39805
  derived and/or modified CDS sequence (wt) from hemagglutinin__InfluenzaA__AHG96515

SEQ ID NO: 43051 - RNA, 1698 nt, Artificial Sequence; identical to SEQ ID NO: 39805
  derived and/or modified CDS sequence (wt) from hemagglutinin__InfluenzaA__AHG96527

SEQ ID NO: 43052 - RNA, 1698 nt, Artificial Sequence; identical to SEQ ID NO: 39805
  derived and/or modified CDS sequence (wt) from hemagglutinin__InfluenzaA__AHG96539

SEQ ID NO: 43053 - RNA, 1698 nt, Artificial Sequence; identical to SEQ ID NO: 39805
  derived and/or modified CDS sequence (wt) from hemagglutinin__InfluenzaA__AHG96551

SEQ ID NO: 43054 - RNA, 1698 nt, Artificial Sequence; identical to SEQ ID NO: 42985
  derived and/or modified CDS sequence (wt) from hemagglutinin__InfluenzaA__AHG96563

SEQ ID NO: 43055 - RNA, 1698 nt, Artificial Sequence; identical to SEQ ID NO: 39805
  derived and/or modified CDS sequence (wt) from hemagglutinin__InfluenzaA__AHG96575

SEQ ID NO: 43056 - RNA, 1698 nt, Artificial Sequence; identical to SEQ ID NO: 39805
  derived and/or modified CDS sequence (wt) from hemagglutinin__InfluenzaA__AHG96587

SEQ ID NO: 43057 - RNA, 1698 nt, Artificial Sequence; identical to SEQ ID NO: 39805
  derived and/or modified CDS sequence (wt) from hemagglutinin__InfluenzaA__AHG96599

SEQ ID NO: 43058 - RNA, 1698 nt, Artificial Sequence; identical to SEQ ID NO: 39805
  derived and/or modified CDS sequence (wt) from hemagglutinin__InfluenzaA__AHG96611

SEQ ID NO: 43059 - RNA, 1698 nt, Artificial Sequence; identical to SEQ ID NO: 39805
  derived and/or modified CDS sequence (wt) from hemagglutinin__InfluenzaA__AHG96623

SEQ ID NO: 43060 - RNA, 1698 nt, Artificial Sequence; identical to SEQ ID NO: 39805
  derived and/or modified CDS sequence (wt) from hemagglutinin__InfluenzaA__AHG96635

SEQ ID NO: 43061 - RNA, 1698 nt, Artificial Sequence; identical to SEQ ID NO: 39805
  derived and/or modified CDS sequence (wt) from hemagglutinin__InfluenzaA__AHG96647

SEQ ID NO: 43062 - RNA, 1698 nt, Artificial Sequence; identical to SEQ ID NO: 39805
  derived and/or modified CDS sequence (wt) from hemagglutinin__InfluenzaA__AHG96659

SEQ ID NO: 43063 - RNA, 1698 nt, Artificial Sequence; identical to SEQ ID NO: 39805
  derived and/or modified CDS sequence (wt) from hemagglutinin__InfluenzaA__AHG96671

SEQ ID NO: 43064 - RNA, 1698 nt, Artificial Sequence; identical to SEQ ID NO: 39805
  derived and/or modified CDS sequence (wt) from hemagglutinin__InfluenzaA__AHG96683

SEQ ID NO: 43065 - RNA, 1701 nt, Artificial Sequence; identical to SEQ ID NO: 43037
  derived and/or modified CDS sequence (wt) from hemagglutinin__InfluenzaA__AHG96695

SEQ ID NO: 43066 - RNA, 1701 nt, Artificial Sequence; identical to SEQ ID NO: 43037
  derived and/or modified CDS sequence (wt) from hemagglutinin__InfluenzaA__AHG96707

SEQ ID NO: 43067 - RNA, 1701 nt, Artificial Sequence; identical to SEQ ID NO: 43037
  derived and/or modified CDS sequence (wt) from hemagglutinin__InfluenzaA__AHG96719

SEQ ID NO: 43068 - RNA, 1701 nt, Artificial Sequence; identical to SEQ ID NO: 43037
  derived and/or modified CDS sequence (wt) from hemagglutinin__InfluenzaA__AHG96731

SEQ ID NO: 43069 - RNA, 1701 nt, Artificial Sequence; identical to SEQ ID NO: 43037
  derived and/or modified CDS sequence (wt) from hemagglutinin__InfluenzaA__AHG96743

SEQ ID NO: 43070 - RNA, 1701 nt, Artificial Sequence; identical to SEQ ID NO: 43037
  derived and/or modified CDS sequence (wt) from hemagglutinin__InfluenzaA__AHG96755

SEQ ID NO: 43071 - RNA, 1701 nt, Artificial Sequence; identical to SEQ ID NO: 43037
  derived and/or modified CDS sequence (wt) from hemagglutinin__InfluenzaA__AHG96767

SEQ ID NO: 43072 - RNA, 1701 nt, Artificial Sequence; identical to SEQ ID NO: 43037
  derived and/or modified CDS sequence (wt) from hemagglutinin__InfluenzaA__AHG96779

SEQ ID NO: 43073 - RNA, 1701 nt, Artificial Sequence
  derived and/or modified CDS sequence (wt) from hemagglutinin__InfluenzaA__AHG96791
augaagacuaucauugcuuugagcuacauucuaugucugguuuucgcucaaaaacuucccggaaaugacaacagcacggcaacgcugugccuugggcaccaugcaguaccaaacggaacgauagugaaaacaaucacgaaugaccaaauugaaguuacuaaugcuacugagcugguucagaguuccucaacagguggaauaugcgacaguccucaucagauccuugauggagaaaacugcacacuaauagaugcucuauugggagacccucagugugauggcuuccaaaauaagaaaugggaccuuuuuguugaacgcagcaaagccuacagcaacuguuacccuuaugaugugccggauuaugccucccuuaggucacuaguugccucauccggcacacuggaguuuaacgaugaaagcuucaauuggacuggagucacucaaaauggaacaagcucuucuugcaaaaggagaucuaauaacaguuucuuuaguagauugaauugguugacccaauuaaaauucaaauacccagcauugaacgugacuaugccaaacaaugaaaaauuugacaaauuguacauuugggggguucaccacccgguuacggacaaugaccaaaucuuccuguaugcucaagcaucaggaagaaucacagucucuaccaaaagaagccaacaaacuguaaucccgaauaucggaucuagacccagaauaaggaauauccccagcagaauaagcaucuauuggacaauaguaaaaccgggagacauacuuuugauuaacagcacagggaaucuaauugcuccuagggguuacuucaaaauacgaagugggaaaagcucaauaaugagaucagaugcacccauuggcaaaugcaauucugaaugcaucacuccaaauggaagcauucccaaugacaaaccauuucaaaauguaaacaggaucacauauggggccugucccagauauguuaagcaaaacacucugaaauuggcaacagggaugcgaaauguaccagagaaacaaacuagaggcauauuuggcgcaaucgcggguuucauagaaaaugguugggagggaaugguggaugguugguacgguuucaggcaucaaaauucugagggaauaggacaagcagcagaucucaaaagcacucaagcagcaaucaaucaaaucaaugggaagcugaauagguugaucgggaaaaccaacgagaaauuccaucagauugaaaaagaauucucagaaguagaaaggagaauucaggaccucgagaaauauguugaggacacuaaaauagaucucuggucauacaacgcggagcuucuuguugcccuggagaaccaacauacaauugaucuaacugacucagaaaugaacaaacuguuugaaagaacaaagaagcaacugagggaaaaugcugaggauaugggcaaugguuguuucaaaauauaccacaaaugugacaaugccugcauaggaucaaucagaaauggaacuuaugaccaugauguauacagagaugaagcauuaaacaaccgguuccagaucaaaggcguugagcugaagucaggauacaaagauuggauccuauggauuuccuuugccauaucauguuuuuugcuuuguguugcuuuguugggguucaucaugugggccugccaaaaaggcaacauuaggugcaacauuugcauuuga

SEQ ID NO: 43074 - RNA, 1701 nt, Artificial Sequence; identical to SEQ ID NO: 43037
  derived and/or modified CDS sequence (wt) from hemagglutinin__InfluenzaA__AHG96803

SEQ ID NO: 43075 - RNA, 1701 nt, Artificial Sequence; identical to SEQ ID NO: 43037
  derived and/or modified CDS sequence (wt) from hemagglutinin__InfluenzaA__AHG96815

SEQ ID NO: 43076 - RNA, 1701 nt, Artificial Sequence; identical to SEQ ID NO: 43037
  derived and/or modified CDS sequence (wt) from hemagglutinin__InfluenzaA__AHG96827

SEQ ID NO: 43077 - RNA, 1701 nt, Artificial Sequence; identical to SEQ ID NO: 43037
  derived and/or modified CDS sequence (wt) from hemagglutinin__InfluenzaA__AHG96839

SEQ ID NO: 43078 - RNA, 1701 nt, Artificial Sequence; identical to SEQ ID NO: 43037
  derived and/or modified CDS sequence (wt) from hemagglutinin__InfluenzaA__AHG96851

SEQ ID NO: 43079 - RNA, 1701 nt, Artificial Sequence; identical to SEQ ID NO: 43037
  derived and/or modified CDS sequence (wt) from hemagglutinin__InfluenzaA__AHG96863

SEQ ID NO: 43080 - RNA, 1701 nt, Artificial Sequence; identical to SEQ ID NO: 43037
  derived and/or modified CDS sequence (wt) from hemagglutinin__InfluenzaA__AHG96875

SEQ ID NO: 43081 - RNA, 1701 nt, Artificial Sequence; identical to SEQ ID NO: 43037
  derived and/or modified CDS sequence (wt) from hemagglutinin__InfluenzaA__AHG96887

SEQ ID NO: 43082 - RNA, 1701 nt, Artificial Sequence; identical to SEQ ID NO: 43037
  derived and/or modified CDS sequence (wt) from hemagglutinin__InfluenzaA__AHG96899

SEQ ID NO: 43083 - RNA, 1701 nt, Artificial Sequence; identical to SEQ ID NO: 43037
  derived and/or modified CDS sequence (wt) from hemagglutinin__InfluenzaA__AHG96911

SEQ ID NO: 43084 - RNA, 1701 nt, Artificial Sequence; identical to SEQ ID NO: 43037
  derived and/or modified CDS sequence (wt) from hemagglutinin__InfluenzaA__AHG96923

SEQ ID NO: 43085 - RNA, 1701 nt, Artificial Sequence; identical to SEQ ID NO: 43037
  derived and/or modified CDS sequence (wt) from hemagglutinin__InfluenzaA__AHG96935

SEQ ID NO: 43086 - RNA, 1701 nt, Artificial Sequence; identical to SEQ ID NO: 43037
  derived and/or modified CDS sequence (wt) from hemagglutinin__InfluenzaA__AHG96947

SEQ ID NO: 43087 - RNA, 1701 nt, Artificial Sequence; identical to SEQ ID NO: 43037
  derived and/or modified CDS sequence (wt) from hemagglutinin__InfluenzaA__AHG96959

SEQ ID NO: 43088 - RNA, 1701 nt, Artificial Sequence; identical to SEQ ID NO: 43037
  derived and/or modified CDS sequence (wt) from hemagglutinin__InfluenzaA__AHG96971

SEQ ID NO: 43089 - RNA, 1701 nt, Artificial Sequence; identical to SEQ ID NO: 43037
  derived and/or modified CDS sequence (wt) from hemagglutinin__InfluenzaA__AHG96983

SEQ ID NO: 43090 - RNA, 1701 nt, Artificial Sequence; identical to SEQ ID NO: 43037
  derived and/or modified CDS sequence (wt) from hemagglutinin__InfluenzaA__AHG96995

SEQ ID NO: 43091 - RNA, 1701 nt, Artificial Sequence; identical to SEQ ID NO: 43037
  derived and/or modified CDS sequence (wt) from hemagglutinin__InfluenzaA__AHG97007

SEQ ID NO: 43092 - RNA, 1701 nt, Artificial Sequence; identical to SEQ ID NO: 43037
  derived and/or modified CDS sequence (wt) from hemagglutinin__InfluenzaA__AHG97019

SEQ ID NO: 43093 - RNA, 1701 nt, Artificial Sequence; identical to SEQ ID NO: 43037
  derived and/or modified CDS sequence (wt) from hemagglutinin__InfluenzaA__AHG97031

SEQ ID NO: 43094 - RNA, 1701 nt, Artificial Sequence; identical to SEQ ID NO: 43037
  derived and/or modified CDS sequence (wt) from hemagglutinin__InfluenzaA__AHG97043

SEQ ID NO: 43095 - RNA, 1701 nt, Artificial Sequence
  derived and/or modified CDS sequence (wt) from hemagglutinin__InfluenzaA__AHH00866
augaagacuaucauugcuuugagcuacauuuuaugucuggcuuucgcucaaaaacuucccggaaaugacaacagcacggcaacgcugugccugggacaccaugcagugccaaacggaacgcuagugaaaacaaucacgaaugaccaaauugaagugacuaaugcuacugagcugguucagaguuccucaacagguagaauaugcgacaguccucaccaaauccuugauggagaaaacugcacacugauagaugcucuauugggagacccacauugugauggcuuccaaaauaaggaaugggaccuuuuuguugaacgcagcaaagccuacagcaacuguuacccuuaugaugugccggauuaugccucccuuaggucacuaguugccucauccggcacccuggaguuuaacaaugaaagcuucaauuggacuggagucgcucagaauggaacaagcucugcuugcaaaaggagaucuauuaaaaguuucuuuaguagauugaauugguugcaccaauuagaaaacagauauccagcacugaacgugacuaugccaaacaaugacaaauuugacaaauuguacauuugggggguucaccacccgaguacggacagugaccaaaucagcguauaugcccaagcaucagggagagucacagucucuaccaaaagaagccaacaaacuguaaucccgaauaucggauccagacccuggguaagggguaucuccagcagaauaagcaucuauuggacaauaguaaacccgggagacauacuuuugauuaacagcacagggaaucuaauugcuccucgggguuacuucaaaauacgaagugggaaaagcucaauaaugaggucagaugcacccauuggcaaaugcaauucugaaugcaucacuccaaauggaagcauucccaaugacaaaccauuucaaaauguaaacaggaucacauauggggccugucccagauauguuaagcaaaacacucugaaauuggcaacagggaugcggaauguaccagagaaacaaacuagaggcauauucggcgcaaucgcggguuucauagaaaaugguugggagggaaugauggacgguugguacgguuucaggcaucaaaauucugagggcacaggacaagcagcagaucuuaaaagcacucaagcagcaaucaaccaaaucaacgggaaacugaauaaguuaaucgagaaaacgaacgagaaauuccaucaaauugaaaaagaauucucagaaguagaagggagaauucaggaccucgagaaauauguugaggacacuaaaauagaucucuggucguacaacgcggagcuucuuguugcccuggagaaccaacauacaauugaucuaacugacucagaaaugaacaaacuguuugaaagaacaaggaagcaacugagagaaaaugcugaggauaugggcaaugguuguuucaaaauauaccacaaaugugacaaugccugcauagggucaaucagaaauggaacuuaugaccaugauguauacagagacgaagcauuaaacaaccgguuccagaucaaagguguugagcugaagucaggauacaaagauuggauccuauggauuuccuuugccauaucauguuuuuugcuuuguguuguuuugcugggguucauuaugugggccugccaaaaaggcaacauuaggugcaacauuugcauuuga

SEQ ID NO: 43096 - RNA, 1701 nt, Artificial Sequence
  derived and/or modified CDS sequence (wt) from hemagglutinin__InfluenzaA__AHH00870
augaagacuaucauugcuuugagcuacauuuuaugucuggcuuucgcucaaaaacuucccggaaaugacaacagcacggcaacgcugugccugggacaccaugcagugccaaacggaacgcuagugaaaacaaucacgaaugaccaaauugaagugacuaaugcuacugagcugguucagaguuccucaacagguagaauaugcgacaguccucaccaaauccuugauggagaaaacugcacacugauagaugcucuauugggagacccacauugugauggcuuccaaaauaaggaaugggaccuuuuuguugaacgcagcaaagccuacagcaacuguuacccuuaugaugugccggauuaugccucccuuaggucacuaguugccucauccggcacccuggaguuuaacaaugaaagcuucaauuggacuggagucgcucagaauggaacaagcucugcuugcaaaaggagaucuauuaaaaguuucuuuaguagauugaauugguugcaccaauuagaaaacagauauccagcacugaacgugacuaugccaaacaaugacaaauuugacaaauuguacauuugggggguucaccacccgaguacggacagugaccaaaucagcguauaugcccaagcaucagggagagucacagucucuaccaaaagaagccaacaaacuguaaucccgaauaucggauccagacccuggguaagggguaucuccagcagaauaagcaucuauuggacaauaguaaaaccgggagacauacuuuugauuaacagcacagggaaucuaauugcuccucgggguuacuucaaaauacgaagugggaaaagcucaauaaugaggucagaugcacccauuggcaaaugcaauucugaaugcaucacuccaaauggaagcauucccaaugacaaaccauuucaaaauguaaacaggaucacauauggggccugucccagauauguuaagcaaaacacucugaaauuggcaacagggaugcggaauguaccagagaaacaaacuagaggcauauucggcgcaaucgcggguuucauagaaaaugguugggagggaaugauggacgguugguacgguuucaggcaucaaaauucugagggcacaggacaagcagcagaucuuaaaagcacucaagcagcaaucaaccaaaucaacgggaaacugaauaaguuaaucgagaaaacgaacgagaaauuccaucaaauugaaaaagaauucucagaaguagaagggagaauucaggaccucgagaaauauguugaggacacuaaaauagaucucuggucguacaacgcggagcuucuuguugcccuggagaaccaacauacaauugaucuaacugacucagaaaugaacaaacuguuugaaagaacaaggaagcaacugagagaaaaugcugaggauaugggcaaugguuguuucaaaauauaccacaaaugugacaaugccugcauagggucaaucagaaauggaacuuaugaccaugauguauacagagacgaagcauuaaacaaccgguuccagaucaaagguguugagcugaagucaggauacaaagauuggauccuauggauuuccuuugccauaucauguuuuuugcuuuguguuguuuugcugggguucauuaugugggccugccaaaaaggcaacauuaggugcaacauuugcauuuga

SEQ ID NO: 43097 - RNA, 1701 nt, Artificial Sequence
  derived and/or modified CDS sequence (wt) from hemagglutinin__InfluenzaA__AHJ57430
augaaggcaauacuaguaguucugcuauauacauuugcaaccgcaaaugcagacacauuauguauagguuaucaugcgaacaauucaacagacacuguagacacaguacuagaaaagaauguaacaguaacacacucuguuaaccuucuagaagacaagcauaacgggaaacuaugcagacuaagagggguagccccauugcauuuggguaaauguaacauugcuggcuggauccugggaaauccagagugugaaucacucuccacagcgaguucaugguccuacauuguggaaacaucuaguucagacaauggaacguguuacccaggagauuucaucaauuaugaggagcuaagagagcaauugagcucagugucaucauuugaaagguuugagauaucccccaagacaaguucauggcccaaucaugacucgaacaaagguguaagggcagcauguccucaugcuggagcaaaaagcuucuacaaaaauuuaauauggcuaguuaaaaaaggaaauucauacccaaagcucagcaaauccuacauuaaugauaaagggaaagaaguccuggugcuauggggcauucaccauccaucuacuagugcugaccaacaaagucucuaucagaaugcagaugcauauguuuuuguggggacaucaagauacagcaagaaguucaagccggaaauagcaauaagacccaaagugaggggucaagaagggagaaugaacuauuacuggacacuaguagagccgggagacaaaauaacauucgaagcaacuggaaaucuagugguaccgagauacgcauucgcaauggaaagaaaugcugcaucugguauuaucauuucagauacaccaguccacgauugcaauacaacuugucagacacccaagggugcuguaaacaccagccucccauuucagaauauacauccgaucacaauuggaaaauguccaaaauauguaaaaagcacaaaauugagacuggccacaggauugaggaauaucccgucuauucaaucuagaggccuauucggggccauugccgguuucauugaagggggguggacagggaugguagauggaugguacgguuaucaccaucaaaaugagcaggggucaggauaugcagccgaccugaagagcacacagaaugccauugacgagauuacuaacaaaguaaauucuguuauugaaaagaugaauacacaguucacagcaguggguaaagaguucaaccaccuggaaaaaagaauagagaauuuaaauaaaaaaguugaugaugguuuccuggacauuuggacuuacaaugccgaacuguugguucuauuggaaaaugaaagaacuuuggacuaccacgauucaaaugugaagaacuuauaugaaaagguaagaagccaguuaaaaaacaaugccaaggaaauuggaaacggcugcuuugaauuuuaccacaaaugcaauaacacgugcauggaaagugucaaaaaugggacuuaugacuacccaaaauacucagaggaagcaaaauuaaacagagaaaaaauagaugggguaaagcuggaaucaacaaggauuuaccagauuuuggcgaucuauucaacugucgccaguucauugguacugguagucucccugggggcaaucaguuucuggaugugcucuaaugggucucuacaguguagaauauguauuuaa

SEQ ID NO: 43098 - RNA, 1701 nt, Artificial Sequence
  derived and/or modified CDS sequence (wt) from hemagglutinin__InfluenzaA__AHJ57431
augaaggcaauacuaguaguucugcuauauacauuugcaaccgcaaaugcagacacauuauguauagguuaucaugcgaacaauucaacagacacuguagacacaguacuagaaaagaauguaacaguaacacacucuguuaaccuucuagaagacaagcauaacgggaaacuaugcaaacuaagagggguagccccauugcauuuggguaaauguaacauugcuggcuggauccugggaaauccagagugugaaucacucuccacagcaagcucaugguccuacauuguggaaacaucuaguucagacaauggaacguguuacccaggagauuucaucgauuaugaggagcuaagagagcaauugagcucagugucaucauuugaaagguuugagauauuccccaagacaaguucauggcccaaucaugacucgaacaaagguguaagggcagcauguccucaugcuggagcaaaaagcuucuacaaaaauuuaauauggcuaguuaaaaaaggaaauucauacccaaagcucagccaauccuacauuaaugauaaagggaaagaaguccucgugcuauggggcauucaccauccaucuacuagugcugaccaacaaagucucuaucagaaugcagaugcauauguuuuuguggggacaucaagauacagcaagaaguucaagccggaaauagcaauaagacccaaagugagggaucaagaagggagaaugaacuauuacuggacacuaguagagccgggagacaaaauaacauucgaagcaacuggaaaucuagugguaccgagauaugcauucgcaauggaaagaaaugcuggaucugguauuaucauuucagauacaccaguccacgauugcaauacaacuugucaaacacccaagggugcuauaaacaccagccucccauuucagaauauacauccgaucacaauuggaaaauguccaaaauauguaaaaagcacaaaauugagacuggccacaggauugaggaauaucccaucuauucaaucuagaggccuauucggggccauugccggcuucauugaagggggguggacagggaugguagauggaugguacgguuaucaccaucaaaaugagcaggggucaggauaugcagccgaccugaagagcacacaaaaugccauugacaagauuacuaacaaaguaaauucuguuauugaaaagaugaauacacaguucacagcaguggguaaagaguucaaccaccuggaaaaaagaauagagaauuuaaauaaaaaaguugaugaugguuuccuggacauuuggacuuacaaugccgaacugcugguucuauuggaaaaugaaagaacuuuggacuaccacgauucaaaugugaagaacuuguaugaaaagguaagaaaccaguuaaaaaacaaugccaaggaaauuggaaacggcugcuuugaauuuuaccacaaaugcgauaacacgugcauggaaagugucaaaaaugggacuuaugacuacccaaaauacucagaggaagcaaaauuaaacagagaaaaaauagaugggguaaagcuggaaucaacaaggauuuaccagauuuuggcgaucuauucaacugucgccaguucauugguacugguagucucccugggggcaaucaguuucuggaugugcucuaaugggucucuacaguguagaauauguauuuaa

SEQ ID NO: 43099 - RNA, 1701 nt, Artificial Sequence
  derived and/or modified CDS sequence (wt) from hemagglutinin__InfluenzaA__AHJ57432
augaaggcaauacuaguaguucugcuauauacauuugcaaccgcaaaugcagacacauuauguauagguuaucaugcgaacaauucaacagacacuguagacacaguacuagaaaagaauguaacaguaacacacucuguuaaccuucuagaagacaagcauaacgggaaacuaugcaaacuaagagggguagccccauugcauuuggguaaauguaacauugcuggcuggauccugggaaauccagagugugaaucacucuccacagcaaguucaugguccuacauuguggaaacaucuaguucagacaauggaacguguuacccaggagauuucaucgauuaugaggagcuaagagagcaauugagcucagugucaucauuugaaagguuugagauauuccccaagacaaguucauggcccaaucaugacucgaacaaagguguaacggcagcauguccucaugcuggagcaaaaagcuucuacaaaaauuuaauauggcuaguuaaaaaaggaaauucauacccaaagcucagcaaauccuacauuaaugauaaagggaaagaaguccucgugcuguggggcauucaccauccaucuacuacugcugaccaacaaagucucuaucagaaugcagaugcauauguuuuuguggggacaucaagauacagcaagaaguucaagccgcaaauagcaauaagacccaaagugagggaucaagaagggagaaugaacuauuacuggacacuaguagagccaggagacaaaauaacauucgaagcaacuggaaaucuagugguaccgagauaugcauucgcauuggaaagaaaugcuggaucugguauuaucauuucagauacaccaguacacgauugcaauacaacuugucagacacccaagggugcuauaaacaccagccucccauuucagaauauacauccgaucacaauuggaaaauguccaaaauauguaaaaagcacaaaauugagacuggccacaggauugaggaaugucccgucuauucaaucuagaggccuauucggggccauugccgguuucauugaagggggguggacagggaugguagagggaugguacgguuaucaccaucaaaaugagcaggggucaggauaugcagccgaccugaagagcacacaaaaugccauugacaagauuacuaacaaaguaaauucuguuauugaaaagaugaauacacaguucacagcaguggguaaagaguucaaccaccuggaaaaaagaauagagaauuuaaauaaaaaaguugaugaugguuuccuggacauuuggacuuacaaugccgaacuguugguucuauuggaaaaugaaagaacuuuggacuaccacgauucaaaugugaagaacuuauaugaaaagguaagaaaccagcuaaaaaacaaugccaaggaaauuggaaacggcugcuuugaauuuuaccacaaaugcgauaacacgugcauggaaagugucaaaaaugggacuuaugacuacccaaaauacucagaggaagcaaaauuaaacagagaaaaaauagaugggguaaagcuggaaucaacaaggauuuaccagauuuuggcgaucuauucaacugucgccaguucauugguacugguagucucccugggggcaaucaguuucuggaugugcucuaaugggucucuacaguguagaauauguauuuaa

SEQ ID NO: 43100 - RNA, 1701 nt, Artificial Sequence
  derived and/or modified CDS sequence (wt) from hemagglutinin__InfluenzaA__AHJ57433
augaaggcaauacuaguaguucugcuauauacauuugcaaccgcaaaugcagacacauuauguauagguuaucaugcgaacaauucaacagacacuguagacacaguacuagaaaagaauguaacaguaacacacuccguuaaccuucuagaagacaagcauaacgggaaacuaugcaaacuaagagggguagccccauugcauuuggguaaauguaacauugcuggcuggauccugggaaauccagagugugaaucacucuccacagcaaguucaugguccuacauuguggaaacaucuaguucagacaauggaacguguuacccaggagauuucaucaauuaugaggagcuaagagagcaauugagcucagugucaucauuugaaagguuugagauauuccccaagacaaguucauggcccaaucaugacucgaacaaagguguaacggcagcauguccucaugcuggagcaaaaagcuucuacaaaaauuuaauauggcuaguuaaagaaggaaauucauacccaaagcucagcaaauccuacauuaaugauaaagggaaagaaguccucgugcuguggggcauucaccauccaucuacuacugcugaccaacaaagucucuaucagaaugcagaugcauauguuuuuguggggacaucaagauacagcaagaaguucaagccggaaauagcaauaagacccaaagugagggaucaagaagggagaaugaacuauuacuggacacuaauagagccaggagacaaaauaacauucgaagcaacuggaaaucuagugguaccgagauaugcauucgcaauggaaagaaaugcuggaucugguauuaucauuucagauacaccaguccacgauugcaauacaacuugucagacacccgagggugcuauaaacaccagccucccauuucagaauauacauccgaucacaauuggaaaauguccaaaauauguaaaaagcacaaaauugagacuggccacaggauugaggaaugucccgucuauucaaucuagaggccuauuuggggccauugccggcuucauugaagggggguggacagggaugguagauggaugguacgguuaucaccaucaaaaugagcaggggucaggauaugcagccgaccugaagagcacacaaaaugccauugacaagauuacuaacaaaguaaauucuguuauugaaaagaugaauacacaguucacagcaguagguaaagaguucaaccaccuggaaaaaagaauagagaauuuaaauaaaaaaguugaugaugguuuccuggacauuuggacuuacaaugccgaacuguugguucuauuggaaaaugaaagaacuuuggacuaccacgauucaaaugugaagaacuuguaugaaaagguaagaaaccagcuaaaaaacaaugccaaggaaauuggaaacggcugcuuugaauuuuaccacaaaugcgauaacacgugcauggaaagugucaaaaaugggacuuaugacuacccaaaauacucagaggaagcaaaauuaaacagagaaaaaauagaugggguaaagcuggaaucaacaaggauuuaccagauuuuggcgaucuauucaacugucgccaguucauugguacugguagucucccugggggcaaucaguuucuggaugugcucuaaugggucucuacaguguagaauauguauuuaa

SEQ ID NO: 43101 - RNA, 1701 nt, Artificial Sequence
  derived and/or modified CDS sequence (wt) from hemagglutinin__InfluenzaA__AHJ57434
augaaggcaauacuaguaguucugcuauauacauuugcaaccgcaaaugcagacacauuauguauagguuaucaugcgaacaauucaacagacacuguagacacaguacuagaaaagaauguaacaguuacacacucuguuaacccucuagaagacaagcauaacgggaaacuaugcaaacuaagagggguagccccauugcauuuggguaaauguaacauugcuggcuggauccugggaaauccagagugugaaucacucuccacagcaagcucaugguccuacauuguggaaacaucuaguucagacaauggaacguguuacccaggagauuucaucgauuaugaggagcuaagagagcaauugagcucagugucaucauuugaaagguuugagauauuccccaagacaaguucauggcccaaucaugacucgaacaaagguguaacggcagcauguccucaugcuggagcaaaaagcuucuacaaaaauuuaauauggcuaguuaaagaaggaaauucauacccaaagcucagcaaauccuacauuaaugauaaagggaaagaaguccucgugcuauggggcauucaccauccaucuacuacugcugaccaacaaagucucuaucagaaugcagaugcauauguuuuuguggggacaucaagauacagcaagaaguucaagccggaaauagcaauaagacccaaagugagggaucaagaagggagaaugaacuauuacuggacacuaguagagccgggagacaaaauaacauucgaagcaacuggaaaucuagugguaccgagauaugcauucgcaauggaaagaaaugcuggaucugguauuaucauuucagauacaccaguccacgauugcaauacaacuugucagacacccgagggugcuauaaacaccagccucccauuucagaauauacauccgaucacaauuggaaaauguccaaaguauguaaaaagcacaaaauugagacuggccacaggauugaggaaugucccgucuauucaaucuagaggccuauucggggccauugccggcuucauugaagggggguggacagggaugguagauggaugguacgguuaucaccaucaaaaugagcaggggucaggauaugcagccgaccugaagagcacacaaaaugccauugacaagauuacuaacaaaguaaauucuguuauugaaaagaugaauacacaguucacagcaguggguaaagaguucaaccaccuggaaaaaagaauagagaauuuaaauaaaaaaguugaugaugguuuccuggacauuuggacuuacaaugccgaacuguugguucuauuggaaaaugaaagaacuuuggacuaccacgauucaaaugugaagaacuuguaugaaaagguaagaaaccaguuaaaaaacaaugccaaggaaauuggaaacggcugcuuugaauuuuaccacaaaugcgauaacacgugcauggaaagugucaaaaaugggacuuaugacuacccaaaauacucagaggaagcaaaauuaaacagagaaaaaauagaugggguaaagcuggaaucaacaaggauuuaccagauuuuggcgaucuauucaacugucgccaguucauugguacugguagucucccugggggcaaucaguuucuggaugugcucuaaugggucucuacaguguagaauauguauuuaa

SEQ ID NO: 43102 - RNA, 1701 nt, Artificial Sequence
  derived and/or modified CDS sequence (wt) from hemagglutinin__InfluenzaA__AHJ57435
augaaggcaauacuaguaguucugcuauacacauuugcaaccgcaaaugcagacacauuauguauagguuaucaugcgaacaauucaacagacacuguagacacaguacuagaaaagaauguaacaguaacacacucuguuaaccuucuagaagacaagcauaacgggaaacuaugcaaacuaagagggguagccccauugcauuuggguaaauguaacauugcuggcuggauccugggaaauccagagugugaaucacucuccacagcaaguucaugguccuacauuguggaaacaucuaguucagacaauggaacguguuacccaggagauuucaucaauuaugaggagcuaagagagcaauugagcucagugucaucauuugaaagguuugagauauuccccaagacaaguucauggcccaaucaugacucgaacagagguguaacggcagcauguccucaugcuggagcaaaaagcuucuacaaaaauuuaauauggcuaguuaaaaaaggaaauucauaccccaagcucagccaauccuacauuaaugauaaagggaaagaaguucucgugcuguggggcauucaccauccaucuacuacugcugaccaacaaagucucuaucagaaugcagaugcauauguuuuuguggggacaucaagauacagcaagaaguucaagccggaaauagcaauaagacccaaagugagggaucaagaagggagaaugaacuauuacuggacacuaguagagccgggagacaagauaacauucgaagcaacuggaaaucuagugguaccgagauaugcauucgcaauggaaagaaaugcuggaucugguauuaucauuucagauacaccaguccacgauugcaauacaacuugucagacacccgagggugcuauaaacaccagccucccauuucagaauauacauccgaucacaauuggaaaauguccaaaguauguaaaaagcacaaaauugagacuggccacaggauugaggaaugucccaucuauucaaucuagaggccuauucggggccauugccggcuucauugaagggggguggacagggaugguagauggaugguacgguuaucaccaucaaaaugagcaggggucaggauaugcagccgaccugaagagcacacaaaaugccauugacaaaauuacuaacaaaguaaauucuguuauugaaaagaugaauacacaguucacagcaguggguaaagaguucaaccaccuggaaaaaagaauagagaauuuaaauaaaaaaguugaugaugguuuccuggacauuuggacuuacaaugccgaacugcugguucuauuggaaaaugaaagaacuuuggacuaccacgauucaaaugugaagaacuuguaugaaaagguaagaaaccaguuaaaaaacaaugccaaggaaauuggaaacggcugcuuugaauuuuaccacaaaugcgauaacacgugcauggaaagugucaaaaaugggacuuaugacuacccaaaauacucagaggaagcaaaauuaaacagagaaaaaauagaugggguaaagcuggaaucaacaaggauuuaccagauuuuggcgaucuauucaacugucgccaguucauugguacugguagucucccugggggcaaucaguuucuggaugugcucuaaugggucucuacaguguagaauauguauuuaa

SEQ ID NO: 43103 - RNA, 1701 nt, Artificial Sequence
  derived and/or modified CDS sequence (wt) from hemagglutinin__InfluenzaA__AHJ57436
augaagacuaucauugcuuugagcuacauucuaugucugguuuucgcucaaaaacuuccuggaaaugacaacagcacggcaacgcugugccuugggcaccaugcaguaccaaacggaacgauagugaaaacaaucacgaaugaccaaauugaaguuacuaaugcuacugagcugguucagaguuccucaacaggugaaauaugcgacaguccucaucagauccuugauggagaaaacugcacacuaauagaugcucuauugggagacccucagugugauggcuuucaaaauaagaaaugggaccuuuuuguugaacgaagcaaagccuacagcaacuguuacccuuaugaugugccggauuaugccucccucaggucacuaguugccucauccggcacacuggaguuuaacaaugaaagcuucaauuggacuggagucacucaaaacggaacaaguucugcuugcauaaggagaucuaauaguaguuucuuuaguagauuaaauugguugacccacuuaaacuucaaauacccagcauugaacgugacuaucccaaacaaugaacaauuugacaaauuguacauuugggggguucaccacccggguacggacaaggaccaaaucuuccuguaugcucaagcaucaggaagaaucacagucucuaccaaaagaagccaacaaacuguaaucccgaauaucggaucuagacccagaguaaggaauaucccuagcagaauaagcaucuauuggacaauaguaaaaccgggagacauacuuuugauuaacagcacagggaaucuaauugcuccuagggguuacuucaaaauacgaagugggaaaagcucaauaaugagaucagaugcacccauuggcaaaugcaauucugaaugcaucacuccaaauggaagcauucccaaugacaaaccauuccaaaauguaaacaggaucacauacggggccugucccagauauguuaagcaaaacacucugaaauuggcaacagggaugcgaaauguaccagagaaacaaacuagaggcauauuuggcgcaauagcggguuucauagaaaaugguugggagggaaugguggaugguugguacgguuucaggcaucaaaauucugagggaagaggacaagcagcagaucucaaaagcacucaagcagcaaucgaucaaaucaaugggaagcugaaucgauugaucgggaaaaccaacgagaaguuccaucagauugaaaaagaauucucagaaguagaagggagaauucaggaccuugagaaauauguugaggacacuaaaauagaucucuggucauacaacgcggagcuucuuguugcccuggagaaccaacauacaaucgaucuaacugacucagaauugaacaaacuguuugaaaaaacaaagaagcaacugagggaaaaugcugaggauaugggcaaugguuguuucaaaauauaccacaaaugugacaaugccugcauaggaucaaucagaaauggaacuuaugaccacgauguauacagagaugaagcauuaaacaaccgguuccagaucaagggaguugagcugaagucaggguacaaagauuggauccuauggauuuccuuugccauaucauguuuuuugcuuuguguugcuuuguugggguucaucaugugggccugccaaaaaggcaacauuaggugcaacauuugcauuuga

SEQ ID NO: 43104 - RNA, 1701 nt, Artificial Sequence
  derived and/or modified CDS sequence (wt) from hemagglutinin__InfluenzaA__AHJ57437
augaagacuaucauugcuuugagcuacauucuaugucugguuuucgcucaaaaacuuccuggaaaugacaacagcacggcaacgcugugccuugggcaccaugcaguaccaaacggaacaauagugaaaacaaucacgaaugaccaaauugaaguuacuaaugcuacugagcugguucagaauuccucaacaggugaaauaugcgacaguccucaucagauccuugauggagaaaacugcacacuaauagaugcucuauugggggacccucagugugauggcuuccaaaauaagaaaugggaccuuuuuguugaacgaagcaaagccuacagcaacuguuacccuuaugaugugccggauuaugccucccuuaggucacuaguugccucauccggcacacuggaguuuaacaaugaaagcuucaauuggacuggagucacucaaaacggaacaaguucugcuugcauaaggagaucuaauaguaguuucuuuaguagauuaaauugguugacccacuuaaacuucaaauacccagcauugaacgugacuaugccaaacaaugaacaauuugacaaauuguacauuugggggguucaccacccggguacggacaaagaccaaaucuuccuguaugcucaaucaucaggaagaaucacaguaucuaccaaaagaagccaacaaaccguaaucccgaauaucggaucuagacccagaguaaggaauaucccuagcagaauaagcaucuauuggacaauaguaaaaccgggagacauacuuuugauuaacagcacagggaaucuaauugcuccuagggguuacuucaaaauacgaagugggaaaagcucaauaaugagaucagaugcacccauuggcaaaugcaauucugaaugcaucacuccaaauggaagcauucccaaugacaaaccauuccaaaauguaaacaggaucacauacggggccugucccagauauguuaagcaaagcacucugaaauuggcaacagggaugcgaaauguaccagagaaacaaacuagaggcauauuuggcgcaaucgcggguuucauagaaaaugguugggagggaaugguggaugguugguacgguuucaggcaucaaaauucugagggaagaggacaagcagcagaucucaaaagcacucaagcagcaaucgaucaaaucaaugggaagcugaaucgauugaucgggaaaaccaacgagaaauuccaucagauugaaaaagaauucucagaagucgaagggagaauucaggaccuugagaaauauguugaggacacuaaaauagaucucuggucauacaacgcggagcuucuuguugcccuggagaaccaacauacaauugaucuaacugacucagaaaugaacaaacuguuugaaaaaacaaagaagcaacugaaggaaaaugcugaggauaugggcaaugguuguuucaaaauauaccacaaaugugacaaugccugcauaggaucaaucagaaauggaacuuaugaccacgauguauacagagaugaagcauuaaacaaccgguuucagaucaagggaguugagcugaagucaggguacaaagauuggauccuauggauuuccuuugccauaucauguuuuuugcuuuguguugcuuuguugggguucaucaugugggccugccaaaaaggcaacauuaggugcaacauuugcauuuga

SEQ ID NO: 43105 - RNA, 1701 nt, Artificial Sequence
  derived and/or modified CDS sequence (wt) from hemagglutinin__InfluenzaA__AHJ57438
augaagacuaucauugcuuugagcuacauucuaugucugguuuucgcucaaaaacuuccuggaaaugacaacagcacggcaacgcugugccuugggcaccaugcaguaccaaacggaacgauagugaaaacaaucacgaaugaccaaauugaaguuacuaaugcuacugagcugguucagaauuccucaacaggugaaauaugcgacaguccucaucagauccuugauggagaaaacugcacacuaauagaugcucuauugggagacccucagugugauggcuuccaaaauaagaaaugggaccuuuuuguugaacgaagcaaagccuacagcaacuguuacccuuaugaugugccggauuaugccucccuuaggucacuaguugccucaucgggcacacuggaguuuaacaaugaaagcuucaauuggacuggagucacucaaaacggaacaaguucugcuugcauaaggagaucuaauaguaguuucuuuaguagauugaaaugguugacccacuuaaacuucaaauacccagcauugaacgugacuaugccaaacaaugaacaauuugacaaauuguacauuugggggguucaccacccggguacggacaaagaccaaaucuuccuguaugcucaagcaucaggaagaaucacagucucuaccaaaagaagccaacaagcuguaaucccgaauaucggaucuagacccagaauaaggaauaucccuagcagaauaagcaucuauuggacaauaguaaaaccgggagacauacuuuugauuaacagcacagggaaucuaauugcuccuagggguuacuucaaaauacgaagugggaaaagcucaauaaugagaucagaugcacccauuggcaaaugcaauucugaaugcaucacuccaaauggaagcauucccaaugacaaaccauuccaaaauguaaacaggaucacauacggggacugucccagauauguuaagcaaagcacucugaaauuggcaacaggaaugcgaaauguaccagagaaacaaacuagaggcauauuuggcgcaaucgcggguuucauagaaaaugguugggagggaaugguggaugguugguacgguuucaggcaucaaaauucugagggaagaggacaagcagcagaucucaaaagcacucaagcagcaaucgaucaaaucaaugggaagcugaaucgauugaucgggaaaaccaacgagaaauuccaucagauugaaaaagaauucucagaagucgaagggagaauucaggaccuugagaaauauguugaggacacuaaaauagaucucuggucauacaacgcggagcuucuuguugcccuggagaaccaacauacaauugaucuaacugacucagaaaugaacaaacuguuugaaaaaacaaagaagcaacugagggaaaaugcugaggauaugggcaaugguuguuucaaaauauaccacaaaugugacaaugccugcacaggaucaaucagaaauggaacuuaugaccacgauguauacagagaugaagcauuaaacaaccgguuucagaucaagggaguugaggugaagucaggguacaaagauuggauccuauggauuuccuuugccauaucauguuuuuugcuuuguguugcuuuguugggguucaucaugugggccugccaaaaaggcaacauuaggugcaacauuugcauuuga

SEQ ID NO: 43106 - RNA, 1701 nt, Artificial Sequence
  derived and/or modified CDS sequence (wt) from hemagglutinin__InfluenzaA__AHJ57651
augauugcauucauuguaauagcaauacuggcagcaaccggaaaaucagacaagauaugcauuggauaucaugccaacaauucaacaacaaagguagauacuauacucgagaagaacguaaccgucacacacucaguugagcugcuggagaaccagaaagaagaaagauucugcaaaaucucaaacaaggccccucucgaucuaagggauuguacccuagaggguuggaucuuggggaauccccgaugcggcauauugcuugcugaccaaagcuggucauacauaguggaacggccuaaugcccgaaaugggauuugcuauccuggaacauugaaugaaguugaagaauugaaggcacuuauuggaucaggggaaaggguagaaagguuugagauguuucccaaaagcacaugggcaggaguggacaccgacaguggagugucaagugcuuguccucuugguaauggcccaucuuucuacaggaaucuucuauggauaauaaaacuaaagucaucagaauacccaguaauuagaggaacuuucaacaacacuggagacaagucaauucucuauuuuugggguguacaccauccuccugucacaacugaacaagaagcucuguaugguucuggugaucgauacguuagaaugggaacugaaagcaugaauuuugccaggaguccagaaauugcggcaaggccugcugugaauggucagagaggcagaaucgauuauuucugguccaucuuaaaaccaggggaaaccuugaauguagaaucuaaugggaauuugauagccccuugguaugcauacagauuugucaacaaagauaguaaaggagccauauucagaucuacuuuaccaauugagaacugugaugccacaugccagacuacugaaggagugauaagaaccaacaaaacauuucagaaugugagcccucuguggauuggagaaugccccaaguauguaaaaaguaagagucuaagacuugcaacuggacuaaggaauguuccacaaauagaaacuagaggacuuuuuggagcuauugcgggcuucauugaaggaggauggacuggaaugauugauggaugguauggcuaccaucaugaaaauucucaaggcucaggauaugcagcugauagagaaagcacucaaaaggcuauagacggaauuacaaacaaggucaauuccaucauugauaaaaugaacacacaauuugaggcuguaggucaugaguucucaaaccuggagagaaggauugacaaccuaaacaaaagaauggaagauggauuucuggauguuuggacauacaacgcugaauuauuaguucuccuugaaaacgaaagaacacuggacaugcaugaugcgaaugugaaaauucuguaugaaaaggucagaucacaacuacgagacaaugcuaaagaccuaggaaaugggugcuuugaauuuuggcauaagugugacaaugaaugcauagagucugucaagaauggcacuuauaacuaucccaaauaccaaagugaaagcagauuaaacaggcaaacaauagaaucagugaagcuggaaaaucuugguguguaucaaauucuugcuauuuauaguacgguaucgagcagucuaguuuugguagggcugaucuuggcaaugggucuuuggauguguucaaaugguucaaugcaaugcaggauauguauauaa

SEQ ID NO: 43107 - RNA, 1701 nt, Artificial Sequence
  derived and/or modified CDS sequence (wt) from hemagglutinin__InfluenzaA__AHJ57663
augauugcauucauuguaauagcaacacugguagcaaccggaaaaucagacaagauaugcauuggauaucaugcaaacaauucgacaacaaagguagauacgauacuugagaagaacguaacugucacacacucaguugaacugcuggagaaccagaaagaagaaagauucugcaagaucucaaacaaggccccucucgaucuaagggauuguacccuagaggguuggaucuuggggaacccccgaugcggcauauugcuagcugaccaaagcuggucauacauaguagaacggccuaaugcccgaaaugggauuugcuauccuggaacauugaaugaagcagaagaauuaaaggcacuuauuggaucaggagaaaggguagaaagguuugagauguuucccaaaagcacauggacaggaguggacaccgaaaguggaguaucaagugcuuguccucuugguaaugguccaucuuucuacaggaaucuucuauggauaauaaaacucaagucaucagaauacccaguaaucagaggaacuuucaacaacacuggagacaagucaauucucuauuuuugggguguacaccauccuccugucacaacugaacaaaaugcucuguaugguucuggugaucgauauguuagaaugggaacugaaagcaugaauuuugccaggagcccagaaauugcggcaagaccugcugugaauggucagagaggcaggauugauuauuucugguccaucuuaaaaccaggagaaaccuugaauguagaaucuaaugggaauuuaauagccccuugguaugcauacagauuugucaacaaagauagcaaaggggccauauucagaucuaauuuaccaaucgagaacugugaugccacaugccagacuacugaaggagugauaagaaccaacaaaacauuucagaaugugagcccucuguggauuggagaaugccccaaguauguaaaaaguaaaagucuaaggcuugcuacuggacuaaggaauguuccacaaauagaaacuagaggacuuuuuggagcuauugcaggcuucauugaaggaggguggacuggaaugauugaugggugguacggcuaccaucaugaaaauucucaaggcucaggauaugcagcugauaaagaaagcacucaaaaggccauagacggaaucacaaacaaggucaauuccaucauugauaaaaugaauacacaauuugaggcuguaggucaugaguuuucaaaccuggagagaaggauugacaaccuaaacaaaagaauggaagauggauuccuggauguuuggacauacaacgcugaacugcugguucuucuugaaaacgaaagaacacuagaccuacaugaugcaaaugugaagaaccuacaugaaagggucaaaucacaacugagggacaaugcuaaugaccuagggaacggaugcuuugaauuuuggcauaagugugacaaugaauguauggagucugucaaaaaugguaccuauaacuaucccaaguaucaagcugagaguagauuaaacaaacagaaaauagaaucgguaaaacuggaggaguuugguguguaucaaauccuugccauuuauaguacgguaucgagcagucuaguuuugguagggcugaucauggcaaugggucuuuggauguguccaaaugguucaaugcagugcaggauauguauauaa

SEQ ID NO: 43108 - RNA, 1701 nt, Artificial Sequence
  derived and/or modified CDS sequence (wt) from hemagglutinin__InfluenzaA__AHJ57674
augauugcauucauuguaauagcgauacugguaacaaccggaaaaucagacaagauaugcauuggauaucaugcuaacaauucaacaacgaagguagauacuauacucgagaagaacguaaccgucacacacucaguugaacugcuggagaaccagaaagaagaaagauucugcaaaaucucgaacaaggccccucucgaucuaagggauuguacccuagaggguuggaucuuggggaauccccgaugcggcauauugcucgcugaccaaagcuggucauacauaguggaaaggccuaaugcccgaaaugggauuugcuauccuggaacauugaaugaaguagaagaauugaaggcacuuauuggaucaggggaaagaguagaaagauuugagauguuucccaaaaguacaugggcaggaguggacaccaauaguggaguaucaagugcuuguccucuuggugaggguccaucuuucuacaggaaucuucuauggauaauaaaacacacgacaucaggauauccaguaauuaaaggaacuuacagaaacacuggagauaagucaguucuuuauuuuuggggugugcaccauccuccugacacaacugaacagaauguucuguacgguucugguaaucgauacguuagaaugggaacugaaagcaugaauuuugccaggagcccagaaauugcggcaaggccugcugugaauggucagagaggcagaauugauuauuucugguccauuuugaaaccaggggaaaccuugaauguagaaucuaaugggaauuuaauagccccuugguacgcauacagauuugucaacaaagauagcaaaggagccauauucagauccaauuuaccaaucgagaacugugaugccacuugccagacuacugaaggagugauaagaaccaacaaaacauuccagaaugugagcccucuguggauuggagagugccccaaguauguaaaaaguaagagucuaaggcuugcaacuggacuaaggaauguuccacaaauagagacuagaggacuauuuggagcuauugcaggcuucauugaagggggauggacuggaaugauugaugggugguauggcuaccaucaugaaaauucccaagguucaggauaugcagccgauagagaaagcacucaaaaggcuauagacggaauuacgaacaaggucaauucuaucauugauaaaaugaacacacaauuugaggcuguaggucaugaguuuucaaaccuggaaagaaggauugacaaccuaaacaaaagaauggaagauggauuucuggauguuuggacauacaacgcugaacuguugguucuucuugaaaacgaaagaacacuagaccuacaugaugcaaaugugaagaaccuacaugaaagggucagaucacaacugagggacaaugcuaaugaccuagggaacggaugcuuugaauuuuggcauaagugugacaaugaauguauggagucagucaaaaaugguaccuauaacuaucccaaguaucaagcugagaguagauuaaauagacagaaaauagaaucgguaaaacuggaggaguuuggcguguaucaaauccuugccauuuauaguacgguaucgagcagucuaguauugguagggcugaucauggcaaugggucuuuggauguguucaaaugguucaaugcagugcaggauauguauauaa

SEQ ID NO: 43109 - RNA, 1701 nt, Artificial Sequence
  derived and/or modified CDS sequence (wt) from hemagglutinin__InfluenzaA__AHJ57686
augauugcauucauuguaauagcaauacuggcagcaaccggaaaaucagacaagauaugcauuggauaccaugccaacaauucaacaacaaagguagauacuauacucgagaagaacguaacugucacacacucaguugagcugcuggagaaccagaaagaaggaagauucugcaaaaucucaaacaaggccccucucgaucuaagggauuguacccuagaggguuggaucuuggggaauccucgaugcggcauacugcuugcugaccaaagcuggucauacauaguggaacggccuaaugcccgaaaugggauuugcuauccuggaauauugaaugaagcugaagaauugaaggcacuuaucggaucaggggaaaggguagaaagguuugagauguuccccaaaaguacaugggcaggaguggacacuaacaguggagugucaagugcuuguccucuugguaauggcccaucuuucuacaggaaucuucuauggauaauaaaacuaaagucaucagcauauccaguaauuagaggaacuuucaacaacacuggagacaagucaauucucuauuuuuggggugugcaccauccuccugucgcaacugaacaagaagcccuguaugguucugguaaucgauacguuagaaugggaacugaaagcaugaauuuugccaggaauccagaaauugcggcaaggccugcugugaauggucagagaggcagaaucgauuauuucugguccaucuuaaaaccaggggaaaccuugaauguagaaucuaaugggaauuuaauagccccuugguaugcauacagauuugucaacaaagauaguaaaggagccauauucagaucuaauuuaccaauugagaacugugaagccacaugccagacuacugaaggagugauaagaaccaacaaaacauuucagaaugugagcccucuguggauuggagaaugccccaaguauguaaagaguaaaagucuaagacuugcaacuggacuaaggaauguuccacaaauagaaacuagaggacuuuuuggagcuauugcaggcuucauugaaggaggauggacuggaaugauugaugggugguauggcuaccaucacgaaaauucucaaggcucaggauaugcagcugauagagaaagcacucaaaaggccauagacgggauuacaaacaaggucaacucuaucauugauaaaaugaacacgcaauuugaggcuguaggccaugaguuuucaaaccuggagagaaggauugacaaccuaaacaaaagaauggaagauggauuucuggauguuuggacauacaacgcggaacuauugguucuucuugaaaacgaaagaacacuagaccuacaugaugcaaaugugaaaaaccuacaugaaaaggucagaucacaacuaagagacaaugcuaaugaccuagggaacgggugcuuugaauuuuggcauaagugugacaaugaauguauggagucugucaagaaugguacuuaugacuaucccaaguaccaagcggagaguagguuaaacagacagaaaauagaaucgguaaaacuggagaacuuugauguguaucaaauccuugccauuuauaguacgguaucgagcagucuaguuuugguaggacugaucauggcaaugggucuuuggauguguucaaaugguucaaugcagugcaggauauguauauaa

SEQ ID NO: 43110 - RNA, 1701 nt, Artificial Sequence
  derived and/or modified CDS sequence (wt) from hemagglutinin__InfluenzaA__AHJ57697
augauugcauucauuguaauagcaauacuggcagcaaccggaaaaucagacaagauaugcauuggauaucaugccaacaauucaacaacaaagguagauacuauacucgagaagaacguaaccgucacacacucaguugagcugcuggagaaccagaaagaagaaagauucugcaaaaucucaaacaaggccccucucgaucuaagggauuguacccuagaggguuggauuuuggggaauccccgaugcggcauauugcuugcugaccaaagcuggucauacauaguggaacggccuaaugcccgaaaugggauuugcuauccuggaacauugaaugaaguugaagaauugaaggcacuuauuggaucaggggaaaggguagaaagguuugagauguuucccaagagcacaugggcaggaguggacaccaacaguggagugucaagugcuuguccucuugguaauggcccaucuuucuacaggaaucuucuauggauaauaaaacuaaagucaucagaauacccaguaauuagaggaacuuucaacaacacuggagacaagucaauucucuauuuuugggguguacaccauccuccugucacaacugaacaagaagcucuguaugguucuggugaucgauacguuagaaugggaacugaaagcaugaauuuugccaggaguccagaaauugcggcaaggccugcugugaauggucagagaggcagaaucgauuauuucugguccaucuuaaaaccaggggaaaccuugaauguagaaucuaaugggaauuugauagccccuugguaugcauacagauuugucaacaaagauaguaaaggggccauauucagaucuaauuuaccaauugagaacugugaugccacaugccagacuacugaaggagugauaagaaccaacaaaacauuucagaaugugagcccucuguggauuggagaaugccccaaguauguaaaaaguaagagucuaagacuugcaacuggacuaaggaauguuccacaaauagaaacuagaggacuuuuuggagcuauugcgggcuucauugaaggaggauggacuggaaugauugauggaugguauggcuaccaucaugaaaauucucaaggcucaggauaugcagcugauagagaaagcacucaaaaggcuauagacggaauuacaaacaaggucaauuccaucauugauaaaaugaacacacaauuugaggcuguaggucaugaguucucaaaccuggagagaaggauugacaaccuaaacaaaagaauggaagauggauuucuggaugucuggacauacaacgcugaacuauugguucuucuugaaaacgagagaacacuagaccuacaugaugcaaaugugaagaaccuacaugaaaaagucaaaucacaacuaagggacaaugcuaaugaccuagggaacgggugcuuugaauuuuggcauaagugugacaaugaauguauggagucugucaaaaaugguaccuaugacuaucccaaguaucaagcggagaguagguuaaacagacagaaaauagaaucgguaaaacuggagaacuuugauguguaucaaauccuugccauuuauaguacgguaucgagcagucuaguuuugguagggcugaucauggcaaugggucuuuggauguguucaaaugguucaaugcagugcaggauauguauauaa

SEQ ID NO: 43111 - RNA, 1701 nt, Artificial Sequence
  derived and/or modified CDS sequence (wt) from hemagglutinin__InfluenzaA__AHJ57707
augauugcauucauuguaauagcgauacugguaacaaccggaaaaucagacaagauaugcguuggauaucaugcuaacaauucaacaacgaagguagauacuauacucgagaagaacguaaccgucacacacucaguugaacugcuggagaaccagaaagaagaaagauucugcaaaaucucgaacaaggccccucucgaucuaagggauuguacccuggaggguuggauccuggggaauccccgaugcggcauauugcucgcugaccaaaguuggucauacauaguggaaaggccuaaugcccgaaaugggauuugcuauccugguacauugaaugaaguagaagaauugaaggcacuuauuggaucaggggaaagaguagaaagauuugagauguuuccuaaaaguacauggacaggaguggacaccaacaguggaguaucaagugcuuguccucuuggugaagguccaucuuucuacaggaaucuucuauggauaauaaaacacacgacaucaggauacccaguaauuaaaggaacuuacagaaacacuggagauaagucaguucucuauuuuuggggugugcaccauccuccugacacaacugaacagaauguucuguacgguucugguaaucgauacguuagaaugggaacugaaagcaugaauuuugccaggagcccagaaauugcggcaaggccugcugugaauggucagagaggcagaauugauuauuucugguccauuuuaaaaccaggggaaaccuugaauguagaaucuaaugggaauuuaauagccccuugguacgcauacagauuugucaacaaagacagcaaaggagccauauucagauccaauuuaccaaucgagaacugugaugccacuugccagacuacugaaggagugauaagaaccaacaaaacauuccagaaugugagcccucuguggauuggagaaugccccaaguauguaaaaagcaagagucuaaggcuugcaacuggacuaaggaauguuccacaaauagaaacuagaggacuauuuggggcuauugcaggcuucauugaagggggauggacuggaaugauugaugggugguauggcuaccaucaugaaaauucucaaggcucaggauaugcagcugauagagaaagcacucaaaaggcuauagacggaauuacgaacaaggucaauuccaucauugauaaaaugaacacacaauuugaggcuguaggucaugaguuuucaaaccuggaaagaaggauugacaaccuaaacaaaagaauggaagauggauuuuuggauguuuggacauacaacgccgaacuguugguucuucuugaaaacgaaagaacacuagaccuacacgaugcaaaugugaagaaccuacaugaaagggucagaucgcaacugagggacaaugcuaaugaccuagggaacggaugcuuugaauuuuggcauaagugugacaaugaauguauggagucagucaaaaaugguaccuauaacuaucccaaguaucaagcugagagcagauuaaacaaacagaaaauagaaucgguaaaacuagaggaguuuggcguguaucaaauccuugccauuuauaguacgguaucgagcagucuaguuuugguagggcugaucauggcaaugggucuuuggauguguucaaaugguucaaugcagugcaggauauguauauaa

SEQ ID NO: 43112 - RNA, 1701 nt, Artificial Sequence
  derived and/or modified CDS sequence (wt) from hemagglutinin__InfluenzaA__AHJ57719
augauugcauucauuguaauagcaauacuggcagcaaccggaaaaucagacaagauaugcauuggauaucaugccaacaauucaacaacaaagguagauacuauacucgagaagaacguaacugucacacacucaguugaacugcuggagaaccagaaagaagaaagauucugcaaaaucucaaacaaggccccucucgaucuaagggauuguacccuagaggguuggauauuggggaauccccgaugcggcauacugcuuucugaccaaagcuggucauacauaguggaacggccuaaugcccgaaaugggauuugcuauccuggaauauugaaugaagcugaagaauugaaggcacuuaucggaucaggggaaaggguagaaagguuugagauguuucccaaaaguacaugggcaggaguggacacuaacaguggagugucaagugcuuguccucuugguaauggcccaucuuucuucaggaaucuccuauggauaauaaaacuaaagucaucaacauacccaguaauuagaggaacuuucaacaacacuggagacaagucaauucucuauuuuuggggugugcaccauccuucugucacaacugaacaagaagcccuguaugguucugguaaucgauacguuagaaugggaacugaaagcaugaauuuugccaggaguccagaaauugcggcaagaccugcugugaauggucagagaggcagaaucgauuauuucugguccaucuuaaaaccaggggaaaccuugaauguagaaucuaaugggaauuuaauagccccuugguaugcauacagauucgucaacaaagauaguaaaggagccauauucagaucuaauuuaccaauugagaacugugacgccacaugccagacuauugaaggagugauaagaaccaacaaaacauuucaaaaugugagcccucuguggauuggagagugccccaaguauguaaagaguaaaagucuaagacuugcaacuggacuaaggaauguuccacaaauagaaacuagaggacuuuuuggagcuauugcaggcuucauugaaggaggauggacuggaaugauugaugggugguauggcuaccaucaugaaaauucucaaggcucaggauaugcagaugauaaagaaagcacucaaaaggccauagacggaauuacaaacaaggucaauuccaucauugauaaaaugaacacacaauuugaggcuguaggccaugaguuuucaaaccuggagagaaggauugacaaccuaaacaaaagaauggaagauggauuucuggauguuuggacauacaacgcugaacuauugguucuucuugagaacgaaagaacacuagaccuacaugaugcaaaugugaaaaaccuacaugaaaaggucagaucacaacuaagggacaaugcuaaugaccuagggaacgggugcuuugaauuuuggcauaagugcgacaaugaauguauggagucugucaaaaaugguaccuaugacuaucccaaguaccaagcggagagcagauuaaacagacagaaaauagaaucgguaaaacuggagaacuuugauguguaucaaauccuugccauuuauaguacgguaucgagcagucuaguuuugguagggcugaucauggcaaugggucuuuggauguguucaaaugguucaaugcaaugcaggauauguauauaa

SEQ ID NO: 43113 - RNA, 1701 nt, Artificial Sequence
  derived and/or modified CDS sequence (wt) from hemagglutinin__InfluenzaA__AHJ57731
augauugcauucauuguaauagcaauacuggcagcaaccggaaaaucagacaagauaugcauuggauaucaugccaacaauucaacaacaaagguagauacuauacucgagaagaacguaacugucacacacucaguugaacugcuggagaaccagaaagaagaaagauucugcaaaaucucaaacaaggccccucucgaucuaagggauuguacccuagaggguuggaucuuggggaauccccgaugcggcauacugcuugcugaccaaagcuggucauacauaguggaacggccuaaugcccgaaaugggauuugcuauccuggaauauugaaugaagcugaagaauugaaggcacuuaucggaucaggggaaaggguagaaagguucgagauguuucccaaaaguacaugggcaggaguggacacugacaguggagugucaagugccuguccucuugguaacggcccaucuuucuacaggaaucuucuauggauaauaaaacuaaagucaucagaauauccaguaauuagaggaacuuucaacaacacuggagacaagucaauucucuauuuuuggggugugcaccauccuccugucacaacugaacaagaagcccuguaugguucugguaaucgauacguuagaaugggaacugaaagcaugaauuuugccaggaguccagaaauugcggcaaggccugcugugaauggucagagaggcagaaucgauuauuucugguccaucuuaaaaccaggggaaaccuugaauguagaaucuaaugggaauuuaauagccccuugguaugcauacagauuugucaacaaagauaguaaaggagccauauucagaucuaauuuaccaauugagaacugugacgccacaugccagacuacugaaggagugauacgaaccaacaaaacauuucagaaugugagcccucuguggauuggagaaugccccaaguauguaaagaguaaaagucuaagacuugcaacuggacuaaggaauguuccacaaauagaaacuagaggacuuuuuggagcuauugcaggcuucauugaaggaggauggacuggaaugauugaugggugguauggcuaccaucaugaaaauucucaaggcucaggauaugcagcugauagagaaagcacucaaaaggccauagacggaauuacaaacaaggucaauuccaucauugauaaaaugaacacacaauuugaggcuguaggccaugaguuuucaaaccuggagagaaggauugacaaccuaaacaaaagaauggaagauggauuucuggauguuuggacauacaacgcugaacuauugguucuucuugaaaacgaaagaacacuagaccuacaugaugcaaaugugaagaaccuacaugaaaaggucagaucacaacuaagggacaaugcuaaugaccuagggaacgggugcuuugaauuuuggcacaagugugacaaugaauguauggagucugucaaaaaugguaccuaugacuaucccaaguaccaaacggagaguagguuaaacagacagaaaauagaaucgguaaaacuggagaacuuugauguguaucaaauccuugccauuuauaguacgguaucgagcagucuaguuuugguagggcugaucauggcaaugggucuuuggauguguucaaaugguucaaugcagugcaggauauguauauaa

SEQ ID NO: 43114 - RNA, 1701 nt, Artificial Sequence
  derived and/or modified CDS sequence (wt) from hemagglutinin__InfluenzaA__AHJ57743
augauugcauucauuguaauagcaauacugguagcaacuggaaaaucagacaaaauaugcauuggauaucaugccaacaauucaacaacaaaaguagauacgauacucgagaagaacguaaccgucacacacucaguugaacugcuggagaaccagaaagaagaaagauucugcaaaaucucaaacaaggccccucucgaccuaagggauuguaccauagaggguuggaucuuggggaauccccgaugcggcauacugcuugcugaccaaagcuggucauacauaguggaacggccugaugcccgaaaugggauuugcuauccugggacauugaaugaagcagaagaauugaaggcacuuauuggaucaggggaaaagguagaaagguuugagauguuucccaaaaguacaugggcaggaguggacaccagcaguggaguaucaagugcuuguccucuugguaaugguccaucuuucuauaggaaucuucuauggauaauaaaacucaaguccucagaauauccaguaauuagaggaacuuucaacaacacuggagacaagucaguucucuauuuuugggguguacaccacccuccugucacaacugaacaaaaugcucuguaugguucugguaauagguauguuagaaugggaacugaaagcaugaauuuugccagaagcccagaaauugcggcaaggccugcugugaauggucagagaggcagaaucgauuauuucugguccaucuuaaaaccaggggaaaccuugaauguagaaucuaacgggaauuuaauagccccuugguaugcauacagauuugucaacaaagauagcaaaggagccauauucagaucuaauuuaccaauugaaaacugugaugccacaugccagacuauugaaggagugauaagaaccaacaaaacauuucagaaugugagcccucuguggauuggagaaugccccaaguauguaaaaaguaagagucuaaggcuugcaacuggacuaaggaauguuccacaaauagaaacuagaggacuuuuuggagcuauugcaggcuucauugaaggaggauggacugguaugauugaugggugguauggcuaccaucaugaaaauucucaaggcucaggauaugcagcugauagagaaagcacucaaaaggcuauagacggaauuacaaacaaggucaauuccaucauugauaaaaugaacacacaauuugaggcugcaggucaugaguuuucaaaccuggagaggaggauugacaaccuaaacaaaagaauggaagauggauuucuggauguuuggacauacaacgccgaacuauugguucuucuugaaaacgaaagaacacuagaccuacaugaugcaaaugugaagaaccuacaugaaaaggucaaaucacaacuaagggacaaugcuaaugaccuagggaacgggugcuuugaauuuuggcauaagugugacaaugaauguauggagucugucaaaaaugguaccuaugacuaucccaaguaucaaaaagagaguagguuaaacagacagaaaauagaaucgguaaaacuggagaacuuugauguguaucaaauccuugccauuuauaguacgguaucgagcagucuaguuuugguagggcugaucauggcaaugggucuuuggauguguucaaaugguucaaugcagugcaggauauguauauaa

SEQ ID NO: 43115 - RNA, 1701 nt, Artificial Sequence
  derived and/or modified CDS sequence (wt) from hemagglutinin__InfluenzaA__AHJ57755
augauugcauucauuguaauagcaauacugguagcaaccggaaaaucagacaagauaugcauuggauaccaugccaacaauucaacaacaaagguagauacgauacuugagaagaacguaaccgucacacacucaguugagcugcuggagaaccagaaagaagaaagauucugcaaaaucucaaacaaggccccucucgaccuaagggauuguaccauagaggguuggaucuuggggaauccccgaugcgacauacugcuugcugaccaaagcuggucauacauaguggaacggccuaaugcccgaaaugggauuugcuauccuggaacauugaaugaagcagaagaauugaaggcacuuauuggaucaggggaagggguagaaagauuugagauguuucccaaaaguacauggguaggaguggacaccagcaguggaguaucaagugcuuguccucuugguaaugguccaucuuucuacaggaaucuucuauggauaauaaaacucaaguccucagaauauccaguaauuagaggaacuuucaacaacacuggagacaagucaguucucuauuuuugggguguacaccauccuccugucacaacugaacaaaaugcucuguaugguucugguaauagauauguuagaaugggaacugaaagcaugaauuuugccagaagcccagaaauugcggcaaggccugcugugaauggucagagaggcagaaucgauuauuucugguccaucuuaaaaccaggggaaaccuugaauguagaaucuaacgggaauuuaauagccccuugguaugcauacagauuugucaacaaagauaauaaaggagccauauucagaucuaauuuaccaauugagaacugugaugccacaugucagacuacugaaggagugauaagaaccaacaaaacauuucagaaugugagcccucuguggauuggagaaugccccaaguauguaaaaaguaagagucuaaggcuugcaacuggacuaaggaauguuccacaaauagaaacuagaggacuuuuuggagcuauugcaggcuucauugaaggaggauggacugguaugauugaugggugguauggcuaccaucaugaaaauucucaaggcucaggauaugcagcugauagagaaagcacucaaaaggcuauagacggaauuacaaacaagguaaauuccaucauugauaaaaugaacacacaauuugaggcugcaggucaugaguuuucaaaccuggagagaaggauugacaaccuaaacaaaagaauggaagauggauuucuagauguuuggacauacaacgccgaacuauugguucuucuugaaaacgaaagaacacuagaccuacaugaugcaaaugugaagaaccuacaugaaaaggucaaaucacaacuaagggacaaugcuaaugaccuagggaacgggugcuuugaauuuuggcauaagugugacaaugaauguauggagucugucaaaaaugguaccuaugacuaucccaaguaucaaaaagagaguagguuaaacagacagaaaauagaaucaguaaaacuggaaaacuuugauguguaucaaauccuugccauuuauaguacgguaucgagcagucuaguugugguagggcugaucauggcaaugggucuuuggauguguucaaaugguucaaugcagugcaggauauguauauaa

SEQ ID NO: 43116 - RNA, 1701 nt, Artificial Sequence
  derived and/or modified CDS sequence (wt) from hemagglutinin__InfluenzaA__AHJ57767
augauugcauucauuguaauagcgauacuggcagcaaccggaaaaucagacaagauaugcauuggauaucaugccaacaauucaacaacaaagguagauacuauacucgagaagaacguaaccgucacacacucaguugagcugcuggagaaccagaaagaagaaagauucugcaaaaucucaaacaaggccccucucgaucuaagggauuguacccuagaggguuggaucuuggggaauccccgaugcggcauauugcuugcugaccaaagcuggucauacauaguggaacggccuaaugcccgaaaugggauuugcuauccuggaacauugaaugaaguugaagaauugaaggcacuuauuggaucaggggaaaggguagaaagguuugagauguuucccaagagcacaugggcaggaguggacaccaacaguggagugucaagugcuuguccucuugguaauggcccaucuuucuacaggaaucuucuauggauaauaaaacuaaagucaucagaauacccaguaauuagaggaacuuucaacaacacuggagacaagucaauucucuauuuuugggguguacaccauccuccugucacaacugaacaagaagcucuguaugguucuggugaucgauacguuagaaugggaacugaaagcaugaauuuugccaggagcccagaaauugcggcaaggccugcugugaauggucagagaggcagaaucgauuauuucugguccaucuuaaaaccaggggaaaccuugaauguagaaucuaaugggaauuuaauagccccuugguaugcauacagauuugucaacaaagauagcaaaggggccauauucagaucuaauuuaccaaucgagaacugugaugccacaugccagacuacugaaggagugauaagaaccaacaaaacauuucagaaugugagcccucuguggauuggagaaugccccaaguauguaaaaaguaaaagucuaaggcuugcuacuggacuaaggaauguuccacaaauagaaacuagaggacuuuuuggagcuauugcgggcuucauugaaggaggguggacuggaaugauugaugggugguacggcuaccaucaugaaaguucucaaggcucaggauaugcagcugauaaagaaagcacucaaaaggccauagacggaaucacaaacaaggucaauuccaucauugauaaaaugaauacacaauuugaggcuguaggucaugaguuuucaaaccuggagagaaggauugacaaccuaaacaaaagaauggaagauggauuucuggauguuuggacauauaaugcugaacuguugguucuucuugaaaacgaaagaacacuagaccuacaugaugcaaauguaaagaaccugcaugaaaaggucagaucacaacuaagggacaaugcuaaugaccuagggaacggaugcuuugaauuuuggcauaaguguaacaaugaauguauggagucugucaaaaaugggaccuaugacuaucccaaauaucaaaaggagaguagguuaaauagacagaaaauagaaucgguaaaacuggagaauuuugauguguaucaaauccuugccauuuauaguacgguaucgagcagucuaguuuugguagggcugauccuggcaaugggucuuuggauguguucaaaugguucaaugcagugcaggauauguauauaa

SEQ ID NO: 43117 - RNA, 1701 nt, Artificial Sequence
  derived and/or modified CDS sequence (wt) from hemagglutinin__InfluenzaA__AHJ57779
augauugcaaucauaauaauagcaauacugguagcaacuggaaaaucagacaagauaugcauuggauaucaugccaacaauucaacaacaaagguagauacgauacucgagaagaacguaaccgucacacacucaguugaacugcuggaggaccagaaagaagaaagauucugcaaaaucucaaacaaggccccucucgaccuaagggauuguaccauagaggguuggaucuuggggaauccccgaugcggcauacugcuugcugaccaaagcuggucauacauaguggaacggccuaaugcccgaaaugggauuugcuauccugggacauugaaugaagcagaagaauugaaagcacuuauuggaucaggggaagggguagaaagguuugagauguuucccaagaguacaugggcaggaguggacaccaacaguggaguaucaagugcuuguccucuugguaaugguccaucuuucuacaggaaucuucuauggauaauaaaacucaaguccucagaauauccaguaauuagaggaacuuucaacaacacuggagacaagucaguucucuauuuuugggguguacaccauccuccugucacaacugaacaaaaugcucuguaugguucugguaauagauauguuagaaugggaacugaaagcaugaauuuugccagaagcccagaaauugcggcaaggccugcugugaauggucagagaggcagaaucgauuauuucugguccaucuuaaaaccaggagaaaccuugaauguagaaucuaacgggaauuuaauagccccuugguaugcauacagauuugucaacaaagauaguaaaggagccauauucagaucuaauuuaccaauugagaacugugaugccacaugccagacuacugaaggagugauaagaaccaacaaaacauuucagaaugugagcccucuguggauuggagaaugccccaaguauguaaaaaguaagagucuaaggcuugcaacuggacuaaggaauguuccacaaauagaaacuagaggacuuuuuggagcuauugcaggcuucauugaaggaggauggacugguaugauugaugggugguauggcuaccaucaugaaaauucucaaggcucaggauaugcagcugauagagaaagcacucaaaaggcuauagacggaauuacaaacaagguaaauuccaucauugauaaaaugaacacacaauuugaggcugcaggucaugaguuuucaaaccuggagagaaggauugacaaccuaaacaaaagaauggaagauggauuucuggauguuuggacauacaacgccgaacuauugguucuucuugaaaacgaaagaacacuagaccuacaugaugcaaaugugaagaaccuacaugaaaaagucaaaucacaacuaagggacaaugcuaaugaccuagggaacggguguuuugaauuuuggcauaagugugacaaugaauguauggagucugucaaaaaugguaccuaugacuaucccaaguaucaaaaagagaguagguuaaacagacaaaaaauagaaucgguaaaacuggagaacuuugauguguaucaaauccuugccauuuauaguacgguaucgagcagucuaguuuugguagggcugaucauggcaaugggucuuuggauguguucaaaugguucaaugcagugcaugauauguauauaa

SEQ ID NO: 43118 - RNA, 1701 nt, Artificial Sequence
  derived and/or modified CDS sequence (wt) from hemagglutinin__InfluenzaA__AHJ57791
augauugcaaucauaauaauagcgauacugguaacaaccggaaaaucagacaagauaugcauuggauaucaugcuaacaauucaacaacaaagguagauacaauacucgagaagaauguaaccgucacacacucaguugaacugcuggagaacaagaaagaagaaagauucugcaaaaucucgaacaaagccccucucgaucuaagggauuguacccuagaggguuggaucuuggggaauccccgaugcggcauauugcuugcugaccaaagcuggucauacauaguggaacggccuaaugcccgaaaugggauuugcuauccuggaacauugaaugaaguaaaagaauugaaggcacuuauugggucaggggaaagaguaaaaagauuugagauguuccccaaaaguacaugggcaggaguggacaccaacaguggaguaucaaguucuuguccucuugguaaugguccaucuuucuacaggaaucuucuauggauaauaaaacacacgacaucaggguacccaguaauuaaaggaacuuacacaaacacuggagauaagucaguucucuauuuuugggguauacaccauccuccugacacaacugaacaaaauguucuguaugguucugguaaucgauacguuagaaugggaaccgaaagcaugaauuuugccaggagcccagaaauugcggcaaggccugcugugaauggucagagaggcagaauugauuauuucugguccauuuuaaaaccgggggaaaccuugaauguagaaucuaaugggaauuuaauagccccuugguacgcguacagauuugucaacaaagauagcaaaggagccauauucagaucuaauuuaccaaucgaggacugugaugccacuugccagacuacugaaggagugauaagaaccaacaaaacauuucagaaugugagcccucuguggauuggagagugccccaaguauguaaaaaguaagagucuaaggcuugcaacugggcuaaggaauguuccacaaauagaaacuagaggacuauuuggagcuauugcaggcuucauugaagggggauggacuggaaugauugacgggugguauggcuaccaucaugaaaauucucaaggcucaggauaugcagcugauagagaaagcacucaaaaggcuauagacggaauuacgaacaaggucaauuccaucauugauaaaaugaacacacaauuugaggcuguaggucaugaguuuucaaaccuggaaagaaggauugacacacuaaacaaaagaauggaagauggauuucuggauguuuggacauacaacgcugaacuguugguucuucuugaaaacgaaagaacacuagaccuacaugaugcaaaugugaagaaccugcaugaaagggucaaaucacagcugagggacaaugcuaaugaccuagggaacggaugcuuugaauuuuggcauaagugugacaaugaauguauggagucagucaaaaaugguaccuauaacuaucccaaguaucaagcugagaguagauuaaauaaacagaagauagaaucgguaaaacuggaggaguuuggcguguaucaaauccuugccauuuauaguacgguaucgagcagucuaguuuugguagggcugaucauggcaaugguucuuuggauguguucaaaugguucaaugcagugcaggguauguauauaa

SEQ ID NO: 43119 - RNA, 1701 nt, Artificial Sequence
  derived and/or modified CDS sequence (wt) from hemagglutinin__InfluenzaA__AHJ57815
augauugcauucaucauaauaacgauacugguaacaaccggaaaaucagacaagauaugcauuggauaucaugccaacaauucaacaacaaagguagauacaauacucgagaagaacguaaccgucacacacucaguagaacugcuggaaaaccagaaagaagagagauucugcagaaucucaaacaaggccccucucgaucuaaaggaguguacccuagaggguuggaucuuggggaauccccaaugcgauuuauuacuuggugaccaaagcuggucauacauaguggagcggcccaaugcccgaaaugggauuugcuacccuggaacguugaaugagguagaagaauugagggcacuuauuggaucaggggaaggaguagagagguuugagauguuucccaaaaguacaugggcaggaguggacaccaaccgugguguaacaaguucuuguccuuuugguagugguucaucuuucuacaggaaccuccuauggauaguaaaacacaccacaucaucauauccaguaauuaaaggaacuuucagaaacacuggagacaagucaguucucuauuuuugggguguacaccauccauuugacacgaaugagcaaaauguucuguaugguucugguaaucgauacguuaggaugggaacugaaagcaugaauuuugccagggguccagaaguugcggcaaggccuguugugaauggucagagaggcagaauugauuauuucugguccauuuuaaaaccaggggaaaccuugaacauagaaucuaacgguaauuuaauagccccuugguaugcauacagguuugucaacaaagauaguaagggagccauauucagaucuaauuuaccaaucgaggacugugaugccacaugccagacuauugaaggagugauaagaaccaacaaaacauuucagaaugugagccccuuguggauaggagaaugccccaaguauguaaaaagugagagucuaaggcuugcaacuggacuaaggaauguaccacagauagaaacaagaggacuuuuuggagcuauugcaggcuucauugaaggaggauggacuggaaugauugaugggugguacggcuaucaucacgaaaauucccaaggaucaggguaugcagcugauagagaaagcacucagaaggcuauagacggaauuacaaccaaggucaauuccauaauugauaaaaugaacacucaauuugaggcuguaggucaugaauuuucaaaccuggagagaaggauugacaaucuaaacaaaagauuggaagauggauuucuggauguuuggacauacaaugcugaauuguugguucuucuugaaaacgaaagaacacuagaccuacaugaugcaaaugugaagaaucuacaugaaagggucagaucacaacuaagggacaaugcuaaugaucuagggaauggauguuucgaauuuuggcauaaaugugacaaugaauguauggagucugucaaaaaugguaccuauaacuaucccaaguaucaagcugaaaguagguuaaacaaacagagaauagagucgguaaaacuggagaauuuugauguguaucaaauccucgccauuuauaguacgguaucgagcagucuaguuuugguagggcugauuuuggcaaugggucuuuggauguguucaaaugguucaaugcagugcaggauauguauauaa

SEQ ID NO: 43120 - RNA, 1701 nt, Artificial Sequence
  derived and/or modified CDS sequence (wt) from hemagglutinin__InfluenzaA__AHJ57827
augauugcauucauuguaauagcgauacugguagcaaccggaaaaucagacaagauaugcauuggauaucaugcaaacaauucaacaacaaagguagauacgauacuugagaaaaacguaacugucacacacucaguugaacugcuggagaaccagaaagaagaaagauucugcaaaaucucaaacaaggccccucucgaccuaagggauuguaccauagaagguuggaucuuggggaauccccgaugcggcauauugcuugcugaccaaagcuggucauacauaguggaacggccuaacgcccggaaugggauuugcuauccuggaacauugaaugaaguagaagaauugaaggcacuuauuggaucaggagaaagaguagaaagguuugagauguuucccaaaaguacaugggcaggaguggacaccaacaguggaguaucaagugcuuguccucuuggaaauggcccaucuuucuacaggaaucuucuauggauaauaaaaaccaagucaucagaauauccaguaauuaaaggaacuuucaacaacacuggagacaagucaguucucuauuuuugggguguacaccauccuccuagcagaaaugaacaaaauguucuguaugguucuggugaucgauacguuagaaugggaacugaaagcaugaauuuugccaggagcccagaaauugcggcaagaccugcugugaauggucagagaggcagaauugauuacuucugguccauuuuaaaaccaggagaaaccuugaauguagaaucuaacgggaauuuaauagccccuugguaugcauacagauuugucaacaaggauaguagaggagccauauucagaucuaauuuaccaaucgagaacugugaugccacaugccagacugcugaaggagugauaagaaccaacaaaacauuucagaaugugagcccucuguggauuggagaaugccccaaguauguaaaaaguaagagucuaaggcuugcaacuggacuaaggaauguuccacaaauagaaacuagagggcuuuuuggagcuauugcaggcuucauugaaggaggauggacuggaaugauugaugggugguauggcuaccaccaugaaaauucucaaggcucaggauaugcagcugauagagaaagcacccaaaaggcuauagacggaauuacaaacaaggucaauuccaucauugacaaaaugaacacacaauuugaggcuguaggucaugaguuuucaaaccuggaaagaaggauugacaaccuaaacaaaagaauggaagauggauuucuggauguuuggacauacaacgcugaacuguugguucuucuugaaaacgaaagaacacuagaccuacaugaugcaaaugugaagaaccuacaugaaagggucaaaucacaacuaagggacaaugcuaaugaucuagggaacgggugcuuugaauuuuggcauaagugugacaaugaauguauggagucugucaaaaaugguaccuaugacuaccccaaguaucaaaaagagaguagguuaaacagacagaaaauagaaucgguaaaacuggagaauuuugauguguaucaaauccuugccauuuauaguacgguaucgagcagucuaguuuugguagggcugaucauggcaaugggucuuuggauguguucaaaugguucaaugcagugcaggauauguauauaa

SEQ ID NO: 43121 - RNA, 1701 nt, Artificial Sequence
  derived and/or modified CDS sequence (wt) from hemagglutinin__InfluenzaA__AHJ57850
augauugcauucauuguaauagcaauacuggcaacaaccggaaaaucagacaagauaugcauuggauaucaugccaacaauucaacaacaaagguagauacuauacucgagaagaacguaacugucacacacucaguugaacuacuggagaaccagaaagaagaaagauucugcaaaaucucaaacaaagccccucucgaucuaagggauuguacccuagaggguuggaucuuggggaauccucgaugcggcauacugcuugcugaccaaagcuggucauacauaguggaacggccuaaugcccgaaaugggauuugcuauccuggaauauuaaaugaagcugaagaauugaaggcacuuaucggaucaggggaaaggguagaaagguuugagauguuucccaaaaguacaugggcaggaguggacacugacaguggagugucaagugcuuguccucuugguaauggcccaucuuucuacaggaaucuucuauggauaauaaaacuaaagucaucagaauauccaguaauuagaggaacuuucaacaacacuggagacaagucaauucucuauuuuuggggugugcaccauccuccugucacaacugaacaagaagccuuguaugguucugguaaucgauacguuagaaugggaacugaaagcaugaauuuugccaggacuccagaaauugcggcaaggccugcugugaauggucagagaggcagaaucgauuauuucugguccaucuuaaaaccaggggaaaccuugaauguagaaucuaaugggaauuuaauagccccuugguaugcauacagauuugucaacaaagauaguaaaggagccauauucagaucuaauuuaccaauugagaacugugacgccacaugccagacuacugaaggagugauaagaaccaacaaaacauuucagaaugugagcccucuguggauuggagaaugccccaaguauguaaagaguaaaagucuaagacuugcaacuggacuaaggaauguuccacaaauagaaacuaggggacuuuuuggagcuauugcaggcuucauugaaggaggauggacuggaaugauugaugggugguauggcuaccaucaugaaaauucucaaggcucaggauaugcugcugauagagaaagcacucaaaaggccauagacggaauuacaaacaaggucaauuccaucauugauaaaaugaacacacaauuugaggcuguaggccaugaguuuucaaaccuggagagaaggauugacaaccuaaacaaaagaauggaagauggauuucuggauguuuggacauacaacgcggaacuauugguucuucuugaaaacgaaagaacacuagaccuacaugaugcaaaugugaagaaccuacaugaaaaggucagaucacaacuaagggacaaugcuaaugaccuagggaaugggugcuuugaauuuuggcauaagugugacaaugaauguauggaguccgucaagaaugguaccuaugacuaucccaaguaccaagcggagaguagguuaaacagacagaaaauagaaucgguaaaacuggaaaacuuugauguguaucaaauccuugccauuuauaguacgguaucgagcagucuaguuuugguagggcugaucauggcaaugggucuuuggauguguucaaaugguucaaugcagugcaggauauguauauaa

SEQ ID NO: 43122 - RNA, 1701 nt, Artificial Sequence
  derived and/or modified CDS sequence (wt) from hemagglutinin__InfluenzaA__AHJ57862
augauugcauucauuguaauagcaauacuggcagcaaccggaaaaucagacaagauaugcauuggauaucaugccaacaauucaacaacaaagguagauacuauacucgagaagaacguaacugucacacacucaguugaacugcuggagaaccagaaagaagaaagauucugcaaaaucucaaacaaggccccucucgaucuaagggauuguacccuagaggguuggaucuuggggaauccccgaugcggcauacugcuugcugaccaaagcuggucauacauaguggaacggccuaaugcccgaaaugggauuugcuauccuggaauauugaaugaagcugaagaauugaaggcacuuaucggaucaggggaaaggguagaaagauuugagauguuucccaaaaguacaugggcaggaguggacaccaacaguggagugucaagugcuuguccucuugguaauggcccaucuuucuacaggaaucuucuauggauaauaaaacuaaagucaucagaauauccaguaauuagaggaacuuucaacaacacuggagacaagucaauucucuauuuuuggggugugcaucauccuccugucacaacugaacaagaagcccuguaugguucugguaaucgauacguuagaaugggaacugaaagcaugaauuuugccaggaguccagaaauugcggcaaggccugcugugaauggucagagaggcagaaucgauuauuucugguccaucuuaaaaccaggggaaaccuugaauguagaaucuaaugggaauuuaauagccccuugguaugcauacagauuugucaacaaagauaguaaaggagccauauucagaucuaauuuaccaauugagaacugugacgccacaugccagacuacugaaggagugauaagaaccaacaaaacauuucagaaugugagcccucuguggauuggagaaugccccaaguauguaaagaguaaaagucuaagacuugcaacuggacuaaggaauguuccacaaauagaaacuagaggacucuuuggagcuauugcagguuucauugaaggaggauggacuggaaugauugaugggugguauggcuaccaucaugaaaauucucaaggcucaggauaugcagcugacagagaaagcacucaaaaggccauagacggaauuacaaacaaggucaauuccaucauugauaaaaugaacacacaauuugaggcuguaggccaugaguuuucaaaccuggagagaaggauugacaaccuaaacaaaagaauggaagauggauuucuggauguuuggacauacaacgcggaacuauugguucuucuugaaaacgaaagaacacuagaccuacaugaugcaaaugugaagaaccuacaugaaaaggucaggucacaacuaagggacaaugcuaaugaccuagggaacgggugcuuugaauuuuggcauaagugugacaaugaauguauggagucugucaaaaaugguacuuaugacuaucccaaguaccaagcggagaguagguuaaacagacagaaaauagaaucgguaaaacuggagaacuuugauguguaucaaauccuugccauuuauaguacgguaucgagcagucuaguuuugguagggcugaucauggcaaugggucuuuggauguguucaaaugguucaaugcagugcaggauauguauauaa

SEQ ID NO: 43123 - RNA, 1701 nt, Artificial Sequence
  derived and/or modified CDS sequence (wt) from hemagglutinin__InfluenzaA__AHJ57873
augauugcauucauuguaauagcaacacugguagcaaccggaaaaucagacaagauaugcaugggauaucaugcaaacaauucgacaacaaagguagauacgauacuugagaagaacguaacugucacacacucaguugaacugcuggagaaccagaaagaagaaagauucugcaagaucucaaacaaggccccucucgaucuaagggauuguacccuagaagguuggauauuggggaacccccgaugcggcauauugcuagcugaccaaagcuggucauacauaguagaacggccuaaugcccgaaaugggauuugcuauccuggaacauugaaugaagcagaagaauuaaaggcacuuauuggaucaggagaaaggguagaaagguuugagauguuucccaaaagcacauggacaggaguggacaccgaaaguggaguaucaagugcuuguccucuugguaaugguccaucuuucuacaggaaucuucuauggauaauaaaacucaagucaucagaauauccaguaaucagaggaacuuucaacaacacuggagacaagucaauucucuauuuuugggguguacaccauccuccugucacaacugaacaaaaugcucuguaugguucuggugaucgauauguuagaaugggaacugaaagcaugaauuuugccaggagcccagaaauugcggcaagaccugcugugaauggucagagaggcagaauugauuauuucugguccaucuuaacaccuggggaaaccuugaauguagaaucuaaugggaauuuaauagccccuugguaugcauacagauuugucaacaaagauagcaaaggggccauauucagaucuaauuuaccaaucgagaacugugaugccacaugccagacuacugaaggagugauaagaaccaacaaaacauuucagaaugugagcccucuguggauuggagaaugccccaaguauguaaaaaguaaaagucuaaggcuugcaacuggacuaaggaauguuccacaaauagaaacuagaggacuuuuuggagcuauugcaggcuucauugaaggaggguggacuggaaugauugauggaugguacggcuaccaucaugaaaauucucaaggcucaggauaugcagcugauaaagaaagcacucaaaaggccauagacggaauuacaaacaaggucaauuccaucauugauaaaaugaauacacaauuugaggcuguaggucaugaguuuucaaaccuggagagaaggauugacaaccuaaacaaaagaauggaagauggauuucuggauguuuggacauauaaugcugaacuguugguucuucuugaaaacgaaagaacacuagaccuacaugaugcaaauguaaagaaccugcaugaaaaggucaggucacaacuaagggacaaugcuaaugaccuagggaacggaugcuuugaauuuuggcauaagugugacaaugaauguauggagucugucaaaaaugggaccuaugacuaucccaaauaucaaaaggagaguagguuaaauagacagaaaauagaaucgguaaaacuggagaauuuugauguguaucaaauccuugccauuuauaguacgguaucgagcagucuaguuuugguagggcugauccuggcaaugggucuuuggauguguucaaaugguucaaugcacugcaggauauguauauaa

SEQ ID NO: 43124 - RNA, 1701 nt, Artificial Sequence
  derived and/or modified CDS sequence (wt) from hemagglutinin__InfluenzaA__AHJ57885
augauugcauucauuguaauggcaauacuggcagcaaccggaaaaucagacaagauaugcauuggauaucaugccaacaauucaacaacaaagguagauacuauacucgaaaagaacguaacugucacacacucaguugaacuacuggagaaccagaaagaagaaagauucugcaaaaucucaaacaaggccccucucgaucuaagggauuguacccuagaggguuggaucuuggguaauccccgaugcggcauacugcuugcugaccaaagcuggucauacauaguggaacggccuaaugcccgaaaugggauuugcuauccuggaauauugaaugaagcugaagaauugaaggcacuuaucggaucaggggaaaggguagaaagguuugagauguuucccaaaaguacaugggcaggaguggacacugacaguggagugucaagugcauguccucuugguaauggcccaucuuucuacaggaaucuucuauggauaauaaaacgaaagucaucagcauauccaguaauuagaggaacuuucaacaacacuggagacaagucaauucucuauuuuuggggugugcaccauccuccugucacaacugaacaagaagcccuguaugguucugguaaucgauacguuagaaugggaacugaaagcaugaauuuugccaggaauccagaaauugcggcaaggccugcugugaauggucagagaggcagaaucgauuauuucugguccaucuuaaaaccaggggaaaccuugaauauagaaucuaaugggaauuuaauagccccuugguaugcauacagauuugucaacaaagauaguaaaggagccauauucagaucuaauuuaccaauugaggacugugacgccucaugccagacuacagaaggagugauaagaaccaacaaaacauuucagaaugugagcccucuguggauuggagaaugccccaaguauguaaagaguaaaagucuaagacuugcaacuggacuaaggaauguuccacaaauagaaacuagaggacuuuuuggagcuauugcaggcuucauugaaggaggauggacuggaaugauugaugggugguauggcuaccaucaugaaaauucucaaggcucaggauaugcagcugauagagaaagcacucaaaaggccauagacggaauuacaaacaaggucaauuccaucauugauaaaaugaacacacaauuugaggcuguaggccaugaguuuucaaaccuggagagaaggauugacaaccuagacaaaagaauggaagauggauuucuggauguuuggacauacaacgcggaacuauugguucuucuugaaaacgaaagaacacuagaccuacaugaugcaaaugugaagaaccuacaugaaaaggucagaucacaacuaagggacaaugcuaaugaccuagggaacgggugcuuugaauuuuggcauaagugugacaaugaauguauggagucugucaaaaaugguaccuaugacuaucccaaguaccaagcggagaguagguuaaacagacagaaaauagaaucgguaaaacuggagaacuuugauguguaucaaauccuugccauuuauaguacgguaucgagcagucuaguuuugguagggcugaucauggcaaugggucuuuggauguguucaaaugguucaaugcagugcaggauauguauauaa

SEQ ID NO: 43125 - RNA, 1701 nt, Artificial Sequence
  derived and/or modified CDS sequence (wt) from hemagglutinin__InfluenzaA__AHJ57897
augauugcauucauuguaauagcaauacuggcagcaaccggaaaaucagacaagauaugcauuggauaucaugccaacaauucaacaacaaagguagauacuauacucgaaaagaacguaacugucacacacucaguugaacuacuggagaaccagaaagaagaaagauucugcaaaaucucaaacaaggccccucucgaucuaagggauuguacccuagaggguuggaucuuggguaauccccgaugcggcauacugcuugcugaucaaagcuggucauacauaguggaacggccuaaugcccgaaaugggauuugcuauccuggaauauugaaugaagcugaagaauugaaggcacuuaucggaucaggggaaaggguagaaagguuugagauguuucccaaaaguacaugggcaggaguggacacugacaguggagugucaagugcauguccucuugguaauggcccaucuuucuacaggaaucuucuauggauaauaaaacgaaagucaucagcauauccaguaauuagaggaacuuucaacaacacuggagacaagucaauucucuauuuuuggggugugcaccauccuccugucacaacugaacaagaagcccuguaugguucugguaaucgauacguuagaaugggaacugaaagcaugaauuuugccaggaauccagaaauugcggcaaggccugcugugaauggucagagaggcagaaucgauuauuucugguccaucuuaaaaccaggggaaaccuugaauauagaaucuaaugggaauuuaauagccccuugguaugcauacagauuugucaacaaagauaguaaaggagccauauucagaucuaauuuaccaauugaggacugugacgccucaugccagacuacagaaggagugauaagaaccaacaaaacauuucagaaugugagcccucuguggauuggagaaugccccaaguauguaaagaguaaaagucuaagacuugcaacuggacuaaggaauguuccacaaauagaaacuagaggacuuuuuggagcuauugcaggcuucauugaaggaggauggacuggaaugauugaugggugguauggcuaccaucaugaaaauucucaaggcucaggauaugcagcugauagagaaagcacucaaaaggccauagacggaauuacaaacaaagucaauuccaucauugauaaaaugaacacacaauuugaggcugugggccaugaguuuucaaaccuggagagaaggauugacaaccuaaacaaaagaauggaagauggauuucuggauguuuggacauacaacgcggaacuauugguucuucuugaaaacgaaagaacacuagaccuacaugaugcaaaugugaagaaccuacaugaaaaggucagaucacaacuaagggacaaugcuaaugaccuagggaacgggugcuuugaauuuuggcauaagugugacaaugaauguauggaguccgucaaaaaugguaccuaugacuaucccaaguaucaagcggagaguagguuaaacagacaaaaaauagaaucgguaaaacuggagaacuuugauguguaucaaauccuugccauuuauaguacgguaucgagcagucuaguuuugguagggcugaucauggcaaugggucuuuggauguguucaaaugguucaaugcagugcaggauauguauauaa

SEQ ID NO: 43126 - RNA, 1701 nt, Artificial Sequence
  derived and/or modified CDS sequence (wt) from hemagglutinin__InfluenzaA__AHJ57908
augauugcauucauuguaauagcaauacugguagcaaccggaaaaucagacaagauaugcauuggauaucaugccaacaauucaacaacaaagguagauacgauacuugaaaagaauguaaccgucacacacucaguugaacugcuggagaaccagaaagaagaaagauucugcaaaaucucaaacaaagccccucucgaucuaagggauuguaccguagaggguuggaucuuggggaauccccgaugcggcauacugauugcugaccaaagcuggucguacauaguggaacggccuaaugcccgaaaugggauuugcuauccuggaacauugaaugaagcagaagaauugaaggcacuuauuggaucgggggaagggguagaaagauuugagauguuucccaaaaguacaugggcaggaguggacaccagcaguggaguaucaagugcuuguccucuugguaaugguccaucuuucuacaggaaucuucuauggauaauaaaacucaagucaucagaauauccaguaauuagaggaacuuucaacaacacuggagacaagucaguucucuauuuuuggggugugcaccauccuccugucacaacugaacaagaugcucuguaugguucugguaaucgauauguuagaaugggaacugaaagcaugaauuuugccagaagcccagaaauugcggcaaggccugcugugaauggucagagaggcagaaucgauuauuucuggucagucuuaaaaccaggggaaaccuugaauguagaaucuaacggaaauuuaauagccccuugguaugcauacagauuuguuaacaaagauaauaaaggagccauauucagaucuaauuuaccaauugagaacugugaugccacaugccagacuacugaaggagugauaagaaccaacaaaacauuucagaaugugagcccucuguggauuggagaaugccccaaguauguaaaaaguaagagucuaaggcuugcaacuggacuaaggaauguuccacaaauagaaacuagaggacuuuuuggagcuauugcaggcuucauugaaggaggauggacuggaaugauugaugggugguauggcuaccaucaugaaaauucucaaggcucaggauaugcagcugauagagaaagcacucaaaaggcuauagacggaauuacaaacaaggucaauuccaucauugauaaaaugaacacacaauuugaggcugcaggucaugaguuuucaaaccuggagagaaggauugacaacuuaaacaaaagaauggaagauggauuucuggauguuuggacauacaacgccgaacuauugguucuucuugaaaacgaaagaacacuagaccuacaugaugcaaaugugaagaaccuacaugaaaaggucaaaucacaacuaagggacaaugcuaaugaccuagggaacgggugcuuugaauuuuggcauaagugugacaaugaaugcauggagucugucaaaaaugguaccuaugacuaucccaaguaucaaaaagagaguagguuaaacagacagagaauagaaucgguaaaacuggagaacuuugauguguaucaaauccuugccauuuauaguacgguaucgagcagucuaguugugguagggcugaucauggcaaugggucuuuggauguguucaaauggcucaaugcagugcaugauauguauauaa

SEQ ID NO: 43127 - RNA, 1701 nt, Artificial Sequence
  derived and/or modified CDS sequence (wt) from hemagglutinin__InfluenzaA__AHJ57920
augauugcaaucauaauaauagcgauacugguagcaaccggaaaaucagacaagauaugcauuggauaucaugcaaacaauucaacaacaaagguagauacgauacuugagaaaaacguaaccgucacacacucaguugaacugcuggagaaccagaaagaagaaagauucugcaaaaucucaaacaaggccccucucgaucuaagggacugcaccauagaagguuggaucuuggggaaucccuggugcggcauauugcuugcugaccaaagcuggucauacauaguggaacggccuaaugcccggaaugggauuugcuaucccggaacauugaaugaaguagaagaauugaaggcacuuauuggaucaggagaaaggguagaaagguuugagauguuucccaaaaguacaugggcaggaguggacaccaacaguggaguaucaagugcuuguccucuuggaaauggcccaucuuucuacaggaaucuucuauggauaauaaaaaccaagucaucagaauauccaguaauuaaaggaacuuucaacaacacuggagacaagucaguucucuauuuuugggguguacaccauccuccuagcagaaaugaacaaaauguucuguaugguucuggugaucgauacguuagaaugggaacugaaagcaugaauuuugccaggagcccagaaauugcggcaagaccugcugugaauggucagagaggcagaauugauuauuucugguccauuuuaaaaccaggggaaaccuugaauguagaaucuaacgggaauuuaauagccccuugguaugcauacagauuugucaacaaggauaguagaggagccauauucagaucuaauuuaccaaucgagaacugugaugccacaugccagacugcugaaggagugauaagaaccaacaaaacauuucagaaugugagcccucuguggauuggagaaugccccaaguauguaaaaaguaagaguuuaaggcuugcaacuggacuaaggaauguuccacaaauagaaacuagagggcuuuuuggagcuauugcaggcuucauugaaggaggauggacuggaaugauugaugggugguauggcuaccaccaugaaaauucucaaggcucaggguaugcagcugauagagaaagcacccaaaaggcuacagacggaauuacaaacaaggucaauuccaucauugacaaaaugaacacacaauuugaggcuguaggucaugaguuuucaaaccuggaaagaaggauugacaaccuaaacaaaagaauggaagauggauuucuggauguuuggacauacaacgcugaacuguugguucuucuugaaaacgaaagaacacuagaccuacaugaugcaaaugugaagaaccuacaugaaagggucaaaucacaacuaagggacaaugcuaaugauuuagggaacgggugcuuugaauuuuggcauaagugugacaaugaauguauggagucugucaaaaaugauaccuaugacuaccccaaguaucaaaaggagaguagguuaaacagacagaaaauagaaucgguaagacuggagaauuuugauguguaucaaauccuugccauuuauaguacgguaucgagcagucuaguuuugguagggcugaucauggcaaugggucuuuggauguguucaaaugguucaaugcagugcaggauauguauauaa

SEQ ID NO: 43128 - RNA, 1701 nt, Artificial Sequence
  derived and/or modified CDS sequence (wt) from hemagglutinin__InfluenzaA__AHJ57932
augauugcacucaucauaauaacgauacugguaacaaccggaaaaucagacaagauaugcauuggauaucaugccaacaauucaacaacaaagguagauacaauacucgagaagaacguaaccgucacacacucaguagaacugcuggaaaaccagaaagaagagagauucugcagaaucucaaacaaagccccucucgaucuaaaggaguguacccuagaggguuggaucuuggggaauccccaaugcgauuuauuacuuggugaccaaagcuggucauacauaguggagcggcccaaugcccgaaaugggauuugcuacccuggaacguugaaugagguagaagaauuaagggcacuuauuggaucaggggaaggaguagagagguuugagauguuucccaaaaguacaugggcaggaguggacaccaaccgugguguaacaaguucuuguccuuuugguagugguucaucuuucuacaggaaccuccuauggauaguaaaacacaccacaucaucauauccaguaauuaaaggaacuuucagaaacacuggagacaagucaguucucuauuuuugggguguacaccauccauuugacacgaaugagcaaaauguucuguaugguucugguaaucgauacguuaggaugggaacugaaagcaugaauuuugccagggguccagaaguugcggcaaggccuguugugaauggucagagaggcagaauugauuauuucugguccauuuuaaaaccaggggaaaccuugaacauagaaucuaacgguaauuuaauagccccuugguaugcauacagguuugucaacaaagauaguaagggagccauauucagaucuaauuuaccaaucgaggacugugaugccacaugccagacuauugaaggagugauaagaaccaacaaaacauuucagaaugugagccccuuguggauaggagaaugccccaaguauguaaaaagugagagucuaaggcuugcaacuggacuaaggaauguaccacagauagaaacaagaggacuuuuuggagcuauugcaggcuucauugaaggaggauggacuggaaugauugaugggugguacggcuaucaucacgaaaauucccaaggaucaggguaugcagcugauagagaaagcacucagaaggcuauagacggaauuacaaccaaggucaauuccauaauugauaaaaugaacacucaauuugaggcuguaggucaugaauuuucaaaccuggagagaaggauugacaaucuaaacaaaagauuggaagauggauuucuggauguuuggacauacaaugcugaauuguugguucuucuugaaaacgaaagaacacuagaccuacaugaugcaaaugugaagaaucuacaugaaagggucagaucacaacuaagggacaaugcuaaugaucuagggaauggauguuucgaauuuuggcauaaaugugacaaugaauguauggagucugucagaaaugguaccuauaacuaucccaaguaucaagcugaaaguagguuaaacaaacagagaauagagucgguaaaacuggagaauuuugauguguaucaaauccucgccauuuauaguacgguaucgagcagucuaguuuugguagggcugauuuuggcaaugggucuuuggauguguucaaaugguucaaugcagugcaggauauguauauaa

SEQ ID NO: 43129 - RNA, 1701 nt, Artificial Sequence
  derived and/or modified CDS sequence (wt) from hemagglutinin__InfluenzaA__AHJ57943
augauugcauucauuguaauagcaacacugguagcaaccggaaaaucagacaagauaugcauuggauaucaugcaaacaauucgacaacaaagguagauacgauacuugagaagaacguaacugucacacacucaguugaacugcuggagaaccagaaagaagaaagauucugcaagaucucaaacaaggccccucucgaucuaagggauuguacccuagaggguuggaucuuggggaacccccgaugcggcauauugcuagcugaccaaagcuggucauacauaguagaacggccuaaugcccgaaaugggauuugcuauccuggaacauugaaugaagcagaagaauuaaaggcacuuauuggaucaggagaaaggguagaaagguuugagauguuucccaaaagcacauggacaggaguggacaccgaaaguggaguaucaagugcuuguccucuugguaaugguccaucuuucuacaggaaucuucuauggauaauaaaacucaagucaucagaauacccaguaaucagaggaacuuucaacaacacuggagacaagucaauucucuauuuuugggguguacaccauccuccugucacaacugaacaaaaugcucuguaugguucuggugaucgauauguuagaaugggaacugaaagcaugaauuuugccaggagcccagaaauugcggcaagaccugcugugaauggucagagaggcaggauugauuauuucugguccaucuuaaaaccaggggaaaccuugaauguagaaucuaaugggaauuuaauagccccuugguaugcauacagauuugucaacaaagauagcaaaggggccauauucagaucuaauuuaccaaucgagaacugugaugccacaugccagacuacugaaggagugauaagaaccaacaaaacauuucagaaugugagcccucuguggauuggagaaugccccaaguauguaaaaaguaaaagucuaaggcuugcuacuggacuaaggaauguuccacaaauagaaacuagaggacuuuuuggagcuauugcaggcuucauugaaggaggguggacuggaaugauugaugggugguacggcuaccaucaugaaaauucucaaggcucaggauaugcagcugauaaagaaagcacucaaaaggccauagacggaaucacaaacaaggucaauuccaucauugauaaaaugaauacacaauuugagacuguaggucaugaguuuucaaaccuggagagaaggauugacaaccuaaacaaaagaauggaagauggauuucuggauguuuggacauauaaugcugaacuguugguucuucuugaaaacgaaagaacacuagaccuacaugaugcaaauguaaagaaccugcaugaaaaggucagaucacaacuaagggacaaugcuaaugaccuagggaacggaugcuuugaauuuuggcauaaguguaacaaugaauguauggagucugucaaaaaugggaccuaugacuaucccaaauaucaaaaggagaguagguuaaauagacagaaaauagaaucgguaaaacuggagaauuuugauguguaucaaauccuugccauuuauaguacgguaucgagcagucuaguuuugguagggcugauccuggcaaugggucuuuggauguguucaaaugguucaaugcagugcaggauauguauauaa

SEQ ID NO: 43130 - RNA, 1701 nt, Artificial Sequence
  derived and/or modified CDS sequence (wt) from hemagglutinin__InfluenzaA__AHJ57954
augauugcauucauuguaauagcaauacuggcagcaaccggaaaaucagacaagauaugcauuggauaucaugccaacaauucaacaacaaagguagauacuauacucgaaaagaacguaacugucacacacucaguugaacuacuggagaaccagaaagaagaaagauucugcaaaaucucaaacaaggccccucucgaucuaagggauuguacccuagaggguuggaucuuggggaauccccgaugcggcauccugcuugcugaccaaagcuggucauacauaguggaacggccuaaugcccgaaaugggauuugcuacccuggaauauugaaugaagcugaagaauugaaggcacuuaucggaucaggggaaaggguagaaagguuugagauguuucccaaaaguacaugggcaggaguggacacuaacaguggggugucaagugcuuguccucuugguaauggcccaucuuucuacaggaaucuucuauggauaauaaaacaaaagucaucagcauauccaguaauuagaggaacuuucaacaacacuggagacaagucaauucucuauuuuuggggugugcaccauccuccugucacaacugaacaagaagcccuguaugguucugguaaucgauacguuagaaugggaacugaaagcaugaauuuugccaggaauccagaaauugcggcaaggccugcugugaauggucagagaggcagaaucgauuauuucugguccaucuuaaaaccaggggaaaccuugaauguagaaucuaaugggaauuuaauagccccuugguaugcauacagauuugucaacaaagauaguaaaggagccauauucagaucuaauuuaccaauugagaacugugacgccacaugccagacuacagaaggagugauaagaaccaacaaaacauuucagaaugugagcccucuguggauuggagaaugccccaaguauguaaagaguaaaagucuaagacuugcaacuggacuaaggaauguuccacaaauagaaacuagaggacuuuuuggagcuauugcaggcuucauugaaggaggauggacuggaaugauugaugggugguauggcuaccaucaugaaaauucucaaggcucaggauaugcagcugauagagaaagcacucaaaaggccauagacggaauuacaaacaaggucaauuccaucauugauaaaaugaacacacaauuugaggcuguaggccaugaguuuucaaaccuggagagaaggauugacaaccugaacaaaagaauggaagauggauuucuggauguuuggacauacaacgcggaacuauugguucuucuugaaaacgaaagaacacuagaccuacaugaugcaaaugugaagaaccuacaugaaaaggucagaucacaacuaagggacaaugcuaaugaccuagggaacgggugcuuugaauuuuggcauaagugugacaaugaauguauggagucugucaaaaaugguaccuaugacuaucccaaguaccaagcggagaguagguuaaacagacagaaaauagaaucaguaaaacuggagaacuuugauguguaucaaauccuugccauuuauaguacgguaucgagcagucuaguuuugguagggcugauaauggcaaugggucucuggauguguucaaaugguucaaugcagugcaggauauguauauaa

SEQ ID NO: 43131 - RNA, 1701 nt, Artificial Sequence
  derived and/or modified CDS sequence (wt) from hemagglutinin__InfluenzaA__AHJ57965
augauugcauucaucauaauaacgauacugguaacaaccggaaagucagacaagauaugcauuggauaucaugccaacaauucaacaacaaagguagauacaauacuugagaagaacguaaccgucacacacucggucgaacugcuggaaaaccagaaggaagagagauucugcaaaauuucaaacaaggccccucucgaucuaaaggaguguacccuagaggguuggaucuuggggaauccccaaugcgaccuauuacuuggugaccaaagcuggucauacauaguggaacgaccuaaugcccgaaaugggauuugcuacccuggaacauugaaugaaguagaagaauugaaggcacuuauuggaucaggagaaagaguagagagguuugagauguuucccaaaaguacaugggcaggaguggacaccaacaguggaguaacaaguucuuguucuuuugguagugguucaucuuucuacaggaaucuccuauggauaauaaaacacaccacaucaucauauccaguaauuaaaggaacuuucagaaacacuggagacaagucaguucucuauuuuugggguguacaccacccaauugacacaacugagcaaaauguucuguaugguucugguaaucgauacguuaggaugggaacugaaagcaugaauuuugccaggaguccagaaauugcggcaagaccuguugugaauggucagagaggcagaauugauuauuucugguccauuuuaaaaccaggggaaaccuugaauauagaaucuaacgggaauuuaauagccccuugguaugcauacagguuugucaacaaagauagcaagggagccauauucagaucuaauuuaccaaucgagaacugugaugccacaugccagacuauugaaggagugauaagaaccaacaaaacauuucagaaugugagccccuuauggauaggagaaugccccaaguaugugaaaagugagagucuaaggcuugcaacuggacuaaggaaugucccacaaauagaaacuagaggacuuuuuggagcuauugcaggcuucauugaaggaggauggacuggaaugauugaugggugguauggcuaucaucaugaaaauucucaaggaucaggauaugcagcugauagagaaagcacucaaagggcuauagacggaauuacaaccaaggucaauuccauaauugauaaaaugaacacacaauuugaggcuguaggucaugaguuuucaaaccuggagagaaggauugacaaccuaaacaagagaauggaagauggauuucuggauguuuggacauacaaugcugaauuguugguucuucuagaaaacgagagaacacuagaccuacaugaugcaaaugugaagaaccuacaugagagggucagaucacaacuaagggacaaugcuaaugauggagggaacggauguuuugaauuuuggcauaagugugacaaugaauguauggagucugucaagaaugguaccuaugacuaucccaaguaucaagcugagaguagaucaaacagacagagaauagaaucgguaaaacuggagaauuuugacguguaucaaauacuugccauuuauaguacgguaucgagcagucuaguggugguauggcugauucuggcaaugggucuuuggaugugugcaaaugguucaaugcagugcaggauauguauauaa

SEQ ID NO: 43132 - RNA, 1701 nt, Artificial Sequence
  derived and/or modified CDS sequence (wt) from hemagglutinin__InfluenzaA__AHJ57977
augauugcauucauuguaauagcaauacuggcagcaaccggaaaaucagacaagauaugcauuggauaucaugccaacaauucaacaacaaagguagauacuauacucgagaagaacguaaccgucacacacucaguugaacugcuggagaaccagaaagaagaaagauucugcaaaaucucgaacaaggccccucucgaucuaagggauuguaccauagaggguuggaucuuggggaauccccgaugcggcauauugcuugcugaccaaagcuggucauacauaguggaacggccuaaugcccgaaaugggauuugcuauccuggaacauugaaugaaguugaagaauugaaggcacuuauuggaucaggggaaaggguagaaagguuugagauguuucccaagagcacaugggcaggaguggacaccaacaguggagugucaagugcuuguccucuugguaauggcccaucuuucuacaggaaucuucuauggauaauaaaacuaaagucaucagaauacccaguaauuagaggaacuuucaacaacacuggagacaagucaauucucuauuuuugggguguacaccauccuccugucacaacugaacaagaagcucuguaugguucuggugaucgauacguuagaaugggaacugaaagcaugaauuuugccaggaguccagaaauugcggcaaggccugcugugaauggucagagaggcagaaucgauuauuucugguccaucuuaaaaccaggggaaaccuugaauguagaaucuaaugggaauuuaauagccccuugguaugcauacagauuugucaacaaagauagcaaaggagccauauucagaucuaauuuaccaaucgagaacugugaugccacaugccagacuacugaaggagugauaagaaccaacaaaacauuucagaaugugagcccucuguggauuggagaaugccccaaguauguaaaaaguaaaagucuaaggcuugcuacuggacuaaggaauguuccacaaauagaaacuagaggacuuuuuggagcuauugcaggcuucauugaaggaggguggacuggaaugauugaugggugguacggcuaccaucaugaaaauucucaaggcucaggauaugcagcugauaaagaaagcacucaaaaggccauagacggaaucacaaacaaggucaauuccaucauugauaaaaugaauacacaauuugaggcuguaggucaugaguuuucaaaccuggagagaaggauugacaaccuaaacaaaagaauggaagauggauuucuggauguuuggacauauaaugcugaacuguugguucuucuugaaaacgaaagaacacuagaccuacaugaugcaaauguaaagaaccugcaugaaaaggucagaucacaacuaagggacaaugcuaaugaccuagggaacggaugcuuugaauuuuggcauaaguguaacaaugaauguauggagucugucaaaaaugggaccuaugacuaucccaaauaucaaaaggagaguagguuaaauagacagaaaauagagucgguaaaacuggagaauuuugauguguaucaaauccuugccauuuauaguacgguaucgagcagucuaguuuugguagggcugauccuggcaaugggucuuuggauguguucaaaugguucaaugcagugcaggauauguauauaa

SEQ ID NO: 43133 - RNA, 1701 nt, Artificial Sequence
  derived and/or modified CDS sequence (wt) from hemagglutinin__InfluenzaA__AHJ57989
augauugcauucauuguaauagcgauacugguaacaaccggaaaaucagacaagauaugcauuggauaucaugcuaacaauucaacaacaaagguagauacaauacucgagaagaacguaaccgucacacacucaguugaacugcuggagaaccagaaagaagaaagauucugcaaaaucucgaacaaggccccucucgaucuaagagauuguacccuagaggguuggaucuuggggaauccccgaugcggcauauugcuugcugaccaaagcuggucauacauaguggaacggccuaaugcccgaaaugggauuugcuauccuggaacauugaaugaaguagaagaauugaaggcacuuauuggaucaggggaaaggguagaaagauuugagauguuucccaaaaguacaugggcaagaguggacaccgacaggggaguaucaagugcuuguccucuugguaaugguccaucuuucuacaggaaucuucuauggauaguaaaacacacgacaucagaauauccagugauuaaaggaacuuacacaaacacuggagauaagucaguucucuauuuuugggguguucaccauccuccugacacaacugaacaaaauguucuguaugguucugguaaucgauacguuagaaugggaacugaaagcaugaacuuugccaggaguccagaaauugcugcaaggccugcagugaauggucagagaggcagaauugauuauuucugguccauucuaaaaccaggggaaaccuugaauguagaaucuaaugggaauuuaauagccccuugguacgcauacagguuugucaacaaagauagcaaaggagccauauucagaucuaauuuaccaaucgagaacugugaugccaccugccagacuacugaaggagugauaagaaccaacaaaacauuucagaaugugagcccuauguggauuggagaaugccccaaguauguaaaaaguaagagucuaaggcuugcaacuggacuaaggaauguuccacaaauagaaacuagaggacuauuuggagcuauugcaggcuucauugaagggggauggacuggaaugauugaugggugguauggcuaccaucaugaaaauucucaaggcucaggauaugcagcugauagagaaagcacucaaaaggcuauagacggaauuacgaacaaggucaauuccauuauugauaaaaugaacacacaauuugaggcuguaggucaugaguuuucaaaccuggaaagaagaauugacaaccuaaacaaaagaauggaagauggauuucuggauguuuggacauacaacgcugaacuguugguucuucuugaaaacgaaagaacacuagaccuacaugauucaaaugugaagaaccuacaugaaagggucaaaucacaacugagggacaaugcuaaugaccuagggaacggaugcuuugaauuuuggcauaagugugacaaugaauguauggagucugucaaaaaugguacuuauaacuaucccaaguaucaagcugagaguagauuaaacagacagaaaauagaaucgguaaaacuggaggaguuuggcguguaucaaauccuugccauuuauaguacgguaucgagcagucuaguuuugguagggcugaucauggcaaugggucuuuggauguguucaaaugguucaaugcagugcaggauauguauauaa

SEQ ID NO: 43134 - RNA, 1701 nt, Artificial Sequence
  derived and/or modified CDS sequence (wt) from hemagglutinin__InfluenzaA__AHJ58001
augauugcauucauuguaauagcaauacuggcagcaaccggaaaaucagacaagauaugcauuggauaucaugccaacaauucaacaacaaagguagauacuauacucgagaagaacguaacugucacacacucaguugaacugcuggagaaccagaaagaagaaagauucugcaaaaucucaaacaaggccccucucgaucuaagggauuguacccuagaggguuggaucuuggggaauccccgaugcggcauauugcuugcugaccaaagcuggucauacauaguggaacggccuaaugcccgaaaugggauuugcuauccuggaauauugaaugaagcugaagaauugaaggcacuuaucggaucaggggaaaggguagaaagguucgagauguuucccaaaaguacaugggcaggaguggacacugacaguggagugucaagugccuguccucuugguaauggcccaucuuucuacaggaaucuucuauggauaauaaaacuaaagucaucagaauauccaguaauuagaggaacuuucaacaacacuggagacaagucaauucucuauuuuuggggugugcaccauccuccugucacaacugaacaagaagcccuguaugguucugguaaucgauacguuagaaugggaacugaaagcaugaauuuugccaggaguccagaaauugcggcaaggccugcugugaauggucagagaggcagaaucgauuauuucugguccaucuuaaaaccaggggaaaccuugaauguagaaucuaaugggaauuuaauagccccuugguaugcauacagauuugucaacaaagauaguaaaggagccauauucagaucuaauuuaccaauugagaacugugacgccacaugccagacuacugaaggagugauacgaaccaacaaaacauuucagaaugugagcccuauguggauuggagaaugccccaaguauguaaagaguaagagucuaagacuugcaacuggacuaaggaauguuccacaaauagaaacuagaggacuauuuggagcuauugcaggcuucauugaaggaggauggacuggaaugauugaugggugguauggcuaccaucaugaaaauucucaaggcucaggauaugcagcugauagagaaagcacucaaaaggccauagacggaauuacaaacaaggucaauuccaucauugauaaaaugaacacacaauuugaggcuguaggucaugaguuuucaaaccuggagagaaggauugacaaccuaaacaaaagaauggaagauggauuucuggauguuuggacauacaacgcugaacuguugguucuucuugaaaacgaaagaacacuagaccuacaugaugcaaaugugaagaaccuacaugaaaaggucagaucacaacuaagggacaaugcuaaugaccuagggaacgggugcuuugaauuuuggcauaagugugacaaugaauguauggagucugucaaaaaugguaccuaugacuaucccaaguaucaaacggagaguagguuaaacagacagaaaauagaaucgguaaaacuggagaacuuugauguguaucaaauccuugccauuuauaguacgguaucgagcagucuaguuuugguagggcugaucauggcaaugggucuuuggauguguucaaaugguucaaugcagugcaggauauguauauaa

SEQ ID NO: 43135 - RNA, 1701 nt, Artificial Sequence
  derived and/or modified CDS sequence (wt) from hemagglutinin__InfluenzaA__AHJ58013
augauugcauucauuguaauagcgauacugguaacaaccggaaaaucagacaagauaugcauuggauaucaugcuaacaauucaacaacgaaaguagauacuauacucgagaagaacguaaccgucacacacucggucgaacugcuggagaaccaaaaagaagaaagguucugcaaaaucucaagcaaggccccucucgaucuaagggauuguucccuagaggguuggaucuuggggaauccccgaugcggcauauugcucgcugaccaaagcuggucauacauaguggaaaggccuaaugcccgaaaugggauuugcuauccuggaacauugaaugaaguagaagaauugaaggcacuuauuggaucaggggaaagaguagaaagauuugagauguuucccaaaaguacaugggcagggguggacaccaacaguggaguaucaagugcuuguccucuuggugaagguccaucuuucuacaggaaucuucuauggauaauaaaacgcacgacaucagaauauccaguaauuaaaggaacuuacagaaacacuggagauaagucaguucucuauuuuuggggugugcaccauccuccugacacaacugaacagaauguucuguacgguucugguaaucgauacguuagaaugggaacugaaagcaugaauuuugccaggagcccagaaauugcggcaaggccugcugugaauggucaaagaggcagaauugauuauuucugguccauuuuaaaaccaggggaaaccuuggauguagaaucuaaugggaauuuaauagccccuugguacgcauacagauuugucaacaaagagagcaaaggagccauauucagauccaauuuaccaaucgagaacugugaugccacuugccagacuacugaaggagugauaaggaccaacaaaacauuccagaaugugagcccucuguggauuggagagugccccaaguauguaaaaaguaagagucuaaggcuugcaacuggacuaaggaauguuccacaaauagaaacuagaggacuauuuggagcuauugcaggcuucauugaaggaggauggacuggaaugauugaugggugguauggcuaucaucaugaaaauucucagggcucaggauaugcagcugauaaagaaagcacccagaaggcuauagacggaauuacgaacaaggucaauuccaucauugauaaaaugaauacacaauuugaggcuguaggucaugaauuuucaacuuuagaaagaaggauugacaaccuaaacaaaagaauggaagauggauuuuuggauguuuggacauacaacgcugaacuguugguucuucuugaaaacgaaagaacacuagaccuacacgaugcaaaugugaagaaccuacaugaaagagucagaucacaacugagggacaaugcuaaugaccuagggaacggaugcuuugaauuuuggcauaagugugacaaugaauguauggagucagucaaaaaugguaccuauaacuaucccaaguaucaagcugagaguagauuaaacaaacagaaaauagaaucgguaaaacuggaggaguuuggcguguaucaaauccuugccauuuauaguacgguaucgagcagucuaguuuugguaggacugaucauggcaaugggucuuuggauguguucaaaugguucaaugcaaugcaggauauguauauaa

SEQ ID NO: 43136 - RNA, 1701 nt, Artificial Sequence
  derived and/or modified CDS sequence (wt) from hemagglutinin__InfluenzaA__AHJ58025
augauugcauucauuguaauagcaauacugguaacgaccggagaaucagacaagauaugcauuggauaucaugccaacaauucgacaacaaaaguagauacgauacucgaaaagaacguaaccgucacacacucaguugaacugcuggagaaccagaaagaagaaagauucugcaaaaucucaaacaaagccccucucgaucuaagggauuguaccauagaagguuggaucuuggggaauccccgaugcggcauacuucuugccgaucaaagcuggucauacauaguggaacggccuaaugcccgaaaugggauuugcuauccuggaacgcugaaugaagcagaagaauugaaggcacuuauuggaucaggggaagggguagaaagguuugagauguuucccaaaaguacaugggcaggaguggacaccaacaguggaguaucaagugcuuguccucuugguaaugguccaucuuucuacagaaaucuucuauggauaauaaaacucaagucaucagaauauccaguaauuagaggaacuuucaacaacacuggagacaagucaguucucuauuuuugggguguacaccauccuccugucacaacugaacaaaaugaucuguaugguucugguaaucgauauguuaggauggguacugaaagcaugaauuuugccagaaacccagagauugcauuaaggccugcugugaauggucagagaggcagaaucgauuauuucugguccauuuuaaaaccaggggaaaccuugaauguagaaucuaacgggaauuuaauagccccuugguaugcauacagauuugucaacaaagauaguaaaggagccauauucagaucuagcuuaccaauugaaaacugugacgccacaugccagacugcugaaggagugauaagaacaaacaaaacauuucagaaugugagcccucuguggauuggagaaugccccaaguauguaaaaaguaagagucuaaggcuugcaacuggacuaaggaauguuccacaaauagaaacuagaggacuuuuuggagcuauugcaggcuucauugaaggaggauggacuggaaugguugauggaugguauggcuaccaucaugaaaauucucaaggcucaggauaugcagcugauagagaaagcacucaaaaggcuauagacggaauuacgaauaaggucaauuccaucauugauaaaaugaacacacaauuugaggcuguggaucaugaguuuucaaaccuggagagaaggauugacaaccugaacaaaagaauggaagauggauuuuuggauguuuggacauacaacgccgaacuauugguucuucuugaaaacgaaagaacacuagaucuacaugaugcaaaugugaagaaccuacaugaaaaggucaaaucacaacuaagggauaaugcuaaugaccuagggaacggaugcuuugaauuuuggcauaagugugacaaugaauguauggagucugucaaaaaugguaccuauaacuaucccaaauaucaaaaagagaguagguuaaacagacagaaaauagaaucgguaaaacuagagaacuuugauguguaucaaauccuugccauuuauaguacgguaucgagcagucugguuuugguagggcugaucauggcaaugggucuuuggauguguucaaaugguucaaugcagugcaggauauguauauaa

SEQ ID NO: 43137 - RNA, 1701 nt, Artificial Sequence
  derived and/or modified CDS sequence (wt) from hemagglutinin__InfluenzaA__AHJ58037
augauugcauucaucauaauaacgauacugguaacaaccggagaaucagacaagauaugcauuggauaucaugccaacaauucaacaacaaagguagauacaauacucgagaagaacguaaccgucacacacucggucgaacugcuggaaaaccagaaggaagagagauucugcaaaauuucaaacaaggccccucucgaucuaaaggaguguacccuagaggguuggaucuuggggaacccccaaugcgaccuauuacuuggugaccaaagcuggucauacauaguggaacggccuaaugcccgaaaugggauuugcuacccuggaacauugaaugaaguagaagaauugaaggcacuuauuggaucaggggaaaggguagagagguuugagauguuucccaaaaguacaugggcaggaguggacaccaacaguggaguaacaaggucuuguccuuuugguagugguucaucuuucuacaggaaucuccuauggauaauaaaacacaccacaucaucauauccaguaauuaaaggaacuuucagaaacacuggagacaagucaguucucuauuuuugggguguacaccauccaauugacacaacugagcaaaauguucuguaugguucugguaaucgauacguuaggaugggaacugaaagcaugaauuuugccaggaguccagaaauugcggcaagaccuguugugaauggucagagaggcagaauugauuauuucugguccauuuuaaaaccaggggaaaccuugaauauagaaucuaacgggaauuuaauagccccuugguaugcauacagguuugucaacaaagauaguaagggagccauauucagaucuaauuuaccaaucgagaacugugaugccacaugccagacuauugaaggagugauaagaaccaacaaaacauuucagaaugugagccccuuguggauaggagaaugccccaaguaugugaaaagugagagucuaaggcuugcaacuggacuaaggaaugucccacaaauagaaacuagaggacuuuuuggagcuauugcaggcuucauugaaggaggauggacuggaaugauugauggaugguauggcuaucaucaugaaaauucucaaggaucaggguaugcagcugauagagaaagcacucaaagggcuauagacggaauuacaaccaaggucaauuccauaauugauaaaaugaacacacaauuugaggcuguaggucaugaauuuucaaaccuggagagaaggauugacaaccuaaacaaaagaauggaagauggauuucuggauguuuggacauacaaugcugaguuguugguucuucuugaaaacgaaagaacacuagaccuacaugaugcaaaugugaagaaccuacaugaaagggucaaaucacaauuaagggacaaugcuaaugaucuagggaacggauguuuugaauuuuggcauaagugugacaaugaauguauggagucugucaaaaaugguaccuaugacuaucccaaguaucaagcugagaguagguuaaacaaacagagaauagaaucgguaaaacuggagaauuuugacguguaucaaauacuugccauuuauaguacgguaucgagcagucuaguuuugguagggcugauuauggcaauuggucuuuggauguguucaaaugguucaaugcagugcaggauauguauauaa

SEQ ID NO: 43138 - RNA, 1701 nt, Artificial Sequence
  derived and/or modified CDS sequence (wt) from hemagglutinin__InfluenzaA__AHJ58049
augauugcauucauuguaauagcaauacuggcagcaaccggaaaaucagacaagauaugcauuggauaucaugccaacaauucaacaacaaagguagauacuauacucgagaagaacguaacugucacacacucaguugaacuacuggagaaccagaaagaagaaagauucugcaaaaucucaaacaaggccccucucgaucuaagggauuguacccuagaggguuggaucuuggggaauccucgaugcggcauacugcuugcugaccaaagcuggucauacauaguggaacggccuaaugcccgaaaugggauuugcuauccuggaauauuaaaugaagcugaagaauugaaggcacuuaucggaucaggggaaaggguagaaagguuugagauguuucccaaaaguacaugggcaggaguggacacugacaguggagugucaagugcuuguccucuugguaauggcccaucuuucuacaggaaucuucuauggauaauaaaacuaaagucaucagaauauccaguaauuagaggaacuuucaacaacacuggagacaagucaauucucuauuuuuggggugugcaccauccuccugucacaacugaacaagaagccuuguaugguucugguaaucgauacguuagaaugggaacugaaagcaugaauuuugccaggacuccagaaauugcggcaaggccugcugugaauggucagagaggcagaaucgauuauuucugguccaucuuaaaaccaggggaaaccuugaauguagaaucuaaugggaauuuaauagccccuugguaugcauacagauuugucaacaaagauaguaaaggagccauauucagaucuaauuuaccaauugagaacugugacgccacaugccagacuacugaaggagugauaagaaccaacaaaacauuucagaaugugagcccucuguggauuggagaaugccccaaguauguaaagaguaaaagucuaagacuugcaacuggacuaaggaauguuccacaaauagaaacuagaggacuuuuuggagcuauugcaggcuucauugaaggaggauggacuggaaugauugaugggugguauggcuaccaucaugaaaauucucaaggcucaggauaugcagcugauagagaaagcacucaaaaggccauagacggaauuacaaacaaggucaauuccaucauugauaaaaugaacacacaauuugaggcuguaggccaugaguuuucaaaccuggagagaaggauugacaaccuaaacaaaagaauggaagauggauuucuggauguuuggacauacaacgcggaacuauugguucuucuugaaaacgaaagaacacuagaccuacaugaugcaaaugugaagaaccuacaugaaaaggucagaucacaacuaagggacaaugcuaaugaccuagggaacgggugcuuugaauuuuggcauaagugugacaaugaauguauggagucugucaagaaugguaccuaugacuaucccaaguaccaagcggagaguagguuaaacagacagaaaauagaaucgguaaaacuggaaaacuuugauguguaucaaauccuugccauuuauaguacgguaucgagcagucuaguuuugguagggcugaucauggcaaugggucuuuggauguguucaaaugguucaaugcagugcaggauauguauauaa

SEQ ID NO: 43139 - RNA, 1701 nt, Artificial Sequence
  derived and/or modified CDS sequence (wt) from hemagglutinin__InfluenzaA__AHJ58061
augauugcauucauuguaauagcaacacugguagcaaccggaaaaucagacaagauaugcauuggauaucaugcaaacaauucgacaacaaagguagauacgauacuugagaagaacguaacugucacacacucaguugaacugcuggagaaccagaaagaagaaagauucugcaagaucucaaacaaggccccucucgaucuaagggauuguacccuagaggguuggaucuuggggaacccccgaugcggcauauugcuagcugaccaaagcuggucauacauaguagaacggccuaaugcccgaaaugggauuugcuauccuggaacauugaaugaagcagaagaauuaaaggcacuuauuggaucaggagaaaggguagaaagguuugagauguuucccaaaagcacauggacaggaguggacaccgaaaguggaguaucaagugcuuguccucuugguaaugguccaucuuucuacaggaaucuucuauggauaauaaaacucaagucaucagaauacccaguaaucagaggaacuuucaacaacacuggagacaagucaauucucuauuuuugggguguacaccauccuccugucacaacugaacaaaaugcucuguaugguucuggugaucgauauguuagaaugggaacugaaagcaugaauuuugccaggagcccagaaauugcggcaagaccugcugugaauggucagagaggcaggauugauuauuucugguccaucuuaaaaccaggagaaaccuugaauguagaaucuaaugggaauuuaauagccccuugguaugcauacagauuugucaacaaagauagcaaaggggccauauucagaucuaauuuaccaaucgagaacugugaugccacaugccagacuacugaaggagugauaagaaccaacaaaacauuucagaaugugagcccucuguggauuggagaaugccccaaguauguaaaaaguaaaagucuaaggcuugcuacuggacuaaggaauguuccacaaauagaaacuagaggacuuuuuggagcuauugcaggcuucauugaaggaggguggacuggaaugauugaugggugguacggcuaccaucaugaaaauucucaaggcucaggauaugcagcugauaaagaaagcacucaaaaggccauagacggaaucacaaacaaggucaauuccaucauugauaaaaugaauacacaauuugaggcuguaggucaugaguuuucaaaccuggagagaaggauugacaaccuaaacaaaagaauggaagauggauuucuggauguuuggacauauaaugcugaacuguugguucuucuugaaaacgaaagaacacuagaccuacaugaugcaaauguaaagaaccugcaugaaaaggucagaucacaacuaagggacaaugcuaaugaccuagggaacggaugcuuugaauuuuggcauaaguguaacaaugaauguauggagucugucaaaaaugggaccuaugacuaucccaaauaucaaaaggagaguagguuaaauagacagaaaauagagucgguaaaacuggagaauuuugauguguaucaaauccuugccauuuauaguacgguaucgagcagucuaguuuugguagggcugauccuggcaaugggucuuuggauguguucaaaugguucaaugcagugcaggauauguauauaa

SEQ ID NO: 43140 - RNA, 1701 nt, Artificial Sequence
  derived and/or modified CDS sequence (wt) from hemagglutinin__InfluenzaA__AHJ58084
augauugcauucauuguaauagcaacacugguagcaaccggaaaaucagacaagauaugcauuggauaucaugcaaacaauucgacaacaaagguagauacgauacuugagaagaacguaacugucacacacucaguugaacugcuggagaaccagaaagaagaaagauucugcaagaucucaaacaaggccccucucgaucuaagggauuguacccuagaggguuggaucuuggggaacccccgaugcggcauauugcuagcugaccaaagcuggucauacauaguagaacggccuaaugcccgaaaugggauuugcuauccuggaacauugaaugaagcagaagaauuaaaggcacuuauuggaucaggagaaaggguagaaagguuugagauguuucccaaaagcacauggacaggagugaacaccgaaaguggaguaucaagugcuuguccucuugguaaugguccaucuuucuacaggaaucuucuauggauaauaaaacucaagucaucagaauacccaguaaucagaggaacuuucaacaacacuggagacaagucaauucucuauuuuugggguguacaccauccuccugucacaacugaacaaaaugcucuguaugguucuggugaucgauauguuagaaugggaacugaaagcaugaauuuugccaggagcccagaaauugcggcaagaccugcugugaauggucagagaggcaggauugauuauuucugguccaucuuaaaaccaggggaaaccuugaauguagaaucuaaugggaauuuaauagccccuugguaugcauacagauuugucaacaaagauagcaaaggggccauauucagaucuaauuuaccaaucgagaacugugaugccacaugccagacuacugaaggagugauaagaaccaacaaaacauuucagaaugugagcccucuguggauuggagaaugccccaaguauguaaaaaguaaaagucuaaggcuugcuacuggacuaaggaauguuccacaaauagaaacuagaggacuuuuuggagcuauugcaggcuucauugaaggaggguggacuggaaugauugaugggugguacggcuaccaucaugaaaauucucaaggcucaggauaugcagcugauaaagaaagcacucaaaaggccauagacggaaucacaaacaaggucaauuccaucauugauaaaaugaauacacaauuugaggcuguaggucaugaguuuucaaaccuggagagaaggauugacaaccuaaacaaaagaauggaagauggauuucuggauguuuggacauauaaugcugaacuguugguucuucuugaaaacgaaagaacacuagaccuacaugaugcaaauguaaagaaccugcaugaaaaggucagaucacaacuaagggacaaugcuaaugaccuagggaacggaugcuuugaauuuuggcauaaguguaacaaugaauguauggagucugucaaaaaugggaccuaugacuaucccaaauaucaaaaggagaguagguuaaauagacagaaaauagaaucgguaaaacuggagaauuuugauguguaucaaauccuugccauuuauaguacgguaucgagcagucuaguuuugguagggcugauccuggcaaugggucuuuggauguguucaaaugguucaaugcagugcaggauauguauauaa

SEQ ID NO: 43141 - RNA, 1701 nt, Artificial Sequence
  derived and/or modified CDS sequence (wt) from hemagglutinin__InfluenzaA__AHL80708
augaagacuaucauugcuuugagcuacauucuaugucugguuuucgcucaaaaacuuccuggaaaugacaacagcacggcaacgcugugccuugggcaccaugcagugccaaacggaacgauagugaaaacaaucacgaaugaccaaauugaaguuacuaaugcuacugagcugguucagaguuccucaacaggugaaauaugcaacaguccucaucagauccuugauggagaaaacugcacacuaauagaugcucuauugggagacccucagugugauggcuuccaaaacaagaaaugggaccuuuuuguugaacgaagcaaagcccacagcaacuguuacccuuaugaugugccggauuaugccucccuuaggucacuaguugccucauccggcacacuggaguuuaacaaugaaagcuucaauuggacuggagucacucaaaacggaacaagcucugcuugcauaaggagaucuaauaauaguuucuuuaguagauugaauugguugacccacuuaaacuucaaauacccagcauugaacgugacuaugccaaacaaugaacaauuugacaaauuguacauuugggggguucaccacccggguacggacaaggaccaaaucuuccuguaugcucaagcagcaggaagaaucacaguaucuaccaaaagaagccaacaggcuguaauuccgaauaucggaucuagacccagaguaaggaauaucccuagcagaguaagcaucuauuggacaauaguaaaaccgggagacauacuuuugauuaacagcacagggaaucuaauugcuccuagggguuacuucaaaauacgaagugggaaaagcucaauaaugagaucagaugcacccauuggcaaaugcaauucugcaugcaucacuccaaauggaagcauucccaaugacaaaccauuccaaaauguaaacaggaucacauacggggccugucccagauauguuaagcaaaacacucugaaauuggcaacaggaaugagaaauguaccagagaaacaaacuagaggcauauuuggcgcaauagcugguuucauagaaaaugguugggagggaaugguggaugguugguacgguuucaggcaucaaaauucugagggaaggggacaagcagcagaucucaaaagcacucaagcagcaaucgaucaaaucaaugggaagcugaauagauugaucgggaaaaccaacgagaaauuccaucagauugaaaaagaauucucugaagucgaagggagaauucaggaccuugagaaauauguugaggacacuaaaauagaucucuggucauacaacgcggagcuucuuguugcccuggagaaccaacacacaauugaucuaacugacucagaaaugaacaaacuguuugaaaaaacaaagaagcaacugagggaaaaugcugaggauaugggcaaugguuguuucaaaauauaccacaaaugugacaaugccugcauaggaucaaucagaaauggaacuuaugaccacgauguguacagagaugaagcauuaaacaaccgauuccagaucaagggaguugagcugaagucaggguacaaagauuggauccuauggauuuccuuugccauaucauguuuuuugcuuuguguugcuuuguugggguucaucaugugggccugccagaaaggcaacauuaggugcaacauuugcauuuga

SEQ ID NO: 43142 - RNA, 1701 nt, Artificial Sequence
  derived and/or modified CDS sequence (wt) from hemagglutinin__InfluenzaA__AHL80718
augaaggcaauacuaguaguucugcuauauacauuugcaaccgcaaaugcagacacauuauguauagguuaucaugcgaacaauucaacagacacuguagacacaguacuagaaaagaauguaacaguaacacacucuguuaaccuucuagaagacaagcauaacgggaaacuaugcaaacuaagagggguagccccauugcauuuggguaaauguaacauugcuggcuggauccugggaaauccagagugugaaucacucuccacagcaagcucaugguccuacauuguggaaacaucuaguucagacaauggaacguguuacccaggagauuucaucaauuaugaggagcuaagagagcaauugagcucagugucaucauuugaaagguuugagauauuccccaagauaaguucauggcccaaucaugacucgaacaaagguguaacggcagcauguccucaugcuggagcaaaaagcuucuacaaaaauuuaauauggcuaguuaaaaaaggaaauucauacccaaagcucagcaaauccuacauuaaugauaaagggaaagaaguccucgugcuguggggcauucaucauccaucuacuacugcugaccaacaaagucucuaucagaaugcagaugcauauguuuuuguggggacaucaagauacagcaagaaguucaagccggaaauagcaauaagacccaaagugagggaucaagaagggagaaugaacuauuacuggacacuaguagagccgggagacaaaauaacauucgaagcaacuggaaaucuagugguaccgagauaugcauucgcaauggaaagaaaugcuggaucugguauuaucauuucagacacaucaguccacgauugcaauacaacuugucagacacccaagggugcuauaaacaccagccucccauuucagaauauacauccgaucacaauuggaaaauguccaaaauauguaaaaagcacaaaauugagacuggccacaggauugaggaaugucccgucuauucaaucuagaggccuauuuggggccauugccggcuucauugaagggggguggacagggaugguagauggaugguacgguuaucaccaucaaaaugagcaggggucaggauaugcagccgaccugaagagcacacagaaugccauugacaagauuacuaacaaaguaaauucuguuauugaaaagaugaauacacaguucacagcaguagguaaagaguucaaccaccuggaaaaaagaauagagaauuuaaauaaaaaaguugaugaugguuuccuggacauuuggacuuacaaugccgaacuguugguucuauuggaaaaugaaagaacuuuggacuaccacgauucaaaugugaagaacuuauaugaaaagguaagaagccaguuaaaaaacaaugccaaggaaauuggaaacggcugcuuugaauuuuaccacaaaugcgauaacacgugcauggaaagugucaaaaaugggacuuaugacuacccaaaauacucagaggaagcaaaauuaaacagagaagaaauagaugggguaaagcuggaaucaacaaggauuuaccagauuuuggcgaucuauucaacugucgccaguucauugguacugguagucucccugggggcaaucaguuucuggaugugcucuaaugggucucuacaguguagaauauguauuuaa

SEQ ID NO: 43143 - RNA, 1710 nt, Artificial Sequence
  derived and/or modified CDS sequence (wt) from hemagglutinin__InfluenzaA__AHL80729
augaaggcaauacuaguaguucugcuauauacauuugcaaccgcaaaugcagacacauuauguauagguuaucaugcgaacaauucaacagacacuguagacacaguacuagaaaagaauguaacaguaacacacucuguuaaccuucuagaagacaagcauaacgggaaacuaugcaaacuaagagggguagccccauugcauuugggugaauguaacauugcuggcuggauccugggaaauccagagugugaaucacucuccacagcaagcucaugguccuacauuguggaaacaucuaguucagacaauggaacguguuacccaggagauuucaucgauuaugaggagcuaagagagcaauugagcucagugucaucauuugaaagguuugagauauuccccaagacaaguucauggcccaaucaugacucgaacaaagguguaacggcagcauguccucaugcuggagcaaaaagcuucuacaaaaauuuaauauggcuaguuaaaaaaggaaauucauacccaaagcucagcaaauccuacauuaaugauaaagggaaagaaguccucgugcuauggggcauucaccauccaucuacuagugcugaccaacaaagucucuaucagaaugcagaugcauauguuuuuguggggacaucaagauacagcaagaaguucaagccggaaauagcaauaagacccaaagugagggaucaagaagggagaaugaacuauuacuggacacuaguagagccgggagacaaaauaacauucgaagcaacuggaaaucuagugguaccgagauaugcauucgcaauggaaagaaaugcuggaucugguauuaucauuucagauacaccaguccacgauugcaauacaacuugucagacacccaagggugcuauaaacaccagccucaccagccucccauuucagaauguacauccgaucacaauuggaaaauguccaaaauauguaaaaagcacaaaauugagacuggccacaggauugaggaaugucccgucuauucaaucuagaggccuauuuggggccauugccgguuucauugaagggggguggacagggaugguagauggaugguacgguuaucaccaucaaaaugagcaggggucaggauaugcagccgaccugaagagcacacagaaugccauugacgagauuacuaacaaaguaaauucuguuauugaaaagaugaauacacaguucacagcaguagguaaagaguucaaccaccuggaaaaaagaauagagaauuuaaauaaaaagguugaugaugguuuccuagacauuuggacuuacaaugccgaacuguugguucuauuggaaaaugaaagaacuuuggacuaccacgauucaaaugugaagaacuuauaugaaaagguaagaagccaauuaaaaaacaaugccaaggaaauuggaaacgguugcuuugaauuuuaccacaaaugcgauaacacgugcauggaaagugucaaaaaugggacuuaugacuacccaaaauacucagaggaagcaaaauuaaacagagaagaaauagaugggguaaagcuggaaucaacaaggauuuaccagauuuuggcgaucuauucaacugucgccaguucauugguacugguagucucccugggggcaaucaguuucuggaugugcucuaaugggucucuacaguguagaauauguauuuaa

SEQ ID NO: 43144 - RNA, 1701 nt, Artificial Sequence
  derived and/or modified CDS sequence (wt) from hemagglutinin__InfluenzaA__AHL80740
augaaggcaauacuaguaguucugcuauauacauuugcaaccgcaaaugcagacacauuauguauagguuaucaugcgaacaauucaacagacacuguagacacaguacuagaaaagaauguaacaguaacacacucuguuaaccuucuagaagacaagcauaacgggaaacuaugcaaacuaagagggguagccccauugcauuuggguaaauguaacauugcuggcuggauccugggaaauccagagugugaauuacucuccacagcaagcucaugguccuacauuguggaaacaucuaguucagacaauggaacguguuacccaggagauuucaucaauuaugaggagcuaagagagcaauugagcucagugucaucauuugaaagguuugagauauuccccaagacaaguucauggcccaaucaugacucgaacaaagguguaacggcagcauguccucaugcuggagcaaaaagcuucuacaaaaauuuaauauggcuaguuaaaaaaggaaauucauacccaaagcucagcaaauccuacauuaaugauaaagggaaagaaguccucgugcuauggggcguucaccauccaucuacuagugcugaccaacaaagucucuaucagaaugcagaugcauauguuuuuguggggacaucaagauacagcaagaaguucaagccggaaauagcaauaagacccaaagugagggaucaagaagggagaaugaacuauuacuggacacuaguagagccgggagacaaaauaacauucgaagcaacuggaaaucuagugguaccgagauaugcauucgcaauggaaagaaaugcuggaucugguauuaucaucucagauacaccaguccacgauugcaauacaacuugucagacacccaagggugcuauaaacaccagccucccauuucagaauauacauccgaucacaauuggaaaauguccaaaauauguaaaaagcacaaaauugagacuggccacaggauugaggaaugucccgucuauucaaucuagaggccuauuuggggccauugccgguuucauugaagggggguggacagggaugguagauggaugguacgguuaucaccaucaaaaugagcaggggucaggauaugcagccgaccugaagagcacacagaaugccauugacaagauuacuaacaaaguaaauucuguuauugaaaagaugaauacacaguucacagcaguagguaaagaguucaaccaccuggaaaaaagaauagagaauuuaaauaaaaaaguugaugaugguuuccuggacauuuggacuuacaaugccgaacuguugguucuauuggaaaaugaaagaacuuuggacuaccacgauucaaaugugaagaacuuauaugaaaagguaagaagccaguuaaaaaacaaugccaaggaaauuggaaacggcugcuuugaauuuuaccacaaaugcgauaacacgugcauggaaagugucaaaaaugggacuuaugacuacccaaaauacucagaggaagcaaaauuaaacagagaaaaaauagaugggguaaagcuggaaucaacaaggauuuaccagauuuuggcgaucuauucaacugucgccaguucauugguacugguagucucccugggggcaaucaguuucuggaugugcucuaaugggucucuacaguguagaauauguauuuaa

SEQ ID NO: 43145 - RNA, 1701 nt, Artificial Sequence
  derived and/or modified CDS sequence (wt) from hemagglutinin__InfluenzaA__AHL80751
augaaggcaauacuaguaguucugcuauauacauuugcaaccgcaaaugcagacacauuauguauagguuaucaugcgaacaauucaacagacacuguagacacaauacuagaaaagaauguaacaguaacacacucuguuaaccuucuagaagacaagcauaacgggaaacuaugcaaacuaagagggguagccccauugcauuuggguaaauguaacauugcuggcuggauccugggaaauccagagugugaaucacucuccacagcaagcucaugguccuacauuguggaaacaucuaguucagacaauggaacguguuacccaggagauuucaucgauuaugaggagcuaagagagcaauugagcucagugucaucauuugaaagguuugagauauuccccaagacaaguucauggcccaaucaugacucgaacaaagguguaacggcagcauguccucaugcuggagcaaaaagcuucuacaaaaauuuaauauggcuaguuaaaaagggaaauucauacccaaagcucagcaaauccuacauuaaugauaaagggaaagaaauccucgugcuauggggcauucaccauccaucuacuagugcugaccaacaaagucucuaucagaaugcagaugcauauguuuuuguggggacaucaagauacagcaagaaguucaagccggaaauagcaauaagacccaaagugagggaucaagaagggagaaugaacuauuacuggacacuaguagagccgggagacaaaauaacauucgaagcaacuggaaaucuagugguaccgagauaugcauucgcaauggaaaaaaaugcuggaucugguauuaucauuucagauacaccaguccacgauugcaauacaacuugucagacacccaagggugcuauaaacaccagccucccauuucagaauauacacccgaucacaauuggaaaauguccaaaauauguaaaaagcacaaaauugagacuggccacaggauugaggaaugucccgucuauucaaucuagaggccuauuuggggccauugccgguuucauugaagggggguggacagggaugguagauggaugguacgguuaucaccaucaaaaugagcaggggucaggauaugcagccgaccugaagagcacacagaaugccauugacgagauuacuaacaaaguaaauucuguuauugaaaagaugaauacacaguucacagcaguagguaaagaguucaaccaccuggaaaaaagaauagagaauuuaaauaaaaagguugaugaugguuuccuggacauuuggacuuacaaugccgaacuguugguucuauuggaaaaugaaagaacuuuggacuaccacgauucaaaugugaagaacuuauaugaaaagguaagaagccaguuaaaaaacaaugccaaggaaguuggaaacggcugcuuugaauuuuaccacaaaugcgauaacacgugcauggaaagugucaaaaaugggacuuaugacuacccaaaauacucagaggaagcaaaauuaaacagagaagaaauagaugggguaaagcuggaaucaacaaggauuuaccagauuuuggcgaucuauucaacugucgccaguucauugguacugguagucucccugggggcaaucaguuucuggaugugcucuaaugggucucuacaguguagaauauguauuuaa

SEQ ID NO: 43146 - RNA, 1701 nt, Artificial Sequence
  derived and/or modified CDS sequence (wt) from hemagglutinin__InfluenzaA__AHL80762
augaaggcaauacuaguaguucugcuauauacauuugcaaccgcaaaugcagacacauuauguauagguuaucaugcgaacaauucaacagacacuguagacacaguacuagaaaagaauguaacaguaacacacucuguuaaccuucuagaagacaagcauaacgggaaacuaugcaaacuaagagggguagccccauugcauuuggguaaauguaacauugcuggcuggauccugggaaauccagagugugaaucacucuccacagcaagcucaugguccuacauuguggaaacaucuaguucagacaauggaacguguuacccaggagauuucaucaauuaugaggagcuaagagagcaauugagcucagugucaucauuugaaagguuugagauauuccccaagacaaguucauggcccaaucaugacucgaacaaagguguaacggcugcauguccucaugcuggagcaaaaagcuucuacaaaaauuuaauauggcuaguuaaaaaaggaaauucauacccaaagcucagcaaauccuacauuaaugauaaagggaaagaaguccucgugcuauggggcauucaccauccaucuacuagugcugaccaacaaagucucuaucagaaugcagaugcauauguuuuuguggggacaucaagauacagcaagaaguucaagccggaaauagcaauaagacccaaagugagggaucaagaagggagaaugaacuauuacuggauacuaguagagccgggagacaaaauaacauucgaagcaaccggaaaucuagugguaccgagauaugcauucgcaauggaaagaaaugcuggaucugguauuaucaucucagauacaccaguccacgauugcaauacaacuugucagacacccaagggugcuauaaacaccagccucccauuucagaauauacauccgaucacaauuggaaaauguccaaaauauguaaaaagcacaaaauugagacuggccacaggauugaggaaugucccgucuauucaaucuagaggccuauuuggggccauugccgguuucauugaagggggguggacagggaugguagauggaugguacgguuaucaccaucaaaaugagcaggggucaggauaugcagccgaccugaagagcacacagaaugccauugacaagauuacuaacaaaguaaauucuguuauugaaaagaugaauacacaguucacagcaguagguaaagaguucaaccaccuggaaaaaagaauagagaauuuaaauaaaaaaguugaugaugguuuccuggacauuuggacuuacaaugccgaacuguugguucuauuggaaaaugaaagaacuuuggacuaccacgauucaaaugugaagaacuuauaugaaaagguaagaagccaguuaaaagacaaugccaaggaaauuggaaacggcugcuuugaauuuuaccacaaaugcgauaacacgugcauggaaagugucaaaaaugggacuuaugacuacccaaaauacucagaggaagcaaaauuaaacagagaagaaauagaugggguaaagcuggaaucaacaaggauuuaccagauuuuggcgaucuauucaacugucgccaguucauugguacugguagucucccugggggcaaucaguuucuggaugugcucuaaugggucucuacaguguagaauauguauuuaa

SEQ ID NO: 43147 - RNA, 1701 nt, Artificial Sequence
  derived and/or modified CDS sequence (wt) from hemagglutinin__InfluenzaA__AHL80784
augaaggcaauacuaguaguucugcuauacacauuugcaaccgcaaaugcagacacauuauguauagguuaucaugcgaacaauucaacagacacuguagacacaguacuagaaaagaauguaacaguaacacacucuguuaaccuucuagaagacaagcauaacgggaaacuaugcaaacuaagagggguagccccauugcauuuggguaaauguaacauugcuggcuggauccugggaaauccagagugugaaucacucuccacagcaagcucaugguccuacauuguggaaacaucuaguucagacaauggaacguguuacccaggagacuucaucgauuaugaggagcuaagagagcaauugagcucagugucaucauuugaaagguuugagauauuccccaagacaaguucauggcccaaucaugacucgaacaaagguauaacggcagcauguccucaugcuggagcaaaaagcuucuacaaaaauuuaauauggcuaguuaaaaaaggaaauucauauccaaagcucagcaaauccuacauuaaugauaaagggaaagaaguccucgugcuauggggcauucaccauccaucuacuagugcugaccaacaaagucucuaucagaaugcagaugcauauguuuuuguggggacaucaagauacagcaagaaguucaagccggaaauagcaauaagacccaaagugagggaucaagaagggagaaugaacuauuacuggacacuaguagagccaggagacaaaauaacauucgaagcaacuggaaaucuagugguaccgagauaugcauucgcaauggaaagaaaugcuggaucugguauuaucauuucagauacaccaguccacgauugcaauacaacuugucagacacccaagggugcuauaaacaccagccucccauuucagaauauacauccgaucacaauuggaaaauguccaaaauauguaaaaagcacaaaauugagacuggccacaggauugaggaaugucccgucuauucaaucuagaggccuauuuggggccauugccgguuucauugaagggggguggacagggaugguagauggaugguacgguuaucaccaucaaaaugagcaggggucaggauaugcagccgaccugaagagcacacagaaugccauugacaagauuacuaacaaaguaaauucuguuauugaaaagaugaauacacaguucacagcaguagguaaagaguucaaccaccuggaaaaaagaauagagaauuuaaauaaaaaaguugaugaugguuuccuggacauuuggacuuacaaugccgaacuguuaguucuauuggaaaaugaaagaacuuuggacuaccacgauucaaaugugaagaacuuauaugaaaagguaagaagccaguuaaaaaacaaugccaaggaaauuggaaacggcugcuuugaauuuuaccacaaaugcgauaacacgugcauggaaagugucaaaaaugggacuuaugacuacccaaaauacucagaggaagcaaaauuaaacagagaagaaauagaugggguaaagcuggaaucaacaaggauuuaccagauuuuggcgaucuauucaacugucgccaguucauugguacugguagucucccugggggcaaucaguuucuggaugugcucuaaugggucucuacaguguagaauauguauuuaa

SEQ ID NO: 43148 - RNA, 1701 nt, Artificial Sequence
  derived and/or modified CDS sequence (wt) from hemagglutinin__InfluenzaA__AHL80795
augaaggcaauacuaguaguucugcuauauacauuugcaaccgcaaaugcggacacauuauguauagguuaucaugcgaacaauucaacagacacuguagacacaguacuagaaaagaauguaacaguaacacacucuguuaaccuucuagaagacaagcauaacgggaaacuaugcaaacuaagagggguagccccauugcauuuggguaaauguaacauugcuggcuggauccugggaaauccagagugugaaucacucuccacagcaagcucaugguccuacauuguggaaacaucuaguucagacaauggaacguguuacccaggagauuucaucgauuaugaggagcuaagagagcaauugagcucagugucaucauuugaaagguuugagauauuccccaagacaaguucauggcccaaucaugacucgaacaaagguguaacggcagcauguccucaugcuggagcaaaaagcuucuacaaaaauuuaauauggcuaguuaaaaaaggaaauucauacccaaagcucagcaaauccuacauuaaugauaaagggaaagaaguccucgugcuauggggcauucaccauccaucuacuagugcugaccaacaaagccucuaucagaaugcagaugcauauguuuuuguggggacaucaagauacagcaagaaguucaagccggaaauagcaauaagacccaaagugagggaucaagaagggagaaugaacuauuacuggacacuaguagagccgggagacaaaauaacauucgaagcaacuggaaaucuagugguaccgagauacgcauucgcaauggaaagaaaugcuggaucugguauuaucauuucagauacaccaguccacgauugcaauacaacuugucaaacacccaagggugcuauaaacaccagccucccauuucagaauauacauccgaucacaauuggaaaauguccaaaauauguaaaaagcacaaaauugagacuggccacaggauugaggaaugucccgucuauucaaucuagaggccuauuuggggccauugccggcuucauugaagggggguggacagggaugguagauggaugguacgguuaucaccaucaaaaugagcaggggucaggauaugcagccgaccugaagagcacacagaaugccauugacaagauuacuaacaaaguaaauucuguuauugaaaagaugaauacacaguucacagcaguagguaaagaguucaaccaccuggaaaaaagaauagagaauuuaaauaaaaaaguugaugaugguuuccuggacauuuggacuuacaaugccgaacuguugguucuauuggaaaaugaaagaacuuuggacuaccacgauucaaaugugaagaacuuauaugaaaagguaagaagccaguuaaaaaacaaugccaaggaaauuggaaacggcugcuuugaauuuuaccacaaaugcgauaacacgugcauggaaagugucaaaaaugggacuuaugacuacccaaaauacucagaggaagcaaaauuaaacagagaagaaauagaugggguaaagcuggaaucaacaaggauuuaccagauuuuggcgaucuauucaacugucgccaguucauugguacugguagucucccugggggcaaucaguuucuggaugugcucuaaugggucucuacaguguagaauauguauuuaa

SEQ ID NO: 43149 - RNA, 1701 nt, Artificial Sequence
  derived and/or modified CDS sequence (wt) from hemagglutinin__InfluenzaA__AHL80817
augaaggcaauacuaguaguucugcuauauacauuugcaaccgcaaaugcagacacauuauguauagguuaucaugcgaacaauucaacagacacuguagacacaguacuagaaaagaauguaacaguaacacacucuguuaaccuucuagaagacaagcauaacgggaaacuaugcaaacuaagagggguagccccauugcauuuggguaacuguaacauugcuggcuggauccuggggaauccagagugugaaucacucuccacagcaagcucaugguccuacauuguggaagcaucuaguucagacaauggaacguguuacccaggagauuucaucgauuaugaggagcuaagagagcaauugagcucagugucaucauuugaaagguuugagauauuccccaagacaaguucauggcccaaucaugacucgaacaaagguguaacggcagcauguccucaugcuggagcaaaaagcuucuacaaaaauuuaauauggcuaguuaaaaaaggaaauucauacccaaagcucagcaaauccuacauuaaugauaaagggaaagaaguccucgugcuauggggcauucaccauccaucuacuagugcugaccaacaaagucucuaucagaaugcagaugcauauguuuuuguggggacaucaagauacagcaagaaguucaagccggaaauagcaauaagacccaaagugagggaucaagaagggagaaugaacuauuacuggacacuaguagagccgggagacaaaauaacauucgaagcaacuggaaaucuagugguaccgagauaugcauucgcaauggaaagaaaugcuggaucugguauuaucauuucagauacaccaguccaugauugcaauacaacuugucagacacccaagggugcuauaaacaccagccucccauuucagaauauacauccgaucacaauuggaaaauguccaaaauauguaaaaagcacaaaauugagacuggccacaggauugaggaaugucccgucuauucaaucuagaggccuauuuggggccauugccgguuucauugaagggggguggacagggaugguagauggaugguacgguuaucaccaucaaaaugagcaggggucaggauaugcagccgaccugaagagcacacagaaugccauugacaagauuacuaacaaaguaaauucuguuauugaaaagaugaauacacaguucacagcaguagguaaagaguucaaccaccuggaaaaaagaauagagaauuuaaauaaaaaaguugaugaugguuuccuggacauuuggacuuacaaugccgaacuguugguucuauuggaaaaugaaagaacuuuggacuaccacgauucaaaugugaagaacuuauaugaaaagguaagaagccaguuaaaaaacaaugccaaggaaauuggaaacggcugcuuugaauuuuaccacaaaugcgauaacacgugcauggaaagugucaaaaaugggacuuaugacuacccaaaauacucagaggaagcaaaauuaaacagagaagaaauagaugggguaaagcuggaaucaacaaggauuuaccagauuuuggcgaucuauucaacugucgccaguucauugguacugguagucucccugggggcaaucaguuucuggaugugcucuaaugggucucuacaguguagaauauguauuuaa

SEQ ID NO: 43150 - RNA, 1701 nt, Artificial Sequence; identical to SEQ ID NO: 43149
  derived and/or modified CDS sequence (wt) from hemagglutinin__InfluenzaA__AHL80828

SEQ ID NO: 43151 - RNA, 1701 nt, Artificial Sequence
  derived and/or modified CDS sequence (wt) from hemagglutinin__InfluenzaA__AHL80839
augaaggcaauacuaguaguucugcuauauacauuugcaaccgcaaaugcagacacauuauguauagguuaucaugcgaacaauucaacagacacuguagacacaguacuagaaaagaauguaacaguaacacacucuguuaaccuucuagaagacaagcauaacgggaaacuaugcaaacuaagagggguagccccauugcauuuggguaaauguaacauugcuggcuggauccugggaaauccagagugugaaucacucuccacagcaagcucaugguccuacauuguggaaacaucuaguucagacaauggaacguguuacccaggagacuucaucgauuaugaggagcuaagagagcaauugagcucagugucaucauuugaaagguuugagauauuccccaagacaaguucauggcccaaucaugacucgaacaaagguauaacggcagcauguccucaugcuggagcaaaaagcuucuacaaaaauuuaauauggcuaguuaaaaaaggaaauucauauccaaagcucagcagauccuacauuaaugauaaagggaaagaaguccucgugcuauggggcauucaccauccaucuacuagugcugaccaacaaagucucuaucagaaugcagaugcauauguuuuuguagggacaucaagauacagcaagaaguucaagccggaaauagcaauaagacccaaagugagggaucaagaagggagaaugaacuauuacuggacacuaguagagccaggagacaaaauaacauucgaagcaacuggaaaucuagugguaccgagauaugcauucgcaauggaaagaaaugcuggaucugguauuaucauuucagauacaccaguccacgauugcaauacaacuugucagacacccaagggugcuauaaacaccagccucccauuucagaauauacauccgaucacaauuggaaaauguccaaaauauguaaaaagcacaaaauugagacuggccacaggauugaggaaugucccgucuauucaaucuagaggccuauuuggggccauugccgguuucauugaagggggguggacagggaugguagauggaugguacgguuaucaccaucaaaaugagcaggggucaggauaugcagccgaccugaagagcacacagaaugccauugacaagauuacuaacaaaguaaauucuguuauugaaaagaugaauacacaguucacagcaguagguaaagaguucaaccaccuggaaaaaagaauagagaauuuaaauaaaaaaguugaugaugguuuccuggacauuuggacuuacaaugccgaacuguuaguucuauuggaaaaugaaagaacuuuggacuaccacgauucaaaugugaagaacuuauaugaaaagguaagaagccaguuaaaaaacaaugccaaggaaauuggaaacggcugcuuugaauuuuaccacaaaugcgauaacacgugcauggaaagugucaaaaaugggacuuaugacuacccaaaauacucagaggaagcaaaauuaaacagagaagaaauagaugggguaaagcuggaaucaacaaggauuuaccagauuuuggcgaucuauucaacugucgccaguucauugguacugguagucucccugggggcaaucaguuucuggaugugcucuaaugggucucuacaguguagaauauguauuuaa

SEQ ID NO: 43152 - RNA, 1701 nt, Artificial Sequence
  derived and/or modified CDS sequence (wt) from hemagglutinin__InfluenzaA__AHL80861
augaaggcaauacuaguaguucugcuauauacauuugcaaccgcaaaugcagacacauuauguauagguuaucaugcgaacaauucaacagacacuguagacacaguacuagaaaagaauguaacaguaacacacucuguuaaccuucuagaagacaagcauaacgggaaacuaugcaaacuaagagggguagccccauugcauuuggguaaauguaacauugcuggcuggauccugggaaauccagagugugaaucacucuccacagcaagcucaugguccuacauuguggaaacaucuaguucagacaauggaacguguuacccaggagauuucaucgauuaugaggagcuaagagagcaauugagcucagugucaucauuugaaagguuugagauauuccccaagacaaguucauggcccaaucaugacucgaacaaagguguaacggcagcauguccucaugcuggagcaaaaagcuucuacaaaaauuuaauauggcuaguuaaaaaaggaaauucauacccaaagcucagcaaauccuacauuaaugauaaagggaaagaaguccucgugcuauggggcauucaccauccaucuacuagugcugaccaacaaagucucuaucagaaugcagaugcauauguuuuuguggggacaucaagauacagcaagaaguucaagccggaaauagcaauaagacccaaagugagggaucaagaaggaagaaugaacuauuacuggacacuaguagagccgggagacaaaauaacauucgaagcaacuggaaaucuagugguaccgagauacgcauucgcaauggaaagaaaugcuggaucugguauuaucauuucagauacaccaguccacgauugcaauacaacuugucaaacacccaagggugcuauaaacaccagccucccauuucagaauauacauccgaucacaauuggaaaauguccaaaauauguaaaaagcacaaaauugagacuggccacaggauugaggaaugucccgucuauucaaucuagaggccuauuuggggccauugccggcuuuauugaagggggguggacagggaugguagauggaugguacgguuaucaccaucaaaaugagcaggggucaggauaugcagccgaccugaagagcacacagaaugccauugacaagauuacuaacaaaguaaauucuguuauugaaaagaugaauacacaguucacagcaguagguaaagaguucaaccaccuggaaaaaagaauagggaauuuaaauaaaaaaguugaugaugguuuccuggacauuuggacuuacaaugccgagcuguugguucuauuggaaaaugaaagaacuuuggacuaccacgauucaaaugugaagaacuuauaugaaaagguaagaagccaguuaaaaaacaaugccaaggaaauuggaaacggcugcuuugaauuuuaccacaaaugcgauaacacgugcauggaaagugucaaaaaugggacuuaugacuacccaaaauacucagaggaagcaaaauuaaacagagaagaaauagaugggguaaagcuggaaucaacaaggauuuaccagauuuuggcgaucuauucaacugucgccaguucauugguacugguagucucccugggggcaaucaguuucuggaugugcucuaaugggucucuacaguguagaauauguauuuaa

SEQ ID NO: 43153 - RNA, 1701 nt, Artificial Sequence
  derived and/or modified CDS sequence (wt) from hemagglutinin__InfluenzaA__AHL80872
augaaggcaauacuaguaguucugcuauauacauuugcaaccgcaaaugcagacacauuauguauagguuaucaugcgaacaauucaacagacacuguagacacaguacuagaaaagaauguaacaguaacacacucuguuaaccuucuagaagacaagcauaacgggaaacuaugcaaacuaagagggguagccccauugcauuuggguaaauguaacauugcuggcuggauccugggaaauccagagugugaaucacucuccacagcaagcucaugguccuacauuguggaaacaucuaguucagacaauggaacguguuacccaggagauuucaucgauuaugaggagcuaagagagcaauugagcucagugucaucauuugaaagguuugagauauuccccaagacaaguucauggcccaaucaugacucgaacaaagguguaacggcagcauguccucaugcuggagcaaaaagcuucuacaaaaauuuaauauggcuaguuaaaaaaggaaauucauacccaaagcucagcaaauccuacauuaaugauaaagggaaagaaguccucgugcuauggggcauucaccauccaucuacuaaugcugaccaacaaagucucuaucagaaugcagaugcauauguuuuuguggggacaucaagauacagcaagaaguucaagccggaaauagcaauaagacccaaagugagggaucaagaagggagaaugaacuauuacuggacacuaguagagccgggagacaaaauaacauucgaagcaacuggaaaucuagugguaccgagauacgcauucgcaauggaaagaaaugcuggaucugguauuaucauuucagauacaccaguccacgauugcaauacaacuugucaaacacccaagggugcuauaaacaccagccucccauuucagaauauacauccgaucacaauuggaaaauguccaaaauauguaaaaagcacaaaauugagacuggccacaggauugaggaaugucccgucuauucaaucuagaggccuauuuggggccauugccggcuuuauugaagggggguggacagggaugguagauggaugguacgguuaucaccaucaaaaugagcagggaucaggauaugcagccgaccugaagagcacacagaaugccauugacaagauuacuaacaaaguaaauucuguuauugaaaagaugaauacacaguucacagcaguagguaaagaguucaaccaccuggaaaaaagaauagagaauuuaaauaaaaaaguugaugaugguuuccuggacauuuggacuuacaaugccgagcuguugguucuauuggaaaaugaaagaacuuuggacuaccacgauucaaaugugaagaacuuauaugaaaagguaagaagccaguuaaaaaacaaugccaaggaaauuggaaacggcugcuuugaauuuuaccacaaaugcgauaacacgugcauggaaagugucaaaaaugggacuuaugacuacccaaaauacucagaggaagcaaaauuaaacagagaagaaauagaugggguaaagcuggaaucaacaaggauuuaccagauuuuggcgaucuauucaacugucgccaguucauugguacugguagucucccugggggcaaucaguuucuggaugugcucuaaugggucucuacaguguagaauauguauuuaa

SEQ ID NO: 43154 - RNA, 1701 nt, Artificial Sequence
  derived and/or modified CDS sequence (wt) from hemagglutinin__InfluenzaA__AHL80883
augaaggcaauacuaguaguucugcuauauacauuugcaaccgcaaaugcagacacauuauguauagguuaucaugcgaacaauucaacagacacuguagacacaguacuagaaaagaauguaacaguaacacacucuguuaaccuucuagaagacaagcacaacgggaaacuaugcaaacuaagagggguagccccauugcauuuggguaaauguaacauugcuggcuggauccugggaaauccagagugugaaucacucuccacagcaagcucaugguccuacauuguggaaacaucuaguucagacaauggaacguguuacccaggagauuucaucgauuaugaggagcuaagagagcaauugagcucagugucaucauuugaaagguuugagauauuccccaagacaaguucauggcccaaucaugacucgaacaaagguguaacggcagcauguccucaugcuggagcaaaaagcuucuacaaaaauuuaauauggcuaguuaaaaaaggaaauucauacccaaagcucagcaaauccuacauuaaugauaaagggaaagaaguccucgugcuauggggcauucaccauccaucuacuagugcugaccaacaaagucucuaucagaaugcagaugcauauguuuuuguggggacaucaagauacagcaagaaguucaagccggaaauagcaauaagacccaaagugagggaucaagaagggagaaugaacuauuacuggacacuaguagagccgggagacaaaauaacauucgaagcaacuggaaaucuagugguaccgagauacgcauucgcaauggaaagaaaugcuggaucugguauuaucauuucagauacaccaguccacgauugcaauacaacuugucaaacacccaagggugcuauaaacaccagccucccauuucagaauauacauccgaucacaauuggaaaauguccaaaauauguaaaaagcacaaaauugagacuggccacaggauugaggaaugucccgucuauucaaucuagaggccuauuuggggccauugccggcuuuauugaagggggguggacagggaugguagauggaugguacgguuaucaccaucaaaaugagcaggggucaggauaugcagccgaccugaagagcacacagaaugccauugacaagauuacuaacaaaguaaauucuguuauugaaaagaugaauacacaguucacagcaguagguaaagaguucaaccaccuggaaaaaagaauagagaauuuaaauaaaaaaguugaugaugguuuccuggacauuuggacuuacaaugccgagcuguugguucuauuggaaaaugaaagaacuuuggacuaccacgauucaaaugugaagaacuuauaugaaaagguaagaagccaguuaaaaaacaaugccaaggaaauuggaaacggcugcuuugaauuuuaccacaaaugcgauaacacgugcauggaaagugucaaaaaugggacuuaugacuacccaaaauacucagaggaagcaaaauuaaacagagaagaaauagaugggguaaagcuggaaucaacaaggauuuaccagauuuuggcgaucuauucaacugucgccaguucauugguacugguagucucccugggggcaaucaguuucuggaugugcucuaaugggucucuacaguguagaauauguauuuga

SEQ ID NO: 43155 - RNA, 1701 nt, Artificial Sequence
  derived and/or modified CDS sequence (wt) from hemagglutinin__InfluenzaA__AHL80894
augaaggcaauacuaguaguucugcuauauacauuugcaaccgcaaaugcggacacauuauguauagguuaucaugcgaacaauucaacagacacuguagacacaguacuagaaaagaauguaacaguaacacacucuguuaaccuucuagaagacaagcauaacgggaaacuaugcaaacuaagagggguagccccauugcauuuggguaaauguaacauugcuggcuggauccugggaaauccagagugugaaucacucuccacagcaagcucaugguccuacauuguggaaacaucuaguucagacaauggaacguguuacccaggagauuucaucgauuaugaggagcuaagagagcaauugagcucagugucaucauuugaaagguuugagauauuccccaagacaaguucauggcccaaucaugacucgaacaaagguguaacggcagcauguccucaugcuggagcaaaaagcuucuacaaaaauuuaauauggcuaguuaaaaaaggaaauucauacccaaagcucagcaaauccuacauuaaugauaaagggaaagaaguccucgugcuauggggcauucaccauccaucuacuagugcugaucaacaaagccucuaucagaaugcagaugcauauguuuuuguggggacaucaagauacagcaagaaguucaagccggaaauagcaauaagacccaaagugagggaucaagaagggagaaugaacuauuacuggacacuaguagagccgggagacaaaauaacauucgaagcaacuggaaaucuagugguaccgagauacgcauucgcaauggaaagaaaugcuggaucugguauuaucauuucagauacaccaguccacgauugcaauacaacuugucaaacacccaagggugcuauaaacaccagccucccauuucagaauauacauccgaucacaauuggaaaauguccaaaauauguaaaaagcacaaaauugagacuggccacaggauugaggaaugucccgucuauucaaucuagaggccuauuuggggccauugccggcuucauugaagggggguggacagggaugguagauggaugguacgguuaucaccaucaaaaugagcaggggucaggauaugcagccgaccugaagagcacacagaaugccauugacaagauuacuaacaaaguaaauucuguuauugaaaagaugaauacacaguucacagcaguagguaaagaguucaaccaccuggaaaaaagaauagagaauuuaaauaaaaaaguugaugaugguuuccuggacauuuggacuuacaaugccgaacuguugguucuauuggaaaaugaaagaacuuuggacuaccacgauucaaaugugaagaacuuauaugaaaagguaagaagccaguuaaaaaacaaugccaaggaaauuggaaacggcugcuuugaauuuuaccacaaaugcgauaacacgugcauggaaagugucaaaaaugggacuuaugacuacccaaaauacucagaggaagcaaaauuaaacagagaagaaauagaugggguaaagcuggaaucaacaaggauuuaccagauuuuggcgaucuauucaacugucgccaguucauugguacugguagucucccugggggcaaucaguuucuggaugugcucuaaugggucucuacaguguagaauauguauuuaa

SEQ ID NO: 43156 - RNA, 1701 nt, Artificial Sequence
  derived and/or modified CDS sequence (wt) from hemagglutinin__InfluenzaA__AHL80905
augaaggcaauacuaguaguucugcuauauacauuugcaaccgcaaaugcagacacauuauguauagguuaucaugcgaacaauucaacagacacuguagacacaguacuagaaaagaauguaacaguaacacacucuguuaaccuucuagaagacaagcauaacgggaaacuaugcaaacuaagagggguagccccauugcauuuggguaaauguaacauugcuggcuggauccugggaaauccagagugugaaucacucuccacagcaagcucaugguccuacauuguggaaacaucuaguucagacaauggaacguguuacccaggagauuucaucgauuaugaggagcuaagagagcaauugagcucagugucaucauuugaaagguuugagauauuccccaagacaaguucauggcccaaucaugacucgaacaaagguguaacggcagcauguccucaugcuggagcaaaaagcuucuacaaaaauuuaauauggcuaguuaaaaaaggaaauucauacccaaagcucagcaaauccuacauuaaugauaaagggaaagaaguccucguguuauggggcauucaccauccaucuacuagugcugaccaacaaagucucuaucagaaugcagaugcauauguuuuuguggggacaucaagauacagcaagaaguucaagccggaaauagcaauaagacccaaagugagggaucaagaagggagaaugaacuauuacuggacacuaguagagccgggagacaaaauaacauucgaagcaacuggaaaucuagugguaccgagauacgcauucgcaauggaaagaaaugcuggaucugguauuaucauuucagauacaccaguccacgauugcaauacaacuugucaaacacccaagggugcuauaaacaccagccucccauuucagaauauacauccgaucacaauuggaaaauguccaaaauauguaaaaagcacaaaauugagacuggccacaggauugaggaaugucccgucuauucaaucuagaggccuauuuggggccauugccggcuuuauugaagggggguggacagggaugguagauggaugguaugguuaucaccaucaaaaugagcaggggucaggauaugcagccgaccugaagagcacacagaaugccauugacaagauuacuaacaaaguaaauucuguuauugaaaagaugaauacacaguucacagcaguagguaaagaguucaaccaccuggaaaaaagaauagagaauuuaaauaaaaaaguugaugaugguuuccuggacauuuggacuuacaaugccgagcuguugguucuauuggaaaaugaaagaaccuuggacuaccacgauucaaaugugaagaacuuauaugaaaagguaagaagccaguuaaaaaacaaugccaaggaaauuggaaacggcugcuuugaauuuuaccacaaaugcgauaacacgugcauggaaagugucaaaaaugggacuuaugacuacccaaaauacucagaggaagcaaaauuaaacagagaagaaauagaugggguaaagcuggaaucaacaaggauuuaccagauuuuggcgaucuauucaacugucgccaguucauugguacugguagucucccugggggcaaucaguuucuggaugugcucuaaugggucucuacaguguagaauauguauuuaa

SEQ ID NO: 43157 - RNA, 1701 nt, Artificial Sequence
  derived and/or modified CDS sequence (wt) from hemagglutinin__InfluenzaA__AHL80916
augaaggcaauacuaguaguucugcuauauacauuugcaaccgcaaaugcagacacauuauguauagguuaucaugcgaacaauucaacagacacuguagacacaguacuagaaaagaauguaacaguaacacacucuguuaaucuucuagaagacaagcauaacgggaaacuaugcaaacuaagagggguagccccauugcauuuggguaaauguaacauugcuggcuggauccugggaaauccagagugugaaucacucuccacagcaagcucaugguccuacauuguggaaacaucuaguucagacaauggaacguguuacccaggagauuucaucgauuaugaggagcuaagagagcaauugagcucagugucaucauuugaaagguuugagauauuccccaagacaaguucauggcccaaucaugacucgaacaaagguguaacggcagcauguccucaugcuggagcaaaaggcuucuacaaaaauuuaauauggcuaguuaaaaaaggaaauucauacccaaagcucagcaaauccuacauuaaugauaaagggaaagaaguccucgugcuauggggcauucaccauccaucuaccacugcugaccaacaaagucucuaucagaaugcagauacauauguuuuuguggggacaucaagauacagcaagaaguucaagccggaaauagcaauaagacccaaagugagggaucaagaagggagaaugaacuauuacuggacacuaguagagccgggagacaaaauaacauucgaagcaacuggaaaucuagugguaccgagauaugcauucgcaauggaaagaaaugcuggaucugguauuaucauuucagauacaccaguccacgauugcaauacaacuugucagacacccaagggugcuauaaacaccagccucccauuucagaauauacauccgaucacaauuggaaaauguccaaaauauguaaaaagcacaaaauugagacuggccacaggauugaggaaugucccgucuauucaaucuagaggccuauuuggggccauugccggcuucauugaagggggguggacagggaugguagauggaugguacgguuaucaccaucaaaaugagcaggggucaggauaugcagccgaccugaagagcacacagaaugccauugacaagauuacuaacaaaguaaauucaguuauugaaaagaugaauacacaguucacagcaguagguaaagaguucaaccaccuggaaaaaagaauagagaauuuaaauaaaaaaguugaugaugguuuccuggacauuuggacuuacaaugccgaacuguugguucuauuggaaaaugaaagaacuuuggacuaccacgauucaaaugugaagaacuuauaugaaaagguaagaaaccaguuaaaaaacaaugccaaggaaauuggaaauggcugcuuugaauuuuaccacaaaugcgauaacacgugcauggaaagugucaaaaaugggacuuaugacuacccaaaauacucagaggaagcaaaauuaaacagagaagaaauagaugggguaaagcuggaaucaacaaggauuuaccagauuuuggcgaucuauucaacugucgccaguucauugguacugguagucucccugggggcaaucaguuuuuggaugugcucuaaugggucucuacaguguagaauauguauuuaa

SEQ ID NO: 43158 - RNA, 1701 nt, Artificial Sequence
  derived and/or modified CDS sequence (wt) from hemagglutinin__InfluenzaA__AHL80927
augaagacuaucauugcuuugagcuacauucuaugucugguuuucgcucaaaaacuuccuggaaaugacaacagcacggcaacgcugugccuugggcaccaugcagugccaaacggaacgauagugaaaacaaucacgaaugaccaaauugaaguuacuaaugcuacugagcugguucagaguuccucaacaggugaaauaugcaacaguccucaucagauccuugauggagaaaacugcacacuaauagaugcucuauugggagacccucagugugauggcuuccaaaacaagaaaugggaccuuuuuguugaacgaagcaaagcccacagcaacuguuacccuuaugaugugccggauuaugccucccuuaggucacuaguugccucauccggcacacuggaguuuaacaaugaaagcuucaauuggacuggagucacucaaaacggaacaagcucugcuugcauaaggagaucuaauaauaguuucuuuaguagauugaauugguugacccacuuaaacuucaaauacccagcauugaacgugacuaugccaaacaaugaacaauuugacaaauuguacauuugggggguucaccacccggguacggacaaggaccaaaucuuccuguaugcucaagcagcaggaagaaucacaguaucuaccaaaagaagccaacaagcuguaauuccgaauaucggaucuagacccagaguaaggaauaucccuagcagaguaagcaucuauuggacaauaguaaaaccgggagacauacuuuugauuaacagcacagggaaucuaauugcuccuagggguuacuucaaaauacgaagugggaaaagcucaauaaugagaucagaugcacccauuggcaaaugcaauucugcaugcaucacuccaaauggaagcauucccaaugacaaaccauuccaaaauguaaacaggaucacauacggggccugucccagauauguuaagcaaaacacucugaaauuggcaacaggaaugagaaauguaccagagaaacaaacuagaggcauauuuggcgcaauagcugguuucauagaaaaugguugggagggaaugguggaugguugguacgguuucaggcaucaaaauucugagggaaggggacaagcagcagaucucaaaagcacucaagcagcaaucgaucaaaucaaugggaagcugaauagauugaucgggaaaaccaacgagaaauuccaucagauugaaaaagaauucucugaagucgaagggagaauucaggaccuugagaaauauguugaggacacuaaaauagaucucuggucauacaacgcggagcuucuuguugcccuggagaaccaacacacaauugaucuaacugacucagaaaugaacaaacuguuugaaaaaacaaagaagcaacugagggaaaaugcugaggauaugggcaaugguuguuucaaaauauaccacaaaugugacaaugccugcauaggaucaaucagaaauggaacuuaugaccacgauguguacagagaugaagcauuaaacaaccgauuccagaucaagggaguugagcugaagucaggguacaaagauuggauccuauggauuuccuuugccauaucauguuuuuugcuuuguguugcuuuguugggguucaucaugugggccugccaaaaaggcaacauuaggugcaacauuugcauuuga

SEQ ID NO: 43159 - RNA, 1701 nt, Artificial Sequence; identical to SEQ ID NO: 38992
  derived and/or modified CDS sequence (wt) from hemagglutinin__InfluenzaA__AHL80946

SEQ ID NO: 43160 - RNA, 1701 nt, Artificial Sequence
  derived and/or modified CDS sequence (wt) from hemagglutinin__InfluenzaA__AHL80958
augaaggcaauacuaguaguucugcuauauacauuugcaaccgcaaaugcagacacauuauguauagguuaucaugcgaacaauucaacagacacuguagacacaguacuagaaaagaauguaacaguaacacacucuguuaaccuucuagaagacaagcauaacgggaaacuaugcaaacuaagagggguagccccauugcauuuggguaaauguaacauugcuggcuggauccugggaaauccagagugugaaucacucuccacagcaagcucaugguccuacauuguggaaacaucuaguucagacaauggaacguguuacccaggagauuucaucaauuaugaggagcuaagagagcaauugagcucagugucaucauuugaaagguuugagauauuccccaagauaaguucauggcccaaucaugacucgaacaaagguguaacggcagcauguccucaugcuggagcaaaaagcuucuacaaaaauuuaauauggcuaguuaaaaaaggaaauucauacccaaagcucagcaaauccuacauuaaugauaaagggaaagaaguccucgugcuguggggcauucaucauccaucuacuacugcugaccaacaaagucucuaucagaaugcagaugcauauguuuuuguggggacaucaagauacagcaagaaguucaagccggaaauagcaauaagacccaaagugagggaucaagaagggagaaugaacuauuacuggacacuaguagagccgggagacaaaauaacauucgaagcaacuggaaaucuagugguaccgagauaugcauucgcaauggaaagaaaugcuggaucugguauuaucauuucagacacaucaguccacgauugcaauacaacuugucagacacccaagggugcuauaaacaccagccucccauuucagaauauacauccgaucacaauuggaaaauguccaaaauauguaaaaagcacaaaauugagacuggccacaggauugaggaaugucccgucuauucaaucuagaggccuauuuggggccauugccggcuucauugaagggggguggacagggaugguagauggaugguacgguuaucaccaucaaaaugagcaggggucaggauaugcagccgaccugaagagcacacagaaugccauugacaagauuacuaacaaaguaaauucuguuauugaaaagaugaauacacaguucacagcaguagguaaagaguucaaccaccuggaaaaaagaauagagaauuuaaauaaaaaaguugaugaugguuuccuggacauuuggacuuacaaugccgaacuguugguucuauuggaaaaugaaagaacuuuggacuaccacgauucaaaugugaagaacuuguaugaaaagguaagaaaccaguuaaaaaacaaugccaaggaaauuggaaacggcugcuuugaauuuuaccacaaaugcgauaacacgugcauggaaagugucaaaaaugggacuuaugacuaccccaaauacucagaggaagcaaaauuaaacagagaagaaauagaugggguaaagcuggaaucaacaaggauuuaccagauuuuggcgaucuauucaacugucgccaguucauugguacugguagucucccugggggcaaucaguuucuggaugugcucuaaugggucucuacaguguagaauauguauuuaa

SEQ ID NO: 43161 - RNA, 1701 nt, Artificial Sequence
  derived and/or modified CDS sequence (wt) from hemagglutinin__InfluenzaA__AHL81001
augaagacuaucauugcuuugagcuacauucuaugucugauuuucgcucaaaaacuuccuggaaaugacaacagcacggcaacgcugugccuugggcaccaugcagugccaaacggaacgauagugaaaacaaucacgaaugaccaaauugaaguuacuaaugcuacugagcugguucagaguuccucaacaggugaaauaugcaacaguccucaucagauccuugauggagaaaacugcacacuaauagaugcucuauugggagacccucagugugauggcuuccaaaacaagaaaugggaccuuuuuguugaacgaagcaaagcccacagcaacuguuacccuuaugaugugccggauuaugccucccuuaggucacuaguugccucauccggcacacuggaguuuaacaaugaaagcuucaauuggacuggagucacucaaaacggaacaagcucugcuugcauaaggagaucuaauaauaguuucuuuaguagauugaauugguugacccacuuaaacuucaaauacccagcauugaacgugacuaugccaaacaaugaacaauuugacaaauuguacauuugggggguucaccacccggguacggacaaggaccaaaucuuccuguaugcucaagcagcaggaagaaucacaguaucuaccaaaagaagccaacaagcuguaauuccgaauaucggaucuagacccagaguaaggaauaucccuagcagaguaagcaucuauuggacaauaguaaaaccgggagacauacuuuugauuaacagcacagggaaucuaauugcuccuagggguuacuucaaaauacgaagugggaaaagcucaauaaugagaucagaugcacccauuggcaaaugcaauucugcaugcaucacuccaaauggaagcauucccaaugacaaaccauuccaaaauguaaacaggaucacauacggggccugucccagauauguuaagcaaaacacucugaaauuggcaacaggaaugagaaauguaccagagaaacaaacuagaggcauauuuggcgcaauagcugguuucauagaaaaugguugggagggaaugguggaugguugguacgguuucaggcaucaaaauucugagggaaggggacaagcagcagaucucaaaagcacucaagcagcaaucgaucaaaucaaugggaagcugaauagauugaucgggaaaaccaacgagaaauuccaucagauugaaaaagaauucucagaagucgaagggagaauucaggaccuugagaaauauguugaggacacuaaaauagaucucuggucauacaacgcggagcuucuuguugcccuggagaaccaacacacaauugaucuaacugacucagaaaugaacaaauuguuugaaaaaacaaagaagcaacugagggaaaaugcugaggauaugggcaaugguuguuucaaaauauaccacaaaugugacaaugccugcauaggaucaaucagaaauggaacuuaugaccacgauguguacagagaugaagcauuaaacaaccgauuccagaucaagggaguugagcugaagucaggguacaaagauuggauccuauggauuuccuuugccauaucauguuuuuugcuuuguguugcuuuguugggguucaucaugugggccugccaaaaaggcaacauuaggugcaacauuugcauuuga

SEQ ID NO: 43162 - RNA, 1701 nt, Artificial Sequence
  derived and/or modified CDS sequence (wt) from hemagglutinin__InfluenzaA__AHL81013
augaagacuaucauugcuuugagcuacauucuaugucugguuuucgcucaaaaacuuccuggaaaugacaacagcacggcaacgcugugccuugggcaccaugcagugccaaacggaacgauagugaaaacaaucacgaaugaccaaauugaaguuacuaaugcuacugagcugguucagaguuccucaacaggugaaauaugcaacaguccucaucagauccuugauggagaaaacugcacacuaauagaugcucuauugggagacccucagugugauggcuuccaaaacaagaaaugggaccuuuuuguugaacgaagcaaagcccacagcaacuguuacccuuaugaugugccggauuaugccucccuuaggucacuaguugccucauccggcacacuggaguuuaacaaugaaagcuucaauuggacuggagucacucaaaacggaacaagcucugcuugcauaaggagaucuaauaauaguuucuuuaguagauugaauugguugacccacuuaaacuucaaauacccagcauugaacgugacuaugccaaacaaugaacaauuugacaaauuguacauuugggggguucaccacccggguacggacaaggaccaaaucuuccuguaugcucaagcagcaggaagaaucacaguaucuaccaaaagaagccaacaagcuguaauuccgaauaucggaucuagacccagaguaaggaauaucccuagcagaguaagcaucuauuggacaauaguaaaaccgggagacauacuuuugauuaacagcacagggaaucuaauugcuccuagggguuacuucaaaauacgaagugggaaaagcucaauaaugagaucagaugcacccauuggcaaaugcaauucugcaugcaucacuccaaauggaagcauucccaaugacaaaccauuccaaaauguaaacaggaucacauacggggccugucccagauauguuaagcaaaacacucugaaauuggcaacaggaaugagaaauguaccagagaaacaaacuagaggcauauuuggcgcaauagcugguuucauagaaaaugguugggagggaaugguggauggcugguacgguuucaggcaucaaaauucugagggaagaggacaagcagcagaucucaaaagcacucaagcagcaaucgaucaaaucaaugggaagcugaauagauugaucgggaaaaccaacgagaaauuccaucagauugaaaaagaauucucagaagucgaagggagaauucaggaccuugagaaauauguugaggacacuaaaauagaucucuggucauacaacgcggagcuucuuguugcccuggagaaccaacacacaauugaucuaacugacucagaaaugaacaaauuguuugaaaaaacaaagaagcaacugagggaaaaugcugaggauaugggcaaugguuguuucaaaauauaccacaaaugugacaaugccugcauaggaucaaucagaaaugggacuuaugaccacgauguguacagagaugaagcauuaaacaaccgauuccagaucaagggaguugagcugaagucaggguacaaagauuggauccuauggauuuccuuugccauaucauguuuuuugcuuuguguugcuuuguugggguucaucaugugggccugccaaaaaggcaacauuaggugcaacauuugcauuuga

SEQ ID NO: 43163 - RNA, 1701 nt, Artificial Sequence; identical to SEQ ID NO: 38992
  derived and/or modified CDS sequence (wt) from hemagglutinin__InfluenzaA__AHL81025

SEQ ID NO: 43164 - RNA, 1701 nt, Artificial Sequence
  derived and/or modified CDS sequence (wt) from hemagglutinin__InfluenzaA__AHL81037
augaagacuaucauugcuuugagcuacauucuaugucugguuuucgcucaaaaacuuccuggaaaugacaacagcacggcaacgcugugccuugggcaccaugcagugccaaacggaacgauagugaaaacaaucacgaaugaccaaauugaaguuacuaaugcuacugagcugguucagaguuccucaacaggugaaauaugcaacaguccucaucagauccuugauggagaaaacugcacacuaauagaugcucuauugggagacccucagugugauggcuuccaaaacaagaaaugggaccuauuuguugaacgaagcaaagcccacagcaacuguuacccuuaugaugugccggauuaugccucccuuaggucacuaguugccucauccggcacacuggaguuuaacaaugaaagcuucaauuggacuggagucacucaaaacggaacaagcucugcuugcauaaggagaucuaauaauaguuucuuuaguagauugaauugguugacccacuuaaacuucaaauacccagcauugaacgugacuaugccaaacaaugaacaauuugacaaauuguacauuugggggguucaccacccggguacggacaaggaccaaaucuuccuguaugcucaagcagcaggaagaaucacaguaucuaccaaaagaagccaacaggcuguaauuccgaauaucggaucuagacccagaguaaggaauaucccuagcagaguaagcaucuauuggacaauaguaaaaccgggagacauacuuuugauuaacagcacagggaaucuaauugcuccuagggguuacuucaaaauacgaagugggaaaagcucaauaaugagaucagaugcacccauuggcaaaugcaauucugcaugcaucacuccaaauggaagcauucccaaugacaaaccauuccaaaauguaaacaggaucacauacggggccugucccagauauguuaagcaaaacacucugaaauuggcaacaggaaugagaaauguaccagagaaacaaacuagaggcauauuuggcgcaauagcugguuucauagaaaaugguugggagggaaugguggaugguugguacgguuucaggcaucaaaauucugagggaaggggacaagcagcagaucucaaaagcacucaagcagcaaucgaucaaaucaaugggaagcugaauagauugaucgggaaaaccaacgagaaauuccaucagauugaaaaagaauucucugaagucgaagggagaauucaggaccuugagaaauauguugaggacacuaaaauagaucucuggucauacaacgcggagcuucuuguugcccuggagaaccaacacacaauugaucuaacugacucagaaaugaacaaacuguuugaaaaaacaaagaagcaacugagggaaaaugcugaggauaugggcaaugguuguuucaaaauauaccacaaaugugacaaugccugcauaggaucaaucagaaauggaacuuaugaccacgauguguacagagaugaagcauuaaacaaccgauuccagaucaagggaguugagcugaagucaggguacaaagauuggauccuauggauuuccuuugccauaucauguuuuuugcuuuguguugcuuuguugggguucaucaugugggccugccagaaaggcaacauuaggugcaacauuugcauuuga

SEQ ID NO: 43165 - RNA, 1701 nt, Artificial Sequence; identical to SEQ ID NO: 43141
  derived and/or modified CDS sequence (wt) from hemagglutinin__InfluenzaA__AHL81049

SEQ ID NO: 43166 - RNA, 1701 nt, Artificial Sequence; identical to SEQ ID NO: 43160
  derived and/or modified CDS sequence (wt) from hemagglutinin__InfluenzaA__AHL81061

SEQ ID NO: 43167 - RNA, 1701 nt, Artificial Sequence; identical to SEQ ID NO: 43160
  derived and/or modified CDS sequence (wt) from hemagglutinin__InfluenzaA__AHL81072

SEQ ID NO: 43168 - RNA, 1701 nt, Artificial Sequence; identical to SEQ ID NO: 40373
  derived and/or modified CDS sequence (wt) from hemagglutinin__InfluenzaA__AHL81083

SEQ ID NO: 43169 - RNA, 1701 nt, Artificial Sequence
  derived and/or modified CDS sequence (wt) from hemagglutinin__InfluenzaA__AHL81095
augaagacuaucauugcuuugagcuacauucuaugucugguuuucgcucaaaaacuuccuggaaaugacaacagcacggcaacgcugugccuugggcaccaugcagugccaaacggaacgauagugaaaacaaucacgaaugaccaaauugaaguuacuaaugcuacugagcugguucagaguuccucaacaggugaaauaugcaacagcccucaucagauccuugauggagaaaacugcacacuaauagaugcucuauugggagacccucagugugauggcuuccaaaacaagaaaugggaccuuuuuguugaacgaagcaaagcccacagcaacuguuacccuuaugaugugccggauuaugccucccuuaggucacuaguugccucauccggcacacuggaguuuaacaaugaaagcuucaauuggacuggagucacucaaaacggaacaagcucugcuugcauaaggagaucuaauaauaguuucuuuaguagauugaauugguugacccacuuaaacuucaaauacccagcauugaacgugacuaugccaaacaaugaacaauuugacaaauuguacauuugggggguucaccacccggguacggacaaggaccaaaucuuccuguaugcucaagcagcaggaagaaucacaguaucuaccaaaagaagccaacaagcuguaauuccgaauaucggaucuagacccagaguaaggaauaucccuagcagaguaagcaucuauuggacaauaguaaaaccgggagacauacuuuugauuaacagcacagggaaucuaauugcuccuagggguuacuucaaaauacgaagugggaaaagcucaauaaugagaucagaugcaccuauuggcaaaugcaauucugcaugcaucacuccaaauggaagcauucccaaugacaaaccauuccaaaauguaaacaggaucacauacggggccugucccagauauguuaagcaaaacacucugaaauuggcaacaggaaugagaaauguaccagagaaacaaacuagaggcauauuuggcgcaauagcugguuucauagaaaaugguugggagggaaugguggaugguugguacgguuucaggcaucaaaauucugagggaaggggacaagcagcagaucucaaaagcacucaagcagcaaucgaucaaaucaaugggaagcugaauagauugaucgggaaaaccaacgagaaauuccaucagauugaaaaagaauucucagaagucgaagggagaauucaggaccuugagaaauauguugaggacacuaaaauagaucucuggucauacaacgcggagcuucuuguugcccuggagaaccaacacacaauugaucuaacugacucagaaaugaacaaacuguuugaaaaaacaaagaagcaacugagggaaaaugcugaggauaugggcaaugguuguuucaaaauauaccacaaaugugacaaugccugcauaggaucaaucagaaauggaacuuaugaccacgauguguacagagaugaagcauuaaacaaccgauuccagaucaaaggaguugagcugaagucaggguacaaagauuggauccuauggauuuccuuugccauaucauguuuuuugcuuuguguugcuuuguugggguucaucaugugggccugccaaaaaggcaacauuaggugcaacauuugcauuuga

SEQ ID NO: 43170 - RNA, 1701 nt, Artificial Sequence
  derived and/or modified CDS sequence (wt) from hemagglutinin__InfluenzaA__AHL81118
augaaggcaauacuaguaguucugcuauauacauuugcaaccgcaaaugcagacacauuauguauagguuaucaugcgaacaauucaacagacacuguagacacgguacuagaaaagaauguaacaguaacacacucuguuaaccuucuagaagacaagcauaacgggaaacuaugcaaacuaagagggguagccccauugcauuuggguaaauguaacauugcuggcuggauccugggaaauccagagugugaaucacucuccacagcaagcucaugguccuacauuguggaaacaucuaguucagacaauggaacguguuacccaggagauuucaucaauuaugaggagcuaagagagcaauugagcucagugucaucauuugaaagguuugagauauuccccaagacaaauucauggcccaaucaugacucgaacaaagguguaacggcagcauguccucaugcuggagcaaaaagcuucuacaaaaauuuaauauggcuaguuaaaaaaggaaauucauacccaaagcucagcaaauccuacauuaaugauaaagggaaagaaguccucgugcuguggggcauucaccauccaucuacuacugcugaccaacaaagucucuaucagaaugcagaugcauauguuuuuguggggacaucaagauacagcaagaaguucaagccggaaauagcaauaagacccaaagugagggaucaagaagggagaaugaacuauuacuggacacuaguagagccgggagacaaaauaacauucgaagcaacuggaaaucuagugguaccgagauaugcauucgcaauggaaagaaaugcuggaucugguauuaucauuucagauacaccaguccacgauugcaauacaacuugucagacacccaagggugcuauaaacaccagccucccauuucagaauauacauccgaucacaauuggaaaauguccaaaauauguaaaaagcacaaaauugagacuggccacaggauugaggaaugucccgucuauucaaucuagaggccuauuuggggccauugccggcuucauugaagggggguggacagggaugguagauggaugguacgguuaucaccaucaaaaugagcaggggucaggauaugcagccgaccugaagagcacacagaaugccauugacaagauuacuaacaaaguaaauucuguuauugaaaagaugaauacacaguucacagcaguagguaaagaguucaaccaccuggaaaaaagaauagagaauuuaaauaaaaaaguugaugaugguuuccuggacauuuggacuuacaaugccgaacuguugguucuauuggaaaaugaaagaacuuuggacuaccacgauucaaaugugaagaacuuguaugaaaagguaagaaaccaguuaaaaaacaaugccaaggaaauuggaaacggcugcuuugaauuuuaccacaaaugcgauaacacgugcauggaaagugucaaaaaugggacuuaugacuacccaaaauacucagaggaagcaaaauuaaacagagaagaaauagaugggguaaagcuggaaucaacaaggauuuaccagauuuuggcgaucuauucaacugucgccaguucauugguacugguagucucccugggggcaaucaguuucuggaugugcucuaaugggucucuacaguguagaauauguauuuaa

SEQ ID NO: 43171 - RNA, 1701 nt, Artificial Sequence; identical to SEQ ID NO: 43141
  derived and/or modified CDS sequence (wt) from hemagglutinin__InfluenzaA__AHL81129

SEQ ID NO: 43172 - RNA, 1701 nt, Artificial Sequence; identical to SEQ ID NO: 43164
  derived and/or modified CDS sequence (wt) from hemagglutinin__InfluenzaA__AHL81141

SEQ ID NO: 43173 - RNA, 1701 nt, Artificial Sequence; identical to SEQ ID NO: 41487
  derived and/or modified CDS sequence (wt) from hemagglutinin__InfluenzaA__AHL81153

SEQ ID NO: 43174 - RNA, 1701 nt, Artificial Sequence
  derived and/or modified CDS sequence (wt) from hemagglutinin__InfluenzaA__AHL81165
augaagacuaucauugcuuugagcuacauucuaugucugguuuucgcucaaaaacuuccuggaaaugacaacagcacggcaacgcugugccuugggcaccaugcaguaccaaacggaacgauagugaaaacaaucacgaaugaccaaauugaaguuacuaacgcuacugagcugguucagaguuccucagcaggugaaauaugcgacaguccucaucagauccuugauggagaaaacugcacacuaauagaugcucuauugggagacccucagugugauggcuuccaaaauaagaaaugggaccuuuuuguugaacgaagcagagccuacagcaacuguuacccuuaugaugugccggauuaugccucccuuaggucacugguugccucauccggcacacuggaguuuaacaaugaaagcuucaauuggacuggagucacucaaaacggaacaagcucugcuugcauaaggagaucuaauaauaguuucuuuaguagauugaauugguugacccacuuaaacuucaaauacccagcauugaacgugacuaugccaaacaaugaacaauuugacaaauuguacauuugggggguucaccacccggguacggacaaggaccaaaucuuccuguaugcucaagcaucaggaagaaucacaguaucuaccaaaagaagccaacaagcuguaaucccgaauaucggaucuagacccagaguaaggaauaucccuagcagaauaagcaucuauuggacaauaguaaaaccgggagacauacuuuugauuaacagcacagggaaucuaauugcuccuagggguuacuucaaaauacgaagugggaaaagcucaauaaugagaucagaugcacccauuggcaaaugcaauucugaaugcaucacuccaaauggaagcauucccaaugacaaaccauuccaaaauguaaacaggaucacauacggggccugucccagauauguuaagcaaagcacucugaaauuggcgacaggaaugcgaaauguaccagagaaacaaacuagaggcauauucggcgcaauagcggguuucauagaaaaugguugggagggaaugauggaugguugguacgguuucaggcaucaaaauucugagggaagaggacaagcagcagaucucaaaagcacucaagcagcaaucgaucaaaucaauggaaagcugaauagauugaucgggaaaaccaacgagaaauuccaucagauugaaaaagaauucucagaagucgaagggagaauucaggaccuugagaaauauguugaggacacuaaaauagaucucuggucauacaacgcggagcuucuuguugcccuggagaaccaacauacaauugaucuaacugacucagaaaugaacaaacuguuugaaaaaacaaagaagcaacugagggaaaaugcugaggauaugggcaaugguuguuucaaaauauaccacaaaugugacaaugccugcauaggaucaaucagaaauggaacuuaugaccacgauguauacagagaugaagcauuaaacaaccgguuccagaucaagggaguugagcugaagucaggguacaaagauuggauccuauggauuuccuuugccauaucauguuuuuugcuuuguguugcuuuguugggguucaucaugugggccugccaaaaaggcaacauuaggugcaacauuugcauuuga

SEQ ID NO: 43175 - RNA, 1701 nt, Artificial Sequence
  derived and/or modified CDS sequence (wt) from hemagglutinin__InfluenzaA__AHL81177
augaagacuaucauugcuuugagcuacauucuaugucugguuuucgcucaaaaacuuccuggaaaugacaacagcacggcaacgcugugucuugggcaccaugcaguaccaaacggaacgauagugaaaacaaucacgaaugaccaaauugaaguuacuaacgcuacugagcugguucagaguuccucagcaggugaaauaugcgacaguccucaucagauccuugauggagaaaacugcacacuaauagaugcucuauugggagacccucagugugauggcuuccaaaauaagaaaugggaccuuuuuguugaacgaagcagagccuacagcaacuguuacccuuaugaugugccggauuaugccucccuuaggucacugguugccucauccggcacacuggaguuuaacaaugaaagcuucaauuggacuggagucacucaaaacggaacaagcucugcuugcauaaggagaucuaauaauaguuucuuuaguagauugaauugguugacccacuuaaacuucaaauacccagcauugaacgugacuaugccaaacaaugaacaauuugacaaauuguacauuugggggguucaccacccggguacggacaaggaccaaaucuuccuguaugcucaagcaucaggaagaaucacaguaucuaccaaaagaagccaacaagcuguaaucccgaauaucggaucuagacccagaguaaggaauaucccuagcagaauaagcaucuauuggacaauaguaaaaccgggagacauacuuuugauuaacagcacagggaaucuaauugcuccuagggguuacuucaaaauacgaagugggaaaagcucaauaaugagaucagaugcacccauuggcaaaugcaauucugaaugcaucacuccaaauggaagcauucccaaugacaaaccauuccaaaauguaaacaggaucacauacggggccugucccagauauguuaagcaaagcacucugaaauuggcgacaggaaugcgaaauguaccagagaaacaaacuagaggcauauucggcgcaauagcggguuucauagaaaaugguugggagggaaugauggaugguugguacgguuucaggcaucaaaauucugagggaagaggacaagcagcagaucucaaaagcacucaagcagcaaucgaucaaaucaauggaaagcugaauagauugaucgggaaaaccaacgagaaauuccaucagauugaaaaagaauucucagaagucgaagggagaauucaggaccuugagaaauauguugaggacacuaaaauagaucucuggucauacaacgcggagcuucuuguugcccuggagaaccaacauacaauugaucuaacugacucagaaaugaacaaacuguuugaaaaaacaaagaagcaacugagggaaaaugcugaggauaugggcaaugguuguuucaaaauauaccacaaaugugacaaugccugcauaggaucaaucagaaauggaacuuaugaccacgauguauacagagaugaagcauuaaacaaccgguuccagaucaagggaguugagcugaagucaggguacaaagauuggauccuauggauuuccuuugccauaucauguuuuuugcuuuguguugcuuuguugggguucaucaugugggccugccaaaaaggcaacauuaggugcaacauuugcauuuga

SEQ ID NO: 43176 - RNA, 1701 nt, Artificial Sequence; identical to SEQ ID NO: 43161
  derived and/or modified CDS sequence (wt) from hemagglutinin__InfluenzaA__AHL81189

SEQ ID NO: 43177 - RNA, 1701 nt, Artificial Sequence
  derived and/or modified CDS sequence (wt) from hemagglutinin__InfluenzaA__AHL81212
augaagacuaucauugcuuugagcuacauucuaugucugguuuucgcucaaaaacuuccuggaaaugacaacagcacggcaacgcugugccuugggcaccaugcagugccaaacggaacgauagugaaaacaaucacgaaugaccaaauugaaguuacuaaugcuacugagcugguucagaguuccucaacaggugaaauaugcaacaguccucaucagauccuugauggagaaaacugcacacuaauagaugcucuauugggagacccucagugugauggcuuccaaaacaagaaaugggaccuuuuuguugaacgaagcaaagcccacagcaacuguuacccuuaugaugugccggauuaugccucccuuaggucacuaguugccucauccggcacacuggaguuuaaaaaugaaagcuucaauuggacuggagucacucaaaacggaacaagcucugcuugcauaaggagaucuaauaauaguuucuuuaguagauugaauugguugacccacuuaaacuucaaauacccagcauugaacgugacuaugccaaacaaugaacaauuugacaaauuguacauuugggggguucaccacccggguacggacaaggaccaaaucuuccuguaugcucaagcagcaggaagaaucacaguaucuaccaaaagaagccaacaagcuguaauuccgaauaucggaucuagacccagaguaaggaauaucccuagcagaguaagcaucuauuggacaauaguaaaaccgggagacauacuuuugauuaacagcacagggaaucuaauugcuccuagggguuacuucaaaauacgaagugggaaaagcucaauaaugagaucagaugcacccauuggcaaaugcaauucugcaugcaucacuccaaauggaagcauucccaaugacaaaccauuccaaaauguaaacaggaucacauacggggccugucccagauauguuaagcaaaacacucugaaauuggcaacaggaaugagaaauguaccagagaaacaaacuagaggcauauuuggcgcaauagcugguuucauagaaaaugguugggagggaaugguggaugguugguacgguuucaggcaucaaaauucugagggaaggggacaagcagcagaucucaaaagcacucaagcagcaaucgaucaaaucaaugggaagcugaauagauugaucgggaaaaccaacgagaaauuccaucagauugaaaaagaauucucagaagucgaagggagaauucaagaccuugagaaauauguugaggacacuaaaauagaucucuggucauacaacgcggagcuucuuguugcccuggagaaccaacacacaauugaucuaacugacucagaaaugaacaaauuguuugaaaaaacaaaaaagcaacuaagggaaaaugcugaggauaugggcaaugguuguuucaaaauauaccacaaaugugacaaugccugcauaggaucaaucagaaauggaacuuaugaccacgauguguacagagaugaagcauuaaacaaccgauuccagaucaagggaguugagcugaagucaggguacaaagauuggauccuauggauuuccuuugccauaucauguuuuuugcuuuguguugcuuuguugggguucaucaugugggccugccaaaaaggcaacauuaggugcaacauuugcauuuga

SEQ ID NO: 43178 - RNA, 1701 nt, Artificial Sequence
  derived and/or modified CDS sequence (wt) from hemagglutinin__InfluenzaA__AHL81224
augaaggcaauacuaguaguucugcuauauacauuugcaaccgcaaaugcagacacauuauguauagguuaucaugcgaacaauucaacagacacuguagacacaguacuagaaaagaauguaacaguaacacacucuguuaaucuucuagaagacaagcauaacgggaaacuaugcaaacuaagagggguagccccauugcauuuggguaaauguaacauugcuggcuggauccugggaaauccagagugugaaucacucuccacagcaagcucaugguccuacauuguggaaacaucuaguucagacaauggaacguguuacccaggagauuucaucgauuaugaggagcuaagagagcaauugagcucagugucaucauuugaaagguuugagauauuccccaagacaaguucauggcccaaucaugacucgaacaaagguguaacggcagcauguccucaugcuggagcaaaaggcuucuacaaaaauuuaauauggcuaguuaaaaaaggaaauucauacccaaagcucagcaaauccuacauuaaugauaaagggaaagaaguccucgugcuauggggcauucaccauccaucuaccacugcugaccaacaaagucucuaucagaaugcagauacauauguuuuuguggggacaucaagauacagcaagaaguucaagccggaaauagcaauaagacccaaagugagggaucaagaagggagaaugaacuauuacuggacacuaguagagccgggagacaaaauaacauucgaagcaacuggaaaucuagugguaccgagauaugcauucgcaauggaaagaacugcuggaucugguauuaucauuucagauacaccaguccacgauugcaauacaacuugucagacacccaagggugcuauaaacaccagccucccauuucagaauauacauccgaucacaauuggaaaauguccaaaauaugugaaaagcacaaaauugagacuggccacaggauugaggaaugucccgucuauucaaucuagaggccuauuuggggccauugccggcuucauugaagggggguggacagggaugguagauggaugguacgguuaucaccaucaaaaugagcaggggucaggauaugcagccgaccugaagagcacacagaaugccauugacaagauuacuaacaaaguaaauucaguuauugaaaagaugaauacacaguucacagcaguagguaaagaguucaaccaccuggaaaaaagaauagagaauuuaaauaaaaaaguugaugaugguuuccuggacauuuggacuuacaaugccgaacuguugguucuauuggaaaaugaaagaacuuuggacuaccacgauucaaaugugaagaacuuauaugaaaagguaagaaaccaguuaaaaaacaaugccaaggaaauuggaaauggcugcuuugaauuuuaccacaaaugcgauaacacgugcauggaaagugucaaaaaugggacuuaugacuacccaaaauacucagaggaagcaaaauuaaacagagaagaaauagaugggguaaagcuggaaucaacaaggauuuaccagauuuuggcgaucuauucaacugucgccaguucauugguacugguagucucccugggggcaaucaguuuuuggaugugcucuaaugggucucuacaguguagaauauguauuuaa

SEQ ID NO: 43179 - RNA, 1701 nt, Artificial Sequence; identical to SEQ ID NO: 43141
  derived and/or modified CDS sequence (wt) from hemagglutinin__InfluenzaA__AHL81235

SEQ ID NO: 43180 - RNA, 1701 nt, Artificial Sequence; identical to SEQ ID NO: 43141
  derived and/or modified CDS sequence (wt) from hemagglutinin__InfluenzaA__AHL81247

SEQ ID NO: 43181 - RNA, 1701 nt, Artificial Sequence; identical to SEQ ID NO: 43141
  derived and/or modified CDS sequence (wt) from hemagglutinin__InfluenzaA__AHL81259

SEQ ID NO: 43182 - RNA, 1701 nt, Artificial Sequence; identical to SEQ ID NO: 43141
  derived and/or modified CDS sequence (wt) from hemagglutinin__InfluenzaA__AHL81271

SEQ ID NO: 43183 - RNA, 1701 nt, Artificial Sequence; identical to SEQ ID NO: 43141
  derived and/or modified CDS sequence (wt) from hemagglutinin__InfluenzaA__AHL81283

SEQ ID NO: 43184 - RNA, 1701 nt, Artificial Sequence; identical to SEQ ID NO: 43141
  derived and/or modified CDS sequence (wt) from hemagglutinin__InfluenzaA__AHL81295

SEQ ID NO: 43185 - RNA, 1701 nt, Artificial Sequence; identical to SEQ ID NO: 43160
  derived and/or modified CDS sequence (wt) from hemagglutinin__InfluenzaA__AHL81307

SEQ ID NO: 43186 - RNA, 1701 nt, Artificial Sequence
  derived and/or modified CDS sequence (wt) from hemagglutinin__InfluenzaA__AHL81329
augaaggcaauacuaguaguucugcuauauacauuugcaaccgcaaaugcagacacauuauguauagguuaucaugcgaacaauucaacagacacuguagacacaguacuagaaaagaauguaacaguaacacacucuguuaaccuucuagaagacaagcauaacgggaaacuaugcaaacuaagagggguagccccauugcauuuggguaaauguaacauugcuggcuggauccugggaaauccagagugugaaucacucuccacagcaagcucaugguccuacauuguggaaacaucuaguucagacaauggaacguguuacccaggagauuucaucaauuaugaggagcuaagagagcaauugagcucagugucaucauuugaaagguuugagauauuccccaagacaaguucauggcccaaucaugacucgaacaaagguguaacggcagcauguccucaugcuggagcaaaaagcuucuacaaaaauuuaauauggcuaguuaaaaaaggaaauucauacccaaagcucagcaaauccuacauuaaugauaaagggaaagaaguccucgugcuguggggcauucaccauccaucuacuacugcugaccaacaaagucucuaucagaaugcagaugcauauguuuuuguggggacaucaagauacagcaagaaguucaagccggaaauagcaauaagacccaaagugagggaucaagaagggagaaugaacuauuacuggacacuaguagagccgggagacaaaauaacauucgaagcaacuggaaaucuagugguaccgagauaugcauucgcaauggaaagaaaugcuggaucugguauuaucauuucagauacaccaguucacgauugcaauacaacuugucagacacccaagggugcuauaaacaccagccucccauuucagaauauacauccgaucacaauuggaaaauguccaaaauauguaaaaagcacaaaauugagacuggccacaggauugaggaaugucccgucuauucaaucuagaggccuauuuggggccauugccggcuucauugaagggggguggacagggaugguagauggaugguacgguuaucaccaucaaaaugagcaggggucaggauaugcagccgaccugaagagcacacagaaugccauugacaagauuacuaacaaaguaaauucuguuauugaaaagaugaauacacaguucacagcaguagguaaagaguucaaccaccuggaaaaaagaauagagaauuuaaauaaaaaaguugaugaugguuuccuggacauuuggacuuacaaugccgagcuguugguucuauuggaaaaugaaagaacuuuggacuaccacgauucaaaugugaagaacuuguaugaaaagguaagaaaccaguuaaaaaacaaugccaaggaaauuggaaacggcugcuuugaauuuuaccacaaaugcgauaacacgugcauggaaagugucaaaaaugggacuuaugacuacccaaaauacucagaggaagcaaaauuaaacagagaagaaauagaugggguaaagcuggaaucaacaaggauuuaccagauuuuggcgaucuauucaacugucgccaguucauugguacugguagucucccugggggcaaucaguuucuggaugugcucuaaugggucucuacaguguagaauauguauuuaa

SEQ ID NO: 43187 - RNA, 1701 nt, Artificial Sequence
  derived and/or modified CDS sequence (wt) from hemagglutinin__InfluenzaA__AHL81340
augaagacuaucauugcuuugagcuacauucuaugucugguuuucgcucaaaaacuuccuggaaaugacaacagcacggcaacgcugugccuugggcaccaugcaguaccaaacggaacgauagugaaaacaaucacgaaugaccaaauugaaguuacuaaugcuacugagcugguucagaguuccucaacaggugaaauaugcgacaguccucaucagauccuugauggaaaaaacugcacacuaauagaugcucuauugggagacccucagugugauggcuuccaaaauaagaaaugggaccuuuuuguugaacgcagcaaagccuacagcaacuguuacccuuaugaugugccggauuaugccucccuuaggucacuaguugccucauccggcacauuggaauuuaacaaugaaagcuucaauuggacuggagucacucaagacggaacaagcucugcuugcauaaggggaucuaaaaacaguuucuuuaguagauugaauugguugacccacuuaaacuucaaauacccagcauugaacgugacuaugccaaacaaugaacaauuugacaaauuguacauuugggggguucaccacccggguacggacaaagaccaaaucuuccuguaugcucaagcaucaggaagaaucacagucucuaccaaaagaagccaacaagcugcaaucccgaauaucggaucuagacccagaguaaggaacauccccagcagaauaagcaucuauuggacaauaguaaaaccgggagacauacuuuugauuaacagcacagggaaucuaauugcuccuagggguuacuucaaaauacgaagugggaaaagcucaauaaugagaucagaugcacccauuggcaaaugcaauucugaaugcaucacuccaaauggaagcauucccaaugacaaaccauuccaaaauguaaacaggaucacauacggggccugucccagauauguuaagcaaaacacucugaaauuggcaacagggaugcgaaauguaccagagaaacaaacuagaggcauauuuggcgcaaucgcggguuucauagaaaaugguugggagggaaugguggaugguugguacgguuucaggcaucaaaauucugagggaagaggacaagcagcagaucucaaaagcacucaagcagcaaucgaucaaaucaaugggaagcugaauagauugaucgggaaaaccaacgagaaauuccaucagauugaaaaagaauucucagaagucgaagggagaauucaggaccuugagaaauauguugaggacacuaaaauagaucucuggucauacaacgcggagcuucuuguugcccuggagaaccaacauacaauugaucuaacugacucagaaaugaacaaacuguuugaaaaaacaaagaagcaacugagggaaaaugcugaggauaugggcaaugguuguuucaaaauauaccacaaaugugacaaugccugcauaggaucaaucagaaauggaacuuauaaccacgauguauacagagaugaagcauuaaacaaacgguuucagaucaagggaauugagcugaagucaggguacaaagauuggauccuauggauuuccuuugccauaucauguuuuuugcuuuguguugcuuuguugggguucaucaugugggccugccaaaaaggcaacauuaggugcaacauuugcauuuga

SEQ ID NO: 43188 - RNA, 1701 nt, Artificial Sequence; identical to SEQ ID NO: 43141
  derived and/or modified CDS sequence (wt) from hemagglutinin__InfluenzaA__AHL81352

SEQ ID NO: 43189 - RNA, 1701 nt, Artificial Sequence
  derived and/or modified CDS sequence (wt) from hemagglutinin__InfluenzaA__AHL81364
augaaggcaauacuaguaguucugcuauauacauuugcaaccgcaaaugcagacacauuauguauagguuaucaugcgaacaauucaacagacacuguagacacgguacuagaaaagaauguaacaguaacacacucuguuaaccuucuagaagacaagcauaacgggaaacuaugcaaacuaagagggguagccccauugcauuuggguaaauguaacauugcuggcuggauccugggaaauccagagugugaaucacucuccacagcaagcucaugguccuacauuguggaaacaucuaguucagacaauggagcguguuacccaggagauuucaucaauuaugaggagcuaagagagcaauugagcucagugucaucauuugaaagguuugagauauuccccaagacaaauucauggcccaaucaugacucgaacaaagguguaacggcagcauguccucaugcuggagcaaaaagcuucuacaaaaauuuaauauggcuaguuaaaaaaggaaauucauacccaaagcucagcaaauccuacauuaaugauaaagggaaagaaguccucgugcuguggggcauucaccauccaucuacuacugcugaccaacaaagucucuaucagaaugcagaugcauauguuuuuguggggacaucaagauacagcaagaaguucaagccggaaauagcaauaagacccaaagugagggaucaagaagggagaaugaacuauuacuggacacuaguagagccgggagacaaaauaacauucgaagcaacuggaaaucuagugguaccgagauaugcauucgcaauggaaagaaaugcuggaucugguauuaucauuucagauacaccaguccacgauugcaauacaacuugucagacacccaagggugcuauaaacaccagccucccauuucagaauauacauccgaucacaauuggaaaauguccaaaauauguaaaaagcacaaaauugagacuggccacaggauugaggaaugucccgucuauucaaucuagaggccuauuuggggccauugccggcuucauugaagggggguggacagggaugguagauggaugguacgguuaucaccaucaaaaugagcaggggucaggauaugcagccgaccugaagagcacacagaaugccauugacaagauuacuaacaaaguaaauucuguuauugaaaagaugaauacacaguucacagcaguagguaaagaguucaaccaccuggaaaaaagaauagagaauuuaaauaaaaagguugaugaugguuuccuggacauuuggacuuacaaugccgaacuguugguucuauuggaaaaugaaagaacuuuggacuaccacgauucaaaugugaagaacuuguaugaaaagguaagaaaccaguuaaaaaacaaugccaaggaaauuggaaacggcugcuuugaauuuuaccacaaaugcgauaacacgugcauggaaagugucaaaaaugggacuuaugacuacccaaaauacucagaggaagcaaaauuaaacagagaagaaauagaugggguaaagcuggaaucaacaaggauuuaccagauuuuggcgaucuauucaacugucgccaguucauugguacugguagucucccugggggcaaucaguuucuggaugugcucuaaugggucucuacaguguagaauauguauuuaa

SEQ ID NO: 43190 - RNA, 1701 nt, Artificial Sequence
  derived and/or modified CDS sequence (wt) from hemagglutinin__InfluenzaA__AHL81386
augaaggcaauacuaguaguucugcuauauacauuugcaaccgcaaaugcagacacauuauguauagguuaucaugcgaacaauucaacagacacuguagacacgguacuagaaaagaauguaacaguaacacacucuguuaaccuucuagaagacaagcauaacgggaaacuaugcaaacuaagagggguagccccauugcauuuggguaaauguaacauugcuggcuggauccugggaaauccagagugugaaucacucuccacagcaagcucaugguccuacauuguggaaacaucuaguucagacaauggaacguguuacccaggagauuucaucaauuaugaggagcuaagagagcaauugagcucagugucaucauuugaaagguuugagauauuccccaagacaaauucauggcccaaucaugacucgaacaaagguguaacggcagcauguccucaugcuggaguaaaaagcuucuacaaaaauuuaauauggcuaguuaaaaaaggaaauucauacccaaagcucagcaaauccuacauuaaugauaaagggaaagaaguccucgugcuguggggcauucaccauccaucuacuacugcugaccaacaaagucucuaucagaaugcagaugcauauguuuuuguggggacaucaagauacagcaagaaguucaagccggaaauagcaauaagacccaaagugagggaucaagaagggagaaugaacuauuacuggacacuaguagagccgggagacaaaauaacauucgaagcaacuggaaaucuagugguaccgagauaugcauucgcaauggaaagaaaugcuggaucugguauuaucauuucagauacaccaguccacgauugcaauacaacuugucagacacccaagggugccauaaacaccagccucccauuucagaauauacauccgaucacaauuggaaaauguccaaaauauguaaaaagcacaaaauugagacuggccacaggauugaggaaugucccgucuauucaaucuagaggccuauuuggggccauugccggcuucauugaagggggguggacagggaugguagauggaugguacgguuaucaccaucaaaaugagcaagggucaggauaugcagccgaccugaagagcacacagaaugccauugacaagauuacuaacaaaguaaauucuguuauugaaaagaugaauacacaguucacagcaguagguaaagaguucaaccaccuggaaaaaagaauagagaauuuaaauaaaaaaguugaugaugguuuccuggacauuuggacuuacaaugccgaacuguugguucuauuggaaaaugaaagaacuuuggacuaccacgauucaaaugugaagaacuuguaugaaaagguaagaaaccaguuaaaaaacaaugccaaggaaauuggaaacggcugcuuugaauuuuaccacaaaugcgauaacacgugcauggaaagugucaaaaaugggacuuaugacuacccaaaauacucagaggaagcaaaauuaaacagagaagaaauagaugggguaaagcuggaaucaacaaggauuuaccagauuuuggcgaucuauucaacugucgccaguucauugguacugguagucucccugggggcaaucaguuucuggaugugcucuaaugggucucuacaguguagaauauguauuuaa

SEQ ID NO: 43191 - RNA, 1701 nt, Artificial Sequence; identical to SEQ ID NO: 43141
  derived and/or modified CDS sequence (wt) from hemagglutinin__InfluenzaA__AHL81397

SEQ ID NO: 43192 - RNA, 1701 nt, Artificial Sequence; identical to SEQ ID NO: 43177
  derived and/or modified CDS sequence (wt) from hemagglutinin__InfluenzaA__AHL81409

SEQ ID NO: 43193 - RNA, 1701 nt, Artificial Sequence
  derived and/or modified CDS sequence (wt) from hemagglutinin__InfluenzaA__AHL81419
augaaggcaauacuaguaguucugcuauauacauuugcaaccgcaaaugcagacacauuauguauagguuaucaugcgaacaauucaacagacacuguagacacaguacuagaaaagaauguaacaguaacacacucuguuaaccuucuagaagacaagcauaacgggaaacuaugcaaacuaagagggguagccccauugcauuuggguaaauguaacauugcuggcuggauccugggaaauccagagugugaaucacucuccacagcaagcucaugguccuacauuguggaaacaucuaguucagacaauggaacguguuacccaggagacuucaucgauuaugaggagcuaagagagcaauugagcucagugucaucauuugaaagguuugagauauuccccaagacaaguucauggcccaaucaugacucgaacaaagguauaacggcagcauguccucaugcuggagcaaaaagcuucuacaaaaauuuaauauggcuaguuaaaaaaggaaauucauauccaaagcucagcaaauccuacauuaaugauaaagggaaagaaguccucgugcuauggggcauucaccauccaucuacuagugcugaccaacaaagucucuaucagaaugcagaugcauauguuuuuguggggacaucaagauacagcaagaaguucaagccggaaauagcaauaagacccaaagugagggaucaagaagggagaaugaacuauuacuggacacuaguagagccaggagacaaaauaacauucgaagcaacuggaaaucuagugguaccgagauaugcauucgcaauggaaagaaaugcuggaucugguauuaucauuucagauacaccaguccacgauugcaauacaacuugucagacacccaagggugcuauaaacaccagccucccauuucagaauauacauccgaucacaauuggaaaauguccaaaauauguaaaaagcacaaaauugagacuggccacaggauugaggaaugucccgucuauucaaucuagaggccuauuuggggccauugccgguuucauugaagggggguggacagggaugguagauggaugguacgguuaucaccaucaaaaugagcaggggucaggauaugcagccgaccugaagagcacacagaaugccauugacaagauuacuaacaaaguaaauucuguuauugaaaagaugaauacacaguucacagcaguagguaaagaguucaaccaccuggaaaaaagaauagagaauuuaaauaaaaaaguugaugaugguuuccuggacauuuggacuuacaaugccgaacuguuaguucuauuggaaaaugaaagaacuuuggacuaccacgauucaaaugugaagaacuuauaugaaaagguaagaagccaguuaaaaaacaaugccaaggaaauuggaaacggcugcuuugaauuuuaccacaaaugcgauaacacgugcauggaaagugucaaaaaugggacuuaugacuacccaaaauacucagaggaagcaaaauuaaacagagaagaaauagaugggguaaagcuggaaucaacaaggauuuaccagauuuuggcgaucuauucaacugucgccaguucauugguacugguagucucccugggggcaaucaguuucuggaugugcucuaaugggucucuacaguguagaauauguauuuaa

SEQ ID NO: 43194 - RNA, 1701 nt, Artificial Sequence; identical to SEQ ID NO: 43154
  derived and/or modified CDS sequence (wt) from hemagglutinin__InfluenzaA__AHL81430

SEQ ID NO: 43195 - RNA, 1701 nt, Artificial Sequence; identical to SEQ ID NO: 32647
  derived and/or modified CDS sequence (wt) from hemagglutinin__InfluenzaA__AHL88951

SEQ ID NO: 43196 - RNA, 1701 nt, Artificial Sequence
  derived and/or modified CDS sequence (wt) from hemagglutinin__InfluenzaA__AHL89030
augaagacuaucauugcuuugagcuacauucuaugucugguuuucgcucaaaaacuucccggaaaugacaacagcacggcaacgcugugccuugggcaccaugcaguaccaaacggaacgauagugaaaacaaucacgaaugaccaaauugaaguuacuaaugcuacugagcugguucagaguuccucaacagguggaauaugcgacaguccucaucagauccuugauggagaaaacugcacacuaauagaugcucuauugggagacccucagugugauggcuuccaaaauaagaaaugggaccuuuuuguugaacgcagcaaagccuacagcaacuguuacccuuaugaugugccggauuaugccucccuuaggucacuaguugccucauccggcacacuggaguuuaacaaugaaagcuucaauuggacuggagucacccaaaauggaacaagcucugcuugcaaaaggagaucuaauaacaguuucuuuaguagauugaauugguugacccacuuaaaauucaaauacccagcauugaacgugacuaugccaaacaaugaaaaauuugacaaauuguacauuugggggguucaccacccggguacggacaaugaccaaaucuuucuguaugcucaagcaucaggaagaaucacagucucuaccaaaagaagccaacaaacuguaaucccgaauaucggaucuagacccagaguaaggaauauccccagcagaauaagcaucuauuggacaauaguaaaaccaggagacauacuuuugauuaacagcacagggaaucuaauugcuccuagggguuacuucaaaauacgaagugggaaaagcucaauaaugagaucagaugcacccauuggcaaaugcaauucugaaugcaucacuccaaauggaagcauucccaaugacaaaccauuucaaaauguaaacaggaucacauauggggccugucccagauauguuaagcaaaacacucugaaauuggcaacagggaugcgaaauguaccagagaaacaaacuagaggcauauuuggcgcaaucgcggguuucauagaaaaugguugggagggaaugguggaugguugguacgguuucaggcaucaaaauucugagggaauaggacaagcagcagaucucaaaagcacucaagcagcaaucaaucaaaucaaugggaagcugaauagguugaucgggaaaaccaacgagaaauuccaucagauugaaaaagaauucucagaaguagaagggagaauucaggaccucgagaaauauguugaggacacuaaaauagaucucuggucauacaacgcggagcuucuuguugcccuggagaaccaacauacaauugaucuaacugacucagaaaugaacaaacuguuugaaagaacaaagaagcaacugagggaaaaugcugaggauaugggcaaugguuguuucaaaauauaccacaaaugugacaaugccugcauaggaucaaucagaaauggaacuuaugaccaugauguauacagagaugaagcauuaaacaaccgguuccagaucaaaggcguugagcugaagucaggauacaaagauuggauccuauggauuuccuuugccauaucauguuuuuugcuuuguguugcuuuguugggguucaucaugugggccugccaaaaaggcaacauuaggugcaacauuugcauuuga

SEQ ID NO: 43197 - RNA, 1701 nt, Artificial Sequence
  derived and/or modified CDS sequence (wt) from hemagglutinin__InfluenzaA__AHL89042
augaagacuaucauugcuuugagcuacauucuaugucugguuuucgcucaaaagcuucccggaaaugacaacagcacggcaacgcugugccuugggcaccaugcaguaccaaacggaacgauagugaaaacaaucacgaaugaccaaauugaaguuacuaaugcuacugagcugguucagaguuccucaacaggugaaauaugcgacaguccucaucagauccuugauggagaaaacugcacacuaauagaugcucuauugggggacccucagugugauggcuuccaaaauaagaaaugggaccuuuuuguugaacgcagcaaagccuacagcaacuguuacccuuaugaugugccggauuaugccucccuuaggucacuaguugccucauccggcacacuggaguuuaacaaugaaaacuucaauuggacuggagucacucaaaauggaacaagcucugcuugcaaaaggagaucuaauaacaguuucuuuaguagauugaauugguugacccacuuaaaauucaaauacccagcauugaacgugacuaugccaaacaaugaaaaauuugacaaauuguacauuugggggguucaccacccggguacggacaaugaccaaaucuuccuguaugcucaagcaucaggaagaaucacagucucuaccaaaagaagccaacaaacuguaaucccgaauaucggaucuagacccagaguaaggaauauccccagcagaauaagcaucuauuggacaauaguaaaaccgggagacauacuuuugauuaacagcacagggaaucuaauugcuccuagggguuacuucaaaauacgaagugggaaaagcucaauaaugagaucagaugcacccauuggcaaaugcaauucugaaugcaucacuccaaauggaagcauucccaaugacaaaccauuucaaaauguaaacaggaucacauauggggccugucccagauauguuaagcaaaacacucugaaauuggcaacagggaugcgaaauguaccagagaaacaaacuagaggcauauuuggcgcaaucgcggguuucauagaaaaugguugggagggaaugguggaugguugguacgguuucaggcaucaaaauucugagggaauaggacaagcagcagaucucaaaagcacucaagcagcaaucaaucaaaucaaugggaagcugaauagguugaucgggaaaaccaacgagaaauuccaucagauugaaaaagaauucucagaaguagaagggagaauucaggaccucgagaaauauguugaggacacuaaaauagaucucuggucauacaacgcggagcuucuuguugcccuggagaaccaacauacaauugaucuaacugacucagaaaugaacaaacuguuugaaagaacaaagaagcaacugagggaaaaugcugaggauaugggcaaugguuguuucaaaauauaccacaaaugugacaaugccugcauaggaucaaucagaaauggaacuuaugaccaugauguauacagagaugaagcauuaaacaaccgguuccagaucaaaggcguugagcugaagucaggauacaaagauuggauccuauggauuuccuuugccauaucauguuuuuugcuuuguguugcuuuggugggguucaucaugugggccugccaaaaaggcaacauuaggugcaacauuugcauuuga

SEQ ID NO: 43198 - RNA, 1701 nt, Artificial Sequence
  derived and/or modified CDS sequence (wt) from hemagglutinin__InfluenzaA__AHL89054
augaagacuaucauugcuuugagcuacauucuaugucugguuuucgcucaaaaacuucccggaaaugacaacagcacggcaacgcugugccuugggcaccaugcaguaccaaacggaacgauagugaaaacaaucacgaaugaccaaauugaaguuacuaaugcuacugagcugguucagaguuccucaacagguggaauaugcgacaguccucaucagauccuugauggagaaaacugcacacuaauagaugcucuauugggagacccucagugugauggcuuccaaaauaagaaaugggaccuuuuuguugaacgcagcaaagccuacagcaacuguuacccuuaugaugugccggauuaugccucccuuaggucacuaguugccucauccggcacacuggaguuuaacaaugaaagcuucaauuggacuggagucacucaaaauggaacaagcucugcuugcaaaaggagaucuaauaacaguuucuuuaguagauugaauugguugacccacuuaaaauucaaauacccagcauugaacgugacuaugccaaacaaugaaaaauuugacaaauuguacauuugggggguucaccacccggguacggacaaugaccaaaucuuccuguaugcucaagcaucaggaagaaucacagucucuaccaaaagaagccaacaaacuguaaucccgaauaucggaucuagacccagaguaaggaauauccccagcagaauaagcaucuauuggacaauaguaaaaccgggagacauacuuuugauuaacagcacagggaaucuaauugcuccuagggguuacuucaaaauacgaagugggaaaagcucaauaaugagaucagaugcacccauuggcaaaugcaauucugaaugcaucacuccaaauggaagcauucccaaugacaaaccauuucaaaauguaaacaggaucacauauggggccugucccagauauguuaagcaaaacacucugaaguuggcaacagggaugcgaaauguaccagagaaacaaacuagaggcauauuuggcgcaaucgcagguuucauagaaaaugguugggagggaaugguggaugguugguacgguuucagacaucaaaauucugagggaauaggacaagcagcagaucucaaaagcacucaagcagcaaucaaucaaaucaaugggaagcugaauagguugaucgggaaaaccaacgagaaauuccaucagauugaaaaagaauucucagaaguagaagggagaauucaggaccucgagaaauauguugaggacacuaaaauagaucucuggucauacaacgcggagcuucuuguugcccuggagaaccaacauacaauugaucuaacugacucagaaaugaacaaacuguuugaaagaacaaagaagcaacuuagggaaaaugcugaggauaugggcaaugguuguuucaaaauauaccacaaaugugacaaugccugcauaggaucaaucagaaauggaacuuaugaccaugauguauacagagaugaagcauuaaacaaccgguuccagaucaaaggcguugagcugaagucaggauacaaagauuggauccuauggauuuccuuugccaugucauguuuuuugcuuuguguugcuuuguugggguucaucaugugggccugccaaaaaggcaacauuaggugcaacauuugcauuuga

SEQ ID NO: 43199 - RNA, 1701 nt, Artificial Sequence
  derived and/or modified CDS sequence (wt) from hemagglutinin__InfluenzaA__AHL89066
augaagacuaucauugcuuugagcuacauucuaugucugguuuucgcucaaaaacuucccggaaaugacaacagcacggcaacgcugugccuugggcaccaugcaguaccaaacggaacgauagugaaaacaaucacgaaugaccaaauugaaguuacuaaugcuacugagcugguucagaguuccucaacaggugaaauaugcgacaguccucaucagauccuugauggagaaaacugcacacuaauagaugcucuauugggagacccucagugugauggcuuccaaaauaagaaaugggaccuuuuugucgaacgcagcaaagccuacagcaacuguuacccuuaugaugugccggauuaugccucccuuaggucacuaguugccucauccggcacacuggaguuuaacaaugaaagcuucaauuggacuggagucacucaaaauggaacaagcucugcuugcaaaaggagaucuaauaacaguuucuuuaguagacugaauugguuaacccacuuaaaauucaaauacccagcauugaacgugacuaugccaaacaaugaaaaauuugacaaauuguacauuugggggguucaccacccggguacggacaaugaccaaaucuuccuguaugcucaagcaucaggaagaaucacagucucuaccaaaagaagccaacaaacuguaaucccgaauaucggaucuagaccuagaguaaggaauauccccagcagaauaagcaucuauuggacaauaguaaaaccgggagacauacuuuugauuaacagcacagggaaucuaauugcuccuagggguuacuucaaaauacgaagugggaaaagcucaauaaugagaucagaugcacccauuggcaaaugcaauucugaaugcaucacuccaaauggaagcauucccaaugacaaaccauuucaaaauguaaacagaaucacauauggggccugucccagauauguuaagcaaaacacucugaaauuggcaacagggaugagaaauguaccagagaaacaaacuagaggcauauuuggcgcaaucgcggguuucauagaaaaugguugggagggaaugguggaugguugguacgguuucaggcaucaaaauucugagggaauaggacaagcagcagaucucaaaagcacucaagcagcaaucaaucaaaucaaugggaagcugaauagguugaucgggaaaaccaacgagaaauuccaucagauugaaaaagaauucucagaaguagaagggagaauucaggaccucgagaaauauguugaggacacuaaaauagaucucuggucauacaacgcggagcuucuuguugcccuggagaaccaacauacaauugaucuaacugacucagaaaugaacaaacuguuugaaagaacaaagaagcaacugagggaaaaugcugaggauaugggcaaugguuguuucaaaauauaccacaaaugugacaaugccugcauaggaucaaucagaaauggaacuuaugaccaugauguauacagagaugaagcauuaaacaaccgguuccagaucaaaggcguugagcugaagucaggauacaaagauuggauccuauggauuuccuuugccauaucauguuuuuugcuuuguguuguuuuguugggguucaucaugugggccugccaaaaaggcaacauuaggugcaacauuugcauuuga

SEQ ID NO: 43200 - RNA, 1701 nt, Artificial Sequence
  derived and/or modified CDS sequence (wt) from hemagglutinin__InfluenzaA__AHL89078
augaagacuaucauugcuuugagcuacauucuaugucugguuuucgcucaaaaacuucccggagaugacaacagcacggcaacgcugugccuugggcaccaugcaguaccaaacggaacgguagugaaaacaaucacgaaugaccaaauugaaguuacuaaugcuacugagcugguucagaguuccucaacagguggaauaugcgacaguccucaucagauccuugauggagaaaacugcacacuaauagaugcucuauugggagacccucagugugauggcuuccaaaauaagaaaugggaccuuuuuguugaacgcagcaaagccuacagcaacuguuacccuuaugaugugccggauuaugccucccuuaggucacuaguugccucauccggcacacuggaguuuaacaaugaaagcuucaauuggacuggagucacucaaaauggaacaagcucugcuugcaaaagaagaucuaauaacaguuucuuuaguagauugaauugguugacccacuuaaaauucaaauacccagcauugaacgugacuaugccaaacaaugaaaaauuugacaaauuguacauuugggggguucaccacccggguacggacaaugaccaaaucuuccuguaugcucaagcaucaggaagaaucacagucucuaccaaaagaagccaacaaacuguaaucccgaauauuggaucuagacccagaguaaggaauauccccagcagaauaagcaucuauuggacaauaguaaaaccgggagacauacuuuugauuaacagcacagggaaucuaauugcuccuagggguuacuucaaaauacgaagugggaaaagcucaauaaugagaucagaugcacccauuggcaaaugcaauucugaaugcaucaccccaaauggaagcauucccaaugacaaaccauuucaaaauguaaacaggaucacauauggggccugucccagauauguuaagcaaaacacucugaaauuggcaacagggaugcgaaauguaccagagaaacaaacuagaggcauauuuggcgcaaucgcggguuucauagaaaaugguugggagggaaugguggaugguugguacgguuucaggcaucaaaauucugagggaauaggacaagcagcagaucucaaaagcacucaagcagcaaucaaucaaaucaaugggaagcugaauagguugaucgggaaaaccaacgagaaauuccaucagauugaaaaagaauucucagaaguagaagggagaauucaggaccucgagaaauauguugaggacacuaaaauagaucucuggucauacaacgcggagcuucuuguugcccuggagaaccaacauacaauugaucuaacugacucagaaaugaacaaacuguuugaaagaacaaagaagcaacugagggaaaaugcugaggauaugggcaaugguuguuucaaaauauaccacaaaugugacaaugccugcauaggaucaaucagaaauggaacuuaugaccaugauguauacagagaugaagcauuaaacaaccgguuccagaucaaaggcguugagcugaagucaggauacaaagauuggauccuauggauuuccuuugccauaucauguuuuuugcuuuguguugcuuuguugggguucaucaugugggccugccaaaaaggcaacauuaggugcaacauuugcauuuga

SEQ ID NO: 43201 - RNA, 1701 nt, Artificial Sequence
  derived and/or modified CDS sequence (wt) from hemagglutinin__InfluenzaA__AHL89090
augaagacuaucauugcuuugagcuacauucuaugucugguuuucgcucaaaaacuucccggaaaugacaacagcacggcaacgcugugccuugggcaccaugcaguaccaaacggaacgauagugaaaacaaucacgaaugaccaaauugaaguuacuaaugcuacugagcugguucagaguuccucaacagguggaauaugcgacaguccuuaucagauccuugauggagaaaacugcacacuaauagaugcucuauugggagacccucagugugauggcuuccaaaauaagaaaugggaccuuuuuguugaacgcagcaaagccuacagcaacuguuacccuuaugaugugccggacuaugccucccuuaggucacuaguugccucauccggcacacuggaguuuaacaaugaaagcuucaauuggacuggagucacucaaaauggaacaagcucugcuugcaaaaggagaucuaauaacaguuucuuuaguagauugaauugguugacccacuuaaaauucaaauacccagcauugaacgugacuaugccaaacaaugaaaaauuugacaaauuguacauuugggggguucaccacccggguacggacaaugaccaaaucuuccuguaugcucaagcaucaggaagaaucacagucucuaccaaaagaagccaacaaacuguaaucccgaauaucggaucuagacccagaguaaggaauauccccagcagaauaagcaucuauuggacaauaguaaaaccgggagacauacuuuugauuaacagcacagggaaucuaauugcuccuagggguuacuucaaaauacgaagugggaaaagcucaauaaugagaucagaugcacccauuggcaaaugcaauucugaaugcaucacuccaaauggaagcauucccaaugacaaaccauuucaaaauguaaacaggaucacauauggggccugucccagauauguuaagcaaaacacucugaaauuggcaacagggaugcgaaauguaccagagaaacaaacuagaggcauauuuggcgcaaucgcggguuucauagaaaaugguugggagggaaugguggaugguugguacgguuucaggcaucaaaauucugagggaauaggacaagcagcagaucucaaaagcacucaagcagcaaucaaucaaaucaaugggaagcugaauagguugaucgggaaaaccaacgagaaauuccaucagauugaaaaagaauucucagaaguagaagggagaauucaggaccucgagaaauauguugaggacacuaaaauagaucucuggucauacaacgcggagcuucuuguugcccuggagaaccaacauacaauugaucuaacugacucagaaaugaacaaacuguuugaaagaacaaagaagcaacugagggaaaaugcugaggauaugggcaaugguuguuucaaaauauaccacaaaugugacaaugccugcauaggaucaaucagaaauggaacuuaugaccaugauguauacagagaugaagcauuaaacaaccgguuccagaucaaaggcguugagcugaagucaggauacaaagauuggauccuauggauuuccuuugccauaucauguuuuuugcuuuguguugcuuuguugggguucaucaugugggccugccaaaaaggcaacauuaggugcaacauuugcauuuga

SEQ ID NO: 43202 - RNA, 1701 nt, Artificial Sequence
  derived and/or modified CDS sequence (wt) from hemagglutinin__InfluenzaA__AHL89102
augaagacuaucauugcuuugagcuacauucuaugucugguuuucgcucaaaaacuucccggaaaugacaacagcacggcaacgcugugccuugggcaccaugcaguaccaaacggaacgauagugaaaacaaucacgaaugaccaaauugaaguuacuaaugcuacugagcugguucagaguuccucaacagguggaauaugcgacaguccucaucagauccuugauggagaaaacugcacacuaauagaugcucuauugggagacccucagugugauggcuuccaaaauaagaaaugggaccuuuuuguugaacgcagcaaagccuacagcaacuguuacccuuaugaugugccggauuaugccucccuuaggucacuaguugccucauccggcacacuggaguuuaacaaugaaagcuucaauuggacuggagucacucaaaauggaacaagcucugcuugcaaaaggagaucuaauaacaguuucuuuaguagauugaauugguugacccacuuaaaauucaaauacccagcauugaacgugacuaugccaaacaaugaaaaauuugacaaauuguacauuugggggguucaccacccggguacggacaaugaccaaaucuuccuguaugcucaagcaucaggaagaaucacagucucuaccaaaagaagccaacaaacuguaaucccgaauaucggaucuagacccagaguaaggaauauccccagcagaauaagcaucuauuggacaauaguaaaaccgggagacauacuuuugauuaacagcacagggaaucuaauugcuccuagggguuacuucaaaauacgaagugggaaaagcucaauaaugagaucagaugcacccauuggcaaaugcaauucugaaugcaucacuccaaauggaagcauucccaaugacaaaccauuucaaaauguaaacaggaucacauauggggccugucccagauauguuaagcaaaacacucugaaauuggcaacagggaugcgaaauguaccagagaaacaaaccagaggcauauuuggcgcaaucgcggguuucauagaaaaugguugggagggaaugguggaugguugguacgguuucaggcaucaaaauucugagggaauaggacaagcagcagaucucaaaagcacucaagcagcaaucaaucaaaucaaugggaagcuaaauagguugaucgggaaaaccaacgagaaauuccaucagauugaaaaagaauucucagaaguagaagggagaauucaggaccucgagaaauauguugaggacacuaaaauagaucucuggucauacaacgcggagcuucuuguugcccuggagaaccaacauacaauugaucuaacugacucagaaaugaacaaacuguuugaaagaacaaagaagcaacugagggaaaaugcugaggauaugggcaaugguuguuucaaaauauaccacaaaugugacaaugccugcauaggaucaaucagaaauggaacuuaugaccaugauguauacagagaugaagcauuaaacaaccgguuccagaucaaaggcguugagcugaagucaggauacaaagauuggauccuauggauuuccuuugccauaucauguuuuuugcuuuguguugcuuuguugggguucaucaugugggccugccaaaaaggcaacauuaggugcaacauuugcauuuga

SEQ ID NO: 43203 - RNA, 1701 nt, Artificial Sequence; identical to SEQ ID NO: 32647
  derived and/or modified CDS sequence (wt) from hemagglutinin__InfluenzaA__AHL89114

SEQ ID NO: 43204 - RNA, 1701 nt, Artificial Sequence
  derived and/or modified CDS sequence (wt) from hemagglutinin__InfluenzaA__AHL89126
augaagacuaucauugcuuugagcuacauucuaugucugguuuucgcucaaaaacuucccggaaaugacaacagcacggcaacgcugugccuugggcaccaugcaguaccaaacggaacgauagugaaaacaaucacgaaugaccaaauugaaguuacuaaugcuacugagcugguucagaguuccucaacagguggaauaugcgacaguccucaucagauccuugauggagaaaacugcacacuaauagaugcucuauugggagacccucagugugauggcuuccaaaauaagaaaugggaccuuuuuguugaacgcagcaaagccuacagcaacuguuacccuuaugaugugccggauuaugccucccuuaggucacuaguugccucauccggcacacuggaguuuaacaaugaaaacuucaauuggacuggagucacucaaaauggaacaagcucugcuugcaaaaggagaucuaauaacaguuucuuuaguagauugaauugguugacccacuuaaaauucaaauacccagcauugaacgugacuaugccaaacaaugaaaaauuugacaaauuguacauuugggggguucaccacccggguacggacaaugaccaaaucuuccuguaugcucaagcaucaggaagaaucacagucucuaccaaaagaagccaacaaacuguaaucccgaauaucggaucuagacccagaguaaggaauauccccagcagaauaagcaucuauuggacaauaguaaaaccgggagacauacuuuugauuaacagcacagggaaucuaauugcuccuagggguuacuucaaaauacgaagugggaaaagcucaauaaugagaucagaugcacccauuggcaaaugcaauucugaaugcaucacuccaaauggaagcauucccaaugacaaaccauuucaaaauguaaacaggaucacauauggggccugucccagauauguuaagcaaaacacucugaaauuggcaacagggaugcgaaauguaccagagaaacaaacuagaggcauauuuggcgcaaucgcggguuucauagaaaaugguugggagggaaugguggaugguugguacgguuucaggcaucaaaauucugagggaauaggacaagcagcagaucucaaaagcacucaagcagcaaucaaucaaaucaaugggaagcugaauagguugaucgggaaaaccaacgagaaauuccaucagauugaaaaagaauucucagaaguagaagggagaauucaggaccucgagaaauauguugaggacacuaaaauagaucucuggucauacaacgcggagcuucuuguugcccuggagaaccaacauacaauugaucuaacugacucagaaaugaacaaacuguuugaaagaacaaagaagcaacugagggaaaaugcugaggauaugggcaaugguuguuucaaaauauaccacaaaugugacaaugccugcauaggaucaaucagaaauggaacuuaugaccaugauguauacagagaugaagcauuaaacaaccgguuccagaucaaaggcguugagcugaagucaggauacaaagauuggauccuauggauuuccuuugccauaucauguuuuuugcuuuguguugcuuuguugggguucaucaugugggccugccaaaaaggcaacauuaggugcaacauuugcauuuga

SEQ ID NO: 43205 - RNA, 1701 nt, Artificial Sequence
  derived and/or modified CDS sequence (wt) from hemagglutinin__InfluenzaA__AHL89138
augaagacuaucauugcuuugagcuacauucuaugucugguuuucgcucaaaaacuucccggaaaugacaacagcacggcaacgcugugccuugggcaccaugcaguaccaaacggaacgauagugaaaacaaucacgaaugaccaaauugaaguuacuaaugcuacugagcugguucagaguuccucaacaggugaaauaugcgacagcccucaucagauccuugauggagaaaacugcacacuaauagaugcucuauugggagacccucagugugauggcuuccaaaauaagaaaugggaccuuuuuguugaacgcagcaaagccuacagcaacuguuacccuuaugaugugccggauuaugccucccuuaggucacuaguugccucauccggcacacuggaguuuaacaaugaaagcuucaauuggacuggagucacucaaaauggaacaagcucugcuugcaaaaggagaucuaauaacaguuucuuuaguagauugaauugguugacccacuuaaaauucaaauacccagcauugaacgugacuaugccaaacaaugaaaaauuugacaaauuguacauuugggggguucaccacccggguacggacaaugaccaaaucuuccuguaugcucaaucaucaggaagaaucacagucucuaccaaaagaagccaacaaacuguaaucccgaauaucggaucuagacccagaguaaggaauauccccagcagaauaagcaucuauuggacaauaguaaaaccgggagacauacuuuugauuaacagcacagggaaucuaauugcuccuagggguuacuucaaaauacgaagugggaaaagcucaauaaugagaucagaugcacccauuggcaaaugcaauucugaaugcaucacuccaaauggaagcauucccaaugacaaaccauuucaaaauguaaacaggaucacauauggggccugucccagauauguuaagcaaaacacucugaaauuggcaacagggaugcgaaauguaccagagaaacaaacuagaggcauauuuggcgcaaucgcggguuucauagaaaaugguugggagggaaugguggaugguugguacgguuucaggcaucaaaauucugagggaauaggacaagcagcagaucucaaaagcacucaagcagcaaucaaucaaaucaaugggaagcugaauagguugaucgggaaaaccaacgagaaauuccaucagauugaaaaagaauucucagaaguagaggggagaauucaggaccucgagaaauauguugaggacacuaaaauagaucucuggucauacaacgcggagcuucuuguugcccuggagaaccaacauacaauugaucuaacugacucagaaaugaacaaacuguuugaaagaacaaagaagcaacugagggaaaaugcugaggauaugggcaaugguuguuucaaaauauaccacaaaugugacaaugccugcauaggaucaaucagaaauggaacuuaugaccaugauguauacagagaugaagcauuaaacaaccgguuccagaucaaaggcguugagcugaagucaggauacaaagauuggauccuauggauuuccuuugccauaucauguuuuuugcuuuguguugcuuuguugggguucaucaugugggccugccaaaaaggcaacauuaggugcaacauuugcauuuga

SEQ ID NO: 43206 - RNA, 1701 nt, Artificial Sequence
  derived and/or modified CDS sequence (wt) from hemagglutinin__InfluenzaA__AHL89150
augaagacuaucauugcuuugagcuacauucuaugucugguuuucgcucaaaaacuucccggaaaugacaacagcacggcaacgcugugccuugggcaccaugcaguaccaaacggaacgauagugaaaacaaucacgaaugaccaaauugaaguuacuaaugcuacugagcugguucagaguuccucaacagguggaauaugcgacaguccucaucagauccuugauggagaaaacugcacacuaauagaugcucuauugggagacccucagugugauggcuuccaaaauaagaaaugggaccuuuuuguugaacgcagcaaagccuacagcaacuguuacccuuaugaugugccggauuaugccucccuuaggucacuaguugccucauccggcacacuggaguuuaacaaugaaagcuucaauuggacuggagucacucaaaauggaacaagcucugcuugcaaaaggagaucuaauaacaguuucuuuaguagauugaauugguugacccacuuaaaauucaaauacccagcauugaacgugacuaugccaaacaaugaaaaauuugacaaauuguacauuugggggguucaccacccggguacggacaaugaccaaaucuuccuguaugcucaagcaucaggaagaaucacagucucuaccaaaagaagccaacaaacuguaaucccgaauaucggaucuagacccagaguaaggaauauccccagcagaauaagcaucuauuggacaauaguaaaaccgggagacauacuuuugauuaacagcacaggaaaucuaauugcuccuagggguuacuucaaaauacgaagugggaaaagcucaauaaugagaucagaugcacccauuggcaaaugcaauucugaaugcaucacuccaaauggaagcauucccaaugacaaaccauuucaaaauguaaacaggaucacauauggggccugucccagauauguuaagcaaaacacucugaaauuggcaacagggaugcgaaauguaccagagaaacaaacuagaggcauauuuggcgcaaucgcggguuucauagaaaaugguugggagggaaugguggaugguugguacgguuucaggcaucaaaauucugagggaauaggacaagcagcagaucucaaaagcacucaagcagcaaucaaucaaaucaaugggaagcugaauagguugaucgggaaaaccaacgagaaauuccaucagauugaaaaagaauucucagaaguagaagggagaauucaggaccucgagaaauauguugaggacacuaaaauagaucucuggucauacaacgcggagcuucuuguugcccuggagaaccaacauacaauugaucuaacugacucagaaaugaacaaacuguuugaaagaacaaagaagcaacugagggaaaaugcugaggauaugggcaaugguuguuucaaaauauaccacaaaugugacaaugccugcauaggaucaaucagaaauggaacuuaugaccaugauguauacagagaugaagcauuaaacaaccgguuccagaucaaaggcguugagcugaagucaggauacaaagauuggauccuauggauuuccuuugccauaucauguuuuuugcuuuguguugcuuuguugguguucaucaugugggccugccagaagggcaacauuaggugcaacauuugcauuuga

SEQ ID NO: 43207 - RNA, 1701 nt, Artificial Sequence
  derived and/or modified CDS sequence (wt) from hemagglutinin__InfluenzaA__AHL89162
augaagacuaucauugcuuugagcuacauucuaugucugguuuucgcucaaaaacuucccggaaaugacaacagcacggcaacgcugugccuugggcaccaugcaguaccaaacggaacgauagugaaaacaaucacgaaugaccaaauugaaguuacuaaugcuacugagcugguucagaguuccucaacagguggaauaugcgacaguccucaucagauccuugauggagaaaacugcacacuaauagaugcucuauuaggagacccucagugugauggcuuccaaaauaagaaaugggaccuuuuuguugaacgcagcaaagccuacagcaacuguuacccuuaugaugugccggauuaugccucccuuaggucacuaguugccucauccggcacacuggaguuuaacaaugaaagcuucaauuggacuggagucacucaaaauggaacaagcucugcuugcaaaaggagaucuaauaacaguuucuuuaguagauugaauugguugacccacuuaaaauucaaauacccagcauugaacgugacuaugccaaacaaugaaaaauuugacaaauuguacauuugggggguucaccacccggguacggacaaugaccaaaucuuccuguaugcucaagcaucaggaagaaucacagucucuaccaaaagaagccaacaaacuguaaucccgaauaucggaucuagacccagaguaaggaauauccccagcagaauaagcaucuauuggacaauaguaaaaccgggagacauacuuuugauuaacagcacagggaaucuaauugcuccuagggguuacuucaaaauacgaagugggaaaagcucaauaaugagaucagaugcacccauuggcaaauguaauucugaaugcaucacuccaaauggaagcauucccaaugacaaaccauuucaaaauguaaacaggaucacauauggggccugucccagauauguuaagcaaaacacucugaaauuggcaacagggaugcgaaauguaccagagaaacaaacuagaggcauauuuggcgcaaucgcggguuucauagaaaaugguugggagggaaugguggaugguugguacgguuucaggcaucaaaauucugagggaacaggacaagcagcagaucucaaaagcacucaagcagcaaccaaucaaaucaaugggaagcugaauagguugaucgggaaaaccaacgagaaauuccaucagauugaaaaagaauucucagaaguagaagggagaauucaggaccucgagaaauauguugaggacaccaaaauagaucucuggucauacaacgcggagcuucuuguugcccuggagaaccaacauacaauugaucuaacugacucagaaaugaacaaacuguuugaaagaacaaagaagcaacugagggaaaaugcugaggauaugggcaaugguuguuucaaaauauaccacaaaugugacaaugccugcauaggaucaaucagaaauggaacuuaugaccaugauguauacagagaugaagcauuaaacaaccgguuccagaucaaaggcguugagcugaagucaggauacaaagauuggauccuauggauuuccuuugccauaucauguuuuuugcuuuguguugcuuuguugggguucaucaugugggccugccaaaaaggcaacauuaggugcaacauuugcauuuga

SEQ ID NO: 43208 - RNA, 1701 nt, Artificial Sequence
  derived and/or modified CDS sequence (wt) from hemagglutinin__InfluenzaA__AHL89174
augaagacuaucauugcuuugagcuacacucuaugucugguuuucgcucaaaaacuucccggaaaugacaacagcacggcaacgcugugccuugggcaccaugcaguaccaaacggaacgauagugaaaacaaucacgaaugaccaaauugaaguuacuaaugcuacugagcugguucagaguuccucaacagguggaauaugcgacaguccucaucagauccuugauggagaaaacugcacucuaauagaugcucuauugggagacccucagugugauggcuuccaaaauaagaaaugggaccuuuuuguugaacgcagcaaagccuacagcaacuguuacccuuaugaugugccagauuaugccucccuuaggucacuaguugccucauccggcacacuggaguuuaacaaugaaagcuucaauuggacuggagucacucaaaauggaacaagcucugcuugcaaaaggagaucuaauaacaguuucuuuaguagauugaauugguugacccacuuaaaauucaaauacccagcauugaacgugacuaugccaaacaaugaaaaauuugacaaauuguacauuugggggguucaccacccggguacggacaaugaccaaaucuuccuguaugcucaagcaucaggaagaaucacagucucuaccaaaagaagccaacaaacuguaaucccgaauaucggaucuagacccagaguaaggaauauccccagcagaauaagcaucuauuggacaauaguaaaaccgggagacauacuuuugauuaacagcacagggaaucuaauugcuccuagggguuacuucaaaauacgaagugggaaaagcucaauaaugagaucagaugcacccauuggcaaaugcaauucugaaugcaucacuccaaauggaagcauucccaaugacaaaccauuucaaaauguaaacaggaucacauauggggccugucccagauauguuaagcaaaacacucugaaauuggcaacagggaugcgaaauguaccagagaaacaaacuagaggcauauuuggcgcaaucgcggguuucauagaaaaugguugggagggaaugguggaugguugguacgguuucaggcaucaaaauucugagggaauaggacaagcagcagaucucaaaagcacucaagcagcaaucaaucaaaucaaugggaagcugaauagguugaucgggaaaaccaacgagaaauuccaucagauugaaaaggaauucucagaaguagaagggagaauucaggaccucgagaaauauguugaggacacuaaaauagaucucuggucauacaacgcggagcuucuuguugcccuggagaaccaacacacaauugaucuaacugacucagaaaugaacaaacuguuugaaagaacaaagaagcaacugagggaaaaugcugaggauaugggcaaugguuguuucaaaauauaccacaaaugugacaaugccugcauaggaucaaucagaaauggaacuuaugaccaugauguauacagagaugaagcauuaaacaaccgguuccagaucaaaggcguugagcugaagucaggauacaaagauuggauccuauggauuuccuuugccauaucauguuuuuugcuuuguguugcuuuguugggguucaucaugugggccugccaaaaaggcaacauuaggugcaacauuugcauuuga

SEQ ID NO: 43209 - RNA, 1701 nt, Artificial Sequence
  derived and/or modified CDS sequence (wt) from hemagglutinin__InfluenzaA__AHL89210
augaagacuaucauugcuuugagcuacauucuaugucugguuuucgcucaaaaacuucccggaaaugacaacagcacggcaacgcugugccuugggcaccaugcaguaccaaacggaacgauagugaaaacaaucacgaaugaccaaauugaaguuacuaaugcuacugaguugguucagaguuccucaacaggugaaauaugcgacaguccucaucagauccuugauggagaaaacugcacacuaauagaugcucuauugggagacccccagugugauggcuuccaaaauaagaaaugggaccuuuuuguugaacgcagcaaagccuacagcaacuguuacccuuaugaugugccggauuaugccucccuuaggucacuaguugccucauccggcacacuggaguuuaacaaugaaagcuucaauuggacuggagucacucaaaauggaacaagcucugcuugcaaaaggagaucuaauaacaguuucuuuaguagauugaauugguugacucacuuaaaauucaaauacccagcauugaacgugacuaugccaaacaaugaaaaauuugacaaauuguacauuugggggguucaccacccggguacggacaaugaccaaaucuuccuguaugcucaagcaucaggaagaaucacagucucuaccaaaagaagccaacaaacuguaaucccgaauaucggaucuagacccagaguaaggaauauccccagcagaauaagcaucuauuggacaauaguaaaaccgggugacauacuuuugauuaacagcacagggaaucuaauugcuccuagggguuacuucaaaauacgaagugggaaaagcucaauaaugagaucagaugcacccauuggcaaaugcaauucugaaugcaucacuccaaauggaagcauucccaaugacaaaccauuucaaaauguaaacaggaucacauauggggccugucccagauauguuaagcaaaacacucugaaauuggcaacagggaugcgaaauguaccagagaaacaaacuagaggcauauuuggcgcaaucgcggguuucauagaaaaugguugggagggaaugguggaugguugguacgguuucaggcaucaaaauucugagggaauaggacaagcagcagaucucaaaagcacucaagcagcaaucaaucaaaucaaugggaagcugaauagguugaucgggaaaaccaacgagaaauuccaucagauugaaaaagaauucucagaaguagaggggagaauucaggaccucgagaaauauguugaggacacuaaaauagaucucuggucauacaacgcggagcuucuuguugcccuggagaaccaacauacaauugaucuaacugacucagaaaugaacaaacuguuugaaagaacaaagaagcaacugagggaaaaugcugaggauaugggcaaugguuguuucaaaauauaccacaaaugugacaaugccugcauaggaucaaucagaaauggaacuuaugaccaugauguauacagagaugaagcauuaaacaaccgguuccagaucaaaggcguugagcugaagucaggguacaaagauuggauccuauggauuuccuuugccauaucauguuuuuugcuuuguguugcuuuauugggguucaucaugugggccugccaaaaaggcaacauuaggugcaacauuugcauuuga

SEQ ID NO: 43210 - RNA, 1701 nt, Artificial Sequence
  derived and/or modified CDS sequence (wt) from hemagglutinin__InfluenzaA__AHL89222
augaagacuaucauugcuuugagcuacauucuaugucugguuuucgcucaaaaacuucccggaaaugacaacagcacggcaacgcugugccuugggcaccaugcaguaccaaacggaacgauagugaaaacaaucacgaaugaccaaauugaaguuacuaaugcuacugagcugguucagaguuccucaacaggugaaauaugcgacagcccucaucagauccuugauggagaaaacugcacacuaauagaugcucuauugggagacccucagugugauggcuuccaaaauaagaaaugggaccuuuuuguugaacgcagcaaagccuacagcaacuguuacccuuaugaugugccggauuaugccucccuuaggucacuaguugccucauccggcacacuggaguuuaacaaugaaagcuucaauuggacuggagucacucaaaauggaacaagcucugcuugcaaaaggagaucuaauaacaguuucuuuaguagauugaauugguugacccacuuaaaauucaaauacccagcauugaacgugacuaugccaaacaaugaaaaauuugacaaauuguacauuugggggguucaccacccggguacggacaaugaccaaaucuuccuguaugcucaagcaucaggaagaaucacagucucuaccaaaagaagccaacaaacuguaaucccgaauaucggaucuagacccagaguaaggaauauccccagcagaauaagcaucuauuggacaauaguaaaaccgggagacauacuuuugauuaacagcacagggaaucuaauugcuccuagggguuacuucaaaauacgaagugggaaaagcucaauaaugagaucagaugcacccauuggcaaaugcaauucugaaugcaucacuccaaauggaagcauucccaaugacaaaccauuucaaaauguaaacaggaucacauauggggccugucccagauauguuaagcaaaacacucugaaauuggcaacagggaugcgaaauguaccagagaaacaaacuagaggcauauuuggcgcaaucgcggguuucauagaaaaugguugggagggaaugguggaugguugguacgguuucaggcaucaaaauucugagggaauaggacaagcagcagaucucaaaagcacucaagcagcaaucaaucaaaucaaugggaagcugaauagguugaucgggaaaaccaacgagaaauuccaucagauugaaaaagaauucucagaaguagaggggagaauucaggaccucgagaaauauguugaggacacuaaaauagaucucuggucauacaacgcggagcuucuuguugcccuggagaaccaacauacaauugaucuaacugacucagaaaugaacaaacuguuugaaagaacaaagaagcaacugagggaaaaugcugaggauaugggcaaugguuguuucaaaauauaccacaaaugugacaaugccugcauaggaucaaucagaaauggaacuuaugaccaugauguauacagagaugaagcauuaaacaaccgguuccagaucaaagguguugagcugaagucaggauacaaagauuggauccuauggauuuccuuugccauaucauguuuuuugcuuuguguugcuuuguugggguucaucaugugggccugccaaaaaggcaacauuaggugcaacauuugcauuuga

SEQ ID NO: 43211 - RNA, 1701 nt, Artificial Sequence
  derived and/or modified CDS sequence (wt) from hemagglutinin__InfluenzaA__AHL89234
augaagacuaucauugcuuugagcuacauucuaugucugguuuucgcucaaaaacuucccggaaaugacaacagcacggcaacgcugugccuugggcaccaugcaguaccaaacggaacgauagugaaaacaaucacgaaugaccaaauugaaguuacuaaugcuacugagcugguucagaguuccucaacaggugaaauaugcgacaguccucaucagauccuugauggagaaaacugcacacuaauagaugcucuauugggagacccucagugugauggcuuccaaaauaagaaaugggaccuuuuuguugaacgcagcaaagccuacagcaacuguuacccuuaugaugugccggauuaugccucccuuaggucacuaguugccucauccggcacacuggaguuuaacaaugaaagcuucaauuggacuggagucacucaaaauggaacaagcucugcuugcaaaaggagaucuaauaacaguuucuuuaguagauugaauugguugacccacuuaaaauucaaauacccagcauugaacgugacuaugccaaacaaugaaaaauuugacaaauuguacauuugggggguucaccacccggguacggacaaugaccaaaucuuccuguaugcccaagcaucaggaagaaucacagucucuaccaaaagaagccaacaaacuguaaucccgaauaucggaucuagacccagaguaaggaauauccccagcagaauaagcaucuauuggacaauaguaaaaccgggagacauacuuuugauuaacagcacagggaaucuaauugcuccuagggguuacuucaaaauacgaagugggaaaagcucaauaaugagaucagaugcacccauuggcaaaugcaauucugaaugcaucacuccaaauggaagcauucccaaugacaagccauuucaaaauguaaacaggaucacauauggggccugucccagauauguuaagcaaaacacucugaaauuggcaacagggaugcgaaauguaccagagaaacaaaccagaggcauauuuggcgcaaucgcggguuucauagaaaaugguugggagggaaugguggaugguugguacgguuucaggcaucaaaauucugagggaaugggacaagcagcagaucucaaaagcacucaagcagcaaucaaucaaaucaaugggaagcugaauagguugaucgggaaaaccaacgagaaauuccaucagauugaaaaagaauucucagaaguagaagggagaauucaggaccucgagaaauauguugaggacacuaaaauagaucucuggucauacaacgcggagcuucuuguugcccuggagaaccaacauacaauugaucuaacugacucagaaaugaacaaacuguuugaaagaacaaagaagcaacugagggaaaaugcugaggauaugggcaaugguuguuucaaaauauaccacaaaugugacaaugccugcauaggaucaaucagaaauggaacuuaugaccaugauguauacagagaugaagcauuaaacaaccgguuccagaucaaaggcguugagcugaagucaggauacaaagauuggauccuauggauuuccuuugccauaucauguuuuuugcuuuguguugcuuuguugggguucaucaugugggccugccaaaaaggcaacauuaggugcaacauuugcauuuga

SEQ ID NO: 43212 - RNA, 1701 nt, Artificial Sequence
  derived and/or modified CDS sequence (wt) from hemagglutinin__InfluenzaA__AHL89246
augaagacuaucauugcuuugagcuacauucuaugucugguuuucgcucaaaaacuucccggaaaugacaacagcacggcaacgcugugccuugggcaccaugcaguaccaaacggaacgauagugaaaacaaucacgaaugaccaaauugaaguuacuaaugcuacugagcugguucagaguuccucaacaggugaaauaugcgacagcccucaucagauccuugauggagaaaacugcacacuaauagaugcucuauugggagacccucagugugauggcuuccaaaauaagaaaugggaccuuuuuguugaacgcagcaaagccuacagcaacuguuacccuuaugaugugccggauuaugccucccuuaggucacuaguugccucauccggcacacuggaguuuaacaaugaaagcuucaauuggacuggagucacucaaaauggaacaagcucugcuugcaaaaggagaucuaauaacaguuucuuuaguagauugaauugguugacccacuuaaaauucaaauacccagcauugaacgugacuaugccaaacaaugaaaaauuugacaaauuguacauuugggggguucaccacccggguacggacaaugaccaaaucuuccuguaugcucaagcaucaggaagaaucacagucucuaccaaaagaagccaacaaacuguaaucccgaauaucggaucuagacccagaguaaggaauauccccagcagaauaagcaucuauuggacaauaguaaaaccaggagacauacuuuugauuaacagcacagggaaucuaauugcuccuagggguuacuucaaaauacgaagugggaaaagcucaauaaugagaucagaugcacccauuggcaaaugcaauucugaaugcaucacuccaaauggaagcauucccaaugacaaaccauuucaaaauguaaacaggaucacauauggggccugucccagauauguuaagcaaaacacucugaaauuggcaacagggaugcgaaauguaccagagaaacaaacuagaggcauauuuggcgcaaucgcgggcuucauagaaaaugguugggagggaaugguggaugguugguacgguuucaggcaucaaaauucugagggaauaggacaagcagcagaucucaaaagcacucaagcagcaaucaaucaaaucaaugggaagcugaauagguugaucgggaaaaccaacgagaaauuccaucagauugaaaaagaauucucagaaguagaggggagaauucaggaccucgagaaauauguugaggacacuaaaauagaucucuggucauacaacgcggagcuucuuguugcccuggagaaccaacauacaauugaucuaacugacucagaaaugaacaaacuguuugaaagaacaaagaagcaacugagggaaaaugcugaggauaugggcaaugguuguuucaaaauauaccacaaauguggcaaugccugcauaggaucaaucagaaauggaacuuaugaccaugauguauacagagaugaagcauuaaacaaccgguuccagaucaaaggcguugagcugaagucaggauacaaagauuggauccuauggauuuccuuugccauaucauguuuuuugcuuuguguugcuuuguugggguucaucaugugggccugccaaaaaggcaacauuaggugcaacauuugcauuuga

SEQ ID NO: 43213 - RNA, 1701 nt, Artificial Sequence
  derived and/or modified CDS sequence (wt) from hemagglutinin__InfluenzaA__AHL89258
augaagacuaucauugcuuugagcuacauucuaugucugguuuucgcucaaaaacuucccggaaaugacaacagcacggcaacgcugugccuugggcaccaugcaguaccaaacggaacgauaguaaaaacaaucacgaaugaccaaauugaaguuacuaaugccacugagcugguucagaguuccucaacaggugaaauaugcgacaguccucaucagauccuugauggagaaaacugcacacuaauagaugcucuauugggagacccucagugugauggcuuccaaaauaagaaaugggaccuuuuuguugaacgcagcaaagccuacagcaacuguuacccuuaugaugugccggauuaugccucccuuaggucacuaguugccucauccggcacacuggaguuuaacaaugaaagcuucaauuggacuggagucacucaaaauggaacaagcucugcuugcaaaaggagaucuaauaacaguuucuuuaguagauugaauugguugacccacuuaaaauucaaauaccaagcauugaacgugacuaugccaaacaaugaaaaauuugacaaauuauacauuugggggguucaccacccggguacggacaaugaccaaaucuuccuguaugcucaagcaucaggaagaaucacagucucuaccaaaagaagccaacaaacuguaaucccgaauaucggaucuagaccuagaguaaggaauauccccagcagaauaagcaucuauuggacaauaguaaaaccgggagacauacuuuugauuaacagcacagggaaucuaauugcuccuagggguuacuucaaaauacgaagugggaaaagcucaauaaugagaucagaugcacccauuggcaaaugcaauucugaaugcaucacuccaaauggaagcauucccaaugacaaaccauuucaaaauguaaacagaaucacauauggggccugucccagauauguuaagcaaaacacucugaaauuggcaacagggaugagaaauguaccagagaaacaaacuagaggcauauuuggcgcaaucgcggguuucauagaaaaugguugggagggaaugguggaugguugguacgguuucaggcaucaaaauucugagggaauaggacaagcagcagaucucaaaagcacucaagcagcaaucaaucaaaucaaugggaagcugaauagguugaucgggaaaaccaacgagaaauuccaucagauugaaaaagaauucucagaaguagaagggagaauucaggaccucgagaaauauguugaggacacuaaaauagaucucuggucauacaacgcggagcuucuuguugcccuggagaaccaacauacaauugaucuaacugacucagaaaugaacaaacuguuugaaagaacaaagaagcaacugagggaaaaugcugaggauaugggcaaugguuguuucaaaauauaccacaaaugugacaaugccugcauaggaucaaucagaaauggaacuuaugaccaugauguauacagagaugaagcauuaaacaaccgguuccagaucaaaggcguugagcugaagucaggauacaaagauuggauccuauggauuuccuuugccauaucauguuuuuugcuuuguguuguuuuguugggguucaucaugugggccugccaaaaaggcaacauuaggugcaacauuugcauuuga

SEQ ID NO: 43214 - RNA, 1701 nt, Artificial Sequence
  derived and/or modified CDS sequence (wt) from hemagglutinin__InfluenzaA__AHL89270
augaagacuaucauugcuuugagcuacauucuaugucugguuuucgcucaaaaacuucccggaaaugacaacagcacggcaacgcugugccuugggcaccaugcaguaccaaacggaacgauagugaaaacaaucacgaaugaccaaauugaaguuacuaaugcuacugagcugguucagaguuccucaacaggugaaauaugcgacagcccucaucagauccuugauggagaaaacugcacacuaauagaugcucuauugggagacccucagugugauggcuuccaaaauaagaaaugggaccuuuuuguugaacgcagcaaagccuacagcaacuguuacccuuaugaugugccggauuaugccucccuuaggucacuaguugccucauccggcacacuggaguuuaacaaugaaagcuucaauuggacuggagucacucaaaauggaacaagcucugcuugcaaaaggagaucuaauaacaguuucuuuaguagauugaauugguugacccacuuaaaauucaaauacccagcauugaacgugacuaugccaaacaaugaaaaauuugacaaauuguacauuugggggguucaccacccggguacggacaaugaccaaaucuuccuguaugcucaagcaucaggaagaaucacagucucuaccaaaagaagccaacaaacuguaaucccgaauaucggaucuagacccagaguaaggaauauccccagcagaauaagcaucuauuggacaauaguaaaaccaggagacauacuuuugauuaacagcacagggaaucuaauugcuccuagggguuacuucaaaauacgaagugggaaaagcucaauaaugagaucagaugcacccauuggcaaaugcaauucugaaugcaucacuccaaauggaagcauucccaaugacaaaccauuucaaaauguaaacaggaucacauauggggccugucccagauauguuaagcaaaacacucugaaauuggcaacagggaugcgaaauguaccagagaaacaaacuagaggcauauuuggcgcaaucgcgggcuucauagaaaaugguugggagggaaugguggaugguugguacgguuucaggcaucaaaauucugagggaauaggacaagcagcagaucucaaaagcacucaagcagcaaucaaucaaaucaaugggaagcugaauagguugaucgggaaaaccaacgagaaauuccaucagauugaaaaagaauucucagaaguagaggggagaauucaggaccucgagaaauauguugaggacacuaaaauagaucucuggucauacaacgcggagcuucuuguugcccuggagaaccaacauacaauugaucuaacugacucagaaaugaacaaacuguuugaaagaacaaagaagcaacugagggaaaaugcugaggauaugggcaaugguuguuucaaaauauaccacaaaugugacaaugccugcauaggaucaaucagaaauggaacuuaugaccaugauguauacagagaugaagcauuaaacaaccgguuccagaucaaaggcguugagcugaagucaggauacaaagauuggauccuauggauuuccuuugccauaucauguuuuuugcuuuguguugcuuuguugggguucaucaugugggccugccaaaaaggcaacauuaggugcaacauuugcauuuga

SEQ ID NO: 43215 - RNA, 1701 nt, Artificial Sequence; identical to SEQ ID NO: 43214
  derived and/or modified CDS sequence (wt) from hemagglutinin__InfluenzaA__AHL89282

SEQ ID NO: 43216 - RNA, 1701 nt, Artificial Sequence; identical to SEQ ID NO: 43214
  derived and/or modified CDS sequence (wt) from hemagglutinin__InfluenzaA__AHL89294

SEQ ID NO: 43217 - RNA, 1701 nt, Artificial Sequence; identical to SEQ ID NO: 43214
  derived and/or modified CDS sequence (wt) from hemagglutinin__InfluenzaA__AHL89306

SEQ ID NO: 43218 - RNA, 1701 nt, Artificial Sequence
  derived and/or modified CDS sequence (wt) from hemagglutinin__InfluenzaA__AHL89318
augaagacuaucauugcuuugagcuacauucuaugucugguuuucgcucaaaaacuucccggaaaugacaacagcacggcaacgcugugccuugggcaccaugcaguaccaaacggaacgauagugaaaacaaucacgaaugaccaaauugaaguuacuaaugcuacugaacugguucagaguuccucaacaggugaaauaugcgacaguccucaucagauccuugauggagaaaacugcacacuaauagaugcucuauugggagacccucagugugauggcuuccaaaauaagaaaugggaccuuuuuguugaacgcagcaaagccuacagcaacuguuacccuuaugaugugccggauuaugccucccuuaggucacuaguugccucauccggcacacuggaguuuaacaaugaaagcuucaauuggacuggagucacucaaaauggaacaagcucugcuugcaaaaggagaucuaauaacaguuucuuuaguagacugaauugguugacccacuuaaaauucaaauacccagcauugaacgugacuaugccaaacaaugaaaaauuugacaaauuguacauuugggggguucaccacccggguacggacaaugaccaaaucuuccuguaugcucaagcaucaggaagaaucacagucucuaccaaaagaagccaacaaacuguaaucccgaauaucggaucuagaccuagaguaaggaauauccccagcagaauaagcaucuauuggacaauaguaaaaccgggagacauacuuuugauuaacagcacagggaaucuaauugcuccuagggguuacuucaaaauacgaagugggaaaagcucaauaaugagaucagaugcacccauuggcaaaugcaauucugaaugcaucacuccaaaugguagcauucccaaugacaaaccauuucaaaauguaaacagaaucacauauggggccugucccagauauguuaagcaaaacacucugaaauuggcaacagggaugagaaauguaccagagaaacaaacuagaggcauauuuggcgcaaucgcggguuucauagaaaaugguugggagggaaugguggaugguugguacgguuucaggcaucaaaauucugagggaauaggacaagcagcagaucucaaaagcacucaagcagcaaucaaucaaaucaaugggaagcugaauagguugaucgggaaaaccaacgagaaauuccaucagauugaaaaagaauucucagaaguagaagggagaauucaggaccucgagaaauauguugaggacacuaaaauagaucucuggucauacaacgcggagcuucuuguugcccuggagaaccaacauacaauugaucuaacugacucagaaaugaacaaacuguuugaaagaacaaagaagcaacugagggaaaaugcugaggauaugggcaaugguuguuucaaaauauaccacaaaugugacaaugccugcauaggaucaaucagaaauggaacuuaugaccaugauguauacagagaugaagcauuaaacaaccgguuccagaucaagggcguugagcugaagucaggauacaaagauuggauccuauggauuuccuuugccauaucauguuuuuugcuuuguguuguuuuguugggguucaucaugugggccugccaaaaaggcaacauuaggugcaacauuugcauuuga

SEQ ID NO: 43219 - RNA, 1701 nt, Artificial Sequence
  derived and/or modified CDS sequence (wt) from hemagglutinin__InfluenzaA__AHL89330
augaagacuaucauugcuuugagcuacauucuaugucugguuuucgcucaaaaacuucccggaaaugacaacagcacggcaacgcugugccuugggcaccaugcaguaccaaacggaacgauagugaaaacaaucacgaaugaccaaauugaaguuacuaaugcuacugagcugguucagaguuccucaacaggugaaauaugcgacagcccucaucagauccuugauggaaaaaacugcacacuaauagaugcucuauugggagacccucagugugauggcuuccaaaauaagaaaugggaccuuuuuguugaacgcagcaaagccuacagcaacuguuacccuuaugaugugccggauuaugccucccuuaggucacuaguugccucauccggcacacuggaguuuaacaaugaaagcuucaauuggacuggagucacucaaaauggaacaagcucugcuugcaaaaggagaucuaauaacaguuucuuuaguagauugaauugguugacccacuuaaaauucaaauacccagcauugaacgugacuaugccaaacaaugaaaaauuugacaaauuguacauuugggggguucaccacccggguacggacaaugaccaaaucuuccuguaugcucaagcaucaggaagaaucacagucucuaccaaaagaagccaacaaacuguaaucccgaauaucggaucuagacccagaguaaggaauauccccagcagaauaagcaucuauuggacaauaguaaaaccgggagacauacuuuugauuaacagcacagggaaucuaauugcuccuagggguuacuucaaaauacgaagugggaaaagcucaauaaugagaucagaugcacccauuggcaaaugcaauucugaaugcaucacuccaaauggaagcauucccaaugacaaaccauuucaaaauguaaacaggaucacauauggggccugucccagauauguuaagcaaaacacucugaaauuggcaacagggaugcgaaauguaccagagaaacaaacuagaggcauauuuggcgcaaucgcggguuucauagaaaaugguugggagggaaugguggaugguugguacgguuucaggcaucaaaauucugagggaauaggacaagcagcagaucucaaaagcacucaagcagcaaucaaucaaaucaaugggaagcugaauagguugaucgggaaaaccaacgagaaauuccaucagauugaaaaagaauucucagaaguagaggggagaauucaggaccucgagaaauauguugaggacacuaaaauagaucucuggucauacaacgcggagcuucuuguugcccuggagaaccaacauacaauugaucuaacugacucagaaaugaacaaacuguuugaaagaacaaagaagcaacugagggaaaaugcugaggauaugggcaaugguuguuucaaaauauaccacaaaugugacaaugccugcauaggaucaaucagaaauggaacuuaugaccaugauguauacagagaugaagcauuaaacaaccgguuccagaucaaaggcguugagcugaagucaggauacaaagauuggauccuauggauuuccuuugccauaucauguuuuuugcuuuguguugcuuuguugggguucaucaugugggccugccaaaaaggcaacauuaggugcaacauuugcauuuga

SEQ ID NO: 43220 - RNA, 1701 nt, Artificial Sequence; identical to SEQ ID NO: 32647
  derived and/or modified CDS sequence (wt) from hemagglutinin__InfluenzaA__AHL89342

SEQ ID NO: 43221 - RNA, 1701 nt, Artificial Sequence; identical to SEQ ID NO: 33573
  derived and/or modified CDS sequence (wt) from hemagglutinin__InfluenzaA__AHL89354

SEQ ID NO: 43222 - RNA, 1701 nt, Artificial Sequence
  derived and/or modified CDS sequence (wt) from hemagglutinin__InfluenzaA__AHL89366
augaagacuaucauugcuuugagcuacauucuaugucugguuuucgcucaaaaacuucccggaaaugacaacagcacggcaacgcugugccuugggcaccaugcaguaccaaacggaacgauagugaaaacaaucacgaaugaccaaauugaaguuacuaaugcuacugagcugguucagaguuccucaacaggugaaauaugcgacaguccucaucagauccuugauggagaaaacugcacacuaauagaugcucuauugggagacccucagugugauggcuuccaaaauaagaaaugggaccuuuuuguugaacgcagcaaagccuacaguaacuguuacccuuaugaugugccggauuaugccucccuuaggucacuaguugccucauccggcacacuggaguuuaacaaugaaagcuucaauuggacuggagucacucaaaauggaacaagcucugcuugcaaaaggagaucuaauaacaguuucuuuaguagacugaauugguugacccacuuaaaauucaaauacccagcauugaacgugacuaugccaaacaaugaaaaauuugacaaauuguacauuugggggguucaccacccggguacggacaaugaccaaaucuuccuguaugcucaagcaucaggaagaaucacagucucuaccaaaagaagccaacaaacuguaaucccgaauaucggaucuagaccuagaguaaggaauauccccagcagaauaagcaucuauuggacaauaguaaaaccgggagacauacuuuugauuaacagcacagggaaucuaauugcuccuagggguuacuucaaaauacgaagugggaaaagcucaauaaugaaaucagaugcacccauuggcaaaugcaauucugaaugcaucacuccaaaugguagcauucccaaugacaaaccauuucaaaauguaaacagaaucacauauggggccugucccagauauguuaagcaaaacacucugaaauuggcaacagggaugagaaauguaccagagaaacaaacuagaggcauauuuggcgcaaucgcggguuucauagaaaaugguugggagggaaugguggaugguugguacgguuucaggcaucaaaauucugagggaauaggacaagcagcagaucucaaaagcacucaagcagcaaucaaucaaaucaaugggaagcugaauagguugaucgggaaaaccaacgagaaauuccaucagauugaaaaagaauucucagaaguagaagggagaauucaggaccucgagaaauauguugaggacacuaaaauagaucucuggucauacaacgcggagcuucuuguugcccuggagaaccaacauacaauugaucuaacugacucagaaaugaacaaacuguuugaaagaacaaagaagcaacugagggaaaaugcugaggauaugggcaaugguuguuucaaaauauaccacaaaugugacaaugccugcauaggaucaaucagaaauggaacuuaugaccaugauguauacagagaugaagcauuaaacaaccgguuccagaucaagggcauugagcugaagucaggauacaaagauuggauccuauggauuuccuuugccauaucauguuuuuugcuuuguguuguuuuguugggguucaucaugugggccugccaaaaaggcaauauuaggugcaacauuugcauuuga

SEQ ID NO: 43223 - RNA, 1701 nt, Artificial Sequence
  derived and/or modified CDS sequence (wt) from hemagglutinin__InfluenzaA__AHL89378
augaagacuaucauugcuuugagcuacauucuaugucugguuuucgcucaaaaacuucccggaaaugacaacagcacggcaacgcugugccuugggcaccaugcaguaccaaacggaacgauagugaaaacaaucacgaaugaccaaauugaaguuacuaaugcuacugagcugguucagaguuccucaacaggugaaauaugcgacagcccucaucagauccuugauggagaaaacugcacacuaauagaugcucuauugggagacccucagugugauggcuuccaaaauaagaaaugggaccuuuuuguugaacgcagcaaagccuacagcaacuguuacccuuaugaugugccggauuaugccucccuuaggucacuaguugccucauccggcacacuggaguuuaacaaugaaagcuucaauuggacuggagucacucaaaauggaacaagcucugcuugcaaaaggagaucuaauaacaguuucuuuaguagauugaauugguugacccacuuaaaauucaaauacccagcauugaacgugacuaugccaaacaaugaaaaauuugacaaauuguacauuugggggguucaccacccggguacggacaaugaccaaaucuuccuguaugcucaagcaucaggaagaaucacagucucuaccaaaagaagccaacaaacuguaaucccgaauaucggaucuagacccagaguaaggaauauccccagcagaauaagcaucuauuggacaauaguaaaaccgggagacauacuuuugauuaacagcacagggaaucuaauugcuccuagggguuacuucaaaauacgaagugggaaaagcucaauaaugagaucagaugcacccauuggcaaaugcaauucugaaugcaucacuccaaauggaagcauucccaaugacaaaccauuucaaaauguaaacaggaucacauauggggccugucccagauauguuaagcaaaacacucugaaauuggcaacagggaugcgaaauguaccagagaaacaaacuagaggcauauuuggcgcaaucgcgggcuucauagaaaaugguugggagggaaugguggaugguugguacgguuucaggcaucaaaauucugagggaauaggacaagcagcagaucucaaaagcacucaagcagcaaucaaucaaaucaaugggaagcugaauagguugaucgggaaaaccaacgagaaauuccaucagauugaaaaagaauucucagaaguagaggggagaauucaggaccucgagaaauauguugaggacacuaaaauagaucucuggucauacaacgcggagcuucuuguugcccuggagaaccaacauacaauugaucuaacugacucagaaaugaacaaacuguuugaaagaacaaagaagcaacugagggaaaaugcugaggauaugggcaaugguuguuucaaaauauaccacaaaugugacaaugccugcauaggaucaaucagaaauggaacuuaugaccaugauguauacagagaugaagcauuaaacaaccgguuccagaucaaaggcguugagcugaagucaggauacaaagauuggauccuauggauuuccuuugccauaucauguuuuuugcuuuguguugcuuuguugggguucaucaugugggccugccaaaaaggcaacauuaggugcaacauuugcauuuga

SEQ ID NO: 43224 - RNA, 1701 nt, Artificial Sequence
  derived and/or modified CDS sequence (wt) from hemagglutinin__InfluenzaA__AHL89390
augaagacuaucauugcuuugagcuacauucuaugucugguuuucgcucaaaaacuucccggaaaugacaacagcacggcaacgcugugccuugggcaccaugcaguaccaaacggaacgauagugaaaacaaucacgaaugaccaaauugaaguuacuaaugcuacugagcugguucagaguuccucaacagguggaauaugcgacaguccucaucagauccuugauggagaaaacugcacacuaauagaugcucuauugggagacccucagugugauggcuuccaaaauaagaaaugggaccuuuuuguugaacgcagcaaagccuacagcaacuguuacccuuaugaugugccggauuaugccucccuuaggucacuaguugccucauccggcacacuggaguuuaacaaugaaagcuucaauuggacuggagucacucaaaacggaacaagcucugcuugcaaaaggagaucuaauaacaguuucuuuaguagauugaauugguugacccacuuaaaauucaaauacccagcauugaacgugacuaugccaaacaaugaaaaauuugacaaauuguacauuugggggguucaccacccggguacggacaaugaccaaaucuuccuguaugcucaagcaucaggaagaaucacagucucuaccaaaagaagccaacaaacuguaaucccgaauaucgggucuagacccagaguaaggaauauccccagcagaauaagcaucuauuggacaauaguaaaaccgggagacauacuuuugauuaacagcacagggaaucuaauugcuccuagggguuacuucaaaauacgaagugggaaaagcucaauaaugagaucagaugcacccauuggcaaaugcaauucugaaugcaucacuccaaauggaagcauucccaaugacaaaccauuucaaaauguaaacaggaucacauacggggccugucccagauauguuaagcaaaacacucugaaauuggcaacagggaugcgaaauguaccagagaaacaaacuagaggcauauuuggcgcaaucgcggguuucauagaaaaugguugggagggaaugguggaugguugguacgguuucaggcaucaaaauucugagggaauaggacaagcagcagaucucaaaagcacucaagcagcaaucgaucaaaucaaugggaagcugaauagguugaucgggaaaaccaacgagaaauuccaucagauugaaaaagaauucucagaaguagaagggagaauucaggaccucgagaaauauguugaggacacuaaaauagaucucuggucauacaacgcggagcuucuuguugcccuggagaaccaacauacaauugaucuaacugacucagaaaugaacaaacuguuugaaaaaacaaagaagcaacugagggaaaaugcugaggauaugggcaaugguuguuucaaaauauaccacaaaugugacaaugccugcauaggaucaaucagaaauggaacuuaugaccaugauguauacagagaugaagcauuaaacaaccgguuccagaucaagggcguugagcugaagucaggauacaaagauuggauccuauggauuuccuuugccauaucauguuuuuugcuuuguguugcuuuguugggguucaucaugugggccugccaaaaaggcaacauuaggugcaacauuugcauuuga

SEQ ID NO: 43225 - RNA, 1701 nt, Artificial Sequence; identical to SEQ ID NO: 43214
  derived and/or modified CDS sequence (wt) from hemagglutinin__InfluenzaA__AHL89402

SEQ ID NO: 43226 - RNA, 1701 nt, Artificial Sequence
  derived and/or modified CDS sequence (wt) from hemagglutinin__InfluenzaA__AHL89414
augaagacuaucauugcuuugagcuacauucuaugucugguuuucgcucaaaaacuucccggaaaugacaacagcacggcaacgcugugccuugggcaccaugcaguaccaaacggaacgauagugaaaacaaucacgaaugaccaaauugaaguuacuaaugcuacugagcugguucagaguuccucaacaggugaaauaugcgacaguccucaucagauccuggauggagaaaacugcacacuaauagaugcucuauugggagacccucagugugauggcuuccaaaauaagaaaugggaccuuuuuguugaacgcagcaaagccuacagcaacuguuacccuuaugaugugccggauuaugccucccuuaggucacuaguugccucauccggcacacuggaguuuaacaaugaaagcuucaauuggacuggagucacucaaaauggaacaagcucugcuugcaaaaggagaucuaauaacaguuucuuuaguagacugaauugguugacccacuuaaaauucaaauacccagcauugaacgugacuaugccaaacaaugaaaaauuugacaaauuguacauuugggggguucaccacccggguacggacaaugaccaaaucuucuuguaugcucaagcaucaggaagaaucacagucucuaccaaaagaagccaacaaacuguaaucccgaauaucggauccagaccuagaguaaggaauauccccagcagaauaagcaucuauuggacaauaguaaaaccgggagacauacuuuugauuaacagcacagggaaucuaauugcuccuagggguuacuucaaaauacgaagugggaaaagcucaauaaugagaucagaugcacccauuggcaaaugcaauucugaaugcaucacuccaaauggaagcauucccaaugacaaaccauuucaaaauguaaacagaaucacauauggggccugucccagauauguuaagcaaaacacucugaaauuggcaacagggaugagaaauguaccagagaaacaaacuagaggcauauuuggcgcaaucgcggguuucauagaaaaugguugggagggaaugguggaugguugguacgguuucaggcaucaaaauucugagggaauaggacaagcagcagaucucaaaagcacucaagcagcaaucaaucaaaucaaugggaagcugaauagguugaucgggaaaaccaacgagaaauuccaucagauugaaaaagaauucucagaaguagaagggagaauucaggaccucgagaaauauguugaggacacuaaaauagaucucuggucauacaacgcggagcuucuuguugcccuggagaaccaacauacaauugaucuaacugacucagaaaugaacaaacuguuugaaagaacaaagaagcaacugagggaaaaugcugaggauaugggcaaugguuguuucaaaauauaccacaaaugugacaaugccugcauaggaucaaucagaaauggaacuuaugaccaugauguauacagagaugaagcauuaaacaaccgguuccagaucaaaggcguugagcugaagucaggauacaaagauuggauccuauggauuuccuuugccauaucauguuuuuugcuuuguguuguuuuguugggguucaucaugugggccugccaaaaaggcaacauuaggugcaacauuugcauuuga

SEQ ID NO: 43227 - RNA, 1701 nt, Artificial Sequence
  derived and/or modified CDS sequence (wt) from hemagglutinin__InfluenzaA__AHL89426
augaagacuaucauugcuuugagcuacauucuaugucugguuuucgcucaaaaacuucccggaaaugacaacagcacggcaacgcugugccuugggcaccaugcaguaccaaacggaacgauagugaaaacaaucacgaaugaccaaauugaaguuacuaaugcuacugagcugguucagaguuccucaacaggugaaauaugcgacaguccucaucagauccuugauggagaaaacugcacacuaauagaugcucuauugggagacccucagugugauggcuuccaaaauaagaaaugggaccuuuuuguugaacgcagcaaagccuacagcaacuguuacccuuaugaugugccggauuaugccucccuuaggucacuaguugccucauccggcacacuggaguuuaacaaugaaagcuucaauuggacuggagucacucaaaauggaacaagcucugcuugcaaaaggagaucuaauaacaguuucuuuaguagacugaauugguugacccacuuaaaauucaaauacccagcauugaacgugacuaugccaaacaaugaaaaauuugacaaauuguacauuugggggguucaccacccggguacggacaaugaccaaaucuuccuguaugcucaagcaucaggaagaaucacagucucuaccaaaagaagccaacaaacuguaaucccgaauaucggaucuagaccuagaguaaggaauauccccagcagaauaagcaucuauuggacaauaguaaaaccgggagacauacuuuuuauuaacagcacagggaaucuaauugcuccuagggguuacuucaaaauacgaagugggaaaagcucaauaaugagaucagaugcacccauuggcaaaugcaauucugaaugcaucacuccaaaugguagcauucccaaugacaaaccauuucaaaauguaaacagaaucacauauggggccugucccagauauguuaagcaaaacacucugaaauuggcaacagggaugagaaauguaccagagaaacaaacuagaggcauauuuggcgcaaucgcggguuucauagaaaaugguugggagggaaugguggaugguugguacgguuucaggcaucaaaauucugagggaauaggacaagcagcagaucucaaaagcacucaagcagcaaucaaucaaaucaaugggaagcugaauagguugaucgggaaaaccaacgagaaauuccaucagauugaaaaagaauucucagaaguagaagggagaauucaggaccucgagaaauauguugaggacacuaaaauagaucucuggucauacaacgcggagcuucuuguugcccuggagaaccaacauacaauugaucuaacugacucagaaaugaacaaacuguuugaaagaacaaagaagcaacugagggaaaaugcugaggauaugggcaaugguuguuucaaaauauaccacaaaugugacaaugccugcauaggaucaaucagaaauggaacuuaugaccaugauguauacagagaugaagcauuaaacaaccgguuccagaucaagggcguugagcugaagucaggauacaaagauuggauccuauggauuuccuuugccauaucauguuuuuugcuuuguguuguuuuguugggguucaucaugugggccugccaaaaaggcaacauuaggugcaacauuugcauuuga

SEQ ID NO: 43228 - RNA, 1701 nt, Artificial Sequence
  derived and/or modified CDS sequence (wt) from hemagglutinin__InfluenzaA__AHL89438
augaagacuaucauugcuuugagcuacauucuaugucugguuuucgcucaaaaacuucccggaaaugacaacagcacggcaacgcugugccuugggcaccaugcaguaccaaacggaacgauagugaaaacaaucacgaaugaccaaauugaaguuacuaaugcuacugagcugguucagaguuccucaacaggugaaauaugcgacaguccucaucagauccuugauggagaaaacugcacacuaauagaugcuuuauugggagacccucagugugauggcuuccaaaauaagaaaugggaccuuuuuguugaacgcagcaaagccuacagcaacuguuacccuuaugaugugccggauuaugccucccuuaggucacuaguugccucauccggcacacuggaguuuaacaaugaaagcuucaauuggacuggagucacucaaaauggaacaagcucugcuugcaaaaggagaucuaauaacaguuucuuuaguagauugaauugguugacccacuuaaaauucaaauacccagcauugaacgugacuaugccaaacaaugaaaaauuugacaaauuguacauuugggggguucaccacccggguacggacaaugaccaaaucuuccuguaugcucaagcaucaggaagaaucacagucucuaccaaaagaagccaacaaacuguaaucccgaauaucggaucuagacccagaguaaggaauauccccagcagaauaagcaucuauuggacaauaguaaaaccgggagacauacuuuugauuaacagcacagggaaucuaaucgcuccuagggguuacuucaaaauacgaagugggaaaagcucaauaaugagaucagaugcacccaucggcaaaugcaauucugaaugcaucacuccaaauggaagcauucccaaugacaaaccauuucaaaauguaaacagaaucacauauggggccuguccccgauauguuaaacaaaacacucugaaauuggcaacagggaugagaaauguaccagagaaacaaacuagaggcauauuuggcgcaaucgcggguuucauagaaaaugguugggagggaaugguggaugguugguacgguuucaggcaucaaaauucugagggaauaggacaagcagcagaucucaaaaguacucaagcagcaaucaaucaaaucaaugggaagcugaauagguugaucgggaaaaccaacgagaaauuccaucagauugaaaaagaauucucagaaguagaagggagaauccaggaccucgagaaauauguugaggacacuaaaauagaucucuggucauacaacgcggagcuucuuguugcccuggagaaccaacauacaauugaucuaacugacucagaaaugaacaaacuauuugaaagaacaaagaagcaacugagggaaaaugcugaggauaugggcaaugguuguuucaaaauauaccacaaaugugacaaugccugcauaggaucaaucagaaauggaacuuaugaccaugauguauacagagaugaagcauuaaacaaccgguuccagaucaaaggcguugagcugaagucaggauacaaagauuggauccuauggauuuccuuugccauaucauguuuuuugcuuuguguugcuuuguugggguucaucaugugggccugccaaaaaggcaacauuaggugcaacauuugcauuuga

SEQ ID NO: 43229 - RNA, 1701 nt, Artificial Sequence; identical to SEQ ID NO: 43228
  derived and/or modified CDS sequence (wt) from hemagglutinin__InfluenzaA__AHL89450

SEQ ID NO: 43230 - RNA, 1701 nt, Artificial Sequence
  derived and/or modified CDS sequence (wt) from hemagglutinin__InfluenzaA__AHL89462
augaagacuaucauugcuuugagcuacauucuaugucugguuuucgcucaaaaacuucccggaaaugacaacagcacggcaacgcugugccuugggcaccaugcaguaccaaacggaacgauagugaaaacaaucacgaaugaccaaauugaaguuacuaaugcuacugagcugguucagaguuccucaacaggugaaauaugcgacagcccucaucagauccuugauggagaaaacugcacacuaauagaugcucuauugggagacccucagugugauggcuuccaaaauaagaaaugggaccuuuuuguugaacgcagcaaagccuacagcaacuguuacccuuaugaugugccggauuaugccucccuuaggucacuaguugccucauccggcacacuggaguuuaacaaugaaagcuucaauuggacuggagucacucaaaauggaacaagcucugcuugcaaaaggagaucuaauaacaguuucuuuaguagauugaauugguugacccacuuaaaauucaaauacccagcauugaacgugacuaugccaaacaaugaaaaauuugacaaauuguacauuugggggguucaccacccggguacggacaaugaccaaaucuuccuguaugcucaagcaucaggaagaaucacagucucuaccaaaagaagccaacaaacuguaaucccgaauaucggaucuagacccagaguaaggaauauccccagcagaauaagcaucuauuggacaauaguaaaaccgggagacauacuuuugauuaacagcacagggaaucuaauugcuccuagggguuacuucaaaauacgaagugggaaaagcucaauaaugagaucagaugcacccauuggcaaaugcaauucugaaugcaucacuccaaauggaagcauucccaaugacaaaccauuucaaaauguaaacaggaucacauauggggccugucccagauauguuaagcaaaacacucugaaauuggcaacagggaugcgaaauguaccagagaaacaaacuagaggcauauuuggcgcaaucgcggguuucauagaaaaugguugggagggaaugguggaugguugguacgguuucaggcaucaaaauucugagggaauaggacaagcagcagaucucaaaagcacucaagcagcaaucaaucaaaucaaugggaagcugaauagguugaucgggaaaaccaacgagaaauuccaucagauugaaaaagaauucucagaaguagaggggagaauucaggaccucgagaaauauguugaggacacuaaaauagaucucuggucauacaacgcggagcuucuuguugcccuggagaaccaacauacaauugaucuaacugacucagaaaugaacaaacuguuugaaagaacaaagaagcaacugagggaaaaugcugaggauaugggcaaugguuguuucaaaauauaccacaaaugugacaaugccugcauaggaucaaucagaaauggaacuuaugaccaugauguauacagagaugaagcauuaaacaaccgguuccagaucaaaggcguugagcugaagucaggauacaaagauuggauccuauggauuuccuuugccauaucauguuuuuugcuuuguguugcuuuguugggguucaucaugugggccugccaaaaaggcaacauuaggugcaacauuugcauuuga

SEQ ID NO: 43231 - RNA, 1701 nt, Artificial Sequence
  derived and/or modified CDS sequence (wt) from hemagglutinin__InfluenzaA__AHL89474
augaagacuaucauugcuuugagcuacauucuaugucugguuuucgcucaaaaacuucccggaaaugacaacagcacggcaacgcugugccuugggcaccaugcaguaccaaacggaacgauagugaaaacaaucacgaaugaccaaauugaaguuacuaaugcuacugagcugguucagaguuccucaacaggugaaauaugcgacagcccucaucagauccuugauggagaaaacugcacacuaauagaugcucuauugggagacccucagugugauggcuuccaaaauaagaaaugggaccuuuuuguugaacgcagcaaagccuacagcaacuguuacccuuaugauguaccggauuaugccucccuuaggucacuaguugccucauccggcacacuggaguuuaacaaugaaagcuucaauuggacuggagucacucaaaauggaacaagcucugcuugcaaaaggagaucuaauaacaguuucuuuaguagauugaauugguugacccacuuaaaauucaaauacccagcauugaacgugacuaugccaaacaaugaaaaauuugacaaauuguacauuugggggguucaccacccggguacggacaaugaccaaaucuuccuguaugcucaagcaucaggaagaaucacagucucuaccaaaagaagccaacaaacuguaaucccgaauaucggaucuagacccagaguaaggaauauccccagcagaauaagcaucuauuggacaauaguaaaaccgggagacauacuuuugauuaacagcacagggaaucuaauugcuccuagggguuacuucaaaauacgaagugggaaaagcucaauaaugagaucagaugcacccauuggcaaaugcaauucugaaugcaucacuccaaauggaagcauucccaaugacaaaccauuucaaaauguaaacaggaucacauauggggccugucccagauauguuaagcaaaacacucugaaauuggcaacagggaugcgaaauguaccagagaaacaaacuagaggcauauuuggcgcaaucgcgggcuucauagaaaaugguugggagggaaugguggaugguugguacgguuucaggcaucaaaauucugagggaauaggacaagcagcagaucucaaaagcacucaagcagcaaucaaucaaaucaaugggaagcugaauagguugaucgggaaaaccaacgagaaauuccaucagauugaaaaagaauucucagaaguagaggggagaauucaggaccucgagaaauauguugaggacacuaaaauagaucucuggucauacaacgcggagcuucuuguugcccuggagaaccaacauacaauugaucuaacugacucagaaaugaacaaacuguuugaaagaacaaagaagcaacugagggaaaaugcugaggauaugggcaaugguuguuucaaaauauaccacaaaugugacaaugccugcauaggaucaaucagaaauggaacuuaugaccaugauguauacagagaugaagcauuaaacaaccgguuccagaucaaaggcguugagcugaagucaggauacaaagauuggauccuauggauuuccuuugccauaucauguuuuuugcuuuguguugcuuuguugggguucaucaugugggccugccaaaaaggcaacauuaggugcaacauuugcauuuga

SEQ ID NO: 43232 - RNA, 1701 nt, Artificial Sequence; identical to SEQ ID NO: 43224
  derived and/or modified CDS sequence (wt) from hemagglutinin__InfluenzaA__AHL89486

SEQ ID NO: 43233 - RNA, 1701 nt, Artificial Sequence
  derived and/or modified CDS sequence (wt) from hemagglutinin__InfluenzaA__AHL89498
augaagacuaucauugcuuugagcuacauucuaugucugguuuuugcucaaaaacuucccggaaaugacaacagcacggcaacgcugugccuugggcaccaugcaguaccaaacggaacgauagugaaaacaaucacgaaugaccaaauugaaguuacuaaugcuacugagcugguucagaguuccucaacaggugaaauaugcgacaguccucaucagauccuugauggagaaaacugcacacuaauagaugcucuauugggagacccucagugugauggcuuccaaaauaagaaaugggaccuuuuuguugaacgcagcaaagccuacagcaacuguuacccuuaugaugugccggauuaugccucccuuaggucacuaguugccucaucaggcacacuggaguuuaacaaugaaagcuucaauuggacuggagucacucaaaauggaacaagcucugcuugcaaaaggagaucuaauaacaguuucuuuaguagacugaauugguugacccacuuaaaauucaaauacccagcauugaacgugacuaugccaaacaaugaaaaauuugacaaauuguacauuugggggguucaccacccggguacggacaaugaccaaaucuuccuguaugcucaagcaucaggaagaaucacagucucuaccaaaagaagccaacaaacuguaaucccgaauaucggaucuagaccuagaguaaggaauauccccagcagaauaagcaucuauuggacaauaguaaaaccgggagacauacuuuugauuaacagcacagggaaucuaauugcuccuagggguuacuucaaaauacgaagugggaaaagcucaauaaugagaucagaugcacccauuggcaaaugcaauucugaaugcaucacuccaaaugguagcauucccaaugacaaaccauuucaaaauguaaacagaaucacauauggggccugucccagauauguuaagcaaaacacucugaaauuggcaacagggaugagaaauguaccagagaaacaaacuagaggcauauuuggcgcaaucgcggguuucauagaaaaugguugggagggaaugguggaugguugguacgguuucaggcaucaaaauucugagggaauaggacaagcagcagaucucaaaagcacucaagcagcaaucaaucaaaucaaugggaagcugaauagguugaucgggaaaaccaacgagaaauuccaucagauugaaaaagaauucucagaaguagaagggagaauucaggaccucgagaaauauguugaggacacuaaaauagaucucuggucauacaacgcggagcuucuuguugcccuggagaaccaacauacaauugaucuaacugacucagaaaugaacaaacuguuugaaagaacaaagaagcaacugagggaaaaugcugaggauaugggcaaugguuguuucaaaauauaccacaaaugugacaaugccugcauaggaucaaucagaaauggaacuuaugaccaugauguauacagagaugaagcauuaaacaaccgguuccagaucaagggcguugagcugaagucaggauacaaagauuggauccuauggauuuccuuugccauaucauguuuuuugcuuuguguuguuuuguugggguucaucaugugggccugccaaaaaggcaacauuaggugcaacauuugcauuuga

SEQ ID NO: 43234 - RNA, 1701 nt, Artificial Sequence; identical to SEQ ID NO: 43233
  derived and/or modified CDS sequence (wt) from hemagglutinin__InfluenzaA__AHL89510

SEQ ID NO: 43235 - RNA, 1701 nt, Artificial Sequence; identical to SEQ ID NO: 43233
  derived and/or modified CDS sequence (wt) from hemagglutinin__InfluenzaA__AHL89522

SEQ ID NO: 43236 - RNA, 1701 nt, Artificial Sequence
  derived and/or modified CDS sequence (wt) from hemagglutinin__InfluenzaA__AHL89534
augaagacuaucauugcuuugagcuacauucuaugucugguuuucgcucaaaaacuucccggaaaugacaacagcacggcaacgcugugccuugggcaccaugcaguaccaaacggaacgauagugaaaacaaucacgaaugaccaaauugaaguuacuaaugcuacugagcugguucagaguuccucaacaggugaaauaugcgacaguccucaucagauccuugauggagaaaacugcacacuaauagaugcucuauugggagacccucagugugauggcuuccaaaauaagaaaugggaccuuuuuguugaacgcagcaaagccuacagcaacuguuacccuuaugaugugccggauuaugccucccuuaggucacuaguugccucauccggcacacuggaguuuaacaaugaaagcuucaauuggacuggagucacucaaaauggaacaagcucugcuugcaaaaggagaucuaauaacaguuucuuuaguagacugaauugguugacccacuuaaaauucaaauacccagcauugaacgugacuaugccaaacaaugaaaaauuugacaaauuguacauuugggggguucaccacccggguacggacaaugaccaaaucuuccuguaugcucaagcaucaggaagaaucacagucucuaccaaaagaagccaacaaacuguaaucccgaauaucggaucuagaccuagaguaaggaauauccccagcagaauaagcaucuauuggacaauaguaaaaccgggagacauacuuuugauuaacagcacagggaaucuaauugcuccuagggguuacuucaaaauacgaagugggaaaagcucaauaaugagaucagaugcacccauuggcaaaugcaauucugaaugcaucacuccaaaugguagcauucccaaugacaaaccauuucaaaauguaaacagaaucacauauggggccugucccagauauguuaagcaaaacacucugaaauuggcaacagggaugagaaauguaccagagaaacaaacuagaggcauauuuggcgcaaucgcggguuucauagaaaaugguugggagggaaugguggaugguugguacgguuucaggcaucaaaauucugagggaauaggacaagcagcagaucucaaaagcacucaagcagcaaucaaucaaaucaaugggaagcugaauagguugaucgggaaaaccaacgagaaauuccaucagauugaaaaagaauucucagaaguagaagggagaauucaggaccucgagaaauauguugaggacacuaaaauagaucucuggucauacaacgcggagcuucuuguugcccuggagaaccaacauacaauugaucuaacugacucagaaaugaacaaacuguuugaaagaacaaagaagcaacugagggaaaaugcugaggauaugggcaaugguuguuucaaaauauaccacaaaugugacaaugccugcauaggaucaaucagaaauggaacuuaugaccaugauguauacagagaugaagcauuaaacaaccgguuccagaucaagggcauugagcugaagucaggauacaaagauuggauccuauggauuuccuuugccauaucauguuuuuugcuuuguguuguuuuguugggguucaucaugugggccugccaaaaaggcaacauuaggugcaacauuugcauuuga

SEQ ID NO: 43237 - RNA, 1698 nt, Artificial Sequence
  derived and/or modified CDS sequence (wt) from hemagglutinin__InfluenzaA__AHL89546
augaaaguaaaacuacugguucuguuauguacauuuacagcuacauaugcagacacaauauguauaggcuaccaugccaacaacucgaccgacacuguugacacaguacuugagaagaaugugacagugacacacucugucaaccuacuugaggacagucacaauggaaaacuaugucuacuaaaaggaauagccccacuacaauuggguaauugcagcguugccggauggaucuuaggaaacccagaaugcgaauuacugauuuccaaggaaucaugguccuacauuguagaaacaccaaauccugagaauggaacauguuacccaggguauuucgccgacuaugaggagcugagggagcaauugaguucaguaucuucauuugagagguucgaaauauuccccaaagagagcucauggcccaaccacaccguaaccggaguaucagcaucaugcucccauaacgggaaaagcaguuuuuacagaaauuuacuauggcugacggggaagaaugguuuguauccaaaucugagcaaguccuaugcaaacaacaaagagaaagaaguccuuguacugugggguguucaucacccgccuaacauaggggaccaaagggcccucuaucauacagaaagugcuuaugucucuguagugucuucacauuauagcagaagauucaccccagaaauagccaaaagacccaagguaagagaucaggaaggaagaaucaacuacuacuggacucugcuggagcccggggauacaauaauauuugaggcaaauggaaaucuaauagcgccaagguuugcuuucgcacugaguagaggcuuuggaucaggaaucaucaccucaaaugcaccaauggaugaaugugaugcgaagugucaaacaccucagggagcuauaaacagcagucuuccuuuccagaauguacacccagucacaauaggagaguguccaaaguaugucaggagugcaaaauuaagaaugguuacaggacuaaggaacaucccauccauucaauccagagguuuguuuggagccauugccgguuucauugaagggggguggacuggaaugguagaugguugguaugguuaucaccaucagaaugagcaaggaucuggguaugcugcagaucaaaaaagcacacaaaaugccauuaacgggauuacaaacaaggugaauucuguaauugagaaaaugaacacucaauucacagcugugggcaaagaauucaacaaauuggaaagaaggauggaaaacuuaaauaaaaaaguugaugauggguuucuagacauuuggacauauaacgcagaauuguugguucuacuggaaaaugaaaggacuuuggacuuccaugacuccaacgugaagaaucuguaugagaaaguaaaaagccaauuaaagaauaaugccaaagaaauaggaaacggguguuuugaauucuaucacaaguguaacgaugaaugcauggagagugugaaaaauggaacuuaugacuauccaaaauauuccgaagaaucaaaguugaacagggagagaauugauggagugaaauuggaaucaaugggagucuaucagauucuggcgaucuacucaacagucgccaguucccugguucuuuuggucucccugggggcaaucagcuucuggauguguuccaaugggucuuugcaguguagaauaugcaucuaa

SEQ ID NO: 43238 - RNA, 1698 nt, Artificial Sequence; identical to SEQ ID NO: 33973
  derived and/or modified CDS sequence (wt) from hemagglutinin__InfluenzaA__AHL89558

SEQ ID NO: 43239 - RNA, 1698 nt, Artificial Sequence
  derived and/or modified CDS sequence (wt) from hemagglutinin__InfluenzaA__AHL89570
augaaaguaaaacuacugguucuguuauguacauuuacagcuacauaugcagacacaauauguauaggcuaccaugccaacaacucgaccgacacuguugacacaguacuugagaagaaugugacagugacacacucugucaaccuacuugaggacagucacaauggaaaacuaugucuacuaaaaggaauagccccacuacaauuggguaauugcagcguugccggauggaucuuaggaaacccagaaugcgaauuacugauuuccaaggaaucaugguccuacauuguagagacaccaaauccugagaauggaacauguuacccaggguauuucgccgacuaugaggagcugagagagcaauugaguucaguaucuucauuugagagguucgaaauauuccccaaagagagcucauggcccaaccacaccguaaccggaguaucagcaucaugcucccauaacgggaaaagcaguuuuuacagaaauuugcuauggcugacggggaagaaugguuuguauccaaaccugagcaaguccuaugcaaacaacaaagagaaagaaguccuuguacugugggguguucaucacccgccuaacauaggggaccaaagggcccucuaucauacagaaaaugcuuaugucucuguagugucuucacauuauagcagaagauucaccccagaaauagccaaaagacccaaggugagagaucaggaaggaagaaucaacuacuacuggacucugcuugaacccggggauacaauaauauuugaggcaaauggaaaucuaauagcgccaagguuugcuuucgcacugaguagaggcuuuggaucaggaaucaucaccucaaaugcaccaauggaugaaugugaugcgaaaugucaaacaccucagggagcuauaaacagcagucuuccuuuccagaauguacacccagucacaauaggagaguguccaaaguaugucaggaguacaaaauuaagaaugguuacaggacuaaggaacaucccauccauucaauccagagguuuguuuggagccauugccgguuucauugaagggggguggacuggaaugguagaugguugguaugguuaucaccaucaaaaugagcaaggaucuggguaugcugcugaucaaaaaagcacacaaaaugccauuaacgggauuacaaacaaggugaauucuguaauugagaaaaugaacacucaauucacagcugugggcaaagaauucaacaaauuggaaagaaggauggaaaacuuaaauaaaaaaguugaugauggguuucuagacauuuggacauauaacgcagaauuguugguucuacuggaaaaugaaaggacuuuggacuuccaugacuccaacgugaagaaucuguaugagaaaguaaaaagccaauuaaagaauaaugccaaagaaauaggaaacggguguuuugaauucuaucacaaguguaacgaugaaugcauggagagugugaaaaauggaacuuaugacuauccaaaauauuccgaagaaucaaaguugaacagggagaaaauugauggagugaaauuggaaucaaugggagucuaucagauuuuggcgaucuacucaacagucgccaguucccugguucuuuuggucucccugggggcaaucagcuucuggauguguuccaaugggucuuugcaguguagaauaugcaucuaa

SEQ ID NO: 43240 - RNA, 1698 nt, Artificial Sequence
  derived and/or modified CDS sequence (wt) from hemagglutinin__InfluenzaA__AHL89582
augaaaguaaaacuacuuguucuguuauguacauuuacagcuacauaugcagacacaauauguauaggcuaccaugccaacaacucgaccgacacuguugacacaguacuugagaagaaugugacagugacacacucugucaaccuacuugaggacagucacaauggaaaacuaugucuacuaaaaggaauagccccacuacaauuggguaauugcagcguugccggauggaucuuaggaaacccagaaugcgaauuacugauuuccaaggaaucaugguccuacauuguagaaacaccaaauccugagaauggaacauguuacccaggauauuucgccgacuaugaggagcugagggagcaauugaguucaguaucuucauuugagagguucgaaauauuccccaaagagagcucauggcccaaccacaccguaaccggaguaucagcaucaugcucccauaacgggaaaagcaguuuuuacagaaauuugcuauggcugacggggaagaaugguuuguauccaaaccugagcaaguccuaugcaaacaacaaagagaaagaaguccuuguacugugggguguucaucacccgccuaacauaggggaccaaagggcccucuaucauacagaaaaugcuuaugucucuguagugucuucacauuauagcagaagauucaccccagaaauagccaaaagacccaaggugagagaucaggaaggaagaaucaacuacuacuggacucugcuggaacccggggauacaauaauauuugaggcaaauggaaaucuaauagcgccaagguuugcuuucgcacugaguagaggcuuuggaucaggaaucaucaccucaaaugcaccaaugggugaaugugaugcgaagugucaaacaccucagggagcuauaaacaguagucuuccuuuccagaauguacacccagucacaauaggagaguguccaaaguaugucaggagugcaaaauuaagaaugguuacaggacuaaggaacaucccauccauucaauccagagguuuguuuggagccauugccgguuucauugaagggggguggacuggaaugguagaugguugguaugguuaucaccaucagaaugagcaaggaucuggguaugcugcagaucaaaaaagcacacaaaaugccauuaacgggauuacaaacaaggugaauucuguaauugagaaaaugaacacucaauucacagcugugggcaaagaauucaacaaauuggaaagaaggauggaaaacuuaaauaaaaagguugaugauggguuucuagacauuuggacauauaacgcagaauuguugguucuacuggaaaaugaaaggacuuuggacuuccaugacuccaacgugaagaaucuguaugagaaaguaaaaagccaauuaaagaauaaugccaaagaaauaggaaacggguguuuugaauucuaucacaaguguaacgaugaaugcauggagagugugaaaaauggaacuuaugacuauccaaaauauuccgaagaaucaaaguugaacagggagaaaauugauggagugaaauuggaaucaaugggagucuaucagauucuggcgaucuacucaacagucgccaguucccugguucuuuuggucucccugggggcaaucagcuucuggauguguuccaaugggucuuugcaguguagaauaugcaucuaa

SEQ ID NO: 43241 - RNA, 1698 nt, Artificial Sequence; identical to SEQ ID NO: 43240
  derived and/or modified CDS sequence (wt) from hemagglutinin__InfluenzaA__AHL89594

SEQ ID NO: 43242 - RNA, 1698 nt, Artificial Sequence; identical to SEQ ID NO: 43240
  derived and/or modified CDS sequence (wt) from hemagglutinin__InfluenzaA__AHL89606

SEQ ID NO: 43243 - RNA, 1698 nt, Artificial Sequence
  derived and/or modified CDS sequence (wt) from hemagglutinin__InfluenzaA__AHL89618
augaaaguaaaacuacugguucuguuauguacauuuacagcuacauaugcagacacaauauguauaggcuaccaugccaacaacucgaccgacacuguugacacaguacuugagaagaaugugacagugacacacucugucaaccuacuugaggacagucacaauggaaaacuaugucuacuaaaaggaauagccccacuacaauuggguaauugcagcguugccggauggaucuuaggaaacccagaaugcgaauuacugauuuccaaggaaucaugguccuacauuguagagacaccaaauccugagaauggaacauguuacccaggguauuucgccgacuaugaggagcugagagagcaauugaguucaguaucuucauuugagagguucgaaauauuccccaaagagagcucauggcccaaccacaccguaaccggaguaucagcaucaugcucccauaacgggaaaagcaguuuuuacagaaauuugcuauggcugacggggaagaaugguuuguauccaaaccugagcaaguccuaugcaaacaacaaagagaaagaaguccuuguacugugggguguucaucacccgccuaacauaggggaccaaagggcccucuaucauacagaaaaugcuuaugucucuguagugucuucacauuauagcagaagauucaccccagaaauagccaaaagacccaaggugagagaucaggaaggaagaaucaacuacuacuggacucugcuugaacccggggauacaauaauauuugaggcaaauggaaaucuaauagcgccaagguuugcuuucgcacugaguagaggcuuuggaucaggaaucaucacuucaaaugcaccaauggaugaaugugaugcgaaaugucaaacaccucagggagcuauaaacagcagucuuccuuuccagaauguacacccagucacaauaggagaguguccaaaguaugucaggaguacaaaauuaagaaugguuacaggacuaaggaacaucccauccauucaauccagagguuuguuuggagccauugccgguuucauugaagggggguggacuggaaugguagaugguugguaugguuaucaccaucagaaugagcaaggaucuggguaugcugcugaucaaaaaagcacacaaaaugccauuaacgggauuacaaacaaggugaauucuguaauugagaaaaugaacacucaauucacagcugugggcaaagaauucaacaaauuggaaagaaggauggaaaacuuaaauaaaaaaguugaugauggguuucuagacauuuggacauauaacgcagaauuguugguucuacuggaaaaugaaaggacuuuggacuuccaugacuccaacgugaagaaucuguaugagaaaguaaaaagccaauuaaagaauaaugccaaagaaauaggaaacggguguuuugaauucuaucacaaguguaacgaugaaugcauggagagugugaaaaauggaacuuaugacuauccaaaauauuccgaagaaucaaaguugaacagggagaaaauugauggagugaaauuggaaucaaugggagucuaucagauuuuggcgaucuacucaacagucgccaguucccugguucuuuuggucucccugggggcaaucagcuucuggauguguuccaaugggucuuugcaguguagaauaugcaucuaa

SEQ ID NO: 43244 - RNA, 1698 nt, Artificial Sequence; identical to SEQ ID NO: 34100
  derived and/or modified CDS sequence (wt) from hemagglutinin__InfluenzaA__AHL89630

SEQ ID NO: 43245 - RNA, 1698 nt, Artificial Sequence
  derived and/or modified CDS sequence (wt) from hemagglutinin__InfluenzaA__AHL89642
augaaaguaaaacuacuuguucuguuauguacauuuacagcuacauaugcagacacaauauguauaggcuaccaugccaacaacucgaccgacacuguugacacaguacuugagaagaaugugacagugacacacucugucaaccuacuugaggacaaucacaauggaaaacuaugucuacuaaaaggaauagccccacuacaauuggguaauugcagcguugccggauggaucuuaggaaacccagaaugcgaauuacugauuuccaaggaaucaugguccuacauuguagaaacaccaaauccugagaauggaacauguuacccaggauauuucgccgacuaugaggagcugagggagcaauugaguucaguaucuucauuugagagguucgaaauauuccccaaagagagcucauggcccaaccacaccguaaccggaguaucagcaucaugcucccauaacgggaaaagcaguuuuuacagaaauuugcuauggcugacggggaagaaugguuuguauccaaaccugagcaaguccuaugcaaacaacaaagagaaagaaguccuuguacugugggguguucaucacccgccuaacauaggggaccaaagggcccucuaucauacagaaaaugcuuaugucucuguagugucuucacauuauagcagaagauucaccccagaaauagccaaaagacccaaggugagagaucaggaaggaagaaucaacuacuacuggacucugcuggaacccggggauacaauaauauuugaggcaaauggaaaucuaauagcgccaagguuugcuuucgcacugaguagaggcuuuggaucaggaaucaucaccucaaaugcaccaaugggugaaugugaugcgaagugucaaacaccucagggagcuauaaacaguagucuuccuuuccagaauguacacccagucacaauaggagaguguccaaaguaugucaggagugcaaaauuaagaaugguuacaggacuaaggaacaucccauccauucaauccagagguuuguuuggagccauugccgguuucauugaagggggguggacuggaaugguagaugguugguaugguuaucaccaucagaaugagcaaggaucuggguaugcugcagaucaaaaaagcacacaaaaugccauuaacgggauuacaaacaaggugaauucuguaauugagaaaaugaacacucaauucacagcugugggcaaagaauucaacaaauuggaaagaaggauggaaaacuuaaauaaaaagguugaugauggguuucuagacauuuggacauauaacgcagaauuguugguucuacuggaaaaugaaaggacuuuggacuuccaugacuccaacgugaagaaucuguaugagaaaguaaaaagccaauuaaagaauaaugccaaagaaauaggaaacggguguuuugaauucuaucacaaguguaacgaugaaugcauggagagugugaaaaauggaacuuaugacuauccaaaauauuccgaagaaucaaaguugaacagggagaaaauugauggagugaaauuggaaucaaugggagucuaucagauucuggcgaucuacucaacagucgccaguucccugguucuuuuggucucccugggggcaaucagcuucuggauguguucuaaugggucuuugcaguguagaauaugcaucuaa

SEQ ID NO: 43246 - RNA, 1698 nt, Artificial Sequence
  derived and/or modified CDS sequence (wt) from hemagglutinin__InfluenzaA__AHL89654
augaaaguaaaacuacugguucuguuauguacauuuacagcuacauaugcagacacaauauguauaggcuaccaugccaacaacucgaccgacacuguugacacaguacuugagaagaaugugacagugacacacucugucaaccuacuugaggacagucacaauggaaaacuaugucuacuaaaagggauagccccacuacaauuggguaauugcagcguugccggauggauuuuaggaaacccagaaugcgaauuacugauuuccaaggaaucaugguccuacauuguagagacaccaaauccugagaauggaacauguuacccagggaauuucgccgacuaugaggagcugagagagcaauugaguucaguaucuucauuugagagguucgaaauauuccccaaagagagcucauggcccaaccacaccguaaccggaguaucagcaucaugcucccauaacgggaaaagcaguuuuuacagaaauuugcuauggcugacggggaagaaugguuuguauccaaaccugagcaaguccuaugcaaacaacaaagagaaagaaguccuuguacugugggguguucaucacccgccuaacauaggggaccaaagggcccucuaucauacagaaaaugcuuaugucucuguagugucuucacauuauagcagaagauucaccccagaaauagccaaaagacccaaggugagagaucaggaaggaagaaucaacuacuacuggacucugcuugaacccggggauacaauaauauuugaggcaaauggaaaucuaauagcgccaagguuugcuuucgcacugaguagaggcuuuggaucaggaaucaucaccucaaaugcaccaauggaugaaugugaugcgaaaugucaaacaccucagggagcuauaaacagcagccuuccuuuccagaauguacacccagucacaauaggagaguguccaaaguaugucaggagugcaaaauuaagaaugguuacaggacuaaggaacaucccauccauucaauccagagguuuguuuggagccauugccgguuucauugaagggggguggacuggaaugguagaugguugguaugguuaucaccaucagaaugagcaaggaucuggguaugcugcagaucaaaaaagcacacaaaaugccauuaacgggauuacaaacaaggugaauucuguaauugagaaaaugaacacucaauucacagcugugggcaaagaauucaacaaauuggaaagaaggauggaaaacuuaaauaaaaaaguugaugauggguuucuagacauuuggacauauaacgcagaauuguugguucuacuggaaaaugaaaggacuuuggacuuccaugacuccaacgugaagaaucuguaugagaaaguaaaaagccaguuaaagaauaaugccaaagaaauaggaaacggguguuuugaauucuaucacaaauguaacgaugaaugcauggagagugugaaaaauggaacuuaugacuauccaaaauauuccgaagaaucaaaguugaacagggagaaaauugauggagugaaauuggaaucaaugggagucuaucagauuuuggcgaucuacucaacagucgccaguucccugguucuuuuggucucccugggggcaaucagcuucuggauguguuccaaugggucuuugcaguguagaauaugcaucuaa

SEQ ID NO: 43247 - RNA, 1698 nt, Artificial Sequence
  derived and/or modified CDS sequence (wt) from hemagglutinin__InfluenzaA__AHL89666
augaaaguaaaacuacuuguucuguuauguacauuuacagcuacauaugcagacacaauauguauaggcuaccaugccaacaacucgaccgacacuguugacacaguacuugagaagaaugugacagugacacacucugucaaccuacuugaggacaaucacaauggaaaacuaugucuacuaaaaggaauagccccacuacaauuggguaauugcagcguugccggauggaucuuaggaaacccagaaugcgaauuauugauuuccaaggaaucaugguccuacauuguagaaacaccaaauccugagaauggaacauguuacccaggauauuucgccgacuaugaggagcugagggagcaauugaguucaguaucuucauuugagagguucgaaauauuccccaaagagagcucauggcccaaccacaccguaaccggaguaucagcaucaugcucccauaacgggaaaagcaguuuuuacagaaauuugcuauggcugacggggaagaaugguuuguauccaaaccugagcaaguccuaugcaaacaacaaagagaaagaaguccuuguacugugggguguucaucacccgccuaacauaggggaccaaagggcccucuaucauacagaaaaugcuuaugucucuguagugucuucacauuauagcagaagauucaccccagaaauagccaaaagacccaaggugagagaucaggaaggaagaaucaacuacuacuggacucugcuggaacccggggauacaauaauauuugaggcaaauggaaaucuaauagcgccaagguuugcuuucgcacugaguagaggcuuuggaucaggaaucaucaccucaaaugcaccaaugggugaaugugaugcgaagugucaaacaccucagggagcuauaaacaguagucuuccuuuccagaauguacacccagucacaauaggagaguguccaaaguaugucaggagugcaaaauuaagaaugguuacaggacuaaggaacaucccauccauucaauccagagguuuguuuggagccauugccgguuucauugaagggggguggacuggaaugguagaugguugguaugguuaucaccaucagaaugagcaaggaucuggguaugcugcagaucaaaaaagcacacaaaaugccauuaacgggauuacaaacaaggugaauucuguaauugagaaaaugaacacucaauucacagcugugggcaaagaauucaacaaauuggaaagaaggauggaaaacuuaaauaaaaagguugaugauggguuucuagacauuuggacauauaacgcagaauuguugguucuacuggaaaaugaaaggacuuuggacuuccaugacuccaacgugaagaaucuguaugagaaaguaaaaagccaauuaaagaauaaugccgaagaaauaggaaacggguguuuugaauucuaucacaaguguaacgaugaaugcauggagagugugaaaaauggaacuuaugacuauccaaaauauuccgaagaaucaaaguugaacagggagaaaauugauggagugaaauuggaaucaaugggagucuaucagauucuggcgaucuacucaacagucgccaguucccugguucuuuuggucucccugggggcaaucagcuucuggauguguucuaaugggucuuugcaguguagaauaugcaucuaa

SEQ ID NO: 43248 - RNA, 1698 nt, Artificial Sequence
  derived and/or modified CDS sequence (wt) from hemagglutinin__InfluenzaA__AHL89678
augaaaguaaaacuacuuguucuguuauguacauuuacagcuacauaugcagacacaauauguauaggcuaccaugccaacaacucgaccgacacuguugacacaguacuugagaagaaugugacagugacacacucugucaaccuacuugaggacagucacaauggaaaacuaugucuacuaaaaggaauagccccacuacaauuggguaauugcagcguugccggauggaucuuaggaaacccagaaugcgaauuacugauuuccaaggaaucaugguccuacauuguagaaacaccaaauccugagaauggaacauguuacccaggauauuucgccgacuaugaggagcugagggagcaauugaguucaguaucuucauuugagagguucgaaauauuccccaaagagagcucauggcccaaccacaccguaaccggaguaucagcaucaugcucccauaacgggaaaagcaguuuuuacagaaauuugcuauggcugacggggaagaaugguuuguauccaaaccugagcaaguccuaugcaaacaacaaagagaaagaaguccuuguacugugggguguucaucacccgccuaacauaggggaccaaagggcccucuaucauacagaaaaugcuuaugucucuguagugucuucacauuauagcagaagauucaccccagaaauagccaaaagacccaaggugagagaucaggaaggaagaaucaacuacuacuggacucugcuggaacccggggauacaauaauauuugaggcaaauggaaaucuaauagcgccaagguuugcuuucgcacugaguagaggcuuuggaucaggaaucaucaccucaaaugcaccaaugggugaaugugaugcgaagugucaaacaccucagggagcuauaaacaguagucuuccuuuccagaauguacauccagucacaauaggggaguguccaaaguaugucaggagugcaaaauuaagaaugguuacaggacuaaggaacaucccauccauucaauccagagguuuguuuggagccauugccgguuucauugaagggggguggacuggaaugguagaugguugguaugguuaucaccaucagaaugagcaaggaucuggguaugcugcagaucaaaaaagcacacaaaaugccauuaacgggauuacaaacaaggugaauucuguaauugagaaaaugaacacucaauucacagcugugggcaaagaauucaacaaauuggaaagaaggauggaaaacuuaaauaaaaagguugaugauggguuucuagacauuuggacauauaacgcagaauuguugguucuacuggaaaaugaaaggacuuuggacuuccaugacuccaacgugaagaaucuguaugagaaaguaaaaagccaauuaaagaauaaugccaaagaaauaggaaacggguguuuugaauucuaucacaaguguaacgaugaaugcauggagagugugaaaaauggaacuuaugacuauccaaaauauuccgaagaaucaaaguugaacaggaagaaaauugauggagugaaauuggaaucaaugggagucuaucagauucuggcgaucuacucaacagucgccaguucccugguucuuuuggucucccugggggcaaucagcuucuggauguguuccaaugggucuuugcaguguagaauaugcaucuaa

SEQ ID NO: 43249 - RNA, 1698 nt, Artificial Sequence
  derived and/or modified CDS sequence (wt) from hemagglutinin__InfluenzaA__AHL89690
augaaaguaaaacuacugguccuguuaugcacauuuacagcuacauaugcagacacaauauguauaggcuaccaugccaacaacucaaccgacacuguugacacaguacuugaaaagaaugugacagugacacacucugucaaccugcuugaggacagucacaauggaaaacuaugucuauuaaaaggaauagccccacuacaauuggguaauugcagcguugccggguggaucuuaggaaacccagaaugcgaauuacugauuuccaaggagucaugguccuacauuguagaaaaaccagauccugagaauggaacauguuacccagggcauuucgcugacuaugaggaacugagggagcaauugaguucaguaucuucauuugagagguucgaaauauuccccaaagaaagcucauggcccaaccacaccguaaccggaguaucagcaucaugcucccauaaugggaaaagcaguuuuuacaaaaacuugcuauggcugacggggaagaaugguuuguacccaaaccugagcaaguccuaugcaaacaacaaagagaaagaaguccuuguacuaugggguguucaucacccgccaaacauaggugaccaaaaggcccucuaucauacagaaaaugcuuaugucucuguagugucuucacauuauagcagaaaauucaccccagaaauagccaaaagacccaaaguaagagaucaagaaggaagaaucaacuacuacuggacucugcuugaacccggggauacaauaauauuugaggcaaauggaaaucuaauagcgccaagauaugcuuucgcacugaguagagguuuuggaucaggaaucaucaauucaaaugcaccaauggauaaaugugaugcgaagugccaaacaccucagggagcuauaaacagcagucuuccuuuccagaauguacacccagucacaauaggagaguguccaaaguaugucaggagugcaaaauuaaggaugguuacaggacuaagaaacaucccauccauucaauccagagguuuguuuggagccauugccgguuucauugaagggggguggacuggaaugguagaugguugguaugguuaucaucaucagaaugagcaaggaucuggcuaugcugcagaucaaaaaagcacacaaaaugccauuaaugggauuacaaacaaggugaauucuguaauugagaaaaugaacacucaauucacagcagugggcaaagaauucaacaaauuggaaagaaggauggaaaacuuaaauaaaaaaguugaugauggguuuauagacauuuggacauacaaugcagagcuguugguucuacuggaaaaugaaaggacuuuggauuuccaugacuccaaugugaagaaucuguaugagaaaguaaaaagccaguuaaagaauaaugccaaagaaauaggaaauggguguuuugaauucuaucacaaguguaacgaugaaugcauggagaguguaaaaaauggaacuuaugacuauccaaaauauuccgaagaaucaaaguuaaacagggagaaaauugauggagugaaauuggaaucaaugggagucuaucagauucuggcgaucuacucaacagucgccaguucucugguucuuuuggucucccugggggcaaucagcuucuggauguguuccaaugggucuuugcaguguagaauaugcaucuga

SEQ ID NO: 43250 - RNA, 1698 nt, Artificial Sequence
  derived and/or modified CDS sequence (wt) from hemagglutinin__InfluenzaA__AHL89702
augaaaguaaaacuacugguucuguuauguacauuuacagcuacauaugcagacacaauauguauaggcuaccaugccaacaacucgaccgacacuguugacacaguacuugagaagaaugugacagugacacacucugucaaccuacuugaggacagucacaauggaaaacuaugucuacuaaaaggaauagccccacuacaauuggguaauugcagcguugccggauggaucuuaggaaacccagaaugcgaauuacugauuuccaaggaaucaugguccuacauuguagagacaccaaauccugagaauggaacauguuacccagggaauuucgccgacuaugaggagcugagagagcaauugaguucaguaucuucauuugagagguucgaaauauuccccaaagagagcucauggcccaaccacaccguaaccggaguaucagcaucaugcucccauaaugggaaaagcaguuuuuacagaaauuugcuauggcugacggggaagaaugguuuguauccaaaccugagcaaguccuaugcaaacaacaaagagaaagaaguccuuguacugugggguguucaucacccgccuaacauaggggaccaaagggcccucuaucauacagaaaaugcuuaugucucuguagugucuucacauuauagcagaagauucaccccagaaauagccaaaagacccaaggugagagaucaggaaggaagaaucaacuacuacuggacucugcuugaacccggggauacaauaauauuugaggcaaauggaaaucuaauagcgccaagguuugcuuucgcacugaguagaggcuuuggaucaggaaucaucaccucaaaugcaccaauggaugaaugugaugcgaaaugucaaacaccucagggagcuauaaacagcagccuuccuuuccagaauguacacccagucacaauaggagaguguccaaaguaugucaggagugcaaaauuaagaaugguuacagggcuaaggaacaucccauccauucaauccagagguuuguuuggagccauugccgguuucauugaagggggguggacuggaaugguagaugguugguaugguuaucaccaucagaaugagcaaggaucuggguaugcugcagaucaaaaaagcacacaaaaugccauuaacgggauuacaaacaaggugaauucuguaauugagaaaaugaacacucaauucacagcugugggcaaagaauucaacaaauuggaaagaaggauggaaaacuuaaauaaaaaaguugaugauggguuucuagacauuuggacauauaacgcagaauuguugguucuacuggaaaaugaaaggacuuuggacuuccaugacuccaacgugaagaaucuguaugagaaaguaaaaagccaauuaaagaauaaugccaaagaaauaggaaacggguguuuugaauucuaucacaaauguaacgaugaaugcauggagagugugaaaaauggaacuuaugacuauccaaaauauuccgaagaaucaaaguugaacagggagaaaauugauggagugaaauuggaaucaaugggagucuaucagauuuuggcgaucuacucaacagucgccaguucccugguucuuuuggucucccugggggcaaucagcuucuggauguguuccaaugggucuuugcaguguagaauaugcaucuaa

SEQ ID NO: 43251 - RNA, 1698 nt, Artificial Sequence
  derived and/or modified CDS sequence (wt) from hemagglutinin__InfluenzaA__AHL89714
augaaaguaaaacuacugguucuguuauguacauuuacagcuacauaugcagacacaauauguauaggcuaccaugccaacaacucgaccgacacuguugacacaguacuugagaagaaugugacagugacacacucugucaaccuacuugaggacagucacaauggaaaacuaugucuacuaaaaggaauagccccacuacaauuggguaauugcagcguugccggauggaucuuaggaaacccagaaugcgaauuacugauuuccaaggaaucaugguccuacauuguagagacaccaaauccugagaauggaacauguuacccaggguauuucgcugacuaugaggagcugagagagcaauugaguucaguaucuucauuugagagguucgaaauauuccccaaagagagcucauggcccaaccacaccguaaccggaguaucagcaucaugcucccauaacgggaaaagcaguuuuuacagaaauuugcuauggcugacggggaagaaugguuuguauccaaaccugagcaaguccuaugcaaacaacaaagagaaagaaguccuuguacugugggguguucaucacccgccuaacauaggggaccaaagggcccucuaucauacagaaaaugcuuaugucucuguagugucuucacauuauagcagaagauucaccccagaaauagccaaaagacccaaggugagagaucaggaaggaagaaucaacuacuacuggacucugcuugaacccggggauacaauaauauuugaggcaaauggaaaucuaauagcgccaagguuugcuuucgcauugaguagaggcuuuggaucaggaaucaucaccucaaaugcaccaauggaugaaugugaugcgaaaugucaaacaccucagggagcuauaaacagcagucuuccuuuccagaauguacacccagucacaauaggagaguguccaaaguaugucaggaguacaaaauuaagaaugguuacaggacuaaggaacaucccauccauucaauccagagguuuguuuggagccauugccgguuucauugaagggggguggacuggaaugguagaugguugguaugguuaucaccaucagaaugagcaaggaucuggguaugcugcagaucaaaaaagcacacaaaaugccauuaacgggauuacaaacaaggugaauucuguaauugagaaaaugaacacucaauucacagcugugggcaaagaauucaacaaauuggaaagaaggauggaaaacuuaaauaaaaaaguugaugauggguuucuagacauuuggacauauaacgcagaauuguugguucuacuggaaaaugaaaggacuuuggacuuccaugacuccaacgugaagaaucuguaugagaaaguaaaaagccaauuaaagaauaaugccaaagaaauaggaaacggguguuuugaauucuaucacaaguguaacgaugaaugcauggagagugugaaaaauggaacuuaugacuauccaaaauauuccgaagaaucaaaguugaacagggagaaaauugauggagugaaauuggaaucaaugggagucuaucagauuuuggcgaucuacucaacagucgccaguucccugguucuuuuggucucccugggggcaaucagcuucuggauguguuccaaugggucuuugcaguguagaauaugcaucuaa

SEQ ID NO: 43252 - RNA, 1698 nt, Artificial Sequence
  derived and/or modified CDS sequence (wt) from hemagglutinin__InfluenzaA__AHL89726
augaaaguaaaacuacugguucuguuauguacauuuacagcuacauaugcagacacaauauguauaggcuaccaugccaacaacucgaccgacacugucgacacaguacuugagaagaaugugacaguaacacacucugucaaccuacuugaggacagucacaauggaaaacuaugucuacuaaaaggaauagccccacuacaauuggguaauugcagcguugccggauggaucuuaggaaacccagaaugcgaauuacugauuuccaaggaaucaugguccuacauuguagagacaccaaauccugagaauggaacauguuacccaggguauuucgccgacuaugaggagcugagagagcaauugaguucaguaucuucauuugagagguucgaaauauuccccaaagagagcucauggcccaaccacaccguaaccggaguaucagcaucaugcucccauaacgggaaaagcaguuuuuacagaaauuugcuauggcugacggggaagaaugguuuguauccaaaccugagcaaguccuaugcaaacaacaaagagaaagaaguccuuguacugugggguguucaucacccgccuaacauaggggaccaaaaggcccucuaucauacagaaaaugcuuauguuucuguagugucuucacauuauagcagaagauucaccccagaaauagccaaaagacccaaggugagagaucaggaaggaagaaucaacuacuacuggacucugcuugaacccggggauacaauaauauuugaggcaaauggaaaucuaauagcaccaagguuugcuuucgcacugaguagaggcuuuggaucaggaaucaucaccucaaaugcaccaauggaugaaugugaugcgaaaugucaaacaccucagggagcuauaaacagcagucuuccuuuccagaauguacacccagucacaauaggagaguguccaaaguaugucaggaguacaaaauuaagaaugguuacaggacuaaggaacaucccauccauucaauccagagguuuguuuggagccauugccgguuucauugaagggggguggacuggaaugguagaugguugguaugguuaucaccaucagaaugagcaaggaucuggguaugcugcagaucaaaaaagcacacaaaaugccauuaacggaauuacaaacaaggugaauuccguaauugagaaaaugaacacucaauucacagcugugggcaaagaauucaacaaauuggaaagaaggauggaaaacuuaaauaaaaaaguugaugauggguuucuagacauuuggacauauaacgcagaauuguugguucuacuggaaaaugaaaggacuuuggacuuccaugacuccaacgugaagaaucuguaugagaaaguaaaaagccaauuaaagaauaaugccaaagaaauaggaaacggguguuuugaauucuaucacaaguguaacgaugaaugcauggagagugugaaaaauggaacuuaugacuauccaaaauauuccgaagaaucaaaguugaacagggagaaaauugauggagugaaauuggaaucaaugggagucuaucagauuuuggcgaucuacucaacagucgccaguucccugguucuuuuggucucccugggggcaaucagcuucuggauguguuccaaugggucuuugcaguguagaauaugcaucuaa

SEQ ID NO: 43253 - RNA, 1698 nt, Artificial Sequence
  derived and/or modified CDS sequence (wt) from hemagglutinin__InfluenzaA__AHL89750
augaaaguaaaacuacugguucuguuauguacauuuacagcuacauaugcagacacaauauguauaggcuaccaugccaacaacucgaccgacacuguugacacaguacuugagaagaaugugacagugacacacucugucaaccuacuugaggacagucacaauggaaaacuaugucuacuaaaaggaauagccccacuacaauuggguaauugcagcguugccggauggaucuuaggaaacccagaaugcgaauuacugauuuccaaggaaucaugguccuacauuguagagacaccaaauccugagaauggaacauguuacccaggguauuucgccgacuaugaggagcugagagagcaauugaguucaguaucuucauuugagagguucgaaauauuccccaaagagagcucauggcccaaccacaccguaaccggaguaucagcaucaugcucccauaacgggaaaagcaguuuuuacagaaauuugcuauggcugacggggaagaaugguuuguauccaaaccugagcaaguccuaugcaaacaacaaagagaaagaaguccuuguacugugggguguucaucacccgccuaacauaggggaccaaagggcccucuaucauacagaaaaugcuuaugucucuguagugucuucacauuauagcagaagauucaccccagaaauagccaaaagacccaaggugagagaucaggaaggaagaaucaacuacuacuggacucugcuugaacccggggauacaauaauauuugaggcaaauggaaaucuaauagcgccaagguuugcuuucgcacugaguagaggcuuuggaucaggaaucaucaccucaaaugcaccaauggauggaugugaugcgaaaugucaaacaccucagggagcuauaaacagcagucuuccuuuccagaauguacacccagucacaauaggagaguguccaaaguaugucaggaguacaaaauuaagaaugguuacaggacuaaggaacaucccauccauucaauccagagguuuguuuggagccauugccgguuucauugaagggggguggacuggaaugguagaugguugguaugguuaucaccaucagaaugagcaaggaucuggguaugcugcugaucaaaaaagcacacaaaaugccauuaacgggauuacaaacaaggugaauucuguaauugagaaaaugaacacucaauucacagcugugggcaaagaauucaacaaauuggaaagaaggauggaaaacuuaaauaaaaaaguugaugauggguuucuagacauuuggacauauaacgcagaauuguugguucuacuggaaaaugaaaggacuuuggacuuccaugacuccaacgugaagaaucuguaugagaaaguaaaaagccaauuaaagaauaaugccaaagaaauaggaaacggguguuuugaauucuaucacaaguguaacgaugaaugcauggagagugugaaaaauggaacuuaugacuauccaaaauauuccgaagaaucaaaguugaacagggagaaaauugauggagugaaauuggaaucaaugggagucuaucagauuuuggcgaucuacucaacagucgccaguucccugguucuuuuggucucccugggggcaaucagcuucuggauguguuccaaugggucuuugcaguguagaauaugcaucuaa

SEQ ID NO: 43254 - RNA, 1698 nt, Artificial Sequence
  derived and/or modified CDS sequence (wt) from hemagglutinin__InfluenzaA__AHL89762
augaaaguaaaacuacugauucuguuauguacauuuacagcuacauaugcagacacaauauguauaggcuaccaugccaacaacucgaccgacacuguugacacaguacuugagaagaaugugacagugacacacucugucaaccuacuugaggacagucacaauggaaaacuaugucuacuaaaaggaauagccccacuacaauuggguaauugcagcguugccggauggaucuuaggaaacccagaaugcgaauuacugauuuccaaggaaucaugguccuacauuguagagacaccaaauccugagaauggaacauguuacccaggguauuucgccgacuaugaggagcugagagagcaauugaguucaguaucuucauuugagagguucgaaauauuccccaaagagagcucauggcccaaccacaccguaaccggaguaucagcaucaugcucccauaacgggaaaagcaguuuuuacagaaauuugcuauggcugacggggaagaaugguuuguauccaaaccugagcaaguccuaugcaaacaacaaagagaaagaaguccuuguacugugggguguucaucacccgccuaacauaggggaccaaagggcccucuaucauacagaaaaugcuuaugucucuguagugucuucacauuauagcagaagauucaccccagaaauagccaaaagacccaaggugagagaucaggaaggaagaaucaacuacuacuggacucugcuugaacccggggauacaauaauauuugaggcaaauggaaaucuaauagcgccaagguuugcuuucgcacugaguagaggcuuuggaucaggaaucaucaccucaaaugcaccaauggaugaaugugaugcgaaaugucaaacaccucagggagcuauaaacagcagucuuccuuuccagaauguacacccagucacaauaggagaguguccaaaguaugucaggaguacaaaauuaagaaugguuacaggacuaaggaacaucccauccauucaauccagagguuuauuuggagccauugccgguuucauugaagggggguggacuggaaugguagaugguugguaugguuaucaccaucagaaugagcaaggaucuggguaugcugcagaucaaaaaagcacacaaaaugccauuaacgggauuacaaacaaggugaauucuguaauugagaaaaugaacacucaauucacagcugugggcaaagaauucaacaaauuggaaagaaggauggaaaacuuaaauaaaaaaguugaugauggguuucuagacauuuggacauauaacgcagaauuguugguucuacuggaaaaugaaaggacuuuggacuuccaugacuccaacgugaagaaucuguaugagaaaguaaaaagccaauuaaagaauaaugccaaagaaauaggaaacggguguuuugaauucuaucacaaguguaacgaugaaugcauggagagugugaaaaauggaacuuaugacuacccaaaauauuccgaagaaucaaaguugaacagggagaaaauugauggagugaaauuggaaucaaugggagucuaucagauuuuggcgaucuacucaacagucgccaguucccugguucuuuuggucucccugggggcaaucagcuucuggauguguuccaaugggucuuugcaguguagaauaugcaucuaa

SEQ ID NO: 43255 - RNA, 1698 nt, Artificial Sequence; identical to SEQ ID NO: 34085
  derived and/or modified CDS sequence (wt) from hemagglutinin__InfluenzaA__AHL89774

SEQ ID NO: 43256 - RNA, 1698 nt, Artificial Sequence; identical to SEQ ID NO: 43250
  derived and/or modified CDS sequence (wt) from hemagglutinin__InfluenzaA__AHL89786

SEQ ID NO: 43257 - RNA, 1698 nt, Artificial Sequence
  derived and/or modified CDS sequence (wt) from hemagglutinin__InfluenzaA__AHL89798
augaaagugaaacuacugguucuguuauguacauuuacagcuacauaugcagacacaauauguauaggcuaccaugccaacaacucgaccgacacuguugacacaguacuugagaagaaugugacagugacacacucugucaaccuacuugaggaccgucacaauggaaaacuaugucuacuaaaaggaauagccccacuacaauuggguaauugcagcguugccggauggaucuuaggaaacccagaaugcgaauuacugauuuccaaggaaucaugguccuacauuguagaaacaccaaauccugagaauggaacauguuacccaggguauuucgccgacuaugaggagcugagggagcaauugaguucaguaucuucauuugagagguucgaaauauuccccaaagagagcucauggcccaaccacaccguaaccggaguaucagcaucaugcucccauaacgggaaaagcaguuuuuacagaaauuugcuauggcugacgggaaagaaugguuuguacccaaaccugagcagauccuaugcaaacaacaaagagaaagaaguccuuguacugugggguguucaucacccgccuagcauaggggaccaaagggcccucuaucauacagaaaaugcuuaugucucuguagugucuucacauuauagcagaagauucaccccagaaauagccaaaagacccaaggugagagaucaggaaggaagaaucaauuacuacuggacucuacuggaacccggggauacaauaauauuugaggcaaaugggaaucuaauagcgccaagguuugcuuucgcacugaguagaggcuuuggaucaggaaucaucaccucaaaugcaccaauggaugaaugugaugcgaagugucaaacaccucagggagcuauaaacagcagucuuccuuuccagaauguacacccagucacaauaggagaguguccaaaguaugucaggagugcaaaauuaagaaugguuacaggacuaaggaacaucccauccauucaauccagagguuuguuuggagccauugccgguuucauugaaggggguuggacuggaaugguagaugguugguaugguuaucaccaccagaaugagcaaggaucuggguaugcugcagaucaaaaaagcacacaaaaugccauuaacgggauuacaaacaaggugaauucugugauugagaaaaugaacacucaauucacagcugugggcaaagaauucaacaaauuggaaagaagaauggaaaacuuaaauaaaaaaguugaugauggguuucuggacauuuggacguauaacgcagaauuguugguucuacuggaaaaugaaaggacuuuggacuuccaugacuccaacgugaagaaucuguaugagaaaguaaaaagccaauuaaagaauaaugccaaagaaauaggaaacggguguuuugaauucuaucacaaguguaacgaugaaugcauggagagugugaaaaauggaacuuaugacuauccaaaauauuccgaagaaucaaaguuaaacagggagaaaauugauggagugaaauuggaaucaaugggagucuaucagauucuggcgaucuacucaacagucgccaguucccuuguucuuuuggucucccugggggcaaucagcuucuggauguguuccaaugggucuuugcaguguagaauaugcaucuaa

SEQ ID NO: 43258 - RNA, 1698 nt, Artificial Sequence
  derived and/or modified CDS sequence (wt) from hemagglutinin__InfluenzaA__AHL89810
augaaaguaaaacuacuuguucuguuauguacauuuacagcuacauaugcagacacaauauguauaggcuaccaugccaacaacucgaccgacacuguugacacaguacuugagaagaaugugacagugacacacucugucaaccuacuugaggacagucacaauggaaaacuaugucuacuaaaaggaauagccccacuacaauuggguaauugcagcguugccggauggaucuuaggaaacccagaaugcgaauuacugauuuccaaggaaucaugguccuacauuguagaaacaccaaauccugagaauggaacauguuacccaggauauuucgccgacuaugaggagcugagggagcaauugaguucaguaucuucauuugagagguucgaaauauuccccaaagagagcucauggcccaaccacaccguaaccggaguaucagcaucaugcucccauaacgggaaaagcaguuuuuacagaaauuugcuauggcugacggggaagaaugguuuguauccaaaccugagcaaguccuaugcaaacaacaaagagaaagaaguccuuguacugugggguguucaucacccgccuaacauaggggaccaaagggcccucuaucauacagaaaaugcuuaugucucuguagugucuucacauuauagcagaagauucaccccagaaauagccaaaagacccaaggugagagaucaggaaggaagaaucaacuacuacuggacucugcuggaacccggggauacaauaauauuugaggcaaauggaaaucuaauagcgccaagguuugcuuucgcacugaguagaggcuuuggaucaggaaucaucaccucaaaugcaccaaugggugaaugugaugcggagugucaaacaccucagggagcuauaaacaguagucuuccuuuccagaauguacauccagucacaauaggagaguguccaaaguaugucaggagugcaaaauuaagaaugguuacaggacuaaggaacaucccauccauucaauccagagguuuguuuggagccauugccgguuucauugaagggggguggacuggaaugguagaugguugguaugguuaucaccaucagaaugagcaaggaucuggguaugcugcagaucaaaagagcacacaaaaugccauuaacgggauuacaaacaaggugaauucuguaauugagaaaaugaacacucaauucacagcugugggcaaagaauucaacaaauuggaaagaaggauggaaaacuuaaauaaaaagguugaugauggguuucuagacauuuggacauauaacgcagaauuguugguucuacuggaaaaugaaaggacuuuggacuuccaugacuccaacgugaagaaucuguaugagaaaguaaaaagccaauuaaagaauaaugccaaagaaauaggaaacggguguuuugaauucuaucacaaguguaacgaugaaugcauggagagugugaaaaauggaacuuaugacuauccaaaauauuccgaagaaucaaaguugaacagggagaaaauugauggagugaaauuggaaucaaugggagucuaucagauucuggcgaucuacucaacagucgccaguucccugguucuuuuggucucccugggggcaaucagcuucuggauguguuccaaugggucuuugcaguguagaauaugcaucuaa

SEQ ID NO: 43259 - RNA, 1698 nt, Artificial Sequence
  derived and/or modified CDS sequence (wt) from hemagglutinin__InfluenzaA__AHL89822
augaaagugaaacuacugguucuguuauguacauuuacagcuacauaugcagacacaauauguauaggcuaccaugccaacaacucgaccgacacuguugacacaguacuugagaagaaugugacagugacacacucugucaaccuacuugaggaccgucacaauggaaaacuaugucuacuaaaaggaauagccccacuacaauuggguaauugcagcguugccggauggaucuuaggaaacccagaaugcgaauuacugauuuccaaggaaucaugguccuacauuguagaaacaccaaauccugagaauggaacauguuacccaggguauuucgccgacuaugaggagcugagggagcaauugaguucaguaucuucauuugagagguucgaaauauuccccaaagagagcucauggcccaaccacaccguaaccggaguaucagcaucaugcucccauaacgggaaaagcaguuuuuacagaaauuugcuauggcugacgggaaagaaugguuuguacccaaaccugagcaaauccuaugcaaacaacaaagagaaagaaguccuuguacugugggguguucaucacccgccuaacauaggggaccaaagggcccucuaucauacagaaaaugcuuaugucucuguagugucuucacauuauagcagaagauucacuccagaaauagccaaaagacccaaggugagagaucaggaaggaagaaucaacuacuacuggacucuacuggaacccggggauacaauaauauuugaggcaaaugggaaucuaauagcgccaagguuugcuuucgcacugaguagaggcuuuggaucaggaaucaucaccucaaaugcaccaauggaugaaugugaugcgaagugucaaacaccucagggagcuauaaacagcagucuuccuuuccagaauguacacccagucacaauaggagaguguccaaaguaugucaggagugcaaaauuaagaaugguuacaggacuaaggaacaucccauccauucaauccagagguuuguuuggagccauugccgguuucauugaagggggguggacuggaaugguagaugguugguaugguuaucaccaccagaaugagcaaggaucuggguaugcugcagaucaaaaaagcacacaaaaugccauuaacgggauuacaaacaaggugaauucugugauugagaaaaugaacacucaauucacagcugugggcaaagaauucaacaaauuggaaagaagaauggaaaacuuaaauaaaaaaguugaugauggauuucuagacauuuggacguauaacgcagaauuguugguucuacuggaaaaugaaaggacuuuggacuuccaugacuccaacgugaagaaucuguaugagaaaguaaaaagccaauuaaagaauaaugccaaagaaauaggaaacggguguuuugaauucuaucacaaguguaacgaugaaugcauggagagugugaaaaauggaacuuaugacuauccaaaauauuccgaagaaucaaaguuaaacagggagaaaauugauggagugaaauuggaaucaaugggagucuaucagauucuggcgaucuacucaacagucgccaguucccugguucuuuuggucucccugggggcaaucagcuucuggauguguuccaaugggucuuugcaguguagaauaugcaucuaa

SEQ ID NO: 43260 - RNA, 1698 nt, Artificial Sequence
  derived and/or modified CDS sequence (wt) from hemagglutinin__InfluenzaA__AHL89834
augaaaguaaaacuacugguucuguuauguacauuuacagcuacauaugcagacacaauauguauaggcuaccaugccaacaacucgaccgacacuguugacacaguacuugagaagaaugugacagugacacacucugucaaccuacuugaggacagucacaauggaaaacuaugucuacuaaaaggaauagccccacuacaauuggguaauugcagcguugccggauggaucuuaggaaacccagaaugcgaauuacugauuuccaaggaaucaugguccuacauuguagagacaccaaauccugagaauggaacauguuacccagggaauuucgccgacuaugaggagcugagagagcaauugaguucaguaucuucauuugagagguucgaaauauuccccaaagagagcucauggcccaaccacaccguaaccggaguaucagcaucaugcucccauaacgggaaaagcaguuuuuacagaaauuugcuauggcugacggggaagaaugguuuguauccaaaccugagcaaguccuaugcaaacaacaaagagaaagaaguccuuguacugugggguguucaucacccgccuaacauaggggaccaaagggcccucuaucauacagaaaaugcuuaugucucuguagugucuucacauuauagcagaagauucaccccagaaauagccaaaagacccaaggugagagaucaggaaggaagaaucaacuacuacuggacucugcuugaacccggggauacaauaauauuugaggcaaauggaaaucuaauagcgccaagguuugcuuucgcacugaguagaggcuuuggaucaggaaucaucaccucaaaugcaccaauggaugaaugugaugcgaaaugucaaacaccucagggagcuauaaacagcagccuuccuuuccagaauguacacccagucacaauaggagaguguccaaaguaugucaggagugcaaaauuaagaaugguuacaggacuaaggaacaucccauccauucaauccagagguuuguuuggagccauugccgguuucauugaagggggguggacuggaaugguagaugguugguaugguuaucaccaucagaaugagcaaggaucuggguaugcugcagaucaaaaaagcacacaaaaugccauuaacgggauuacaaacaaggugaauucuguaauugagaaaaugaacacucaauucacagcugugggcaaagaauucaacaaauuggaaagaagaauggaaaacuuaaauaaaaaaguugaugauggguuucuagacauuuggacauauaacgcagaauuguugguucuacuggaaaaugaaaggacuuuggacuuccaugacuccaacgugaagaaucuguaugagaaaguaaaaagccaauuaaagaauaaugccaaagaaauaggagacggguguuuugaauucuaucacaaauguaacgaugaaugcauggagagugugaaaaauggaacuuaugacuauccaaaauauuccgaagaaucaaaguugaacagggagaaaauugauggagugaaauuggaaucaaugggagucuaucagauuuuggcgaucuacucaacagucgccaguucccugguucuuuuggucucccugggggcaaucagcuucuggauguguuccaaugggucuuugcaguguagaauaugcaucuaa

SEQ ID NO: 43261 - RNA, 1698 nt, Artificial Sequence; identical to SEQ ID NO: 34085
  derived and/or modified CDS sequence (wt) from hemagglutinin__InfluenzaA__AHL89846

SEQ ID NO: 43262 - RNA, 1701 nt, Artificial Sequence; identical to SEQ ID NO: 33953
  derived and/or modified CDS sequence (wt) from hemagglutinin__InfluenzaA__AHL89858

SEQ ID NO: 43263 - RNA, 1701 nt, Artificial Sequence
  derived and/or modified CDS sequence (wt) from hemagglutinin__InfluenzaA__AHL89870
augaagacuaucauugcuuugagcuacauucuaugucugguuuucgcucaaaaacuuccuggaaaugacaacagcacggcaacgcugugccuugggcaccaugcaguaccaaacggaacgauagugaaaacaaucacgaaugaccaaauugaaguuacuaaugcuacugagcugguucagaguuccucaacaggugaaauaugcgacaguccucaucagauccuugauggagaaaacugcacacuaauagaugcucuauugggagacccucagugugauggcuuccaaaauaagaaaugggaccuuuuuguugaacgcagcaaagccuacagcaacuguuacccuuaugaugugccagauuaugccucccuuaggucacuaguugccucauccggcacacuggaguuuaacaaugaaagcuucaauuggacuggagucacucaaaacggaacaagcucugcuugcauaaggagaucuaauaacaguuucuuuaguagauugaauugguugacccacuuaaaauucaaauacccagcauugaacgugacuaugccaaacaaugaaaaauuugacaaauuguacauuugggggguucaccacccggguacggacaaugaccaaaucuuccuguaugcucaagcaucaggaagaaucacagucucuaccaaaagaagccaacaaacuguaaucccgaauaucggaucuagacccagaguaaggaauauccccagcagaauaagcaucuauuggacaauaguaaaaccgggagacauacuuuugauuaacagcacagggaaucuaauugcuccuagggguuacuucaaaauacgaagugggaaaagcucaauaaugagaucagaugcacccauuggcaaaugcaauucugaaugcaucacuccaaauggaagcauucccaaugacaaaccauuccaaaauguaaacaggaucacauacggggccugucccagauauguuaagcaaaacacucugaaauuggcaacagggaugcgaaauguaccagagaaacaaacuagaggcauauuuggcgcaaucgcggguuucauagaaaaugguugggagggaaugguggaugguugguacgguuucaggcaucaaaauucugagggaauaggacaagcagcagaucucaaaagcacucaagcagcaaucgaucaaaucaaugggaagcugaauagguugaucgggaaaaccaacgagaaauuccaucagauugaaaaagaauucucagaagucgaagggaggauucaggaccuugagaaauauguugaggacaccaaaauagaucucuggucauacaacgcggagcuucuuguugcccuggagaaccaacauacaauugaucuaacugacucagaaaugaacaaacuguuugaaaaaacaaagaagcaacugagggaaaaugcugaggauaugggcaaugguuguuucaaaauauaccacaaaugugacaaugccugcauaggaucaaucagaaauggaacuuaugaccacgauguauacagagaugaagcauuaaacaaccgguuccagaucaagggcguugagcugaagucaggauacaaagauuggauccuauggauuuccuuugccauaucauguuuuuugcuuuguguugcuuuguugggguucaucaugugggccugccaaaaaggcaacauuaggugcaacauuugcauuuga

SEQ ID NO: 43264 - RNA, 1701 nt, Artificial Sequence
  derived and/or modified CDS sequence (wt) from hemagglutinin__InfluenzaA__AHL89882
augaagacuaucauugcuuugagcuacauucuaugucugguuuucgcucaaaaacuucccggaaaugacaacagcacggcaacgcugugccuugggcaccaugcaguaccaaacggaacgauagugaaaacaaucacgaaugaccaaauugaaguuacuaaugcuacugagcugguucagaguuccucaacagguggaauaugcgacaguccucaucagauccuugauggagaaaacugcacacuaauagaugcucuauugggagacccucagugugauggcuuccaaaauaagaaaugggaccuuuuuguugaacgcagcaaagccuacagcaacuguuacccuuaugaugugccggauuaugccucccuuaggucacuaguugccucaucuggcacacuggaguuuaacaaugaaagcuucaauuggacgggagucacucaaaauggaacaagcucugcuugcaaaaggggaucugauaacaguuucuuuaguagauugaauugguugacccacuuaaaauucaaauacccagcauugaacgugacuaugccaaacaaugaaaaauuugacaaauuguacauuugggggguucaccacccggguacggacaaugaccaaaucuuccuguaugcucaagcaucaggaagaaucacagucucuaccaaaagaagccaacaaacuguaaucccgaauaucggaucuagacccagaguaaggaauauccccagcagaauaagcaucuauuggacaauaguaaaaccgggagacauacuuuugauuaacagcacagggaaucuaauugcuccuagggguuacuucaaaauacgaagugggaaaagcucaauaaugagaucagaugcacccauuggcaaaugcaauucugaaugcaucacuccaaauggaagcauucccaaugacaaaccauuucaaaauguaaacaggaucacauauggggccugucccagauauguuaagcaaaacacccugaaauuggcaacagggaugcgaaauguaccagagaaacaaacuagaggcauauuuggcgcaaucgcggguuucauagaaaaugguugggagggaaugguggaugguugguacgguuucaggcaucaaaauucugagggaauaggacaagcagcagaucucaaaagcacucaagcagcaaucaaucaaaucaaugggaagcugaauagguugaucgggaaaaccaacgagaaauuccaucagauugaaaaagaauucucagaaguagaagggagaauucaggaccucgagaaauauguugaggacacuaaaauagaucucuggucauacaacgcggagcuucuuguugcccuggagaaccaacauacaauugaucuaacugacucagaaaugaacaaacuguuugaaagaacaaagaagcaacugagggaaaaugcugaggauauggguaaugguuguuucaaaauauaccacaaaugugacaaugccugcauaggaucaaucagaaauggaacuuaugaccaugauguauacagagaugaagcauuaaacaaccgguuccagaucaaaggcguugagcugaagucaggcuacaaagauuggauccuauggauuuccuuugccauaucauguuuuuugcuuuguguugcuuuguugggguucaucaugugggccugccaaaaaggcaacauuaggugcaacauuugcauuuaa

SEQ ID NO: 43265 - RNA, 1701 nt, Artificial Sequence
  derived and/or modified CDS sequence (wt) from hemagglutinin__InfluenzaA__AHL89894
augaagacuaucauugcuuugagcuacauucuaugucugguuuucgcucaaaaacuuccuggaaaugacaacagcacggcaacgcugugccuugggcaccaugcaguaccaaacggaacgauagugaaaacaaucacgaaugaccaaauugaaguuacuaaugcuacugagcugguucagaguuccucaacaggugaaauaugcgacaguccucaucagauccuugauggagaaaacugcacacuaauagaugcucuauugggagacccucagugugauggcuuccaaaauaagaaaugggaccuuuuuguugaacgcagcaaagccuacagcaacuguuacccuuaugaugugccggauuaugccucccuuaggucacuaguugccucauccggcacacuggaguuuaacaaugaaagcuucaauuggacuggagucacucaaaacggaacaagcucugcuugcauaaggagaucuaauaacaguuucuuuaguagauugaauugguugacccacuuaaaauucaaauacccagcauugaacgugacuaugccaaacaaugaaaaauuugacaaauuguacauuugggggguucaccacccggguacggacaaugaccaaaucuuccuguaugcucaagcaucaggaagaaucacagucucuaccaaaagaagccaacaaacuguaaucccgaauaucggaucuagacccagaguaaggaauauccccagcagaauaagcaucuauuggacaauaguaaaaccgggagacauacuuuugauuaacagcacagggaaucuaauugcuccuagggguuacuucaaaauacgaagugggaaaagcucaauaaugagaucagaugcacccauuggcaaaugcaauucugaaugcaucacuccaaauggaagcauucccaaugacaaaccauuccaaaauguaaacaggaucacauacggggccugucccagauauguuaagcaaaacacucugaaauuggcaacagggaugcgaaauguaccagagaaacaaacuagaggcauauuuggcgcaaucgcggguuucauagaaaaugguugggagggaaugguggaugguugguacgguuucaggcaucaaaauucugagggaauaggacaagcagcagaucucaaaagcacucaagcagcaaucgaucaaaucaaugggaagcugaauagguugaucgggaaaaccaacgagaaauuccaucagauugaaaaagaauucucagaagucgaagggagaauucaggaccuugagaaauauguugaggacaccaaaauagaucucuggucauacaacgcggagcuucuuguugcccuggagaaccaacauacaauugaucuaacugacucagaaaugaacaaacuguuugaaaaaacaaagaagcaacugagggaaaaugcugaggauaugggcaaugguuguuucaaaauauaccacaaaugugacaaugccugcauaggaucaaucagaaauggaacuuaugaccacgauguauacagagaugaagcauuaaacaaccgguuccagaucaagggcguugagcugaagucaggauacaaagauuggauccuauggauuuccuuugccauaucauguuuuuugcuuuguguugcuuuguugggguucaucaugugggccugccaaaaaggcaacauuaggugcaacauuugcauuuga

SEQ ID NO: 43266 - RNA, 1701 nt, Artificial Sequence
  derived and/or modified CDS sequence (wt) from hemagglutinin__InfluenzaA__AHL89906
augaagacuaucauugcuuugagcuacauucuaugucugguuuacgcucaaaaacuucccggaauugacaacagcacggcaacgcugugccuugggcaccaugcaguaccaaacggaacgauagugaaaacaaucacgaaugaccaaauugaaguuacuaaugcuacugagcugguucagaguuccucaacaggugaaauaugcgacaguccucaucagauccuugauggagaaaacugcacacuaauagaugcucuauugggagacccucagugugauggcuuccaaaauaagaaaugggaccuuuuuguugaacgcagcaaagccuacagcaacuguuacccuuaugaugugccggauuaugccucccuuaggucacuaguugccucauccggcacacuggaguuuaacaaugaaagcuucaauugggcuggagucacucaaaauggaacaagcucugcuugcaaaaggggaucuaauaacaguuucuuuaguagauugaauugguugacccacucaaaauucaaauacccagcauugaacgugacuaugccaaacaaugaagaauuugacaaauuguacauuugggggguucaccacccggguacggacaaugaccaaaucuuccuguaugcucaagcaucaggaagaaucacagucucuaccaaaagaagccaacaaacuguaaucccgaauaucggaucuagacccagaguaaggaauauccccagcagaauaagcaucuauuggacaauaguaaaaccgggagacauacuuuugauuaacagcacagggaaucuaauugcuccuagggguuacuucaaaauacgaagugggaaaagcucaauaaugagaucagaugcacccauuggcaaaugcaauucugaaugcaucacuccaaauggaagcauucccaaugacaaaccauuucaaaauguaaacaggaucacauacggggccugucccagauauguuaggcaaaacacucugaaauuggcaacagggaugcgaaauguaccagagaaacaaacuagaggcauauuuggcgcaaucgcggguuucauagaaaaugguugggagggaaugguggaugguugguacgguuucaggcaucaaaauucugagggaauaggacaagcagcagaucucaaaagcacucaagcagcaaucgaucaaaucaaugggaagcugaauagguugaucgggaaaaccaacgagaaauuccaccagauugaaaaagaauucucagaaguagaagggagaauucaggaccucgagaaauauguugaggacacuaaaauagaucucuggucauacaacgcggagcuucuuguugcccuggagaaccaacauacaauugaucuaacugacucagaaaugaacaaacuguuugaaaagacaaagaagcaacugagggaaaaugcugaggauaugggcaaugguuguuucaaaauauaccacaaaugugacaaugccugcauaggaucaaucagaaauggaacuuaugaccaugauguauacagagaugaagcauuaaacaaccgguuucagaucaagggcguugagcugaagucaggauacaaagauuggauccuauggauuuccuuugccauaucauguuuuuugcuuuguguugcuuuguugggguucaucaugugggccugccaaaaaggcaacauuaggugcaacauuugcauuuga

SEQ ID NO: 43267 - RNA, 1701 nt, Artificial Sequence
  derived and/or modified CDS sequence (wt) from hemagglutinin__InfluenzaA__AHL89918
augaagacuaucauugcuuugagcuacauucuaugucugguuuucgcucaaaaacuucccggaaaugacaacagcacggcaacgcugugccuugggcaccaugcaguaccaaacggaacgauagugaaaacaaucacgaaugaccaaauugaaguuacuaaugcuacugagcugguucagaguuccucaacaggugaaauaugcgacaguccucaucagauccuugauggagaaaacugcacacuaauagaugcucuauugggagacccucagugugauggcuuccaaaauaagaaaugggaccuuuuuguugaacgcagcaaagccuacagcaacuguuacccuuaugaugugccggauuaugccucccuuaggucacuaguugccucauccggcacacuggaguuuaacaaugaaagcuucaauuggacuggagucacucaaaacggaacaagcucugcuugcauaaggagaucuaauaacaguuucuuuaguagauugaauugguugacccacuuaaaauucaaauacccagcauugaacgugacuaugccaaacaaugaaaaauuugacaaauuguacauuugggggguucaccacccggguacggacaaugaccaaaccuuccuguaugcucaagcaucaggaagaaucacagucucuaccaaaagaagccaacaaacuguaaucccgaauaucggaucuagacccagaguaaggaauauccccagcagaauaagcaucuauuggacaauaguaaaaccgggagacauacuuuugauuaacagcacaggaaaucuaauugcuccuagggguuacuucaaaauacaaagugggaaaagcucaauaaugagaucagaugcacccauuggcaaaugcaauucugaaugcaucacuccaaauggaagcauucccaaugacaaaccauuccaaaauguaaacaggaucacauacggggccugucccagauauguuaagcaaaacacucugaaauuggcaacagggaugcgaaauguaccagagaaacaaacuagaggcauauuuggcgcaaucgcggguuucauagaaaaugguugggagggaaugguggaugguugguacgguuucaggcaucaaaauucugagggaauaggacaagcagcagaucucaaaagcacucaagcggcaaucgaucaaaucaaugggaagcugaauagguugaucgggaaaaccaacgagaaauuccaucagauugaaaaagaguucucagaagucgaagggagaauucaggaccuugagaaauauguugaggacaccaaaauagaucucuggucauacaacgcggagcuucuuguugcccuggagaaccaacauacaauugaucuaacugacucagaaaugaacaaacuguuugaaaaaacaaagaagcaacugagggaaaaugcugaggauaugggcaaugguuguuucaaaauauaccacaaaugugacaaugccugcauaggaucaaucagaaauggaacuuaugaccacgauguauacagagaugaagcauuaaacaaccgguuccagaucaagggcguugagcugaagucaggauacaaagauuggauccuauggauuuccuuugccauaucauguuuuuugcuuuguguugcuuuguugggguucaucaugugggccugccaaaaaggcaacauuaggugcaacauuugcauuuga

SEQ ID NO: 43268 - RNA, 1701 nt, Artificial Sequence
  derived and/or modified CDS sequence (wt) from hemagglutinin__InfluenzaA__AHL89930
augaagacuaucauugcuuugagcuacauucuaugucugguuuucgcucaaaaacuucccggaauugacaacagcacggcaacgcugugccuugggcaccaugcaguaccaaacggaacgauagugaaaacaaucacgaaugaccaaauugaaguuacuaaugcuacugagcugguucagaguuccucaacagguggaauaugcgacaguccucaucagauccuugauggagaaaacugcacacuaauagaugcucuguugggagacccucagugugauggcuuccaaaauaagaaaugggaccuuuuuguugaacgcagcaaagccuacagcaacuguuacccuuaugaugugccggauuaugccucccuuaggucacuaguugccucauccggcacacuggaguuuaacaaugaaagcuucaauugggcuggagucacucaaaauggaacaagcucugcuugcaaaaggggaucuaauaacaguuucuuuaguagauugaauugguugacccacucaaaauucaaauacccagcauugaacgugacuaugccaaacaaugaagaauuugacaaauuguacauuugggggguucaccacccggguacggacaaugaccaaaucuuccuguaugcucaagcaucaggaagaaucacagucucuaccaaaagaagccaacaaacuguaaucccgaauaucggaucuagacccagaguaaggaauauccccagcagaauaagcaucuauuggacaauagugaaaccgggagacauacuuuugauuaacagcacagggaaucuaauugcuccuagggguuacuucaaaauacgaagugggaaaagcucaauaaugagaucagaugcacccauuagcaaaugcaauucugaaugcaucacuccaaauggaagcauucccaaugacaaaccauuucaaaauguaaacaggaucacauacggggccugucccagguauguuaagcaaaacacucugaaauuggcaacagggaugcgaaauguaccagagaaacaaacuagaggcauauuuggcgcaaucgcggguuucauagaaaaugguugggagggaaugguggaugguugguacgguuucaggcaucaaaauucugagggaaugggacaagcagcagaucucaaaagcacucaagcagcaaucgaucaaaucaaugggaagcugaauagguugaucgggaaaaccaacgagaaauuccaccagauugaaaaagaauucucagaaguagaagggagaauucaggaccucgagaaauauguugaggacacuaaaauagaucucuggucauacaacgcggagcuucuuguugcccuggagaaccaacauacaauugaucuaacugacucagaaaugaacaaacuguuugaaaagacaaagaagcaacugagggaaaaugcugaggauaugggcaaugguuguuucaaaauauaccacaaaugugacaaugccugcauaggaucaaucagaaauggaacuuaugaccaugauguauacagagaugaagcauuaaacaaccgguuucagaucaagggcguugagcugaagucaggauacaaagauuggauccuauggauuuccuuugccauaucauguuuuuugcuuuguguugcuuuguugggguucaucaugugggccugccaaaaaggcaacauuaggugcaacauuugcauuuga

SEQ ID NO: 43269 - RNA, 1701 nt, Artificial Sequence
  derived and/or modified CDS sequence (wt) from hemagglutinin__InfluenzaA__AHL89942
augaagacuaucauugcuuugagcuacauucuaugucugguuuucgcucaaaaacuucccggaaaugacaacagcacggcaacgcugugccuugggcaccaugcaguaccaaacggaacgauagugaaaacaaucacgaaugaccaaauugaaguuacuaaugcuacugagcugguucagaguuccucaacaggugaaauaugcgacaguccucaucagauccuugauggagaaaacugcacacuaauagaugcucuauugggagacccucagugugauggcuuccaaaauaagaaaugggaccuuuuuguugaacgcagcaaagccuacagcaacuguuacccuuaugaugugccggauuaugccucccuuaggucacuaguugccucauccggcacacuggaguuuaacaaugaaagcuucaauuggacuggagucacucaaaacggaacaagcucugcuugcauaaggagaucuaauaacaguuucuuuaguagauugaauugguugacccacuuaaaauucaaauacccagcauugaacgugacuaugccaaacaaugaaaaauuugacaaauuguacauuugggggguucaccacccggguacggacaaugaccaaaucuuccuguaugcucaagcaucaggaagaaucacagucucuaccaaaagaagccaacaaacuguaaucccgaauaucggaucuagacccagaguaaggaauauccccagcagaauaagcaucuauuggacaauaguaaaaccgggagacauacuuuugauuaacagcacaggaaaucuaauugcuccuagggguuacuucaaaauacaaagugggaaaagcucaauaaugagaucagaugcacccauuggcaaaugcaauucugaaugcaucacuccaaauggaagcauucccaaugacaaaccauuccaaaauguaaacaggaucacauacggggccugucccagauauguuaagcaaaacacucugaaauuggcaacagggaugcgaaauguaccagagaaacaaacuagaggcauauuuggcgcaaucgcggguuucauagaaaaugguugggagggaaugguggaugguugguacgguuucaggcaucaaaauucugagggaauaggacaagcagcagaucucaaaagcacucaagcagcaaucgaucaaaucaaugggaagcugaauagguugaucgggaaaaccaacgagaaauuccaucagauugaaaaagaguucucagaagucgaagggagaauucaggaccuugagaaauauguugaggacaccaaaauagaucucuggucauacaacgcggagcuucuuguugcccuggagaaccaacauacaauugaucuaacugacucagaaaugaacaaacuguuugaaaaaacaaagaagcaacugagggaaaaugcugaggauaugggcaaugguuguuucaaaauauaccacaaaugugacaaugccugcauaggaucaaucagaaauggaacuuaugaccacgauguauacagagaugaagcauuaaacaaccgguuccagaucaagggcguugagcugaagucaggauacaaagauuggauccuauggauuuccuuugccauaucauguuuuuugcuuuguguugcuuuguugggguucaucaugugggccugccaaaaaggcaacauuaggugcaacauuugcauuuga

SEQ ID NO: 43270 - RNA, 1701 nt, Artificial Sequence
  derived and/or modified CDS sequence (wt) from hemagglutinin__InfluenzaA__AHL89954
augaagacuaucauugcuuugagcuacauucuaugucugguuuucgcucaaaaacuucccggaaaugacaacagcacggcaacgcugugccuugggcaccaugcaguaccaaacggaacgauagugaaaacaaucacgaaugaccaaauugaaguuacuaaugcuacugagcugguucagaguuccucaacaggugaaauaugcgacaguccucaucagauccuugauggagaaaacugcacacuaauagaugcucuauugggagacccucagugugauggcuuccaaaauaagaaaugggaccuuuuuguugaacgcagcaaagccuacagcaacuguuacccuuaugaugugccggaucaugccucccuuaggucacuaguugccucauccggcacacuggaguuuaacaaugaaagcuucaauuggacuggagucacucaaaacggaacaagcucugcuugcauaaggagaucuaauaacaguuucuuuaguagauugaauugguugacccacuuaaaauucaaauacccagcauugaacgugacuaugccaaacaaugaaaaauuugacaaauuguacauuugggggguucaccacccggguacggacaaugaccaaaucuuccuguaugcucaagcaucaggaagaaucacagucucuaccaaaagaagccaacaaacuguaaucccgaauaucggaucuagacccagaguaaggaauauccccagcagaauaagcaucuauuggacaauaguaaaaccgggagacauacuuuugauuaacagcacagggaaucuaauugcuccuagggguuacuucaaaauacgaagugggaaaagcucaauaaugagaucagaugcacccauuggcaaaugcaauucugaaugcaucacuccaaauggaagcauucccaaugacaaaccauuccaaaauguaaacaggaucacauacggggccugucccagauauguuaagcaaaacacucugaaauuggcaacagggaugcgaaauguaccagagaaacaaacuagaggcauauuuggcgcaaucgcggguuucauagaaaaugguugggagggaaugguggaugguugguacgguuucaggcaucaaaauucugagggaauaggacaagcagcagaucucaaaagcacucaagcagcaaucgaucaaaucaaugggaagcugaauagguugaucgggaaaaccaacgagaaauuccaucagauugaaaaagaauucucagaagucgaagggagaauucaggaccuugagaaauauguugaggacaccaaaauagaucucuggucauacaacgcggagcuucuuguugcccuggagaaccaacauacaauugaucuaacugacucagaaaugaacaaacuguuugaaaaaacaaagaagcaacugagggaaaaugcugaggauaugggcaaugguuguuucaaaauauaccacaaaugugacaaugccugcauaggaucaaucagaaauggaacuuaugaccacgauguauacagagaugaagcauuaaacaaccgguuccagaucaagggcguugagcugaagucaggauacaaagauuggauccuauggauuuccuuugccauaucauguuuuuugcuuuguguugcuuuguugggguucaucaugugggccugccaaaaaggcaacauuaggugcaacauuugcauuuga

SEQ ID NO: 43271 - RNA, 1701 nt, Artificial Sequence
  derived and/or modified CDS sequence (wt) from hemagglutinin__InfluenzaA__AHL89966
augaagacuaucauugcuuugagcuacauucuaugucugguuuucgcucaaaaacuucccggaaaugacaacagcacggcaacgcugugccuugggcaccaugcaguaccaaacggaacgauagugaaaacaaucacgaaugaccaaauugaagucacuaaugcuacugagcugguucagaguuccucaacaggugaaauaugcgacaguccucaucagauccuugauggagaaaacugcacacuaauagaugcucuauugggagacccucagugugauggcuuccaaaauaagaaaugggaccuuuuuguugaacgcagcaaagccuacagcaacuguuacccuuaugaugugccggauuaugccucccuuaggucacuaguugccucauccggcacacuggaguuuaacaaugaaagcuucaauuggacuggagucacucaaaacggaacaagcucugcuugcauaaggagaucuaauaacaguuucuuuaguagauugaauugguugacccacuuaaaauucaaauacccagcauugaacgugacuaugccaaacaaugaaaaauuugacaaauuguacauuugggggguucaccacccggguacggacaaugaccaaaucuuccuguaugcucaagcaucaggaagaaucacagucucuaccaaaagaagccaacaaacuguaaucccgaauaucggaucuagacccagaguaaggaauauccccagcagaauaagcaucuauuggacaauaguaaaaccgggagacauacuuuugauuaacagcacagggaaucuaauugcuccuagggguuacuucaaaauacgaagugggaaaagcucaauaaugagaucagaugcacccauuggcaaaugcaauucugaaugcaucacuccaaauggaagcauucccaaugacaaaccauuccaaaauguaaacaggaucacauacggggccugucccagauauguuaagcaaaacacucugaaauuggcaacagggaugcgaaauguaccagagaaacaaacuagaggcauauuuggcgcaaucgcggguuucauagaaaaugguugggagggaaugguggaugguugguacgguuucaggcaucaaaauucugagggaauaggacaagcagcagaucucaaaagcacucaagcagcaaucgaucaaaucaaugggaagcugaauagguugaucgggaaaaccaacgagaaauuccaucagauugaaaaagaauucucagaagucgaagggagaauucaggaccuugagaaauauguugaggacaccaaaauagaucucuggucauacaacgcggagcuucuuguugcccuggagaaccaacauacaauugaucuaacugacucagaaaugaacaaacuguuugaaaaaacaaagaagcaacugagggaaaaugcugaggauaugggcaaugguuguuucaaaauauaccacaaaugugacaaugccugcauaggaucaaucagaaauggaacuuaugaccacgauguauacagagaugaagcauuaaacaaccgguuccagaucaagggcguugagcugaagucaggauacaaagauuggauccuauggauuuccuuugccauaucauguuuuuugcuuuguguugcuuuguugggguucaucaugugggccugccaaaaaggcaacauuaggugcaacauuugcauuuga

SEQ ID NO: 43272 - RNA, 1701 nt, Artificial Sequence
  derived and/or modified CDS sequence (wt) from hemagglutinin__InfluenzaA__AHL89978
augaagacuaucauugcuuugagcuacauucuaugucugguuuucgcucaaaaacuucccggaaaugacaacagcacggcaacgcugugccuugggcaccaugcaguaccaaacggaacgauagugaaaacaaucacgaaugaccaaauugaagucacuaaugcuacugagcugguucagaguuccucaacaggugaaauaugcgacaguccucaucagauccuugauggagaaaacugcacacuaauagaugcucuauugggagacccucagugugauggcuuccaaaauaagaaaugggaccuuuuuguugaacgcagcaaagccuacagcaacuguuacccuuaugaugugccggauuaugccucccuuaggucacuaguugccucauccggcacacuggaguuuaacaaugaaagcuucaauuggacuggagucacucaaaacggaacaagcucugcuugcauaaggagaucuaauaacaguuucuuuaguagauugaauugguugacccacuuaaaauucaaauacccagcauugaacguuacuaugccaaacaaugaaaaauuugacaaauuguacauuugggggguucaccacccggguacggacaaugaccaaaucuuccuguaugcucaagcaucaggaagaaucacagucucuaccaaaagaagccaacaaacuguaaucccgaauaucggaucuagacccagaguaaggaauauccccagcagaauaagcaucuauuggacaauaguaaaaccgggagacauacuuuugauuaacagcacagggaaucuaauugcuccuagggguuacuucaaaauacgaagugggaaaagcucaauaaugagaucagaugcacccauuggcaaaugcaauucugaaugcaucacuccaaauggaagcauucccaaugacaaaccauuccaaaauguaaacaggaucacauacggggccugucccagauauguuaagcaaaacacucugaaauuggcaacagggaugcgaaauguaccagagaaacaaacuagaggcauauuuggcgcaaucgcggguuucauagaaaaugguugggagggaaugguggaugguugguacgguuucaggcaucaaaauucugagggaauaggacaagcagcagaucucaaaagcacucaagcagcaaucgaucaaaucaaugggaagcugaauagguugaucgggaaaaccaacgagaaauuccaucagauugaaaaagaauucucagaagucgaagggagaauucaggaccuugagaaauauguugaggacaccaaaauagaucucuggucauacaacgcggagcuucuuguugcccuggagaaccaacauacaauugaucuaacugacucagaaaugaacaaacuguuugaaaaaacaaagaagcaacugagggaaaaugcugaggauaugggcaaugguuguuucaaaauauaccacaaaugugacaaugccugcauaggaucaaucagaaauggaacuuaugaccacgauguauacagagaugaagcauuaaacaaccgguuccagaucaagggcguugagcugaagucaggauacaaagauuggauccuauggauuuccuuugccauaucauguuuuuugcuuuguguugcuuuguugggguucaucaugugggccugccaaaaaggcaacauuaggugcaacauuugcauuuga

SEQ ID NO: 43273 - RNA, 1701 nt, Artificial Sequence
  derived and/or modified CDS sequence (wt) from hemagglutinin__InfluenzaA__AHL89990
augaagacuaucauugcuuugagcuacauucuaugucugguuuucgcucaaaaacuuccuggaaaugacaacagcacggcaacgcugugccuugggcaccaugcaguaccaaacggaacgauagugaaaacaaucacgaaugaccaaauugaaguuacuaaugcuacugagcugguucagaguuccucaacaggugaaauaugcgacaguccucaucagauccuugauggagaaaacugcacacuaauagaugcucuauugggagacccucagugugauggcuuccaaaauaagaaaugggaccuuuuuguugaacgcagcaaagccuacagcaacuguuacccuuaugaugugccggauuaugccucccuuaggucacuaguugccucauccggcacacuggaguuuaacaaugaaagcuucaauuggacuggagucacucaaaacggaacaagcucugcuugcauaaggagaucuaauaacaguuucuuuaguagauugaauugguugacccacuuaaaauucaaauacccagcauugaacgugacuaugccaaacaaugaaaaauuugacaaauuguacauuugggggguucaccacccggguacggacaaugaccaagucuuccuguaugcucaagcaucaggaagaaucacagucucuaccaaaagaagccaacaaacuguaaucccgaauaucggaucuagacccagaguaaggaauauccccagcagaauaagcaucuauuggacaauaguaaaaccgggagacauacuuuugauuaacagcacagggaaucuaauugcuccuagggguuacuucaaaauacgaagugggaaaagcucaauaaugagaucagaugcacccauuggcaaaugcaauucugaaugcaucacuccaaauggaagcauucccaaugacaaaccauuccaaaauguaaacaggaucacauacggggccugucccagauauguuaagcaaaacacucuaaaauuggcaacagggaugcgaaauguaccagagaaacaaacuagaggcauauuuggcgcaaucgcggguuucauagaaaaugguugggagggaaugguggaugguugguacgguuucaggcaucaaaauucugagggaauaggacaagcagcagaucucaaaagcacucaagcagcaaucgaucaaaucaaugggaagcugaauagguugaucgggaaaaccaacgagaaauuccaucagauugaaaaagaauucucagaagucgaagggagaauucaggaccuugagaaauauguugaggacaccaaaauagaucucuggucauacaacgcggagcuucuuguugcccuggagaaccaacauacaauugaucuaacugacucagaaaugaacaaacuguuugaaaaaacaaagaagcaacugagggaaaaugcugaggauaugggcaaugguuguuucaaaauauaccacaaaugugacaaugccugcauaggaucaaucagaaauggaacuuaugaccacgauguauacagagaugaagcauuaaacaaccgguuccagaucaagggcguugagcugaagucaggauacaaagauuggauccuauggauuuccuuugccauaucauguuuuuugcuuuguguugcuuuguugggguucaucaugugggccugccaaaaaggcaacauuaggugcaacauuugcauuuga

SEQ ID NO: 43274 - RNA, 1701 nt, Artificial Sequence
  derived and/or modified CDS sequence (wt) from hemagglutinin__InfluenzaA__AHL90002
augaagacuaucauugcuuugagcuacauucuaugucugguuuucgcucaaaaacuucccggaauugacaacagcacggcaacgcugugccuugggcaccaugcaguaccaaacggaacgauagugaaaacaaucacgaaugaccaaauugaaguuacuaaugcuacugagcugguucagaguuccucaacagguggaauaugcgacaguccucaucagauccuugauggagaaaacugcacacuaauagaugcucuauugggagacccucagugugauggcuuccaaaauaagaaaugggaccuuuuuguugaacgcagcaaagccuacagcaacuguuacccuuaugaugugccggauuaugccucccuuaggucacuaguugccucauccggcacacuggaguuuaacaaugaaagcuucaauugggcuggagucacucaaaauggaacaagcucugcuugcaaaaggggaucuaauaacaguuucuuuaguagauugaauugguugacccacucaaaauucaaauacccagcauugaacgugacuaugccaaacaaugaagaauuugacaaauuguacauuugggggguucaccacccggguacggacaaugaccaaaucuuccuguaugcucaagcaucaggaagaaucacagucucuaccaaaagaagccaacaaacuguaaucccgaauaucggaucuagacccagaguaaggaauauccccagcagaauaagcaucuauuggacaauaguaaaaccgggagacauacuuuugauuaacagcacagggaaucuaauugcuccuagggguuacuucaaaauacgaagugggaaaagcucaauaaugagaucagaugcacccauuggcaaaugcaauucugaaugcaucacuccaaauggaagcauucccaaugacaaaccauuucaaaauguaaacaggaucacauacggggccugucccagguauguuaagcagaacacucugaaauuggcaacagggaugcgaaauguaccagagaaacaaacuagaggcauauuuggcgcaaucgcggguuucauagaaaaugguugggagggaaugguggaugguugguacgguuucaggcaucaaaauucugagggaaugggacaagcagcagaucucaaaagcacucaagcagcaauugaucaaaucaaugggaagcugaauagguugaucgggaaaaccaacgagaaauuccaccagauugaaaaagaauucucagaaguagaagggagaauucaggaccucgagaaauauguugaggacacuaaaauagaucucuggucauacaacgcggagcuucuuguugcccuggagaaccaacauacaauugaucuaacugacucagaaaugaacaaacuguuugaaaagacaaagaagcaacugagggaaaaugcugaggauaugggcaaugguuguuucaaaauauaccacaaaugugacaaugccugcauaggaucaaucagaaauggaacuuaugaccaugauguauacagagaugaagcauuaaacaaccgguuucagaucaagggcguugagcugaagucaggauacaaagauuggauccuauggauuuccuuugccauaucauguuuuuugcuuuguguugcuuuguugggguucaucaugugggccugccaaaaaggcaacauuaggugcaacauuugcauuuga

SEQ ID NO: 43275 - RNA, 1701 nt, Artificial Sequence
  derived and/or modified CDS sequence (wt) from hemagglutinin__InfluenzaA__AHL90014
augaagacuaucauugcuuugagcuacauucuaugucugguuuucgcucaaaaacuuccuggaaaugacaacagcacggcaacgcugugccuugggcaccaugcaguaccaaacggaacgauagugaaaacaaucacgaaugaccaaguugaaguuacuaaugcuacugagcugguucagaguuccucaacaggugaaauaugcgacaguccucaucagauccuugauggagaaaacugcacacuaauagaugcucuauugggagacccucaaugugauggcuuccaaaauaagaaaugggaccuuuuuguugaacgcagcaaagccuacagcaacuguuacccuuaugaugugccggauuaugccucccuuaggucacuaguugccucauccggcacacuggaguuuaacaaugaaagcuucaauuggacuggagucacucaaaacggaacaagcucugcuugcauaaggagaucuaauaacaguuucuuuaguagauugaauugguugacccacuuaaaauucaaauauccagcauugaacgugacuaugccaaacaaugaaaaauuugacaaauuguacauuugggggguucaccacccggguacggacaaugaccaaaucuuccuguaugcucaagcaucaggaagaaucacagucucuaccaaaagaagccaacaaacuguaaucccgaauaucggaucuagacccagaguaaggaauauccccagcagaauaagcaucuauuggacaauaguaaaaccgggagacauacuuuugauuaacagcacagggaaucuaauugcuccuagggguuacuucaaaauacgaagugggaaaagcucaauaaugagaucagaugcacccauuggcaaaugcaauucugaaugcaucacuccaaauggaagcauucccaaugacaaaccauuccaaaauguaaacaggaucacauacggggccugucccagauauguuaagcaaaacacucugaaauuggcaacagggaugcgaaauguaccagagaaacaaacuagaggcauauuuggcgcaaucgcggguuucauagaaaaugguugggagggaaugguggaugguugguacgguuucaggcaucaaaauucugagggaauaggacaagcagcagaucucaaaagcacucaagcagcaaucgaucaaaucaaugggaagcugaauagguugaucgggaaaaccaacgagaaauuccaucagauugaaaaagaauucucagaagucgaagggagaauucaggaccuugagaaauauguugaggacaccaaaauagaucucuggucauacaacgcggagcuucuuguugcccuggagaaccaacauacaauugaucuaacugacucagaaaugaacaaacuguuugaaaaaacaaagaagcaacugagggaaaaugcugaggauaugggcaaugguuguuucaaaauauaccacaaaugugacaaugccugcauaggaucaaucagaaauggaacuuaugaccacgauguauacagagaugaagcauuaaacaaccgguuccagaucaagggcguugagcugaagucaggauacaaagauuggauccuauggauuuccuuugccauaucauguuuuuugcuuuguguugcuuuguugggguucaucaugugggccugccaaaaaggcaacauuaggugcaacauuugcauuuga

SEQ ID NO: 43276 - RNA, 1701 nt, Artificial Sequence
  derived and/or modified CDS sequence (wt) from hemagglutinin__InfluenzaA__AHL90026
augaagacuaucauugcuuugagcuacauucuaugucugguuuucgcucaaaaacuuccuggaaaugacaacagcacggcaacgcugugccuugggcaccaugcaguaccaaacggaacgauagugaaaacaaucacgaaugaccaaguugaaguuacuaaugcuacugagcugguucagaguuccucaacaggugaaauaugcgacaguccucaucagauccuugauggagaaaacugcacacuaauagaugcucuauugggagacccucagugugauggcuuccaaaauaagaaaugggaccuuuuuguugaacgcagcaaagccuacagcaacuguuacccuuaugaugugccggauuaugccucccuuaggucacuaguugccucauccggcacacuggaguuuaacaaugaaagcuucaauuggacuggagucacucaaaacggaacaagcucugcuugcauaaggagauccaauaacaguuucuuuaguagauugaauugguugacccacuuaaaauucaaauauccagcauugaacgugacuaugccaaacaaugaaaaauuugacaaauuguacauuugggguguucaccacccggguacggacaaugaccaaaucuuccuguaugcucaagcaucaggaagaaucacagucucuaccaaaagaagccaacaaacuguaaucccgaauaucggaucuagacccagaguaaggaauauccccagcagaauaagcaucuauuggacaauaguaaaaccgggagacauacuuuugauuaacagcacagggaaucuaauugcuccuagggguuacuucaaaauacgaagugggaaaagcucaauaaugagaucagaugcacccauuggcaaaugcaauucugaaugcaucacuccaaauggaagcauucccaaugacaaaccauuccaaaauguaaacaggaucacauacggggccugucccagauauguuaagcaaaacacucugaaauuggcaacagggaugcgaaauguaccagagaaacaaacuagaggcauauuuggcgcaaucgcggguuucauagaaaaugguugggagggaaugguggaugguugguacgguuucaggcaucaaaauucugagggaauaggacaagcagcagaucucaaaagcacucaagcagcaaucgaucaaaucaaugggaagcugaauagguugaucgggaaaaccaacgagaaauuccaucagauugaaaaagaauucucagaagucgaagggagaauucaggaccuugagaaauauguugaggacaccaaaauagaucucuggucauacaacgcggagcuucuuguugcccuggagaaccaacauacaauugaucuaacugacucagaaaugaacaaacuguuugaaaaaacaaagaagcaacugagggaaaaugcugaggauaugggcaaugguuguuucaaaauauaccacaaaugugacaaugccugcauaggaucaaucagaaauggaacuuaugaccacgauguauacagagaugaagcauuaaacaaccgguuccagaucaagggcguugagcugaagucaggauacaaagauuggauccuauggauuuccuuugccauaucauguuuuuugcuuuguguugcuuuguugggguucaucaugugggccugccaaaaaggcaacauuaggugcaacauuugcauuuga

SEQ ID NO: 43277 - RNA, 1701 nt, Artificial Sequence
  derived and/or modified CDS sequence (wt) from hemagglutinin__InfluenzaA__AHL90050
augaagacuaucauugcuuugagcuacauucuaugucugguuuucgcccaaaaacuucccggaaaugacaacagcacggcaacgcugugccuugggcaccaugcaguaccaaacggaacgauagugaaaacaaucacgaaugaccaaauugaaguuacuaaugcuacugagcugguucagaguuccucaacaggugaaauaugcgacaguccucaucagauccuugauggagaaaacugcacacuaauagaugcucuauugggagacccucagugugauggcuuccaaaauaagaaaugggaccuuuuuguugaacgcagcaaagccuacagcaacuguuacccuuaugaugugccggauuaugccucccuuaggucacuaguugccucauccggcacacuggaguuuaacaaugaaagcuucaauuggacuggagucacucaaaacggaacaagcucugcuugcauaaggagaucuaauaacaguuucuuuaguagauugaauugguugacccacuuaaaauucaaauacccagcauugaacgugacuaugccaaacaaugaaaaauuugacaaauuguacauuugggggguucaccacccggguacggacaaugaccaaaucuuccuguaugcucaagcaucaggaagaaucacagucucuaccaaaagaagccaacaaacuguaaucccgaauaucggaucuagacccagaguaaggaauauccccagcagaauaagcauuuauuggacaauaguaaaaccgggagacauacuuuugauuaacagcacagggaaucuaauugcuccuagggguuacuucaaaauacgaagugggaaaagcucaauaaugagaucagaugcacccauuggcaaaugcaauucugaaugcauaacuccaaauggaagcauucccaaugacaaaccauuccaaaauguaaacaggaucacauacggggccugucccagauauguuaagcaaaacacucugaaauuggcaacagggaugcgaaauguaccagagaaacaaacuagaggcauauuuggcgcaaucgcggguuucauagaaaaugguugggagggaaugguggaugguugguacgguuucaggcaucaaaauucugagggaauaggacaagcagcagaucucaaaagcacucaagcagcaaucgaucaaaucaaugggaagcugaauagguugaucgggaaaaccaacgagaaauuccaucagauugaaaaagaauucucagaagucgaagggagaauucaggaccuugagaaauauguugaggacaccaaaauagaucucuggucauacaacgcggagcuucuuguugcccuggagaaccaacauacaauugaucuaacugacgcagaaaugaacaaacuguuugaaaaaacaaagaagcaacugagggaaaaugcugaggauaugggcaaugguuguuucaaaauauaccacaaaugugacaaugccugcauaggaucaaucagaaauggaacuuaugaccacgauguauacagagaugaagcauuaaacaaccgguuccagaucaagggcguugagcugaagucgggauacaaagauuggauccuauggauuuccuuugccauaucauguuuuuugcuuuguguugcuuuguugggguucaucaugugggccugccaaaaaggcaacauuaggugcaacauuugcauuuga

SEQ ID NO: 43278 - RNA, 1701 nt, Artificial Sequence
  derived and/or modified CDS sequence (wt) from hemagglutinin__InfluenzaA__AHL90062
augaagacuaucauugcuuugagcuacauucuaugucugguuuucgcucaaaaacuuccugaaaaugacaacagcacggcaacgcugugccuugggcaccaugcgguaccaaacggaacgauagugaaaacaaucacgaaugaccaaauugaaguuacuaaugcuacugagcugguucagaguuccucaacaggugaaauaugcgacaguccucaucagauccuugauggagaaaacugcacacuaauagaugcucuauugggagacccucagugugauggcuuccaaaauaagaaaugggaccuuuuuguugaacgcagcaaagccuacagcaacuguuacccuuaugaugugccggauuaugccucccuuaggucacuaguugccucauccggcacacuggaguuuaacaaugaaagcuucaauuggacuggagucacucaaaacggaacaagcucugcuugcauaaggagaucuaauaacaguuucuuuaguagauugaauugguugacccacuuaaaauucaaauacccagcauugaacgugacuaugccaaacaaugaaaaauuugacaaauuguacauuugggggguucaccacccggguacggacaaugaccaaaucuuccuguaugcucaagcaucaggaagaaucacagucucuaccaaaagaagccaacaaacuguaaucccgaauaucggaucuagacccagaguaaggaauauccccagcagaauaagcaucuauuggacaauaguaaaaccgggagacauacuuuugauuaacagcacagggaaucuaauugcuccuagggguuacuucaaaauacgaagugggaaaagcucaauaaugagaucagaugcacccauuggcaaaugcaauucugaaugcaucacuccaaauggaagcauucccaauuacaaaccauuccaaaauguaaacaggaucacauacggggccugucccagauauguuaagcaaaacacucugaaauuggcaacagggaugcgaaauguaccagagaaacaaacuagaggcauauuuggcgcaaucgcggguuucauagaaaaugguugggagggaaugguggaugguugguacgguuucaggcaucaaaauucugagggaauaggacaagcagcagaucucaaaagcacucaagcagcaaucgaucaaaucaaugggaagcugaauagguugaucgggaaaaccaacgagaaauuccaucagauugaaaaagaauucucagaagucgaagggaggauucaggaccuugagaaauauguugaggacaccaaaauagaucucuggucauacaacgcggagcuucuuguugcccuggagaaccaacauacaauugaucuaacugacucagaaaugaacaaacuguuugaaaaaacaaagaagcaacugagggaaaaugcugaggauaugggcaaugguuguuucaaaauauaccacaaaugugacaaugccugcauaggaucaaucagaaauggaacuuaugaccacgauguauacagagaugaagcauuaaacaaccgguuccagaucaagggcguugagcugaagucaggauacaaagauuggauccuauggauuuccuuugccauaucauguuuuuugcuuuguguugcuuuguugggguucaucaugugggccugccaaaaaggcaacauuaggugcaacauuugcauuuga

SEQ ID NO: 43279 - RNA, 1701 nt, Artificial Sequence
  derived and/or modified CDS sequence (wt) from hemagglutinin__InfluenzaA__AHL90074
augaagacuaucauugcuuugagcuacauucuaugucugguuuucgcucaaaaacuucccggaaaugacaacagcacggcaacgcugugccuugggcaccaugcaguaccaaacggaacgauagugaaaacaaucacgaaugaccaaauugaaguuacuaaugcuacugagcugguucagaguuccucaacaggugaaauaugcgacaguccucaucagauccuugauggagaaaacugcacacuaauagaugcucuauugggagacccucagugugauggcuuccaaaauaagaaaugggaccuuuuuguugaacguagcaaagccuacagcaacuguuacccuuaugaugugccggauuaugccucccuuaggucacuaguugccucauccggcacacuggaguuuaacaaugaaagcuucaauuggacuggagucacucaaaacggaacaagcucugcuugcauaaggagaucuaauaacaguuucuuuaguagauugaauugguugacccacuuaaaauucaaauacccagcauugaacgugacuaugccaaacaaugaaaaauuugacaaauuguacauuugggggguucaccacccggguacggacaaugaccaaaucuuccuguaugcucaagcaucaggaagaaucacagucucuaccaaaagaagccaacaaacuguaaucccgaauaucggaucuagacccagaguaaggaauauccccagcagaauaagcaucuauuggacaauaguaaaaccgggagacauacuuuugauuaacagcacagggaaucuaauugcuccuagggguuacuucaaaauacgaagugggaaaagcucaauaaugagaucagaugcacccauuggcaaaugcaauucugaaugcaucacuccaaauggaagcauucccaaugacaaaccauuccaaaauguaaacaggaucacauacggggccugucccagauauguuaagcaaaacacucugaaauuggcaacagggaugcgaaauguaccagagaaacaaacuagaggcauauuuggcgcaaucgcggguuucauagaaaaugguugggagggaaugguggaugguugguacgguuucaggcaucaaaauucugagggaauaggacaagcagcagaucucaaaagcacucaagcagcaaucgaucaaaucaaugggaagcugaauagguugaucgggaaaaccaacgagaaauuccaucagauugaaaaagaauucucagaagucgaagggagaauucaggaccuugagaaauauguugaggacaccaaaauagaucucuggucauacaacgcggagcuucuuguugcccuggagaaccaacauacaauugaucuaacugacucagaaaugaacaaacuguuugaaaaaacaaagaagcaacugagggaaaaugcugaggauaugggcaaugguuguuucaaaauauaccacaaaugugacaaugccugcauaggaucaaucagaaauggaacuuaugaccacgauguauacagagaugaagcauuaaacaaccgguuccagaucaagggcguugagcugaagucaggauacaaagauuggauccuauggauuuccuuugccauaucauguuuuuugcuuuguguugcuuuguugggguucaucaugugggccugccaaaaaggcaacauuaggugcaacauuugcauuuga

SEQ ID NO: 43280 - RNA, 1701 nt, Artificial Sequence
  derived and/or modified CDS sequence (wt) from hemagglutinin__InfluenzaA__AHL90086
augaagacuaucauugcuuugagcuacauucuaugucugguuuucgcucaaaaacuuccuggaaaugacaacagcacggcaacgcugugccuugggcaccaugcaguaccaaacggaacgauagugaaaacaaucacgaaugaccaaauugaaguuacuaaugcuacugagcugguucagaguuccucaacaggugaaauaugcgacaguccucaucagauccuugauggagaaaacugcacacuaauagaugcucuauugggagacccucagugugauggcuuccaaaauaagaaaugggaccuuuuuguugaacgcagcaaagccuacagcaacuguuacccuuaugaugugccggauuaugccucccuuaggucacuaguugccucauccggcacacuggaguuuaacaaugaaagcuucaauuggacuggagucacucaaaacggaacaagcucugcuugcauaaggagauauaauaacaguuucuuuaguagauugaauugguugacccacuuaaaauucaaauacccagcauugaacgugacuaugccaaacaaugaaaaauuugacaaauuguacauuugggggguucaccacccggguacggacaaugaccaaaucuuccuguaugcucaagcaucaggaagaaucacagucucuaccaaaagaagccaacaaacuguaaucccgaauaucggaucuagacccagaguaaggaauauccccagcagaauaagcaucuauuggacaauaguaaaaccaggagacauacuuuugauuaacagcacagggaaucuaauugcuccuagggguuacuucaaaauacgaagugggaaaagcucaauaaugagaucagaugcacccauuggcaaaugcaauucugaaugcaucacuccaaauggaagcauucccaaugacaaaccauuccaaaauguaaacaggaucacauacggggccugucccagauauguuaagcaaaacacucugaaauuggcaacagggaugcgaaauguaccagagaaacaaacuagaggcauauuuggcgcaaucgcggguuucauagaaaaugguugggagggaaugguggaugguugguacgguuucaggcaucaaaauucugagggaauaggacaagcagcagaucucaaaagcacucaagcagcaaucgaucaaaucaaugggaagcugaauagguugaucgggaaaaccaacgagaaauuccaucagauugaaaaagaauucucagaagucgaagggaggauucaggaccuugagaaauauguugaggacaccaaaauagaucucuggucauacaacgcggagcuucuuguugcccuggagaaccaacauacaauugaucuaacugacucagaaaugaacaaacuguuugaaaaaacaaagaagcaacugagggaaaaugcugaggauaugggcaaugguuguuucaaaauauaccacaaaugugacaaugccugcauaggaucaaucagaaauggaacuuaugaccacgauguauacagagaugaagcauuaaacaaccgguuccagaucaagggcguugagcugaagucaggauacaaagauuggauccuauggauuuccuuugccauaucauguuuuuugcuuuguguugcuuuguugggguucaucaugugggccugccaaaaaggcaacauuaggugcaacauuugcauuuga

SEQ ID NO: 43281 - RNA, 1701 nt, Artificial Sequence
  derived and/or modified CDS sequence (wt) from hemagglutinin__InfluenzaA__AHL90098
augaagacuaucauugcuuugagcuacauucuaugucugguuuucgcucaaaaacuucccggaaaugacaacagcacggcaacgcugugccuugggcaccaugcaguaccaaacggaacgauagugaaaacaaucacgaaugaccaaauugaaguuacuaaugcuacugagcugguucagaguuccucaacagguggaauaugcgacaguccucaucagauccuugauggagaaaacugcacacuaauagaugcccuauugggagacccucagugugauggcuuccaaaauaagaaaugggaccuuuuuguugaacgcagcaaagccuacagcaacuguuacccuuaugaugugccggauuaugccucccuuaggucacuaguugccucaucuggcacacuggaguuuaacaaugaaagcuucaauuggacgggagucacucaaaauggaacaagcucugcuugcaaaaggggaucugauaacaguuucuuuaguagauugaauugguugacccacuuaaaauucaaauacccagcauugaacgugacuaugccaaacaaugaaaaauuugacaaauuguacauuugggggguucaccacccggguacggacaaugaccaaaucuuccuguaugcucaagcaucaggaagaaucacagucucuaccaaaagaagccaacaaacuguaaucccgaauaucggaucuagacccagaguaaggaauauccccagcagaauaagcaucuauuggacaauaguaaaaccgggagacauacuuuugauuaacagcacagggaaucuaauugcuccuagggguuacuucaaaauacgaagugggaaaagcucaauaaugagaucagaugcacccauugacaaaugcaauucugaaugcaucacuccaaauggaagcauucccaaugacaaaccauuucaaaauguaaacaggaucacauauggggccugucccagauauguuaagcagaacacccugaaauuggcaacaggaaugcgaaauguaccagagaaacaaacuagaggcauauuuggcgcaaucgcggguuucauagaaaaugguugggagggaaugguggaugguugguacgguuucaggcaucaaaauucugagggaauaggacaagcagcagaucucaaaagcacucaagcagcaaucaaucaaaucaaugggaagcugaauagguugaucgggaaaaccaacgagaaauuccaucagauugaaaaagaauucucagaaguagaagggagaauucaggaccucgagaaauauguugaggacacuaaaauagaucucuggucauacaacgcggagcuucuuguugcccuggagaaccaacauacaauugaucuaacugacucagaaaugaacaaacuguuugaaagaacaaagaagcaacugagagaaaaugcugaggauaugggcaaugguuguuucaaaauauaccacaaaugugacaaugccugcauaggaucaaucagaaauggaacuuaugaccaugauguauacagagaugaagcauuaaacaaccgguuccagaucaaaggcguugagcugaagucaggcuacaaagauuggauacuauggauuuccuuugccauaucauguuuuuugcuuuguguugcuuuguugggguucaucaugugggccugccaaaaaggcaacauuaggugcaacauuugcauuuaa

SEQ ID NO: 43282 - RNA, 1701 nt, Artificial Sequence
  derived and/or modified CDS sequence (wt) from hemagglutinin__InfluenzaA__AHL90110
augaagacuaucauugcuuugagcuacauucuaugucugguuuucgcucaaaaacuucccggaaaugacaacagcacggcaacgcugugccuugggcaccaugcaguaccaaacggaacgauagugaaaacaaucacgaaugaccaaauugaaguuacuaaugcuacugagcugguucagaguuccucaacaggugaaauaugcgacaguccucaucagauccuugauggagaaaacugcacacuaauagaugcucuauugggagacccucagugugauggcuuccaaaauaagaaaugggaccuuuuuguugaacgcagcaaagccuacagcaacuguuacccuuaugaugugccggauuaugccucccuuaggucacuaguugccucauccggcacacuggaguuuaacaaugaaagcuucaauuggacuggagucacucaaaacggaacaagcucugcuugcauaaggagaucuaauaacaguuucuuuaguagauugaauugguugacccacuuaaaauucaaauacccagcauugaacgugacuaugccaaacaaugaaaaauuugacaaauuguacauuugggggguucaccacccggguacggacaaugaccaaaucuuccuguaugcucaagcaucaggaagaaucacagucucuaccaaaagaagccaacaaacuguaaucccgaauaucggaucuagacccagaguaaggaauauccccagcagaauaagcaucuauuggacaauaguaaaaccgggagacauacuuuugauuaacagcacaggaaaucuaauugcuccuagggguuacuucaaaauacaaagugggaaaagcucaguaaugagaucagaugcacccauuggcaaaugcaauucugaaugcaucacuccaaauggaagcauucccaaugacaaaccauuccaaaauguaaacaggaucacauacggggccugucccagauauguuaagcaaaacacucugaaauuggcaacagggaugcgaaauguaccagagaaacaaacuagaggcauauuuggcgcaaucgcggguuucauagaaaaugguugggagggaaugguggaugguugguacgguuucaggcaucaaaauucugagggaauaggacaagcagcagaucucaaaagcacucaagcagcaaucgaucaaaucaaugggaagcugaauagguugaucgggaaaaccaacgagaaauuccaucagauugaaaaagaguucucagaagucgaagggagaauucaggaccuugagaaauauguugaggacaccaaaauagaucucuggucauacaacgcggagcuucuuguugcccuggagaaccaacauacaauugaucuaacugacucagaaaugaacaaacuguuugaaaaaacaaagaagcaacugagggaaaaugcugaggauaugggcaaugguuguuucaaaauauaccacaaaugugacaaugccugcauaggaucaaucagaaauggaacuuaugaccacgauguauacagagaugaagcauuaaacaaccgguuccagaucaagggcguugagcugaagucaggauacaaagauuggauccuauggauuuccuuugccauaucauguuuuuugcuuuguguugcuuuguugggguucaucaugugggccugccaaaaaggcaacauuaggugcaacauuugcauuuga

SEQ ID NO: 43283 - RNA, 1698 nt, Artificial Sequence
  derived and/or modified CDS sequence (wt) from hemagglutinin__InfluenzaA__AHL90122
augaaagcaaaacuacugguccuguuaugcacauuuacagcuacauaugcagacacaauauguauaggcuaccaugcuaacaacucgaccgacacuguugacacaguacuugaaaagaaugugacagugacacacucugucaaccugcuugagaacagucacaauggaaaacuaugucuauuaaaaggaauagccccacuacaguuggguaauugcagcguugccggguggaucuuaggaaacccagaaugcgaauuacugauuuccaaggagucaugguccuacauuguagaaaaaccaaauccugagaauggaacauguuacccagggcauuucgcugacuaugaggaacugagggagcaauugaguucaguaucuucauuugagagguucgaaauauuccccaaagaaagcucauggcccaaccacaccguaaccggagugucagcaucaugcucccauaauggggaaagcaguuuuuacagaaauuugcuauggcugacggggaagaaugguuuguacccaaaccugagcaaguccuaugcaaacaacaaagaaaaagaaguccuuguacuaugggguguucaucacccgccaaacauaggugaccaaaaggcccucuaucauacagaaaaugcuuaugucucuguagugucuucacauuauagcagaaaauucaccccagaaauagccaaaagacccaaaguaagagaucaagaaggaagaaucaacuacuacuggacucugcuugaacccggggauacaauaauauuugaggcaaauggaaaucuaauagcgccaagauaugcuuucgcacugaguagagguuuaggaucaggaaucaucaacucaaaugcaccaauggauaaaugugaugcgaagugccaaacaccucagggagcuauaaacagcagucuuccuuuccagaacguacacccagucacaauaggagaguguccaaaguaugucaggagugcaaaauuaaggaugguuacaggacuaaggaacaucccauccauucaauccagagguuuguuuggagccauugccgguuucauugaagggggguggacuggaaugguagaugguugguaugguuaucaucaucagaaugagcaaggaucuggcuaugcugcagaucaaaaaagcacacaaaaugccauuaaugggauuacaaacaaggugaacucuguaauugagaaaaugaacacucaauucacagcagugggcaaagaauucaacaaauuggaaagaaggauggaaaacuugaauaaaaaaguugaugauggguuuauagacauuuggacauauaaugcagaacuguugguccuacuggaaaaugaaaggacuuuggauuuccaugacuccaaugugaagaaucuguaugagaaaguaaaaagccaguuaaagaauaaugcuaaagaaauaggaaauggguguuuugaauucuaucacaaguguaacgaugaaugcauggagaguguaaagaauggaacuuaugacuauccaaaauauuccgaagaaucaaaguuaaacagggagaaaauugauggagugaaauuggaaucaaugggagucuaucagauucuggcgaucuacucaacagucgccaguucucugguucuuuuggucucccugggggcaaucagcuucuggauguguuccaaugggucuuugcaguguagaauaugcaucuaa

SEQ ID NO: 43284 - RNA, 1698 nt, Artificial Sequence
  derived and/or modified CDS sequence (wt) from hemagglutinin__InfluenzaA__AHL90133
augaaaguaaaacuacugguccuguuaugcacauuuacagcuacauaugcagacacaauauguauaggcuaccaugcuaacaacucgaccgacacuguugacacaguacuugaaaagaaugugacagugacacacucugucaaccugcuugagaacagucacaauggaaaacuaugucuauuaaaaggaauagccccacuacaauuggguaacugcagcguugccggguggaucuuaggaaacccagaaugcgaauuacugauuuccaaggagucaugguccuacauuguagaaaaaccaaauccugagaauggaacauguuacccagggcauuucgcugacuaugaggaacugagggagcaauugaguucaguaucuucauuugagagguucgaaauauuccccaaagaaagcucauggcccaaccacaccguaaccggagugucagcaucaugcucccauaauggggaaagcaguuuuuacagaaauuugcuauggcugacggggaagaaugguuuguacccaaaccugagcaaguccuaugcaaacaacaaagaaaaagaaguccuuguacuaugggguguucaucacccgccaaacauaggugaccaaaaggcccucuaucauacagaaaaugcuuauguuucuguagugucuucacauuauagcagaaaauucaccccagaaauagccaaaagacccaaaguaagagaucaagaaggaagaaucaacuacuacuggacucugcuugaacccggggauacaauaauauuugaggcaaauggaaaucuaauagcgccaagauaugcuuucgcacugaguagaggcuuuggaucaggaaucaucaacucaaaugcaccaauggauaaaugugaugcgaagugccaaacaccucagggagcuauaaacagcagucuuccuuuccagaacguacacccagucacaauaggagaguguccaaaguaugucaggagugcaaaauuaaggaugguuacaggacuaaggaacaucccauccauucaauccagagguuuguuuggagccauugccgguuucauugaagggggauggacuggaaugguagaugguugguaugguuaucaucaucagaaugagcaaggaucuggcuaugcugcagaucaaaaaagcacacaaaaugccauuaaugggauuacaaacaaggugaauucuguaauugagaaaaugaacacucaauucacagcagugggcaaagaauucaacaaauuggaaagaaggauggaaaacuugaauaaaaaaguugaugauggauuuauagacauuuggacauauaaugcagaacuguugguucuacuggaaaaugaaaggacuuuggauuuccaugacuccaaugugaagaaucuguaugagaaaguaaaaagccaguuaaagaauaaugcuaaagaaauaggaaauggguguuuugaauucuaucacaaguguaacgaugaaugcauggagaguguaaagaauggaacuuaugacuauccaaaauauuccgaagaaucaaaguuaaacagggagaaaauugauggagugaaauuggaaucaaugggagucuaucagauucuggcgaucuacucaacagucgccaguucucugguucuuuuggucucccugggggcaaucagcuucuggauguguuccaaugggucuuugcaguguagaauaugcaucuaa

SEQ ID NO: 43285 - RNA, 1698 nt, Artificial Sequence
  derived and/or modified CDS sequence (wt) from hemagglutinin__InfluenzaA__AHL90145
augaaagcaaaacuacugguccuguuaugcacauuuacagcuacauaugcagacacaauauguauaggcuaccaugcuaacaacucgaccgacacuguugacacaguacuugaaaagaaugugacagugacacacucugucaaccugcuugagaacagucacaauggaaaacuaugucuauuaaaaggaauagccccacuacaauuggguaauugcagcguugccggguggaucuuaggaaacccagaaugcgaauuacugauuuccaaggagucaugguccuacauuguagaaaaaccaaauccugagaauggaacauguuacccagggcauuucgcugacuaugaggaacugagggagcaauugaguucaguaucuucauuugagagguucgaaauauuccccaaagaaagcucauggcccaaccacaccguaaccggagugucagcaucaugcucccauaauggggaaagcaguuuuuacagaaauuugcuauggcugacggggaagaaugguuuguacccaaaccugagcaaguccuaugcaaacaacaaagaaaaagaaguccuuguacuaugggguguucaucacccgccaaacauaggugaccaaaaggcccucuaucauacagaaaaugcuuaugucucuguagugucuucacauuauagcagaaaauucaccccagaaauagccaaaagacccaaaguaagagaucaagaaggaagaaucaacuacuacuggacucugcuugaacccggggauacaauaauauuugaggcaaauggaaaucuaauagcgccaagauaugcuuucgcacugaguagagguuuaggaucagguaucaucaacucaaaugcaccaauggauaaaugugaugcgaagugccaaacaccucagggagcuauaaacagcagucuuccuuuccagaacguacacccagucacaauaggagaguguccaaaguaugucaggagugcaaaauuaaggaugguuacaggacuaaggaacaucccauccauucaauccagagguuuguuuggagccauugccgguuucauugaagggggguggacuggaaugguagaugguugguaugguuaucaucaucagaaugagcaaggaucuggcuaugcugcagaucaaaaaagcacacaaaaugccauuaaugggauuacaaacaaggugaauucuguaauugagaaaaugaacacucaauucacagcagugggcaaagaauucaacaaauuggaaagaaggauggaaaacuugaauaaaaaaguugaugauggguuuauagacauuuggacauauaaugcagaacuguugguccuacuggaaaaugaaaggacuuuggauuuccaugacuccaaugugaagaaucuguaugagaaaguaaaaagccaguuaaagaauaaugcuaaagaaauaggaaauggguguuuugaauucuaucacaaguguaacgaugaaugcauggagaguguaaagaauggaacuuaugacuauccaaaauauuccgaagaaucaaaguuaaacagggagaaaauugauggagugaaauuggaaucaaugggagucuaucagauucuggcgaucuacucaacagucgccaguucucugguucuuuuggucucccugggggcaaucagcuucuggauguguuccaaugggucuuugcaguguagaauaugcaucuaa

SEQ ID NO: 43286 - RNA, 1698 nt, Artificial Sequence
  derived and/or modified CDS sequence (wt) from hemagglutinin__InfluenzaA__AHL90157
augaaaguaaaacuacugguccuguuaugcacauuuacagcuacauaugcagacacaauauguauaggcuaccaugcuaacaacucgaccgacacuguugacacaguacuugaaaagaaugugacagugacacacucugucaaccugcuugagaacagucacaauggaaaacuaugucuauuaaaaggaauagccccacuacaauuggguaauugcagcguugccggguggaucuuaggaaacccagaaugcgaauuacugauuuccaaggagucaugguccuacauuguagaaaaaccaaauccugagaauggaacauguuacccagggcauuucgcugacuaugaggaacugagggagcaauugaguucagugucuucguuugagagguucgaaauauuccccaaagaaagcucauggcccaaccacaccguaaccggagugucagcaucaugcucccauaauggggaaagcaguuuuuacagaaauuugcuauggcugacggggaagaaugguuuguacccaaaccugagcaaguccuaugcaaacaacaaagaaaaagaaguccuuguacuaugggguguucaucacccgccaaacauaggugaccaaaaggcccucuaucauacagaaaaugcuuaugucucuguagugucuucacauuauagcagaaaauucaccccagaaauagccaagagacccaaaguaagagaucaagaaggaagaaucaacuacuacuggacucugcuugaacccggggauacuauaauauuugaggcaaauggaaaucuaauagcgccaagauaugcuuucgcacugaguagaggcuuuggaucaggaaucaucaacucaaaugcuccaauggauaaaugugaugcgaagugccaaacaccucagggagcuauaaacagcagucuuccuuuccagaacguacacccagucacaauaggagaguguccaaaguaugucaggagugcaaaauuaaggaugguuacaggacuaaggaacaucccauccauucaauccagagguuuguuuggagccauugccgguuucauugaagggggguggacuggaaugguagaugguugguaugguuaucaucaucagaaugagcaaggaucuggcuaugcugcagaucaaaaaagcacacaaaaugccauuaaugggauuacaaacaaggugaauucuguaauugagaaaaugaacacucaauucacagcagugggcaaagaauucaacaaauuggaaagaaggauggaaaacuugaauaaaaaaguugaugauggguuuauagacauuuggacauauaaugcagaacuguugguucuacuggaaaaugaaaggacuuuggauuuccaugacuccaaugugaagaaucuguaugagaaaguaaaaauccaguuaaagaauaaugcuaaagaaauaggaaauggguguuuugaauucuaucacaaguguaacgaugaaugcauggagaguguaaagaauggaacuuaugacuauccaaaauauuccgaagaaucaaaguuaaacagggagaaaauugauggagugaaauuggaaucaaugggagucuaucagauucuagcgaucuacucaacaaucgccaguucucugguucuuuuggucucccugggggcaaucagcuucuggauguguuccaaugggucuuugcaguguagaauaugcaucuaa

SEQ ID NO: 43287 - RNA, 1698 nt, Artificial Sequence; identical to SEQ ID NO: 43285
  derived and/or modified CDS sequence (wt) from hemagglutinin__InfluenzaA__AHL90169

SEQ ID NO: 43288 - RNA, 1698 nt, Artificial Sequence
  derived and/or modified CDS sequence (wt) from hemagglutinin__InfluenzaA__AHL90181
augaaaguaaaacuacugguccuguuaugcacauuugcagcuacauaugcagacacaauauguauaggcuaccaugcuaacaacucgaccgacacuguugacacaguacuugaaaagaaugugacagugacacacucugucaaccugcuugagaacagucacaauggaaaacuaugucuauuaaaaggaauagccccacuacaauuggguaauugcagcguugccggguggaucuuaggaaacccagaaugcgaauugcugauuuccaaggagucaugguccuacauuguagaaaaaccaaauccuaagaauggaacauguuacccagggcauuucgcugacuaugaggaacugagggagcaauugaguucaguaucuucauuugagagguucgaaauauuccccaaagaaagcucauggcccaaccacaccguaaccggagugucagcaucaugcucccauaauggggaaagcaguuuuuacagaaauuugcuauggcugacggggaagaaugguuuguacccaaaccugagcaaguccuaugcaaacaacaaagaaaaagaaguccuuguacuaugggguguucaucacccgccaaacauaggugaccaaaaggcccucuaucauacagaaaaugcuuaugucucuguagugucuucacauuauagcagaaaauucaccccagaaauagccaaaagacccaaaguaagagaucaagaaggaagaaucaauuacuacuggacucugcuugaacccggggauacaauaauauuugaggcaaauggaaaucuaauagcgccaagauaugcuuucgcacugaguagaggcuuuggaucaggaaucaucaacucaaaugcaccaauggauaaaugugaugcgaagugccaaacaccucagggagcuauaaacagcagucuuccuuuccagaacguacacccagucacaauaggagaguguccaaaguaugucagaagugcaaaauuaaggaugguuacaggacuaaggaacaucccauccauucaauccagagguuuguuuggagccauugccgguuucauugaagggggguggacuggaaugguagaugguugguaugguuaucaucaucagaaugagcaaggaucuggcuaugcugcagaucaaaaaagcacacaaaaugccauuaaugggauuacaaacaaggugaauucuguaauugagaaaaugaacacucaauucacagcagugggcaaagaauucaacaaauuggaaagaaggauggaaaacuugaauaaaaaaguugaugauggguuuauagacauuuggacauauaaugcagaacuguugguucuacuggaaaaugaaaggacuuuggauuuccaugacuccaaugugaagaaucuguaugagaaaguaaaaagccaguuaaagaauaaugcuaaagaaauaggaaauggguguuuugaauucuaucacaaguguaacgaugaaugcauggagaguguaaagaauggaacuuaugacuauccaaaguauuccgaagaaucaaaguuaaacagggagaaaauugauggagugaaauuggaaucaaugggagucuaucagauucuggcgaucuacucaacagucgccaguucucugguucuuuuggucucccugggggcaaucagcuucuggauguguuccaaugggucuuugcaguguagaauaugcaucuaa

SEQ ID NO: 43289 - RNA, 1698 nt, Artificial Sequence; identical to SEQ ID NO: 35182
  derived and/or modified CDS sequence (wt) from hemagglutinin__InfluenzaA__AHL90217

SEQ ID NO: 43290 - RNA, 1698 nt, Artificial Sequence; identical to SEQ ID NO: 35182
  derived and/or modified CDS sequence (wt) from hemagglutinin__InfluenzaA__AHL90229

SEQ ID NO: 43291 - RNA, 1698 nt, Artificial Sequence
  derived and/or modified CDS sequence (wt) from hemagglutinin__InfluenzaA__AHL90241
augaaaguaaaacuacugguccuguuaugcacauuuacagcuacauaugcagacacaauauguauaggcuaccaugcuaacaacucaaccgacacuguugacacaguacuugaaaagaaugugacagugacacacucugucaaccugcuugagaacagucacaauggaaaacuaugucuauuaaaaggaauagccccacuacaauuggguaauugcagcguugccggguggaucuuaggaaacccagaaugcgaauuacugauucccaaggagucaugguccuacauuguagaaaaaccaaauccugagaauggaacauguuacccagggcauuucgcugacuaugaggaacugagggagcaauugaguucaguaucuucauuugagagguucgaaauauuccccaaagaaagcucauggcccaaccacaccguaaccggagugucagcaucaugcucccauaauggggaaagcaguuuuuacagaaauuugcuauggcugacggggaagaaugguuuguacccaaaccugagcaaguccuaugcaaacaacaaagaaaaagaaguccuuguacuaugggguguucaucacccgccaaacauaggugaccaaaaggcccucuaucauacagaaaaugcuuaugucucuguagugucuucacauuauagcagaaaauucaccccagaaauagccaaaagacccaaaguaagagaucaagaaggaagaaucaauuacuacuggacucugcuugaacccggggauacaauaauauuugaggcaaauggaaaucuaauagcgccaagauaugcuuucgcacugaguagaggcuuuggaucaggaaucaucaacucaaaugcaccaauggauaaaugugaugcgaagugccaaacaccucagggagcuauaaacagcagccuuccuuuccagaacguacacccagucacaauaggagaguguccaaaguaugucaggagugcaaaauuaaggaugguuacaggacuaaggaacaucccauccauucaauccagagguuuguuuggagccauugccgguuucauugaagggggguggacuggaaugguagaugguugguaugguuaucaucaucagaaugagcaaggaucuggcuaugcugcagaucaaaaaagcacacaaaaugccauuaaugggauuacaaacaaggugaauucuguaauugagaaaaugaacacucaauucacagcagugggcaaagaauucaacaaauuggaaagaaggauggaaaacuugaauaaaaaaguugaugauggguuuauagacauuuggacauauaaugcagaacuguugguucuacuggaaaaugaaaggacuuuggauuuccaugacuccaaugugaagaaucuguaugagaaaguaaaaagccaguuaaagaauaaugcuaaagaaauaggaaauggguguuuugaauucuaucacaaguguaacgaugaaugcauggagaguguaaagaauggaacuuaugacuauccaaaauauuccgaagaaucaaaguuaaacagggagaaaauugauggagugaaauuggaaucaaugggagucuaucagauucuggcgaucuacucaacagucgccaguucucugguucuuuuggucucccugggggcaaucagcuucuggauguguuccaaugggucuuugcaguguagaauaugcaucuaa

SEQ ID NO: 43292 - RNA, 1698 nt, Artificial Sequence
  derived and/or modified CDS sequence (wt) from hemagglutinin__InfluenzaA__AHL90253
augaaaguaaaacuacugguccuguuaugcacauuuacagcuacauaugcagacacaauauguauaggcuaccaugcuaacaacucgaccgacacuguugacacaguacuugaaaagaaugugacagugacacacucugucaaccugcuugagaacagucacaauggaaaacuaugucuauuaaaaggaauagccccacuacaauuggguaacugcagcguugccggguggaucuuaggaaacccagaaugcgaauuacugauuuccaaggagucaugguccuacauuguagaaaaaccaaauccugagaauggaacauguuacccagggcauuucgcugacuaugaggaacugagggagcaauugaguucaguaucuucauuugagagguucgaaauauuccccaaaggaagcucauggcccaaccacaccguaaccggagugucagcaucaugcucccauaauggggaaagcaguuuuuacagaaauuugcuauggcugacggggaagaaugguuuguacccaaaccugagcaaguccuaugcaaacaacaaagaaaaagaaguccuuguacuaugggguguucaucacccgccaaacauaggugaccaaaagacccucuaucauacagaaaaugcuuauguuucuguagugucuucacauuauagcagaaaauucaccccagaaauagccaaaagacccaaaguaagagaucaagaaggaagaaucaacuacuacuggacucugcuugaacccggggauacaauaauauuugaggcaaauggaaaucuaauagcgccaagauaugcuuucgcacugaguagaggcuuuggaucaggaaucaucaacucaaaugcaccaauggauaaaugugaugcgaagugccaaacaccucagggagcuauaaacagcagucuuccuuuccagaacguacacccagucacaauaggagaguguccaaaguaugucaggagugcaaaauuaaggaugguuacaggacuaaggaacaucccauccauucaauccagagguuuguuuggagccauugccgguuucauugaagggggguggacuggaaugguagaugguugguaugguuaucaucaucagaaugagcaaggaucuggcuaugcugcagaucaaaaaagcacacaaaaugccauuaaugggauuacaaacaaggugaauucuguaauugagaaaaugaacacucaauucacagcagugggcaaagaauucaacaaauuggaaagaaggauggaaaacuugaauaaaaaaguugaugauggguuuauagacauuuggacauauaaugcagaacuguugguucuacuggaaaaugaaaggacuuuggauuuccaugacuccaaugugaagaaucuguaugagaaaguaaaaagccaguuaaagaauaaugcuaaagaaauaggaaauggguguuuugaauucuaucacaaguguaacgaugaaugcauggagaguguaaagaauggaacuuaugacuauccaaaauauuccgaaguaucaaaguuaaacagggagaaaauugauggagugaaauuggaaucaaugggagucuaucagauucuggcgaucuacucaacagucgccaguucucugguucuuuuggucucccugggggcaaucagcuucuggauguguuccaaugggucuuugcaguguagaauaugcaucuaa

SEQ ID NO: 43293 - RNA, 1698 nt, Artificial Sequence
  derived and/or modified CDS sequence (wt) from hemagglutinin__InfluenzaA__AHL90265
augaaaguaaaacuacugguccuguuaugcacauuuacagcuacauaugcagacacaauauguauaggcuaccaugcuaacaacucgaccgacacuguugacacaguacuugaaaagaaugugacagugacacacucugucaaccugcuugagaacagccacaauggaaaacuaugucuauuaaaaggaauagccccacuacaauuggguaauugcagcguugccggguggaucuuaggaaacccagaaugcgaauuacugauuuccaaggagucaugguccuacauuguagaaaaaccaaauccugagaauggaacauguuacccagggcauuucgcugacuaugaggaacugagggagcaauugaguucaguaucuucauuugagagguucgaaauauuccccaaagaaagcucauggcccaaccacaccguaaccggagugucagcaucaugcucccauaauggggaaagcaguuuuuacagaaauuugcuauggcugacggggaagaaugguuuguacccaaaccugagcaaguccuaugcaaacaacaaagaaaaagaaguccuuguacuaugggguguucaucacccgccaaacauaggugaccaaaaggcccucuaucauacagaaaaugcuuauguuucuguagugucuucacauuauagcagaaaauucaccccagaaauagccaaaagacccaaaguaagagaucaagaaggaagaaucaacuacuacuggacucugcuugaacccggggauacaauaauauuugaggcaaauggaaaucuaauagcgccaagauaugcuuucgcacugaguagaggcuuuggaucaggaaucaucaacucaaaugcaccaauggauaaaugugaugcgaagugccaaacaccucagggagcuauaaacagcagucuuccuuuccagaacguacacccagucacaauaggagaguguccaaaguaugucagaagugcaaaauuaaggaugguuacaggacuaaggaacaucccauccauucaauccagagguuuguuuggagccauugccgguuucauugaagggggguggacuggaaugguagaugguugguaugguuaucaucaucagaaugagcaaggaucuggcuaugcugcagaucaaaaaagcacacaaaaugccauuaaugggauuacaaacaaggugaauucuguaauugagaaaaugaacacucaauucacagcagugggcaaagaauucaacaaauuggaaagaaggauggaaaacuugaauaaaaaaguugaugauggguuuauagacauuuggacauauaaugcugaacuguugguucuacuggaaaaugaaaggacuuuggauuuccaugacuccaaugugaagaaucuguaugagaaaguaaaaagccaguuaaagaacaaugcuaaagaaauaggaaauggguguuuugaauucuaucacaaguguaacgaugaaugcauggagaguguaaagaauggaacuuaugacuauccaaaauauuccgaagaaucaaaguuaaacagggagaaaauugauggagugaaauuggaaucaaugggagucuaucagauucuggcgaucuacucaacagucgccaguucucugguucuuuuggucucccugggggcaaucagcuucuggauguguuccaaugggucuuugcaguguagaauaugcaucuaa

SEQ ID NO: 43294 - RNA, 1698 nt, Artificial Sequence
  derived and/or modified CDS sequence (wt) from hemagglutinin__InfluenzaA__AHL90277
augaaaguaaaacuacugguccuguuaugcacauuuacagcuacauaugcagacacaauauguauaggcuaccaugcuaacaacucgaccgacacuguugacacaguacuugaaaagaaugugacagugacacacucugucaaccugcuugagaacagucacaauggaaaacuaugucuauuaaaaggaauagccccacuacaauuggguaacugcagcguugccggguggaucuuaggaaacccagaaugcgaauuacugauuuccaaggagucaugguccuacauuguagaaaaaccaaauccugagaauggaacauguuacccagggcauuucgcugacuaugaggaacugagggagcaauugaguucaguaucuucauuugagagguucgaaauauuccccaaagaaagcucauggcccaaccacaccguaaccggagugucagcaucaugcucccauaauggggaaagcaguuuuuacagaaauuugcuauggcugacggggaagaaugguuuguacccaaaccugagcaaguccuaugcaaacaacaaagaaaaagaaguccuuguacuaugggguguucaucacccgccaaacauaguugaccaaaagacccucuaucauacagaaaaugcuuauguuucuguagugucuucacauuauagcagaaaauucaccccagaaauagccaaaagacccaaaguaagagaucaagaaggaagaaucaacuacuacuggacucugcuugaacccggggauacaauaauauuugaggcaaauggaaaucuaauagcgccaagauaugcuuucgcacugaguagaggcuuuggaucaggaaucaucaacucaaaugcaccaauggauaaaugugaugcgaagugccaaacaccucagggagcuauaaacagcagucuuccuuuccagaacguacacccagucacaauaggagaguguccaaaguaugucaggagugcaaaauuaaggaugguuacaggacuaaggaacaucccauccauucaauccagagguuuguuuggagccauugccgguuucauugaagggggguggacuggaaugguagaugguugguaugguuaucaucaucagaaugagcaaggaucuggcuaugcugcagaucaaaaaagcacacaaaaugccauuaaugggauuacaaacaaggugaauucuguaauugagaaaaugaacacucaauucacagcagugggcaaagaauucaacaaauuggaaagaaggauggaaaacuugaauaaaaaaguugaugauggguuuauagacauuuggacauauaaugcagaacuguugguucuacuggaaaaugaaaggacuuuggauuuccaugacuccaaugugaagaaucuguaugagaaaguaaaaagccaguuaaagaauaaugcuaaagaaauaggaaauggguguuuugaauucuaucacaaguguaacgaugaaugcauggagaguguaaagaauggaacuuaugacuauccaaaauauuccgaagaaucaaaguuaaacagggagaaaauugauggagugaaauuggaaucaaugggagucuaucagauucuggcgaucuacucaacagucgccaguucucugguucuuuuggucucccugggggcaaucagcuucuggauguguuccaaugggucuuugcaguguagaauaugcaucuaa

SEQ ID NO: 43295 - RNA, 1698 nt, Artificial Sequence
  derived and/or modified CDS sequence (wt) from hemagglutinin__InfluenzaA__AHL90289
augaaaguaaaacuacugguccuguuaugcacauuuacagcuacauaugcagacacaauauguauaggcuaccaugcuaacaacucgaccgacacuguugacacaguacuugaaaagaaugugacagugacacacucugucaaccugcuugagaacagucacaauggaaaacuaugucuauuaaaaggaauagccccacuacaauuggguaauugcagcguugccggguggaucuuaggaaacccagaaugcgaauuacugauuuccaaggagucaugguccuacauuguagaaaaaccaaauccugagaauggaacauguuacccagggcauuucgcugacuaugaggaacugagggagcaauugaguucaguaucuucauuugagagguuugaaauauuccccaaagaaagcucauggcccaaccacaccguaaccggagugucagcaucaugcucccauaauggggaaagcaguuuuuacagaaauuugcuauggcugacggggaagaaugguuuguacccaaaccugagcaaguccuaugcaaacaacaaagaaaaagaaguccuuguacuaugggguguucaucacccgccaaacauaggugaccaaaaggcccucuaucauacagaaaaugcuuaugucucuguagugucuucacauuauagcagaaaauucaccccagaaauagccaaaagacccaaaguaagagaucaagaaggaagaaucaauuacuacuggacucugcuugagcccagggauacaauaauauuugaggcaaauggaaaucuaauagcgccaagauaugcuuucgcacugaguagaggcuuuggaucaggaaucaucaacucaaaugcaccaauggauaaaugugaugcaaagugccaaacaccucagggagcuauaaacagcagucuuccuuuccagaacguacacccagucacaauaggagaguguccaaaguaugucaggagugcaaaauuaaggaugguuacaggacuaaggaacaucccauccauucaauccagagguuuguuuggagccauugccgguuucauugaagggggguggacuggaaugguagaugguugguaugguuaucaucaucagaaugagcaaggaucuggcuaugcugcagaucaaaaaagcacacaaaaugccauuaaugggauuacaaacaaggugaauucuguaauugagaaaaugaacacucaauucacagcagugggcaaagaauucaacaaauuggaaagaaggauggaaaacuugaauaaaaaaguugaugauggguuuauagacauuuggacauauaaugcagaacuguugguucuacuggaaaaugaaaggacuuuggauuuccaugacuccaaugugaagaaucuguaugagaaaguaaaaagccaguuaaagaauaaugcuaaagaaauaggaaauggguguuuugaauucuaucacaaguguaacgaugaaugcauggagaguguaaagaauggaacuuaugacuauccaaaauauuccgaagaaucaaaguuaaacagggagaaaauugauggagugaaauuggaaucaaugggagucuaucagauucuggcgaucuacucaacagucgccaguucucugguucuuuuggucucccugggggcaaucagcuucuggauguguuccaaugggucuuugcaguguagaauaugcaucuaa

SEQ ID NO: 43296 - RNA, 1698 nt, Artificial Sequence; identical to SEQ ID NO: 43295
  derived and/or modified CDS sequence (wt) from hemagglutinin__InfluenzaA__AHL90301

SEQ ID NO: 43297 - RNA, 1698 nt, Artificial Sequence
  derived and/or modified CDS sequence (wt) from hemagglutinin__InfluenzaA__AHL90325
augaaaguaaaacuacugguccuguuaugcacauuuacagcuacauaugcagacacaauauguauaggcuaccaugcuaacaacucgaccgacacuguugacacaguacuugaaaagaaugugacagugacacacucugucaaccugcuugagaacagucacaauggaaaacuaugucuauuaaaaggaauagccccacuacaauuggguaauugcagcguugccggguggaucuuaggaaacccagaaugcgaauuacugauuuccaaggagucaugguccuacauuguagaaaaaccaaauccugagaauggaacauguuacccagggcauuucgcugacuaugaagaacugagggagcaauugaguucaguaucuucauuugagagguucgaaauauuccccaaagaaagcucauggcccaaccacaccguaaccggagugucagcaucaugcucccauaauggggaaagcaguuuuuacagaaauuugcuauggcugacggggaagaaugguuuguacccaaaccugagcaaguccuaugcaaacaacaaagaaaaagaaguccuuguacuaugggguguucaucacccgccaaacauaggugaccaaaaggcccucuaucauacagaaaaugcuuauguuucuguagugucuucacauuauagcagaaaauucaccccagaaauagccaaaagacccaaaguaagagaucaagaaggaagaaucaacuacuacuggacucugcuugaacccggggauacaauaauauuugaggcaaauggaaaucuaauagcaccaagauaugcuuucgcacugaguagaggcuuuggaucaggaaucaucaacucaaaugcaccaauggauaaaugugaugcgaagugccaaacaccucagggagcuauaaacagcagucuuccuuuccagaacguacacccagucacaauaggagaguguccaaaguaugucaggagugcaaaauuaaggaugguuacaggacuaaggaacaucccauccauucaauccagagguuuguuuggagccauugccgguuucauugaaggaggguggacuggaaugguagaugguugguaugguuaucaucaucagaaugagcaaggaucuggcuaugcugcagaucaaaaaagcacacaaaaugccauuaaugggauuacaaacaaggugaauucuguaauugagaaaaugaacacucaauucacagcagugggcaaagaauucaacaaauuggaaagaaggauggaaaacuugaauaaaaaaguugaugauggguuuauagacauuuggacauauaaugcagaacuguugguucuacuggaaaaugaaaggacuuuggauuuccaugacuccaaugugaagaaucuguaugagaaaguaaaaagccaguuaaagaauaaugcuaaagaaaugggaaauggguguuuugaauucuaucacaaguguaacgaugaaugcauggagaguguaaagaauggaacuuaugacuauccaaaauauuccgaagaaucaaaguuaaacagggagaaaauugauggagugaaauuggaaucaaugggagucuaucagauucuggcgaucuacucaacagucgccaguucucugguucuuuuggucucccugggggcaaucagcuucuggauguguuccaaugggucuuugcaguguagaauaugcaucuaa

SEQ ID NO: 43298 - RNA, 1698 nt, Artificial Sequence; identical to SEQ ID NO: 43297
  derived and/or modified CDS sequence (wt) from hemagglutinin__InfluenzaA__AHL90337

SEQ ID NO: 43299 - RNA, 1698 nt, Artificial Sequence
  derived and/or modified CDS sequence (wt) from hemagglutinin__InfluenzaA__AHL90349
augaaaguaaaacuacugguccuguuaugcacauuuacagcuacauaugcagacacaauauguauaggcuaccaugcuaacaacucgaccgacacuguugacacaguacuugaaaagaaugugacagugacacacucugucaaccugcuugagaacagucacaauggaaaacuaugucuauuaaaaggaauagccccacuacaauuggguaauugcagcguugccggguggaucuuaggaaacccagaaugcgaauuacugauuuccaaggagucaugguccuacauuguagaaaaaccaaauccugagaauggaacauguuacccagggcauuucgcugacuaugaggaacugagggagcaauugaguucaguaucuucauuugagagguucgaaauauuccccaaagaaagcucauggcccaaccacaccguaaccggagugucagcaucaugcucccauaauggggaaagcaguuuuuacagaaauuugcuauggcugacggggaagaaugguuuguacccaaaccugagcaaguccuaugcaaacaacaaagaaaaagaaguccuuguacuaugggguguucaucacccgccaaacauaggugaccaaaaggcccucuaucauacagaaaaugcuuaugucucuguagugucuucacauuauagcagaaaauucaccccagaaauagccaaaagacccaaaguaagagaucaagaaggaagaaucaacuacuacuggacucugcuugaacccggggauacaauaauauuugaggcaaauggaaaucuaauagcgccaagauaugcuuucgcacugaguagaggcuuuggaucuggaaucaucaacucaaaugcaccaauggauaaaugugaugcgaagugccaaacaccucagggagcuauaaacagcagucuuccuuuccagaacguacacccagucacaauaggagaguguccaaaguaugucaggagugcaaaauuaaggaugguuacaggacuaaggaacaucccauccauucaauccagagguuuguuuggagccauugccgguuucauugaagggggguggacuggaaugguagaugguugguaugguuaucaucaucagaaugagcaaggaucuggcuaugcugcagaucaaaaaagcacacaaaaugccauuaaugggauuacaaacaaggugaauucuguaauugagaaaaugaacacucaauucacagcagugggcaaagaauucaacaaauuggaaagaaggauggaaaacuugaauaaaaaaguugaugauggguuuauagacauuuggacauauaaugcagaacuguugguucuacuggaaaaugaaaggacuuuggauuuccaugacuccaaugugaagaaucuguaugagaaaguaaaaagccaguuaaagaauaaugcuaaagaaauaggaaauggguguuuugaauucuaucacaaguguaacgaugaaugcauggagaguguaaagaauggaacuuaugacuauccaaaauauuccgaagaaucaaaguuaaacagggagaaaauugauggagugaaauuggaaucaaugggagucuaucagauucuggcgaucuacucaacagucgccaguucucugguucuuuuggucucccugggggcaaucagcuucuggauguguuccaaugggucuuugcaguguagaauaugcaucuag

SEQ ID NO: 43300 - RNA, 1698 nt, Artificial Sequence
  derived and/or modified CDS sequence (wt) from hemagglutinin__InfluenzaA__AHL90361
augaaaguaaaacuacugguccuguuaugcacauuuacagcuacauaugcagacacaauauguauaggcuaccaugcuaacaacucgaccgacacuguugacacaguacuugaaaagaaugugacagugacacacucugucaaccugcuugagaacagucacaauggaaaacuaugucuauuaaaaggaauagccccacuacaauuggguaauugcagcguugccggguggaucuuaggaaacccagaaugcgaauuacugauuuccaaggagucaugguccuacauuguagaaaaaccaaauccugagaauggaacauguuacccagggcauuucgcugacuaugaggaacugagggagcaauugaguucaguaucuucauuugagagguucgaaauauuccccaaagaaagcucauggcccaaccacaccguaaccggagugucagcaucaugcucccauaauggggaaagcaguuuuuacagaaauuugcuauggcugacggggaagaaugguuuguacccaaaccugagcaaguccuaugcaaacaacaaagaaaaagaaguccuuguacuaugggguguucaucacccgccaaacauaggugaccaaaaggcccucuaucauacagaaaaugcuuauguuucuguagugucuucacauuauagcagaaaauucaccccagaaauagccaaaagacccaaaguaagagaucaagaaggaagaaucaacuacuacuggacucugcuugaacccggggauacaauaauauuugaggcaaauggaaaucuaauagcaccaagauaugcuuucgcacugaguagaggcuuuggaucaggaaucaucaacucaaaugcaccaauggauaaaugugaugcgaagugccaaacaccucagggagcuauaaacagcagucuuccuuuccagaacguacacccagucacaauaggagaguguccaaaguaugucaggagugcaaaauuaaggaugguuacaggacuaaggaacaucccauccauucaauccagagguuuguuuggagccauugccgguuucauugaaggaggguggacuggaaugguagaugguugguaugguuaucaucaucagaaugagcaaggaucuggcuaugcugcagaucaaaaaagcacacaaaaugccauuaaugggauuacaaacaaggugaauucuguaauugagaaaaugaacacucaauucacagcagugggcaaagaauucaacaaauuggaaagaaggauggaaaacuugaauaaaaaaguugaugauggguuuauagacauuuggacauauaaugcagaacuguugguucuacuggaaaaugaaaggacuuuggauuuccaugacuccaaugugaagaaucuguaugagaaaguaaaaagccaguuaaagaauaaugcuaaagaaauaggaaauggguguuuugaauucuaucacaaguguaacgaugaaugcauggagaguguaaagaauggaacuuaugacuauccaaaauauuccgaagaaucaaaguuaaacagggagaaaauugauggagugaaauuggaaucaaugggagucuaucagauucuggcgaucuacucaacagucgccaguucucugguucuuuuggucucccugggggcaaucagcuucuggauguguuccaaugggucuuugcaguguagaauaugcaucuaa

SEQ ID NO: 43301 - RNA, 1698 nt, Artificial Sequence
  derived and/or modified CDS sequence (wt) from hemagglutinin__InfluenzaA__AHL90373
augaaaguaaaacuacugguccuguuaugcacauuuacagcuacauaugcagacacaauauguauaggcuaccaugcuaacaacucgaccgacacuguugacacaguacuugaaaagaaugugacagugacacacucugucaaccugcuugagaacagucacaauggaaaacuaugucuauuaaaaggaauagccccacuacaauuggguaacugcagcguugccggguggaucuuaggaaacccagaaugcgaauuacugauuuccaaggagucaugguccuacauuguagaaaaaccaaauccugagaauggaacauguuacccagggcauuucgcugacuaugaggaacugagggagcaauugaguucaguaucuucauuugagagguucgaaauauuccccaaagaaagcucauggcccaaccacaccguaaccggagugucagcaucaugcucccauaauggggaaagcaguuuuuacagaaauuugcuauggcugacggggaagaaugguuuguacccaaaccugagcaaguccuaugcaaacaacaaagaaaaagaaguccuuguacuaugggguguucaucacccgccaaacauaguugaccaaaagacccucuaucauacagaaaaugcuuauguuucuguagugucuucacauuauagcagaaaauucaccccagaaauagccaaaagacccaaaguaagagaucaagaaggaagaaucaacuacuacuggacucugcuugaacccggggauacaauaauauuugaggcaaauggaaaucuaauagcgccaagauaugcuuucgcacugaguagaggcuuuggaucaggaaucaucaacucaaaugcaccaauggauaaaugugaugcgaagugccaaacaccucagggagcuauaaacagcagucuuccuuuccagaacguacacccagucacaauaggagaguguccaaaguaugucaggagugcaaaauuaaggaugguuacaggacuaaggaacaucccauccauucaauccagagguuuguuuggagccauugccgguuucauugaagggggauggacuggaaugguagaugguugguaugguuaucaucaucagaaugagcaaggaucuggcuaugcugcagaucaaaaaagcacacaaaaugccauuaaugggauuacaaacaaggugaauucuguaauugagaaaaugaacacucaauucacagcagugggcaaagaauucaacaaauuggaaagaaggauggaaaacuugaauaaaaaaguugaugauggguuuauagacauuuggacauauaaugcagaacuguugguucuacuggaaaaugaaaggacuuuggauuuccaugacuccaaugugaagaaucuguaugagaaaguaaaaagccaguuaaagaauaaugcuaaagaaauaggaaauggguguuuugaauucuaucacaaguguaacgaugaaugcauggagaguguaaagaauggaacuuaugacuauccaaaauauuccgaagaaucaaaguuaaacagggagaaaauugauggagugaaauuggaaucaaugggagucuaucagauucuggcgaucuacucaacagucgccaguucucugguucuuuuggucucccugggggcaaucagcuucuggauguguuccaaugggucuuugcaguguagaauaugcaucuaa

SEQ ID NO: 43302 - RNA, 1701 nt, Artificial Sequence
  derived and/or modified CDS sequence (wt) from hemagglutinin__InfluenzaA__AHL90385
augaagacuaucauugcuuugagcuacauucaaugucugguuuucgcucaaaaauuuccuggaaaugacaacagcacggcaacgcugugccuugggcaccaugcaguaccaaacggaacgauagugaaaacaaucacgaaugaccaaauugaaguuacuaaugcuacugagcugguucagaguuccucaacaggugaaauaugcgacaguccucaucagauccuugauggagaaaacugcacacuaauagaugcucuauugggagacccucagugugauggcuuccaaaauaagaauugggaccuuuuuguugaacgcagcaaagccuacagcaacuguuacccuuaugaugugccggauuaugccucccuuaggucacuaguugccucauccggcacacuggaguuuaacaaugaaagcuucaauuggacuggagucacucaaaacggaacaagcucugcuugcauaaggagaucuaauaacaguuucuuuaguagauugaauugguugacccacucaaaauucaaauacccagcauugaacgugacuaugccaaacaaugaaaauuuugacaaauuguacauuugggggguucaccacccggguacggacaaugaccaaaucuuccuguaugcucaagcaucaggaagaaucacagucucuaccaaaagaagccaacaaacuguaaucccgaauaucggaucuagacccagaguaaggaauaucccuagcagaauaagcaucuauuggacaauaguaaaaccgggagacauacuuuugauuaacagcacagggaaucuaauugcuccuagggguuacuucaaaauacgaagugggaaaagcucaauaaugagaucagaugcacccauuggcaaaugcaauucugaaugcaucacuccaaauggaagcauucccaaugacaaaccauuccaaaauguaaacaggaucacauacggggccugucccagauauguuaagcaaaacacucugaaauuggcaacagggaugcgaaauguaccagagaaacaaacuagaggcauauuuggcgcaaucgcugguuucauagaaaaugguugggagggaaugguggaugguugguacgguuucaggcaucaaaauucugagggaauaggacaagcagcagaucucaaaagcacucaagcagcaaucgaucaaaucaaugggaagcugaauagguugaucgggagaaccaacgagaaauuccaucagauugaaaaagaauucucagaagucgaagggagaauucaggaccuugagaaauauguugaggacaccaaaauagaucucuggucauacaacgcggagcuucuuguugcccuggagaaccaacauacaauugaucuaacugauucagaaaugaacaaacuguuugaaaaaacaaagaagcaacugagggaaaaugcugaggauaugggcaaugguuguuucaaaaucuaccacaaaugugacaaugccugcauaggaucaaucagaaauggaacuuaugaccacgaugucuacagagaugaagcauuaaacaaccgguuccagaucaagggcguugagcugaagucaggauacaaagauuggauccuauggauuuccuuugccauaucauguuuuuugcuuugcauugcuuuguugggguucaucaugugggccugccaaaaaggcaacauuaggugcaacauuugcauuuga

SEQ ID NO: 43303 - RNA, 1701 nt, Artificial Sequence
  derived and/or modified CDS sequence (wt) from hemagglutinin__InfluenzaA__AHL90397
augaagacuaucauugcuuugagcuacauucuaugucugguuuucgcucaaaaacuuccuggaaaugacaacagcacggcaacgcugugccuugggcaccaugcaguaccaaacggaacgauagugaaaacaaucacgaaugaccagauugaaguuacuaaugcuacugagcugguucagaguuccucaacaggugaaauaugcgacaguccucaucagauccuugauggagaaaacugcacacuaauagaugcucuauugggagacccucagugugauggcuuccaaaauaagaaaugggaccuuuuuguugaacgcagcaaagccuacagcaacuguuacccuuaugaugugccggauuaugccucccuuaggucacuaguugccucauccggcacacuggaguuuaacaaugaaagcuucaauuggacuggagucacucaaaacggaacaagcucugcuugcauaaggagaucuaauaacaguuucuuuaguagauugaauugguugacccacuuaaaauucaaauacccagcauugaacgugacuaugccaaacaaugaacaauuugacaaauuguacauuugggggguucaccacccggguacggacaaugaccaaaucuuccuguaugcucaagcaucaggaagaaucacagucucuaccaaaagaagccaacaaacuguaaucccgaauaucggaucuagacccagaguaaggaauaucccuagcagaauaagcaucuauuggacaauaguaaaaccgggagacauacuuuugauuaacagcacagggaaucuaauugcuccuagggguuacuucaaaauacgaagugggaaaagcucaauaaugagaucagaugcacccauuggcaaaugcaguucugaaugcaucacuccaaauggaagcauucccaaugacaaaccauuccaaaauguaaacaggaucacauacggggccugucccagauauguuaagcaaaacacucugaaauuggcaacagggaugcgaaauguaccagagaaacaaacuagaggcauauuuggcgcaaucgcggguuucauagaaaaugguugggagggaaugguggaugguugguacgguuucaggcaucaaaauucugagggaagaggacaagcagcagaucucaaaagcacucaagcagcaaucgaucaaaucaaugggaagcugaauagauugaucgggaaaaccaacgagaaauuccaucagauugaaaaagaauucucagaagucgaagggagaauucaggaccuugagaaauauguugaggacaccaaaauagaucucuggucauacaacgcggagcuucuuguugcccuggagaaccaacauacaauugaucuaacugacucagaaaugaacaaacuguuugaaaaaacaaagaagcaacugagggaaaaugcugaggauaugggcaaugguuguuucaaaauauaccacaaaugugacaaugccugcauaggaucaaucagaaauggaacuuaugaccacgauguauacagagaugaagcauuaaacaaccgguuccagaucaagggaguugagcugaagucaggguacaaagauuggauccuauggauuuccuuugccauaucauguuuuuugcuuuguguugcuuuguugggguucaucaugugggccugccaaaaaggcaacauuaggugcaacauuugcauuuga

SEQ ID NO: 43304 - RNA, 1701 nt, Artificial Sequence; identical to SEQ ID NO: 34548
  derived and/or modified CDS sequence (wt) from hemagglutinin__InfluenzaA__AHL90410

SEQ ID NO: 43305 - RNA, 1701 nt, Artificial Sequence
  derived and/or modified CDS sequence (wt) from hemagglutinin__InfluenzaA__AHL90422
augaagacuaucauugcuuugagcuacauucuaugucugguuuucgcucaaaaacuuccuggaaaugacaacagcacggcaacgcugugccuugggcaccaugcaguaccaaacggaacgauagugaaaacaaucacgaaugaccaaauugaaguuacuaaugcuacugagcugguucagaguuccucaacaggugaaauaugcgacaguccucaucagauccuugauggagaaaacugcacacuaauagaugcucuauugggagacccucagugugauggcuuccaaaacaagaaaugggaccuuuuuguugaacgcagcaaagccuacagcaacuguuacccuuaugaugugccggauuaugccucccuuaggucacuaguugccucauccggcacacuggaguuuaacaaugaaagcuucaauuggacuggagucacucaaaacggaacaagcucugcuugcauaaggagaucuaauaacaguuucuuuaguagauugaauugguugacccacucaaaauucaaauacccagcauugaacgugacuaugccaaacaaugaagaauuugacaaauuguacauuugggggguucaccacccggguacggacaaugaccaaaucuuccuguaugcucaagcaucaggaagaaucacagucucuaccaaaagaagccaacaaacuguaaucccgaauaucggaucuagacccagaguaaggaauauccccagcagaauaagcaucuauuggacaauaguaaaaccgggagacauacuuuugauuaacagcacagggaaucuaauugcuccuagggguuacuucaaaauacgaagugggaaaagcucaauaaugagaucagaugcacccauuggcaaaugcaauucugaaugcaucacuccaaauggaagcauucccaaugacaaaccauuccaaaauguaaacaggaucacauacggggccugucccagauauguuaagcaaaacacucugaaauuggcaacagggaugcgaaauguaccagagaaacaaacuagaggcauauuuggcgcaaucgcggguuucauagaaaaugguugggagggaaugguggaugguugguacgguuucaggcaucaaaauucugagggaauaggacaagcagcagaucucaaaagcacucaagcagcaaucgaucaaaucaaugggaagcugaauagguugaucgggaaaaccaacgagaaauuccaucagauugaaaaagaauucucagaagucgaagggaggauucaggaccuugagaaauauguugaggacaccaaaauagaucucuggucauacaacgcggagcuucuuguugcccuggagaaccaacauacaauugaucuaacugacucagaaaugagcaaacuguuugaaaaaacaaagaagcaacugagggaaaaugcugaggauaugggcaaugguuguuucaaaauauaccacaaaugugacaauaccugcauaggaucaaucagaaauggaacuuaugaccacaauguauacagagaugaagcauuaaacaaccgguuccagaucaagggcguugagcugaagucaggauacaaagauuggauccuauggauuuccuuugccauaucauguuuuuugcuuuguguugcuuuguugggguucaucaugugggccugccaaaaaggcaacauuaggugcaacauuugcauuuga

SEQ ID NO: 43306 - RNA, 1701 nt, Artificial Sequence
  derived and/or modified CDS sequence (wt) from hemagglutinin__InfluenzaA__AHL90434
augaagacuaucauugcuuugagcuacauucuaugucugguuuucgcucaaaaacuuccuggaaaugacaacagcacggcaacgcugugccuugggcaccaugcaguaccaaacggaacgauagugaaaacaaucacgaaugaccaaauugaaguuacuaaugcuacugagcugguucagaguuccucaacaggugaaauaugcgacaguccucaucagauccuugauggagaaaacugcacacuaauagaugcucuauugggagacccucagugugauggcuuccaaaauaagaaaugggaccuuuuuguugaacgcagcaaagccuacagcaacuguuacccuuaugaugugccggauuaugccucccuuaggucacuaguugccucauccggcacacuggaguuuaacaaugaaagcuucaauuggacuggagucacucaaaacggaacaagcucugcuugcauaaggagaucuaauaacaguuucuuuaguagauugaauugguugacccacuuaaaauucaaauacccagcauugaacgugacuaugccaaacaaugaacaauuugacaaauuguacauuugggggguucaccacccggguacggacaaugaccaaaucuuccuguaugcucaagcaucaggaagaaucacagucucuaccaaaagaagccaacaaacuguaaucccgaauaucggaucuagacccagaguaaggaauaucccuagcagaauaagcaucuauuggacaauaguaaaaccaggagacauacuuuugauuaacagcacagggaaucuaauugcuccuagggguuacuucaaaauacgaagugggaaaagcucaauaaugagaucagaugcacccauuggcaaaugcaauucugaaugcaucacuccaaauggaagcauucccaaugacaaaccauuccaaaauguaaacaggaucacauacggggccugucccagauauguuaagcaaaacacucugaaauuggcaacagggaugcgaaauguaccagagaaacaaacuagaggcauauuuggcgcaaucgcggguuucauagaaaaugguugggagggaaugguggaugguugguacgguuucaggcaucaaaauucugagggaagaggacaagcagcagaucucaaaagcacucaagcagcaaucgaucaaaucaaugggaagcugaauagauugaucgggaaaaccaacgagaaauuccaucagauugaaaaagaauucucagaagucgaagggagaauucaggaccuugagaaauauguugaggacacuaaaauagaucucuggucauacaacgcggagcuucuuguugcccuggagaaccaacauacaauugaucuaacugacucagaaaugaacaaacuguuugaaaaaacaaagaagcaacugagggaaaaugcugaggauaugggcaaugguuguuucaaaauauaucacaaaugugacaaugccugcauaggaucaaucagaaauggaacuuaugaccacgauguauacagagaugaagcauuaaacaaccgguuccagaucaagggaguugagcugaagucaggguacaaagauuggauccuauggauuuccuuugccauaucauguuuuuugcuuuguguugcuuuguugggguucaucaugugggccugccaaaaaggcaacauuaggugcaacauuugcauuuga

SEQ ID NO: 43307 - RNA, 1701 nt, Artificial Sequence; identical to SEQ ID NO: 34551
  derived and/or modified CDS sequence (wt) from hemagglutinin__InfluenzaA__AHL90446

SEQ ID NO: 43308 - RNA, 1701 nt, Artificial Sequence
  derived and/or modified CDS sequence (wt) from hemagglutinin__InfluenzaA__AHL90458
augaagacuaucauugcuuugagcuacauucuaugucugguuuucgcucaaaaacuuccuggaaaugacaacagcacggcaacgcugugccuugggcaccaugcaguaccaaacggaacgauagugaaaacaaucacgaaugaccaaauugaaguuacuaaugcuacugagcugguucagaguuccucaacaggugaaauaugcgacaguccucaucagauccuugauggagaaaacugcgcacuaauagaugcucuauugggagacccucagugugauggcuuccaaaauaagaaaugggaccuuuuuguugaacgcagcaaagccuacagcaacuguuacccuuaugaugugccggauuaugccucccuuaggucacuaguugccucauccggcacacuggaguuuaacaaugaaagcuucaauuggacuggagucacucaaaacggaacaagcucugcuugcauaaggagaucuaauaacaguuucuuuaguagauugaauugguugacccacuuaaaauucaaauacccagcauugaacgugacuaugccaaacaaugaacaauuugacaaauuguacauuugggggguucaccacccggguacggacaaugaccaaaucuuccuguaugcucaagcaucaggaagaaucacagucucuaccaaaagaagccaacaaacuguaaucccgaauaucggaucuagacccagaguaaggaauaucccuaguagaauaagcaucuauuggacaauaguaaaaccgggagacauacuuuugauuaacagcacagggaaucuaauugcuccuagggguuacuucaaaauacgaagugggaaaagcucaauaaugagaucagaugcacccauuggcaaaugcaauucugaaugcaucacuccaaauggaagcauucccaaugacaaaccauuccaaaauguaaacaggaucacauacggggccugucccagauauguuaagcaaaacacucugaaauuggcaacagggaugcgaaauguaccagagaaacaaacuagaggcauauuuggcgcaaucgcggguuucauagaaaaugguugggagggaaugguggaugguugguacgguuucaggcaucaaaauucugagggaagaggacaagcagcagaucucaaaagcacucaagcagcaaucgaucaaaucaaugggaagcugaauagauugaucgggaaaaccaacgagaaauuccaucagauugaaaaagaauucucagaagucgaagggagaauucaggaccuugagaaauauguugaggacaccaaaauagaucucuggucauacaacgcggagcuucuuguugcccuggagaaccaacauacaauugaucuaacugacucagaaaugaacaaacuguuugaaaaaacaaagaagcaacugagggaaaaugcugaggauaugggcaaugguuguuucaaaauauaccacaaaugugacaaugccugcauaggaucaaucagaaauggaacuuaugaccacgauguauacagagaugaagcauuaaacaaccgguuccagaucaagggaguugagcugaagucaggguacaaagauuggauccuauggauuuccuuugccauaucauguuuuuugcuuuguguugcuuuguugggguucaucaugugggccugccaaaaaggcaacauuaggugcaacauuugcauuuga

SEQ ID NO: 43309 - RNA, 1701 nt, Artificial Sequence
  derived and/or modified CDS sequence (wt) from hemagglutinin__InfluenzaA__AHL90470
augaagacuaucauugcuuugagcuacauucuaugucugguuuucgcucaaaaacuuccuggaaaugacaacagcacggcaacgcugugccuugggcaccaugcaguaccaaacggaacgauagugaaaacaaucacgaaugaccaaauugaaguuacuaaugcuacugaacugguucagaguuccucaacaggugaaauaugcgacaguccucaucagauccuugauggagaaaacugcacacuaauagaugcucuauugggagacccucagugugauggcuuccaaaauaagaaaugggaccuuuuuguugaacgcagcaaagccuacagcaacuguuacccuuaugaugugccggauuaugccucccuuaggucacuaguugccucauccggcacacuggaguuuaacaaugaaagcuucaauuggacuggagucacucaaaacggaacaagcucugcuugcauaaggagaucuaauaacaguuucuuuaguagauugaauugguugacccacuuaaaauucaaauacccagcauugaacgugacuaugccaaacaaugaacaauuugacaaauuguacauuugggggguucaccacccggguacggacaaugaccaaaucuuccuguaugcucaagcaucaggaagaaucacagucucuaccaaaagaagccaacaaacuguaaucccgaauaucggaucuagacccagaguaaggaauaucccuagcagaauaagcaucuauuggacaauaguaaaaccgggagacauacuuuugauuaacagcacagggaaucuaauugcuccuagggguuacuucaaaauacgaagugggaaaagcucaauaaugagaucagaugcacccauuggcaaaugcaauucugaaugcaucacuccaaauggaagcauucccaaugacaaaccauuccaaaauguaaacaggaucacauacggggccugucccagauauguuaagcaaaacacucugaaauuggcaacagggaugcgaaauguaccagagaaacaaacuagaggcauauuuggcgcaaucgcggguuucauagaaaaugguugggagggaaugguggaugguugguacgguuucaggcaucaaaauucugagggaagaggacaagcagcagaucucaaaagcacucaagcagcaaucgaucaaaucaaugggaaacugaauagauugaucgggaaaaccaacgagaaauuccaucagauugaaaaagaauucucagaagucgaagggagaauucaggaccuugagaaauauguugaggacaccaaaauagaucucuggucauacaacgcggagcuucuuguugcccuggagaaccaacauacaauugaucuaacugacucagaaaugaacaaacuguuugaaaaaacaaagaagcaacugagggaaaaugcugaggauaugggcaaugguuguuucaaaauauaccacaaaugugacaaugccugcauaggaucaaucagaaauggaacuuaugaccacgauguauacagagaugaagcauuaaacaaccgguuccagaucaagggaguugagcugaagucaggguacaaagauuggauccuauggauuuccuuugccauaucauguuuuuugcuuuguguugcuuuguugggguucaucaugugggccugccaaaaaggcaacauuaggugcaacauuugcauuuga

SEQ ID NO: 43310 - RNA, 1701 nt, Artificial Sequence; identical to SEQ ID NO: 34551
  derived and/or modified CDS sequence (wt) from hemagglutinin__InfluenzaA__AHL90482

SEQ ID NO: 43311 - RNA, 1701 nt, Artificial Sequence; identical to SEQ ID NO: 34569
  derived and/or modified CDS sequence (wt) from hemagglutinin__InfluenzaA__AHL90494

SEQ ID NO: 43312 - RNA, 1701 nt, Artificial Sequence; identical to SEQ ID NO: 34569
  derived and/or modified CDS sequence (wt) from hemagglutinin__InfluenzaA__AHL90506

SEQ ID NO: 43313 - RNA, 1701 nt, Artificial Sequence
  derived and/or modified CDS sequence (wt) from hemagglutinin__InfluenzaA__AHL90518
augaagacuaucauugcuuugagcuacauucuaugucugguuuucgcucaaaaacuuccuggaaaugacaacagcacggcaacgcugugccuugggcaccaugcaguaccaaacggaacaauagugaaaacaaucacgaaugaccaaauugaaguuacuaaugcuacugagcugguucagaguuccucaacaggugaaauaugcgacaguccucaucagauccuugauggagaaaacugcacacuaauagaugcucuauugggagacccucagugugauggcuuccaaaauaagaaaugggaccuuuuuguugaacgcagcaaagccuacagcaacuguuacccuuaugaugugccggauuaugccucccuuaggucacuaguugccucauccggcacacuggaguuuaaaaaugaaagcuucaauuggacuggagucacucaaaacggaacaagcucugcuugcauaaggagaucuaauaacaguuucuuuaguagauugaauugguugacccacuuaaaauucaaauacccagcauugaaugugacuaugccaaacaaagaaaaauuugacaaauuguacauuugggggguucaccacccggguacggacaaugaccaaaucuuccuguaugcucaagcaucaggaagaaucacagucucuaccaaaagaagucaacaaacuguaaucccgaauaucggaucuagacccagaguaaggaauaucccuagcagaauaagcaucuauuggacaauaguaaaaccgggagacauacuuuugauuaacagcacagggaaucuaauugcuccuagggguuacuucaaaauacgaagugggaaaagcucaauaaugagaucagaugcacccauuggcaaaugcaauucugaaugcaucacuccaaauggaagcauucccaaugacaaaccauuccaaaauguaaacaggaucacauacggggccugucccagauauguuaagcaaaacacucugaaauuggcaacagggaugcgaaauguaccagagaaacaaacuagaggcauauuuggcgcaaucgcggguuucauagaaaaugguugggagggaaugguggaugguugguacgguuucaggcaucaaaauucugagggaacaggacaagcagcagaucucaaaagcacucaagcagcaaucgaucaaaucaaugggaagcugaauagguugaucgggaaaaccaacgagaaauuccaucagauugaaaaagaauucucagaagucgaagggagaauucaggaccuugagaaauauguugaggacaccaaaauagaucucuggucauacaacgcggagcuucuuguugcccuggagaaccaacauacaauugaucuaacugauucagaaaugaacaaacuguuugaaaaaacaaagaagcaacugagggaaaaugcugaggauaugggcaaugguuguuucaaaaucuaccacaaaugugacaaugccugcauaggaucaaucagaaauggaacuuaugaccacgauguauacagagaugaagcauuaaacaaccgguuccagaucaagggcguugagcugaagucaggauacaaagauuggauccuauggauuuccuuugccauaucauguuuuuugcuuuguguugcuuuguugggguucaucaugugggccugccaaaaaggcaacauuaggugcaacaucugcauuuga

SEQ ID NO: 43314 - RNA, 1701 nt, Artificial Sequence
  derived and/or modified CDS sequence (wt) from hemagglutinin__InfluenzaA__AHL90530
augaagacuaucauugcuuugagcuacauucuaugucugguuuucgcucaaaaacuuccuggaaaugacaacagcacggcaacgcugugccuugggcaccaugcaguaccaaacggaacgauagugaaaacaaucacgaaugaccaaauugaaguuacuaaugcuacugagcugguucagaguuccucaacaggugaaauaugcgacaguccucaucagauccuugauggagaaaacugcacacuaauagaugcucuauugggagacccucagugugauggcuuccaaaauaagaaaugggaccuuuuuguugaacgcagcaaagccuacagcaacuguuacccuuaugaugugccggauuaugccucccuuaggucacuaguugccucauccggcacacuggaguuuaacaaugaaagcuucaauuggacuggagucacucaaaacggaacaagcucugcuugcauaaggagaucuaauaacaguuucuuuaguagauugaauugguugacccauucaaaauucaaauacccagcauugaacgugacuaugccaaacaaugaagaauuugacaaauuguacauuugggggguucaccacccggguacggacaaugaccaaaucuuccuguaugcucaagcaucaggaagaaucacagucucuaccaaaagaagccaacaaacuguaaucccgaauaucggaucuagacccagaguaaggaauauccccagcagaauaagcaucuauuggacaauaguaaaaccgggagacauacuuuugauuaacagcacagggaaucuaauugcuccuagggguuacuucaaaauacgaagugggaaaagcucaauaaugagaucagaugcacccauuggcaaaugcaauucugaaugcaucacuccaaauggaagcauucccaaugacaaaccauuccaaaauguaaacaggaucacauacggggccugucccagauauguuaagcaaaacacucugaaauuggcaacagggaugcgaaauguaccagagaaacaaacuagaggcauauuuggcgcaaucgcggguuucauagaaaaugguugggagggaaugguggaugguugguacgguuucaggcaucaaaauucugagggaauaggacaagcagcagaucucaaaagcacucaagcagcaaucgaucaaaucaauggaaagcugaauagguugaucgggaaaaccaacgagaaauuccaucagauugaaaaagaauucucagaagucgaagggaggauucaggaccuugagaaauauguugaggacaccaaaauagaucucuggucauacaacgcggagcuucuuguugcccuggagaaccaacauacaauugaucuaacugacucagaaaugaacaaacuguuugaaaaaacaaagaagcaacugagggaaaaugcugaggauaugggcaaugguuguuucaaaauauaccacaaaugugacaaugccugcauaggaucaaucagaaauggaacuuaugaccacgauguauacagagaugaagcauuaaacaaccgguuccagaucaagggcguugagcugaaaucaggauacaaagauuggauccuauggauuuccuuugccauaucauguuuuuugcuuuguguugcuuuguugggguucaucaugugggccugccaaaaaggcaacauuaggugcaacauuugcauuuga

SEQ ID NO: 43315 - RNA, 1701 nt, Artificial Sequence
  derived and/or modified CDS sequence (wt) from hemagglutinin__InfluenzaA__AHL90542
augaagacuaucauugcuuugagcuacauucuaugucugguuuucgcucaaaaacuuccuggaaaugacaacagcacggcaacgcugugccuugggcaccaugcaguaccaaacggaacgauagugaaaacaaucacgaaugaccaaauugaaguuacuaaugcuacugagcugguucagaguuccucaacaggugaaauaugcgacaguccucaucagauccuugauggagaaaacugcacacuaauagaugcucuauugggagacccucagugugauggcuuccaaaauaagaaaugggaccuuuuuguugaacgcagcaaagccuacagcaacuguuacccuuaugaugugccggauuaugccucccuuaggucacuaguugccucauccggcacacuggaguuuaacaaugaaagcuucaauuggacuggagucacucaaaacggaacaagcucugcuugcauaaggagaucuaauaacaguuucuuuaguagauugaauugguugacccacuuaaaauucaaauacccagcauugaacgugacuaugccaaacaaugaacaauuugacaaauuguacauuugggggguucaccacccggguacggacaaugaccaaaucuuccuguaugcucaagcaucaggaagaaucacagucucuaccaaaagaagccaacaaacuguaaucccgaauaucggaucuagacccagaguaaggaauaucccuagcagaauaagcaucuauuggacaauaguaaaaccgggagacauacuuuugauuaacagcacagggaaucuaauugcuccuagggguuacuucaaaauacgaagugggaaaagcucaauaaugagaucagaugcacccauuggcaaaugcaauucugaaugcaucacuccaaauggaagcauucccaaugacaaaccauuccaaaauguaaacaggaucacauacggggccugucccagauauguuaagcaaaacacucugaaauuggcaacagggaugcgaaauguaccagagaaacaaacuagaggcauauuuggcgcaaucgcggguuucauagaaaaugguugggagggaaugguggaugguugguacgguuucaggcaucaaaauucugagggaagagggcaagcagcagaucucaaaagcacucaagcagcaaucgaucaaaucaaugggaagcugaauagauugaucgggaaaaccaacgagaaauuccaucagauugaaaaagaauucucagaagucgaagggagaauucaggaccuugagaaauauguugaggacaccaaaauagaucucuggucauacaacgcggagcuucuuguugcccuggagaaccaacauacaauugaucuaacugacucagaaaugaacaaacuguuugaaaaaacaaagaagcaacugagggaaaaugcugaggauaugggcaaugguuguuucaaaauauaccacaaaugugacaaugccugcauaggaucaaucagaaauggaacuuaugaccacgauguauacagagaugaagcauuaaacaaccgguuccagaucaagggaguugagcugaagucaggguacaaagauuggauccuauggauuuccuuugccauaucauguuuuuugcuuuguguugcuuuguugggguucaucaugugggccugccaaaaaggcaacauuaggugcaacauuugcauuuga

SEQ ID NO: 43316 - RNA, 1701 nt, Artificial Sequence
  derived and/or modified CDS sequence (wt) from hemagglutinin__InfluenzaA__AHL90554
augaagacuaucauugcuuugagcuacauucuaugucugguuuucgcucaaaaacuuccuggaaaugacaacagcacggcaacgcugugccuugggcaccaugcaguaccaaacggaacgauagugaaaacaaucacgaaugaccaaauugaaguuacuaaugcuacugagcugguucagaguuccucaacaggugaaauaugcgacaguccucaucagauccuugauggagaaaacugcacacuaauagaugcucuauugggagacccucagugugauggcuuccaaaauaagaaaugggaccuuuuuguugaacgcagcaaagccuacagcaacuguuacccuuaugaugugccggauuaugccucccuuaggucacuaguugccucauccggcacacuggaguuuaacaaugaaagcuucaauuggacuggagucacucaaaacggaacaagcucugcuugcauaaggagaucuaauaacaguuucuuuaguagauugaauugguugacccacuuaaaauucaaauacccagcauugaacgugacuaugccaaacaaugaacaauuugacaaauuguacauuugggggguucaccacccggguacggacaaugaccaaaucuuccuguaugcucaagcaucaggaagaaucacagucucuaccaaaagaagccaacaaacuguaaucccgaauaucggaucuagacccagaguaaggaauaucccuagcagaauaagcaucuauuggacaauaguaaaaccgggagacauacuuuugauuaacagcacagggaaucuaauugcuccuagggguuacuucaaaauacgaagugggaaaagcucaauaaugagaucagaugcacccauuggcaaaugcaauucugaaugcaucacuccaaauggaagcauucccaaugacaaaccauuccaaaauguaaacaggaucacauacggggccugucccagauauguuaagcaaaacacucugaaauuggcaacagggaugcgaaauguaccagagaaacaaacuagaggcauauuuggcgcaaucgcggguuucauagaaaaugguugggagggaaugguggaugguugguacgguuucaggcaucaaaauucugagggaagaggacaagcagcagaucucaaaagcacucaagcagcaaucgaucaaaucaaugggaagcugaauagauugaucgggaaaaccaacgagaaauuccaucagauugaaaaagaauucucagaagucgaagggagaauucaggaccuugagaaauauguugaggacacuaaaauagaucucuggucauacaacgcggagcuucuuguugcccuggagaaccaacauacaauugaucuaacugacucagaaaugaacaaacuguuugaaaaaacaaagaagcaacugagggaaaaugcugaggauaugggcaaugguuguuucaagauauaccacaaaugugacaaugccugcauaggaucaaucagaaauggaacuuaugaccacgauguauacagagaugaagcauuaaacaaccgguuccagaucaagggaguugagcugaagucaggguacaaagauuggauccuauggauuuccuuugccauaucauguuuuuugcuuuguguugcuuuguugggguucaucaugugggccugccaaaaaggcaacauuaggugcaacauuugcauuuga

SEQ ID NO: 43317 - RNA, 1701 nt, Artificial Sequence
  derived and/or modified CDS sequence (wt) from hemagglutinin__InfluenzaA__AHL90566
augaagacuaucauugcuuugagcuacauucuaugucugguuuucgcucaaaaacuuccuggaaaugacaacagcacggcaacgcugugccuugggcaccaugcaguaccaaacggaacgauagugaaaacaaucacgaaugaccaaauugaaguuacuaaugcuacugagcugguucagaguuccucaacaggugaaauaugcgacaguccucaucagauccuugauggagaaaacugcacacuaauagaugcucuauugggagacccucagugugauggcuuccaaaauaagaaaugggaccuuuuuguugaacgcagcaaagccuacagcaacuguuacccuuaugaugugccggauuaugccucccuuaggucacuaguugccucauccggcacacuggaguuuaacaaugaaagcuucaauuggacuggagucacucaaaacggaacaagcucugcuugcauaaggagaucuaauaacaguuucuuuaguagauugaauugguugacccacuuaaaauucaaauacccagcauugaacgugacuaugccaaacaaugaacaauuugacaaauuguacauuugggggguucaccacccggguacggacaaugaccaaaucuuccuguaugcucaagcaucaggaagaaucacagucucuaccaaaagaagccaacaaacuguaaucccgaauaucggaucuagacccagaguaaggaauaucccuagcagaauaagcaucuauuggacaauaguaaaaccgggagacauacuuuugauuaacagcacagggaaucuaauugcuccuagggguuacuucaaaauacgaagugggaaaagcucaauaaugagaucagaugcacccauuggcaaaugcaauucugaaugcaucacuccaaauggaagcauucccaaugacaaaccauuccaaaauguaaacaggaucacauacggggccugucccagauauguuaagcaaaacacucugaaauuggcaacagggaugcgaaauguaccagagaaacaaacuagaggcauauuuggcgcaaucgcggguuucauagaaaaugguugggagggaaugguggaugguugguacgguuucaggcaucaaaauucugagggaagaggacaagcagcagaucucaaaagcacucaagcagcaaucgaucaaaucaaugggaagcugaauagauugaucgggaaaaccaacgagaaauuccaucagauugaaaaagaauucucagaagucgaagggagaauucaggaccuugagaaauauguugaggacacuaaaauagaucucuggucauacaacgcggagcuucuuguugcccuggagaaccaacauacaauugaucuaacugacucagaaaugaacaaacuguuugaaaaaacaaagaagcaacugagggaaaaugcugaggauaugggcaaugguuguuucaaaauauaccacaaaugugacaaugccugcauaggaucaaucagaaauggaacuuaugaccacgauguauacagagaugaagcauuaaacaaccguuuccagaucaagggaguugagcugaagucaggguacaaagauuggauccuauggauuuccuuugccauaucauguuuuuugcuuuguguugcuuuguugggguucaucaugugggccugccaaaaaggcaacauuaggugcaacauuugcauuuga

SEQ ID NO: 43318 - RNA, 1701 nt, Artificial Sequence
  derived and/or modified CDS sequence (wt) from hemagglutinin__InfluenzaA__AHL90578
augaagacuaucauugcuuugagcuacauucuaugucugguuuucgcucaaaaacuuccuggaaaugacaacagcacggcaacgcugugccuugggcaccaugcaguaccaaacggaacgauagugaaaacaaucacgaaugaccaaauugaaguuacuaaugcuacugagcugguucagaguuccucaacaggugaaauaugcgacaguccucaucagauccuugauggagaaaacugcacacuaauagaugcucuauugggagacccucagugugauggcuuccaaaauaagaaaugggaccuuuuuguugaacgcagcaaagccuacagcaacuguuacccuuaugaugugccggauuaugccucccuuaggucacuaguugccucauccggcacacuggaguuuaacaaugaaagcuucaauuggacuggagucacucaaaacggaacaagcucugcuugcauaaggagaucuaauaacaguuucuuuaguagauugaauugguugacccacuuaaaauucaaauacccagcauugaacgugacuaugccaaacaaugaacaauuugacaaauuguacauuugggggguucaccacccggguacggacaaugaccaaaucuuccuguaugcucaagcaucaggaagaaucacagucucuaccaaaagaagccaacaaacuguaaucccgaauaucggaucuagacccagaguaaggaauaucccuagcagaauaagcaucuauuggacaauaguaaaaccgggagacauacuuuugauuaacagcacagggaaucuaauugcuccuagggguuacuucaaaauacgaagugggaaaagcucaauaaugagaucagaugcacccauuggcaaaugcaauucugaaugcaucacuccaaauggaagcauucccaaugacaaaccauuccaaaauguaaacaggaucacauacggggccugucccagauauguuaagcaaaacacucugaaauuggcaacagggaugcgaaauguaccagagaaacaaacuagaggcauauuuggagcaaucgcggguuucauagaaaaugguugggagggaaugguggaugguugguacgguuucaggcaucaaaauucugagggaagaggacaagcagcagaucucaaaagcacucaagcagcaaucgaucaaaucaaugggaagcugaauagauugaucgggaaaaccaacgagaaauuccaucagauugaaaaagaauucucagaagucgaagggagaauucaggaccuugagaaauauguugaggacacuaaaauagaucucuggucauacaacgcggaacuucuuguugcccuggagaaccaacauacaauugaucuaacugacucagaaaugaacaaacuguuugaaaaaacaaagaagcaacugagggaaaaugcugaggauaugggcaaugguuguuucaaaauauaccacaaaugugacaaugccugcauaggaucaaucagaaauggaacuuaugaccacgauguauacagagaugaagcauuaaacaaccgguuccagaucaagggaguugagcugaagucaggguacaaagauuggauccuauggauuuccuuugccauaucauguuuuuugcuuuguguugcuuuguugggguucaucaugugggccugccaaaaaggcaacauuaggugcaacauuugcauuuga

SEQ ID NO: 43319 - RNA, 1701 nt, Artificial Sequence; identical to SEQ ID NO: 34569
  derived and/or modified CDS sequence (wt) from hemagglutinin__InfluenzaA__AHL90590

SEQ ID NO: 43320 - RNA, 1701 nt, Artificial Sequence; identical to SEQ ID NO: 34535
  derived and/or modified CDS sequence (wt) from hemagglutinin__InfluenzaA__AHL90602

SEQ ID NO: 43321 - RNA, 1701 nt, Artificial Sequence; identical to SEQ ID NO: 35220
  derived and/or modified CDS sequence (wt) from hemagglutinin__InfluenzaA__AHL90614

SEQ ID NO: 43322 - RNA, 1701 nt, Artificial Sequence
  derived and/or modified CDS sequence (wt) from hemagglutinin__InfluenzaA__AHL90638
augaagacuaucauugcuuugagcuacauucuaugucugguuuucgcucaaaaacuuccuggaaaugacaacagcacggcaacgcugugccuugggcaccaugcaguaccaaacggaacgauagugaaaacaaucacgaaugaccaaauugaaguuacuaaugcuacugagcugguucagaguuccucaacaggugaaauaugcgacaguccucaucagauccuugauggagaaaacugcacacuaauagaugcucuauugggagacccucagugugauggcuuccaaaauaagaaaugggaccuuuuuguugaacgcagcaaagccuacagcaacuguuacccuuaugaugugccggauuaugccucccuuaggucacuaguugccucauccggcacacuggaguuuaacaaugaaagcuucaauuggacuggagucacucaaaacggaacaagcucugcuugcauaaggagaucuaauaacaguuucuuuaguagauugaauugguugacccacuuaaaauucaaauacccagcauugaacgugacuaugccaaacaaugaacaauuugacaaauuguacauuugggggguucaccacccggguacggacaaugaccaaaucuuccuguaugcucaagcaucaggaagaaucacagucucuaccaaaagaagccaacaaacuguaaucccgaauaucggaucuagacccagaguaaggaauaucccuagcagaauaagcaucuauuggacaauaguaaaaccgggagacauacuuuugauuaacagcacagggaaucuaauugcuccuagggguuacuucaaaauacgaaguaggaaaagcucaauaaugagaucagaugcacccauuggcaaaugcaauucugaaugcaucacuccaaauggaagcauucccaaugacaaaccauuccaaaauguaaacaggaucacauacggggccugucccagauauguuaagcaaaacacucugaaauuggcaacagggaugcgaaauguaccagagaaacaaacuagaggcauauuuggcgcaaucgcggguuucauagaaaaugguugggagggaaugguggaugguugguacgguuucaggcaucaaaauucugagggaagaggacaagcagcagaucucaaaagcacucaagcagcaaucgaucaaaucaaugggaagcugaauagauugaucgggaaaaccaacgagaaauuccaucagauugaaaaagaauucucagaagucgaagggagaauucaggaccuugagaaauauguugaggacacuaaaauagaucucuggucauacaacgcggagcuucuuguugcccuggagaaccaacauacaauugaucuaacugacucagaaaugaacaaacuguuugaaaaaacaaagaagcaacugagggaaaaugcugaggauaugggcaaugguuguuucaaaauauaccacaaaugugacaaugccugcauaggaucaaucagaaauggaacuuaugaccacgauguauacagagaugaagcauuaaacaaccgguuccagaucaagggaguugagcugaagucaggguacaaagauuggauccuauggauuuccuuugccauaucauguuuuuugcuuuguguugcuuuguugggguucaucaugugggccugccaaaaaggcaacauuaggugcaacauuugcauuuga

SEQ ID NO: 43323 - RNA, 1701 nt, Artificial Sequence
  derived and/or modified CDS sequence (wt) from hemagglutinin__InfluenzaA__AHL90650
augaagacuaucauugcuuugagcuacauucuaugucugguuuucgcucaaaaacuuccuggaaaugacaacagcacggcaacgcugugccuugggcaccaugcaguaccaaacggaacgauagugaaaacaaucacgaaugaccaaauugaaguuacuaaugcuacugagcugguucagaguuccucaacaggugaaauaugcgacaguccucaucagauccuugauggagaaaacugcacacuaauagaugcucuauugggagacccucagugugauggcuuccaaaauaagaaaugggaccuuuuuguugaacgcagcaaagccuacagcaacuguuacccuuaugaugugccggauuaugccucccuuaggucacuaguugccucauccggcacacuggaguuuaacaaugaaagcuucaauuggacuggagucacucaaaacggaacaagcucugcuugcauaaggagaucuaauaacaguuucuuuaguagauugaauugguugacccacuuaaaauucaaauacccagcauugaacgugacuaugccaaacaaugaacaauuugacaaauuguacauuugggggguucaccacccggguacggacaaugaccaaaccuuccuguaugcucaagcaucaggaagaaucacagucucuaccaaaagaagccaacaaacuguaaucccgaauaucggaucuagacccagaguaaggaauaucccuagcagaauaagcaucuauuggacaauaguaaaaccgggagacauacuuuugauuaacagcacagggaaucuaauugcuccuagggguuacuucaaaauacgaagugggaaaagcucaauaaugagaucagaugcacccauuggcaaaugcaauucugaaugcaucacuccaaauggaagcauucccaaugacaaaccauuccaaaauguaaacaggaucacauacggggccugucccagauauguuaagcaaaacacucugaaauuggcaacagggaugcgaaauguaccagagaaacaaacuagaggcauauuuggcgcaaucgcggguuucauagaaaaugguugggagggaaugguggaugguugguacgguuucaggcaucaaaauucugagggaagaggacaagcagcagaucucaaaagcacucaagcagcaaucgaucaaaucaaugggaagcugaauagauugaucgggaaaaccaacgagaaauuccaucagauugaaaaagaauucucagaagucgaagggagaauucaggaccuugagaaauauguugaggacaccaaaauagaucucuggucauacaacgcggagcuucuuguugcccuggagaaccaacauacaauugaucuaacugacucagaaaugaacaaacuguuugaaaaaacaaagaagcaacugagggaaaaugcugaggauaugggcaaugguuguuucaaaauauaccacaaaugugacaaugccugcauagggucaaucagaaauggaacuuaugaccacgauguauacagagaugaagcauuaaacaaccgguuccagaucaaaggaguugagcugaagucaggguacaaagauuggauccuauggauuuccuuugccauaucauguuuuuugcuuuguguugcuuuguugggguucaucaugugggccugccaaaaaggcaacauuaggugcaacauuugcauuuga

SEQ ID NO: 43324 - RNA, 1701 nt, Artificial Sequence
  derived and/or modified CDS sequence (wt) from hemagglutinin__InfluenzaA__AHL90662
augaagacuaucauugcuuugagcuacauucuaugucugguuuucgcucaaaaacuuccuggaaaugacaacagcacggcaacgcugugccuugggcaccaugcaguaccaaacggaacgauagugaaaacaaucacgaaugaccaaauugaaguuacuaaugcuacugagcugguucagaguuccucaacaggugaaauaugcgacaguccucaucagauccuugauggagaaaacugcacacuaauagaugcucuauugggagacccucagugugauggcuuccaaaauaagaaaugggaccuuuuuguugaacgcagcaaagccuacagcaacuguuacccuuaugaugugccggauuaugccucccuuaggucacuaguugccucauccggcacacuggaguuuaacaaugaaagcuucaauuggacuggagucacucaaaacggaacaagcucugcuugcauaaggagaucuaauaacaguuucuuuaguagauugaauugguugacccacuuaaaauucaaauacccagcauugaacgugacuaugccaaacaaugaacaauuugacaaauuguacauuugggggguucaccacccggguacggacaaugaccaaaucuuccuguaugcucaagcaucaggaagaaucacagucucuaccaaaagaagccaacaaacuguaaucccgaauaucggaucuagacccagaguaaggaauaucccuagcagaauaagcaucuauuggacaauaguaaaaccgggagacauacuuuugauuaacagcacagggaaucuaauugcuccuagggguuacuucaaaauacgaagugggaaaagcucaauaaugagaucagaugcacccauuggcaaaugcaauucugaaugcaucacuccaaauggaagcauucccaaugacaaaccauuccaaaauguaaacaggaucacauacggggccugucccagauaugucaagcaaaacacucugaaauuggcaacagggaugcgaaauguaccagagaaacaaacuagaggcauauuuggcgcaaucgcggguuucauagaaaaugguugggagggaaugguggaugguugguacgguuucaggcaucaaaauucugagggaagaggacaagcagcagaucucaaaagcacucaagcagcaaucgaucaaaucaaugggaagcugaauagauugaucgggaaaaccaacgagaaauuccaucagauugaaaaagaauucucagaagucgaagggagaauucaggaccuugagaaauauguugaggacacuaaaauagaucucuggucauacaacgcggagcuucuuguugcccuggagaaccaacauacaauugaucuaacugacucagaaaugaacaaacuguuugaaaaaacaaagaagcaacugagggaaaaugcugaggauaugggcaaugguuguuucaaaauauaccacaaaugugacaaugccugcauaggaucaaucagaaauggaacuuaugaccacgauguauacagagaugaagcauuaaacaaccgguuccagaucaagggaguugagcugaagucaggguacaaagauuggauccuauggauuuccuuugccauaucauguuuuuugcuuuguguugcuuuguugggguucaucaugugggccugccaaaaaggcaacauuaggugcaacauuugcauuuga

SEQ ID NO: 43325 - RNA, 1701 nt, Artificial Sequence
  derived and/or modified CDS sequence (wt) from hemagglutinin__InfluenzaA__AHL90674
augaagacuaucauugcuuugagcuacauucuaugucugguuuucgcucaaaaacuuccuggaaaugacaacagcacggcaacgcugugccuugggcaccaugcaguaccaaacggaacgauagugaaaacaaucacgaaugaccaaauugaaguuacuaaugcuacugagcugguucagaguuccucaacaggugaaauaugcgacaguccucaucagauccuugauggagaaaacugcacacuaauagaugcucuauugggagacccucagugugauggcuuccaaaauaagaaaugggaccuuuuuguugaacgcagcaaagccuacagcaacuguuacccuuaugaugugccggauuaugccucccuuaggucacuaguugccucauccggcacacuggaguuuaacaaugaaagcuucaauuggacuggagucacucaaaacggaacaagcucugcuugcauaaggagaucuaauaacaguuucuuuaguagauugaauugguugacccacuuaaaauucaaauacccagcauugaacgugacuaugccaaacaaugaaaaauuugacaaauuguacauuugggggguucaccacccggguacggacaaugaccaaaucuuccuguaugcucaagcaucaggaagaaucacagucucuaccaaaagaagccaacaaacuguaaucccgaauaucggaucuagacccagaguaaggaauauccccagcagaauaagcaucuauuggacaauaguaaaaccgggagacauacuuuugauuaacagcacagggaaucuaauugcuccuagggguuacuucaaaauacgaagugggaaaagcucaauaaugagaucagaugcacccauuggcaaaugcaauucugaaugcaucacuccaaauggaagcauucccaaugacaaaccauuccaaaauguaaacaggaucacauacggggccugucccagauauguuaagcaaaacacucugaaauuggcaacagggaugcgaaauguaccagagaaacaaacuagaggcauauuuggcgcaaucgcggguuucauagaaaaugguugggaaggaaugguggaugguugguacgguuucaggcaucaaaauucugagggaauaggacaagcagcagaucucaaaagcacucaagcagcaaucgaucaaaucaaugggaagcugaauagguugaucgggaaaaccaacgagaaauuccaucagauugaaaaagaauucucagaagucgaagggaggauucaggaccuugagaaauauguugaggacaccaaaauagaucucuggucauacaacgcggagcuucuuguugcccuggagaaccaacauacaauugaucuaacugacucagaaaugaacaaacuguuugaaaaaacaaagaagcaacugagggaaaaugcugaggauaugggcaaugguuguuucaaaauauaccacaaaugugacaaugucugcauaggaucaaucagaaauggaacuuaugaccacgauguauacagagaugaagcauuaaacaaccgguuccagaucaagggcguugagcugaagucaggauacaaagauuggauccuauggauuuccuuugccauaucauguuuuuugcuuuguguugcuuuguugggguucaucaugugggccugccaaaaaggcaacauuaggugcaacauuugcauuuga

SEQ ID NO: 43326 - RNA, 1701 nt, Artificial Sequence
  derived and/or modified CDS sequence (wt) from hemagglutinin__InfluenzaA__AHL90686
augaagacuaucauugcuuugagcuacauucuaugucugguuuucgcucaaaaacuuccuggaaaugacaacagcacggcaacgcugugccuugggcaccaugcaguaccaaacggaacgauagugaaaacaaucacgaaugaccaaauugaaguuacuaaugcuacugagcugguucagaguuccucaacaggugaaauaugcgacaguccucaucagauccuugauggagaaaacugcacacuaauagaugcucuauugggagacccucagugugauggcuuccaaaauaagaaaugggaccuuuuuguugaacgcagcaaagccuacagcaacuguuacccuuaugaugugccggauuaugccucccuuaggucacuaguugccucauccggcacacuggaguuuaacaaugaaagcuucaauuggacuggagucacucaaaacggaacaagcucugcuugcauaaggagaucuaauaacaguuucuuuaguagauugaauugguugacccacuuaaaauucaaauacccagcauugaacgugacuaugccaaacaaugaacaauuugacaaauuguacauuugggggguucaccacccggguacggacaaugaccaaaucuuccuguaugcucaagcaucaggaagaaucacagucucuaccaaaagaagccaacaaacuguaaucccgaauaucggaucuagacccagaguaaggaauaucccuagcagaauaagcaucuauuggacaauaguaaaaccgggagacauacuuuugauuaacagcacagggaaucuaauugcuccuagggguuacuucaaaauacgaagugggaaaagcucaauaaugagaucagaugcacccauuggcaaaugcaauucugaaugcaucacuccaaauggaagcauucccaaugacaaaccauuccaaaauguaaacaggaucacauacggggccugucccagauauguuaagcaaaacacucugaaauuggcaacagggaugcgaaauguaccagagaaacaaacuagaggcauauuuggcgcaaucgcggguuucauagaaaaugguugggagggaaugguggaugguugguacgguuucaggcaucaaaauucugagggaagaggacaagcagcagaucucaaaagcacucaagcagcaaucgaucaaaucaaugggaagcugaauagauugaucgggaaaaccaacgagaaauuccaucagauugaaaaagaauucucagaagucgaagggagaauucaggaccuugagaaauauguugaggacacuaaaauagaucucuggucauacaacgcggagcuucuuguugccauggagaaccaacauacaauugaucuaacugacucagaaaugaacaaacuguuugaaaaaacaaagaagcaacugagggaaaaugcugaggauaugggcaaugguuguuucaaaauauaccacaaaugugacaaugccugcauaggaucaaucagaaauggaacuuaugaccacgauguauacagagaugaagcauuaaacaaccgguuccagaucaagggaguugagcugaagucaggguacaaagauuggauccuauggauuuccuuugccauaucauguuuuuugcuuuguguugcuuuguugggguucaucaugugggccugccaaaaaggcaacauuaggugcaacauuugcauuuga

SEQ ID NO: 43327 - RNA, 1701 nt, Artificial Sequence; identical to SEQ ID NO: 34535
  derived and/or modified CDS sequence (wt) from hemagglutinin__InfluenzaA__AHL90698

SEQ ID NO: 43328 - RNA, 1701 nt, Artificial Sequence; identical to SEQ ID NO: 34535
  derived and/or modified CDS sequence (wt) from hemagglutinin__InfluenzaA__AHL90710

SEQ ID NO: 43329 - RNA, 1698 nt, Artificial Sequence
  derived and/or modified CDS sequence (wt) from hemagglutinin__InfluenzaA__AHL90722
augaaaguaaaacuacugguccuguuaugcacauuuacagcuacauaugcagacacaauauguauaggcuaccaugcuaacaacucgaccgacacuguugacacaguacuugaaaagaaugugacagugacacacucugucaaccugcuugagaacagucacaauggaaaacugugucuauuaaaaggaauagccccacuacaauuggguaacugcagcguugccggguggaucuuaggaaauccagaaugcgaguuacugauuuccaaggagucaugguccuacauuguagaaaaaccaaauccugagaauggaacauguuacccagggcauuucgcugacuaugaggaacugagggagcaauugaguucaguaucuucauuugagagguucgaaauauuccccaaagaaagcucauggcccaaccacaccguaaccggagugucagcaucaugcucccauaauggggaaagaaguuuuuacagaaauuugcuauggcugacggggaagaaugguuuguacccaaaccugagcaaguccuaugcaaacaacaaagaaaaagaaguccuuguacuaugggguguucaucacccgccagacauaggugaccaaaagacccucuaucauacagaaaaugcuuauguuucuguagugucuucacauuauagcagaaaauucaccccagaaauagccaaaagacccaaaguaagagaucaagaaggaagaaucaacuacuacuggacucugcuugaacccggggauacaauaauauuugaggcaaauggaaaucuaauagcgccaagauaugcuuucgcacugaguagaggcuuuggaucaggaaucaucaacucaaaugcaccaauggauaaaugugaugcgaagugccaaacaccucagggagcuauaaacagcagucuuccuuuccagaacguacacccagucacaauaggagaguguccaaaguaugucaggagugcaaaauuaaggaugguuacuggacuaaggaacaucccauccauucaauccagagguuuguuuggagccauugccgguuucauugaagggggguggacuggaaugguagaugguugguaugguuaucaucaucagaaugagcaagggucuggcuaugcugcagaucaaaaaagcacacaaaaugccauuaauggaauuacaaacaaggugaauucuguaauugagaaaaugaacacucaauucacagcagugggcaaagaauucaacaaauuggaaagaaggauggaaaacuugaauaaaaaaguugaugauggguuuauagacauuuggacauauaaugcagaacuguugguucuacuggaaaaugaaaggacuuuggauuuccaugauuccaaugugaagaaucuguaugagaaaguaaaaagccaguuaaagaauaaugcuaaagaaauaggaaauggguguuuugaauucuaucacaaguguaacgaugagugcauggagaguguaaagaauggaacuuaugacuauccaaaauauuccgaagaaucaaaguuaaacagggagaaaauugauggagugaaauuggaaucaaugggagucuaucagauucuggcgaucuacucaacagucgccaguucucugguucuuuuggucucccugggggcaaucaguuucuggauguguuccaaugggucuuugcaguguagaauaugcaucuaa

SEQ ID NO: 43330 - RNA, 1698 nt, Artificial Sequence
  derived and/or modified CDS sequence (wt) from hemagglutinin__InfluenzaA__AHL90746
augaaaguaaaacuacugguccuguuaugcacauuuacagcuacauaugcagacacaauauguauaggcuaccaugcuaacaacucgaccgacacuguugacacaguacuugaaaagaaugugacagugacacacucugucaaccugcuugagaacagucacaauggaaaacuaugucuauuaaaaggaauagccccacuacaauuggguaacugcagcguugccggguggaucuuaggaaacccagaaugcgaauuacugauuuccaaagagucaugguccuacauuguagaaaaaccaaauccugagaauggaacauguuacccagggcauuucgcugacuaugaggaacugagggagcaauugaguucaguaucuucauuuaagagguucgaaauauuccccaaagaaagcucauggcccaaccacaccguaaccggagugucagcaucaugcucccauaauggggaaagcaguuuuuacagaaauuugcuauggcugacggggaagaaugguuuguacccaaaccugagcaaguccuaugcaaacaacaaagaaaaagaaguccuuguacuaugggguguucaucacccgccaaacauaguugaccaaaagacccucuaccguacagaaaaugcuuauguuucuguagugucuucacauuauagcagaaaauucaccccagaaauagccaaaagacccaaaguaagagaucaagaaggaagaaucaacuacuacuggacucugcuugaacccggggauacaauaauauuugaggcaaauggaaaucuaauagcgccaagauaugcuuucgcacugaguagaggcuuuggaucaggaaucaucaacucaaaugcaccaauggguaaaugugaugcgaagugccaaacaccucagggagcuauaaacagcagucuuccuuuccagaacguacacccagucacaauaggagaguguccaaaguaugucaggagugcaaaauuaaggaugguuacaggacuaaggaacaucccauccauucaauccagagguuuguuuggagccauugccgguuucauugaagggggguggacuggaaugguagaugguugguaugguuaucaucaucagaaugagcaaggaucuggcuaugcugcagaucaaaaaagcacacaaaaugccauuaaugggauuacaaacaaggugaauucuguaauugagaaaaugaacacucaauucacagcagugggcaaagaauucaacaaauuggaaagaaggauggaaaacuugaauaaaaaaguugaugauggguuuauagacauuuggacauauaaugcagaacuguugguucuacuggaaaaugaaaggacuuuggauuuccaugacuccaaugugaagaaucuguaugagaaaguaaaaagccaguuaaagaauaaugcuaaagaaauaggaaauggguguuuugaauucuaucacaaguguaacgaugaaugcauggagaguguaaagaauggaacuuaugacuauccaaaauauuccgaagaaucaaaguuaaacagggagaaaauugauggagugaaauuggaaucaaugggagucuaucagauucuggcgaucuacucaacagucgccaguucucugguucuuuuggucucccugggggcaaucagcuucuggauguguuccaaugggucuuugcaguguagaauaugcaucuaa

SEQ ID NO: 43331 - RNA, 1698 nt, Artificial Sequence
  derived and/or modified CDS sequence (wt) from hemagglutinin__InfluenzaA__AHL90758
augaaaguaaaacuacugguccuguuaugcacauuuacagcuacauaugcagacacaauauguauaggcuaccaugcuaacaacucgaccgacacuguugacacaguacuugaaaagaaugugacagugacacacucugucaaccugcuugagaacagucacaauggaaaacuaugucuauuaaaaggaauagccccacuacaauuggguaacugcagcguugccggguggaucuuaggaaacccagaaugcgaauuacugauuuccaaggagucaugguccuacauuguagaaaaaccaaauccugagaauggaacauguuacccagggcauuucgcugacuaugaggaacugagggagcaauugaguucaguaucuucauuugagagguucgaaauauuccccaaagaaagcucauggcccaaccacaccguaaccggagugucagcaucaugcucccauaauggggaaagcaguuuuuacagaaauuugcuauggcugacggggaagaaugguuuguacccaaaccugagcaaguccuaugcaaacaacaaagaaaaagaaguccuuguacuaugggguguucaucacccgccaaacauaguugaccaaaagacccucuaucguacagaaaaugcuuauguuucuguagugucuucacauuauagcagaaaauucaccccagaaauagccaaaagacccaaaguaagagaucaagaaggaagaaucaacuacuacuggacucugcuugaacccggggauacaauaauauuugaggcaaauggaaaucuaauagcgccaagauaugcuuucgcacugaguagaggcuuuggaucaggaaucaucaacucaaaugcaccaauggauaaaugugaugcgaaaugccaaacaccucagggagcuauaaacagcagucuuccuuuccagaacguacacccagucacaauaggagaguguccaaaguaugucaggagugcaaaauuaaggaugguuacaggacuaaggaacaucccauccauucaauccagagguuuguuuggagccauugccgguuucauugaagggggguggacuggaaugguagaugguugguaugguuaucaucaucagaaugagcaaggaucuggcuaugcugcagaucaaaaaagcacacaaaaugccauuaaugggauuacaaacaaggugaauucuguaauugagaaaaugaacacucaauucacagcagugggcaaagaauucaacaaauuggaaagaaggauggaaaacuugaauaaaaaaguugaugauggguuuauagacauuuggacauauaaugcagaacuguugguucuacuggaaaaugaaaggacuuuggauuuccaugacuccaaugugaagaaucuguaugagaaaguaaaaagccaguuaaagaauaaugcuaaagaaauaggaaauggguguuuugaauucuaucacaaguguaacgaugaaugcauggagaguguaaagaauggaacuuaugacuauccaaaauauuccgaagaaucaaaguuaaacagggagaaaauugauggagugaaauuggaaucaaugggagucuaucagauucuggcgaucuacucaacagucgccaguucucugguucuuuuggucucccugggggcaaucagcuucuggauguguuccaaugggucuuugcaguguagaauaugcaucuaa

SEQ ID NO: 43332 - RNA, 1698 nt, Artificial Sequence
  derived and/or modified CDS sequence (wt) from hemagglutinin__InfluenzaA__AHL90770
augaaaguaaaacuacugguccuguuaugcacauuuacagcuacauaugcagacacaauauguauaggcuaccaugcuaacaacucgaccgacacuguugacacaguacuugaaaagaaugugacagugacacacucugucaaccugcuugagaacagucacaauggaaaacuaugucuauuaaaaggaauagccccacuacaauuggguaacugcagcguugccggguggaucuuaggaaacccagaaugcgaauuacugauuuccaaggagucaugguccuacauuguagaaaaaccaaauccugagaauggaacauguuacccagggcauuucgcugacuaugaggaacugagggagcaauugaguucaguaucuucauuugagagguucgaaauauuccccaaagauagcucauggcccaaccacaccguaaccggagugucagcaucauguucccauaauggggaaagcaguuuuuacagaaauuugcuauggcugacggggaagaaugguuuguacccaaaccugagcaaguccuaugcaaacaacaaagaaaaagaaguccuuguacuaugggguguucaucacccgccaagcauaaaugaccaaaagacccucuaucauacagaaaaugcuuauguuucuguagugucuucacaucauagcaggaaauucaccccagaaauagccaaaagacccaaaguaagagaucaagaaggaagaaucaacuacuacuggacucugcuugaacccggggauacaauaauauuugaggcaaauggaaaucuaauagcgccaagauaugcuuucgcacugaguagaggcuuuggaucaggaaucaucaacucaaaugcaccaauggauaaaugugaugcgaagugccaaacaccucagggagcuauaaacagcagucuuccuuuccagaacguacauccagucacaauaggagaguguccaaaguaugucaggagugcaaaauuaaggaugguuacaggacuaaggaacaucccauccauucaauccagagguuuguuuggagccauugccgguuucauugaagggggguggacuggaaugguagaugguugguaugguuaucaucaucagaaugagcaaggaucuggcuaugcugcagaucaaaaaagcacacaaaaugccauuaaugggauuacaaacaaggugaauucuguaauugagaaaaugaacacucaauucacagcagugggcaaagaauucaacaaauuggaaagaaggauggaaaacuugaauaaaaaaguugaugauggguuuauagacauuuggacauauaaugcagaacuguugguucuacuggaaaaugaaaggacuuuggauuuccaugacuccaaugugaagaaucuguaugagaaaguaaaaagccaguuaaagaauaaugcuaaagaaauaggaaauggguguuuugaauucuaucacaaguguaacgaugaaugcauggagaguguaaagaauggaacuuaugacuauccaaaauauuccgaagaaucaaaguuaaacagggagaaaauugauggagugaaauuggaaucaaugggagucuaucagauucugacgaucuacucaacagucgccaguucucugguucuuuuggucucccugggggcaaucagcuucuggauguguuccaaugggucuuugcaguguagaauaugcaucuaa

SEQ ID NO: 43333 - RNA, 1698 nt, Artificial Sequence; identical to SEQ ID NO: 38401
  derived and/or modified CDS sequence (wt) from hemagglutinin__InfluenzaA__AHL90782

SEQ ID NO: 43334 - RNA, 1698 nt, Artificial Sequence
  derived and/or modified CDS sequence (wt) from hemagglutinin__InfluenzaA__AHL90794
augaaaguaaaacuauugguccuguuaugcacauuuacagcuacauaugcggacacaauauguauaggcuaccaugcuaacaacucgaccgacacuguugacacaguacuugaaaagaaugugacagugacacacucugucaaccugcuugagaacagucacaauggaaaacuaugucuauuaaaaggaauagccccacuacaauuggguaauugcagcguugccggguggaucuuaggaaacccagaaugcgaauuacugauuuccaaggagucaugguccuacauuguagaaaaaccaaauccugagaauggaacauguuacccagggcauuucgcugacuaugaggaacugagggagcaauugaguucaguaucuucauuugagagguucgaaauauuccccaaagaaagcucauggcccaaccacaccguaaccggagugucagcaucaugcucccacaauggggaaagcaguuuuuacagaaauuugcuauggcugacggggaagaaugguuuguacccaaaccugagcaaguccuaugcaaacaacaaagaaaaagaaguccuuguacuaugggguguucaucacccgccaaacauaggugaccaaaauacccucuaucauacagaaaaugcuuauguuucuguagugucuucacauuauagcagaaaauucaccccagaaauagccaaaagacccaaaguaagagaucaagaaggaagaaucaacuacuacuggacucugcuugaacccggggauacaauaauauuugaggcaaauggaaaucuaauagcaccaagauaugcuuucgcacugaguagaggcuuuggaucaggaaucaucaacucaaaugcaccaauggauaaaugugaugcgaagugccaaacaccucagggagcuauaaacagcagucuuccuuuccagaacguacacccagucacaauaggagaguguccaaaguaugucaggagugcaaaauuaaggaugguuacaggacuaaggaacaucccauccauucaauccagagguuuguuuggagccauugccgguuucauugaagggggguggacuggaaugguagaugguugguaugguuaucaucaucagaaugagcaaggaucuggcuaugcugcagaucaaaaaagcacacaaaaugccauuaaugggauuacaaacaaggugaauucuguaauugagaaaaugaacacucaauucacagcagugggcaaagaauucaacaaauuggaaagaaggauggaaaacuugaauaaaaaaguugaugauggguuuauagacauuuggacauauaaugcagaacuguugguucuacuggaaaaugaaaggacuuuggauuuccaugacuccaaugugaagaaucuguaugagaaaguaaaaagccaguuaaagaauaaugcuaaagaaauaggaaauggguguuuugaauucuaucacaaguguaacgaugaaugcauggagaguguaaagaauggaacuuaugacuauccaaaauauuccgaagaaucaaaguuaaacagggagaaaauugauggagugaaauuggaaucaaugggagucuaucagauucuggcgaucuauucaacagucgccaguucucugguucuuuuggucucccugggggcaaucagcuucuggauguguuccaaugggucuuugcaguguagaauaugcaucuaa

SEQ ID NO: 43335 - RNA, 1698 nt, Artificial Sequence
  derived and/or modified CDS sequence (wt) from hemagglutinin__InfluenzaA__AHL90806
augaaaguaaaacuacugguccuguuaugcacauuuacagcuacauaugcagacacaauauguauaggcuaccaugcuaacaacucgaccgacacuguugacacaguacuugaaaagaaugugacagugacacacucugucaaccugcuugagaacagucacaauggaaaacuaugucuauuaaaaggaauagccccacuacaauuggguaacugcagcguugccggguggaucuuaggaaacccagaaugcgaauuacugauuuccaaggagucaugguccuacauuguagaaaaaccaaauccugagaauggaacauguuacccagggcauuucgcugacuaugaggaacugagggagcaauugaguucaguaucuucauuugagagguucgaaauauuccccaaagaaagcucauggcccaaccacaccguaaccggagugucagcaucaugcucccauaauggggaaagcaguuuuuacagaaauuugcuauggcugacggggaagaaugguuuguacccaaaccugagcaaguccuaugcaaacaacaaagaaaaagaaguccuuguacuaugggguguucaucacccgccaaacauaguugaccaaaagacccucuaucguacagaaaaugcuuauguuucuguagugucuucacauuauagcagaaaauucaccccagaaauagccaaaagacccaaaguaagagaucaagaaggaagaaucaacuacuacuggacucugcuugaacccggggauacaauaauauuugaggcaaauggaaaucuaauagcgccaagauaugcuuucgcacugaguagaggcuuuggaucaggaaucaucaacucaaaugcaccaauggauaaaugugaugcgaaaugccaaacaccucagggagcuauaaacagcagucuuccuuuccagaacguacacccagucacaauaggagaguguccaaaguaugucaggagugcaaaauuaaggaugguuacaggacuaaggaacaucccauccauucaauccagagguuuguuuggagccauugccgguuucauugaagggggguggacuggaaugguagaugguugguaugguuaucaucaucagaaugagcaaggaucuggcuaugcugcagaucaaaaaagcacacaaaaugccauuaaugggauuacaaacaaggugaauucuguaauugagaaaaugaacacucaauucacagcagugggcaaagaauucaacaaauuggaaagaaggauggaaaacuugaauaaaaaaguugaugauggguuuauagacauuuggacauauaaugcagaacuguugguucuacuggaaaaugaaaggacuuuggauuuccaugacuccaaugugaagaaucuguaugagaaaguaaaaagccaguuaaagaauaaugcuaaagaaauaggaaauggguguuuugaauucuaucacaaguguaacgaugaaugcauggagaguguaaagaauggaacuuaugacuauccaaaauauuccgaagaaucaaaguuaaacagggagaaaauugauggagugaaauuggaaucaaugggagucuaucagauucuggcgaucuacucaacagucgccaguucucugguucuuuugaucucccugggggcaaucagcuucuggauguguuccaaugggucuuugcaguguagaauaugcaucuaa

SEQ ID NO: 43336 - RNA, 1698 nt, Artificial Sequence; identical to SEQ ID NO: 38664
  derived and/or modified CDS sequence (wt) from hemagglutinin__InfluenzaA__AHL90818

SEQ ID NO: 43337 - RNA, 1698 nt, Artificial Sequence
  derived and/or modified CDS sequence (wt) from hemagglutinin__InfluenzaA__AHL90830
augaaaguaaaacuacugguccuguuaugcacauuuacagcuacauaugcagacacaauauguauaggcuaccaugcuaacaacucgaccgacacuguugacacaguacuugaaaagaaugugacagugacacacucugucaaccugcuugagaacagucacaauggaaaacugugucuauuaaaaggaauagccccacuacaauuggguaacugcagcguugccggguggaucuuaggaaauccagaaugcgaauuacugauuuccaaggagucaugguccuacauuguagaaaaaccaaauccugagaauggaacauguuacccagggcauuucgcugacuaugaggaacugagggagcaauugaguucaguaucuucauuugagagguucgaaauauuccccaaagaaagcucauggcccaaccacaccguaaccggagugucagcaucaugcucccauaauggggaaagaaguuuuuacagaaauuugcuauggcugacggggaagaaugguuuguacccaaaccugagcaaguccuaugcaaacaacaaagaaaaagaaguccuuguacuaugggguguucaucacccgccagacauaggugaccaaaagacccucuaucauacagaaaaugcuuauguuucuguagugucuucacauuauagcagaaaauucaccccagaaauagccaaaagacccaaaguaagagaucaggaaggaagaaucaacuacuacuggacucugcuugaacccggggauacaauaauauuugaggcaaauggaaaucuaauagcgccaagauaugcuuucgcacugaguagaggcuuuggaucaggaaucaucaacucaaaugcaccaauggauaaaugugaugcgaagugccaaacaccucagggagcuauaaacagcagucuuccuuuccagaacguacacccagucacaauaggagaguguccaaaguaugucaggagugcaaaauuaaggaugguuacuggacuaaggaacaucccauccauucaauccagagguuuguuuggagccauugccgguuucauugaagggggguggacuggaaugguagaugguugguaugguuaucaucaucagaaugagcaagggucuggcuaugcugcagaucaaaaaagcacacaaaaugccauuaaugggauuacaaacaaggugaauucuguaauugagaaaaugaacacucaauucacagcagugggcaaagaauucaacaaauuggaaagaaggauggaaaacuugaauaaaaaaguugaugauggguuuauagacauuuggacauauaaugcagaacuguugguucuacuggaaaaugaaaggacuuuggauuuccaugauuccaaugugaagaaucuguaugagaaaguaaaaagccaguuaaagaauaaugcuaaagaaauaggaaauggguguuuugaauucuaucacaaguguaacgaugagugcauggagaguguaaagaauggaacuuaugacuauccaaaauauuccgaagaaucaaaguuaaacagggagaaaauugauggagugaaauuggaaucaaugggagucuaucagauucuggcgaucuacucaacagucgccaguucucugguucuuuuggucucccugggggcaaucaguuucuggauguguuccaaugggucuuugcaguguagaauaugcaucuaa

SEQ ID NO: 43338 - RNA, 1698 nt, Artificial Sequence; identical to SEQ ID NO: 43331
  derived and/or modified CDS sequence (wt) from hemagglutinin__InfluenzaA__AHL90842

SEQ ID NO: 43339 - RNA, 1698 nt, Artificial Sequence
  derived and/or modified CDS sequence (wt) from hemagglutinin__InfluenzaA__AHL90854
augaaaguaaaacuacugguccuguuaugcacauuuacagcuacauaugcagacacaauauguauaggcuaccaugcuaacaacucgaccgacacuguugacacaguacuugaaaagaaugugacagugacacacucugucaaccugcuugagaacagucacaauggaaaacuaugucuauuaaaaggaauagccccacuacaauuggguaacugcagcguugccggguggaucuuaggaaacccagaaugcgaauuacugauuuccaaagagucaugguccuacauuguagaaaaaccaaauccugagaauggaacauguuacccagggcauuucgcugauuaugaggaacugagggagcaauugaguucaguaucuucauuugagagguucgaaauauuccccaaagaaagcucauggcccaaccacaccguaaccggagugucagcaucaugcucccauaauggggaaagcaguuuuuacagaaauuugcuauggcugacggggaagaaugguuuguacccaaaccugagcaaguccuaugcaaacaacaaagaaaaagaaguccuuguacuaugggguguucaucacccgccaaacauaguugaccaaaagacccucuaccguacagaaaaugcuuauguuucuguagugucuucacauuauagcagaaaauucaccccagaaauagccaaaagacccaaaguaagagaucaagaaggaagaaucaacuacuacuggacucugcuugaacccggggauacaauaauauuugaggcaaauggaaaucuaauagcgccaagauaugcuuucgcacugaguagaggcuuuggaucaggaaucaucaacucaaaugcaccaauggguaaaugugaugcgaagugccaaacaccucagggagcuauaaacagcagucuuccuuuccagaacguacacccagucacaauaggagaguguccaaaguaugucaggagugcaaaauuaaggaugguuacaggacuaaggaacaucccauccauucaauccagagguuuguuuggagccauugccgguuucauugaagggggguggacuggaaugguagaugguugguaugguuaucaucaucagaaugagcaaggaucuggcuaugcugcagaucaaaaaagcacacaaaaugccauuaaugggauuacaaacaaggugaauucuguaauugagaaaaugaacacucaauucacagcagugggcaaagaauucaacaaauuggaaagaaggauggaaaacuugaauaaaaaaguugaugauggguuuauagacauuuggacauauaaugcagaacuguugguucuacuggaaaaugaaaggacuuuggauuuccaugacuccaaugugaagaaucuguaugagaaaguaaaaagccaguuaaagaauaaugcuaaagaaauaggaaauggguguuuugaauucuaucacaaguguaacgaugaaugcauggagaguguaaagaauggaacuuaugacuauccaaaauauuccgaagaaucaaaguuaaacagggagaaaauugauggagugaaauuggaaucaaugggagucuaucagauucuggcgaucuacucaacagucgccaguucucugguucuuuuggucucccugggggcaaucagcuucuggauguguuccaaugggucuuugcaguguagaauaugcaucuaa

SEQ ID NO: 43340 - RNA, 1698 nt, Artificial Sequence
  derived and/or modified CDS sequence (wt) from hemagglutinin__InfluenzaA__AHL90866
augaaaguaaaacuacugguccuguuaugcacauuuacagcuacauaugcagacacaauauguauaggcuaccaugcuaacaacucgaccgacacuguugacacaguacuugaaaagaaugugacagugacacacucugucaaccugcuugagaacagucacaauggaaaacuaugucuauuaaaaggaauagccccacuacaauuggguaacugcagcguugccggguggaucuuaggaaacccagaaugcgaauuacugauuuccaaggagucaugguccuacauuguagaaaaaccaaauccugagaauggaacauguuacccagggcauuucgcugacuaugaggaacugagggagcaauugaguucaguaucuucauuugagagguucgaaauauuccccaaagaaagcucauggcccaaccacaccguaaccggagugucagcaucaugcucccauaauggggaaagcaguuuuuacagaaauuugcuauggcugacggggaagaaugguuuguacccaaaccugagcaaguccuaugcaaacaacaaagaaaaagaaguccuuguacuaugggguguucaucacccgccaaacauaguugaccaaaagacccucuaucguacagaaaaugcuuauguuucuguagugucuucacauuauagcagaaaauucaccccagaaauagccaaaagacccaaaguaagagaucaagaaggaagaaucaacuacuacuggacucugcuugaacccggggauacaauaauauuugaggcaaauggaaaucuaauagcgccaagauaugcuuucgcacugaguagaggcuuuggaucaggaaucaucaacucaaaugcaccaauggauaaaugugaugcgaaaugccaaacaccucagggagcuauaaacagcagucuuccuuuccagaacguacacccagucacaauaggagaguguccaaaguaugucaggagugcaaaauuaaggaugguuacaggacuaaggaacaucccauccauucaauccagagguuuguuuggagccauugccgguuucauugaagggggguggacuggaaugguagaugguugguaugguuaucaucaucagaaugagcaaggaucuggcuaugcugcagaucaaaaaagcacacaaaaugccauuaaugggauuacaaacaaggugaauucuguaauugagaaaaugaacacucaauucacagcagugggcaaagaauucaacaaauuggaaagaaggauggaaaacuugaauaaaaaaguugaugauggguuuauagacauuuggacauauaaugcagaacuguugguucuacuggaaaaugaaaggacuuuggauuuccaugacuccaaugugaagaaucuguaugagaaaguaaaaagccaguuaaagaauaaugcuaaagaaauaggaaauggguguuuugaauuuuaucacaaguguaacgaugaaugcauggagaguguaaagaauggaacuuaugacuauccaaaauauuccgaagaaucaaaguuaaacagggagaaaauugauggagugaaauuggaaucaaugggagucuaucagauucuggcgaucuacucaacagucgccaguucucugguucuuuuggucucccugggggcaaucagcuucuggauguguuccaaugggucuuugcaguguagaauaugcaucuaa

SEQ ID NO: 43341 - RNA, 1698 nt, Artificial Sequence
  derived and/or modified CDS sequence (wt) from hemagglutinin__InfluenzaA__AHL90878
augaaaguaaaacuacugguccuguuaugcacauuuacagcuacauaugcagacacaauauguauaggcuaccaugcuaacaacucgaccgacacuguugacacaguacuugaaaagaaugugacagugacacacucugucaaccugcuugagaacagucacaauggaaaacuaugucuauuaaaaggaauagccccacuacaauuggguaacugcagcguugccggguggaucuuaggaaacccagaaugcgaauuacugauuuccaaagagucaugguccuacauuguagaaaaaccaaauccugagaauggaacauguuacccagggcauuucgcugauuaugaggaacugagggagcaauugaguucaguaucuucauuugagagguucgaaauauuccccaaagaaagcucauggcccaaccacaccguaaccggagugucagcaucaugcucccauaauggggaaagcaguuuuuacagaaauuugcuauggcugacggggaagaaugguuuguacccaaaccugagcaaguccuaugcaaacaacaaagaaaaagaaguccuuguacuaugggguguucaucacccgccaaacauaguugaccaaaagacccucuaccguacagaaaaugcuuauguuucuguagugucuucacauuauagcagaaaauucaccccagaaauagccaaaagacccaaaguaagagaucaagaaggaagaaucaacuacuacuggacucugcuugaacccggggauacaauaauauuugaggcaaauggaaaucuaauagcgccaagauaugcuuucgcacugaguagaggcuuuggaucaggaaucaucaacucaaaugcaccaauggguaaaugugaugcgaagugccaaacaccucagggagcuauaaacagcagucuuccuuuccagaacguacacccagucacaauaggagaguguccaaaguaugucaggagugcaaaauuaaggaugguuacaggacuaaggaacaucccauccauucaauccagagguuuguuuggagccauugccgguuucauugaagggggguggacuggaaugguagaugguugguaugguuaucaucaucagaaugagcaaggaucuggcuaugcugcagaucaaaaaagcacacaaaaugccauuaaugggauuacaaacaaggugaauucuguaauugagaaaaugaacacucaauucacagcagugggcaaagaauucaacaaauuggaaagaaggauggaaaacuugaauaaaaaaguugaugauggguuuauagacauuuggacauauaaugcagaacuguugguucuacuggaaaaugaaaggacuuuggauuuccaugacuccaaugugaagaaucuguaugagaaaguaaaaagccaguuaaagaauaaugcuaaagaaauaggaaauggguguuuugaauucuaucacaaguguaacgaugaaugcauggaaaguguaaagaauggaacuuaugacuauccaaaauauuccgaagaaucaaaguuaaacagggagaaaauugauggagugaaauuggaaucaaugggagucuaucagauucuggcgaucuacucaacagucgccaguucucugguucuuuuggucucccugggggcaaucagcuucuggauguguuccaaugggucuuugcaguguagaauaugcaucuaa

SEQ ID NO: 43342 - RNA, 1698 nt, Artificial Sequence; identical to SEQ ID NO: 43337
  derived and/or modified CDS sequence (wt) from hemagglutinin__InfluenzaA__AHL90890

SEQ ID NO: 43343 - RNA, 1698 nt, Artificial Sequence; identical to SEQ ID NO: 37543
  derived and/or modified CDS sequence (wt) from hemagglutinin__InfluenzaA__AHL90902

SEQ ID NO: 43344 - RNA, 1698 nt, Artificial Sequence
  derived and/or modified CDS sequence (wt) from hemagglutinin__InfluenzaA__AHL90914
augaaaguaaaacuacugguccuguuaugcacauuuacagcuacauaugcagacacaauauguauaggcuaccaugcuaacaacucgaccgacacuguugacacaguacuugaaaagaaugugacagugacacacucugucaaccugcuugagaacagucacaauggaaaacuaugucuauuaaaaggaauagccccacuacaauuggguaacugcagcguugccggguggaucuuaggaaacccagaaugcgaauuacugauuuccaaggagucaugguccuacauuguagaaaaaccaaauccugagaauggaacauguuacccagggcauuucgcugacuaugaggaacugagggagcaauugaguucaguaucuucauuugagagguucgaaauauuccccaaagaaagcucauggcccaaccacaccguaaccggagugucagcaucaugcucccauaauggggaaagcaguuuuuacagaaauuugcuauggcugacggggaagaaugguuuguacccaaaccugagcaaguccuaugcaaacaacaaagaaaaagaaguccuuguacuaugggguguucaucacccgccaaacauaguugaccaaaagacccucuaucguacagaaaaugcuuauguuucuguagugucuucacauuauagcagaaaauucaccccagaaauagccaaaagacccaaaguaagagaucaagaaggaagaaucaacuacuacuggacucugcuugaacccggggauacaauaauauuugaggcaaauggaaaucuaauagcgccaagauaugcuuucgcacugaguagaggcuuuggaucaggaaucaucaacucaaaugcaccaauggauaaaugugaugcgaaaugccaaacaccucagggagcuauaaacagcagucuuccuuuccagaacguacacccagucacaauaggagaguguccaaaguaugucaggagugcaaaauuaaggaugguuacaggacuaaggaacaucccauccauucaauccagagguuuguuuggagccauugccgguuucauugaagggggguggacuggaaugguagaugguugguaugguuaucaucaucagaaugagcaaggaucuggcuaugcugcagaucaaaaaagcacacaaaaugccauuaaugggauuacaaacaaggugaauucuguaauugagaaaaugaacacucaauucacagcagugggcaaagaauucaacaaauuggaaagaaggauggaaaacuugaauaaaaaaguugaugauggguuuauagacauuuggacauauaaugcagaacuguugguucuacuggaaaaugaaaggacuuuggauuuccaugacucuaaugugaagaaucuguaugagaaaguaaaaagccaguuaaagaauaaugcuaaagaaauaggaaauggguguuuugaauucuaucacaaguguaacgaugaaugcauggagaguguaaagaauggaacuuaugacuauccgaaauauuccgaagaaucaaaguuaaacagggagaaaauugauggagugaaauuggaaucaaugggagucuaucagauucuggcgaucuacucaacagucgccaguucucugguucuuuuggucucccugggggcaaucagcuucuggauguguuccaaugggucuuugcaguguagaauaugcaucuaa

SEQ ID NO: 43345 - RNA, 1698 nt, Artificial Sequence; identical to SEQ ID NO: 37543
  derived and/or modified CDS sequence (wt) from hemagglutinin__InfluenzaA__AHL90938

SEQ ID NO: 43346 - RNA, 1698 nt, Artificial Sequence; identical to SEQ ID NO: 37543
  derived and/or modified CDS sequence (wt) from hemagglutinin__InfluenzaA__AHL90950

SEQ ID NO: 43347 - RNA, 1698 nt, Artificial Sequence; identical to SEQ ID NO: 37543
  derived and/or modified CDS sequence (wt) from hemagglutinin__InfluenzaA__AHL90962

SEQ ID NO: 43348 - RNA, 1698 nt, Artificial Sequence
  derived and/or modified CDS sequence (wt) from hemagglutinin__InfluenzaA__AHL90974
augaaaguaaaacuacuaguccuguuaugcacauuuacagcuacauaugcagacacaauauguauaggcuaccaugcuaacaacucgaccgacacuguugacacaguacuugaaaagaauguaacagugacacacucugucaaccugcuugagaacagucacaauggaaaacuaugucuauuaaaaggaauagccccacuacaauuggguaacugcagcguugccggguggaucuuaggaaacccagaaugcgaauuacugauuuccaaggagucaugguccuacauuguagaaaaaccaaauccugagaauggaacauguuacccagggcauuucgcugacuaugaggaacugagggagcaauugaguucaguaucuucauuugagagguucgaaauauuccccaaagaaagcucauggcccaaccacaccguaaccggagugucagcaucaugcucccauaauggggaaagcaguuuuuacagaaauuugcuauggcugacggggaagaaugguuuguacccaaaccugagcaaguccuaugcaaacaacaaagaaaaagaaguccuuguacuaugggguguucaucacccgccaagcauaagugaucaaaagacccucuaucauacagaaaaugcuuauguuucuguagugucuucacauuauagcagaaaauucaccccagaaguagccaaaagacccaaaguaagagaucaagaaggaagaaucaacuacuacuggacucugcuugaacccggggauacaauaauauuugaggcaaauggaaaucuaauagcgccaagauaugcuuucgcacugaguagaggcuuuggaucaggaaucaucaacucaaaugcaccaauggauaaaugugaugcgaagugccaaacaccucagggagcuauaaacagcagucuuccuuuccagaacguacacccagucacaauaggagaguguccaaaauaugucaggagugcaaaauuaaggaugguuacaggacuaaggaacaucccauccauucaauccagagguuuguuuggagccauugccgguuucauugaagggggguggacuggaaugguagacgguugguaugguuaucaucaucagaaugagcaaggaucuggcuaugcugcagaucaaaaaagcacacaaaaugccauuaaugggauuacaaacaaggugaauucuguaauugagaaaaugaacacucaauucacagcagugggcaaagaauucaacaaauuggaaagaaggauggaaaacuugaauaaaaaaguugaugauggguuuauagacauuuggacauauaaugcagaacuguugguucuacuggaaaaugaaaggacuuuggauuuccaugacuccaaugugaagaaucuguaugagaaaguaaaaggccaguuaaagaauaaugcuaaagaaauaggaaauggguguuuugaauucuaucacaaguguaacgaugaaugcauggagaguguaaagaauggaacuuaugacuauccaaaauauuccgaagaaucaaaguuaaacagggagaaaauugauggagugaaauuggaaucaaugggagucuaucagauucuggcgaucuacucaacagucgccaguucucugguucuuuuggucucccugggggcaaucagcuucuggauguguuccaaugggucuuugcaguguagaauaugcaucuaa

SEQ ID NO: 43349 - RNA, 1698 nt, Artificial Sequence
  derived and/or modified CDS sequence (wt) from hemagglutinin__InfluenzaA__AHL90986
augaaaguaaaacuacugguccuguuaugcacauuuacagcuacauaugcagacacaauauguauaggcuaccaugcuaacaacucgaccgacacuguugacacaguacuugaaaagaaugugacagugacacacucuguuaaccugcuugagaacagucacaauggaaaacuauguuuauuaaaaggaauagccccacuacaauuggguaacugcagcguugccggguggaucuuaggaaacccagaaugcgaauuacugauuuccaaggagucaugguccuacauuguagaaaaaccaaauccugagaauggaacauguuacccagggcauuucgcugacuaugaggaacugagggagcaauugaguucaguaucuucauuugagagguucgaaauauuccccaaagaaagcucauggcccaaccacaccguaaccggagugucagcaucaugcucccauaauggggaaagcaguuuuuacagaaauuugcuauggcugacggugaagaaugguuuguacccaaacuugagcaaguccuaugcaaacaacaaagaaaaagaaguccuuguacuaugggguguucaucacccgccaaacauaguugaccaaaagacccucuaucguacagaaaaugcuuauguuucuguagugucuucacauuauagcagaaaauucaccccagaaauagccaaaagacccaaaguaagagaucaagaaggaagaaucaacuacuacuggacucugcuugaacccggggauacaauaauauuugaggcaaauggaaaucuaauagcgccaagauaugcuuucgcacugaguaaaggcuuuggaucaggaaucaucaacucaaaugcaccaauggauaaaugugaugcgaagugccaaacaccucggggagcuauaaacagcagucuuccuuuccagaacguacacccagucacaauaggagaguguccaaaguaugucaggagugcaaaauuaaggaugguuacaggacuaaggaacaucccauccauucaauccagagguuuguuuggagccauugccgguuucauugaagggggguggacuggaaugguagaugguugguaugguuaucaucaucagaaugagcaaggaucuggcuaugcugcagaucaaaaaagcacacaaaaugccauuaaugggauuacaaacaaggugaauucuguaauugagaaaaugaacacucaauucacagcagugggcaaagaauucaacaaauuggaaagaaggauggaaaacuugaauaaaaaaguugaugauggguuuauagacauuuggacauauaaugcagaacuguugguucuacuggaaaaugaaaggacuuuggauuuccaugacuccaaugugaagaaucuguaugagaaaguaaaaagccaguuaaagaauaaugcuaaagaaauaggaaauggguguuuugaauucuaucacaaguguaacgaugaaugcauggagaguguaaagaauggaaccuaugacuauccaaaauauuccgaagaaucaaaguuaaacagggagaaaauugauggagugaaauuggaaucaaugggagucuaucagauucuggcgaucuacucaacagucgccaguucucugguucuuuuggucucccugggggcaaucagcuucuggauguguuccaaugggucuuugcaguguagaauaugcaucuaa

SEQ ID NO: 43350 - RNA, 1698 nt, Artificial Sequence
  derived and/or modified CDS sequence (wt) from hemagglutinin__InfluenzaA__AHL91010
augaaaguaaaacuacugguccugcuaugcacauuuacagcuacauaugcagacacaauauguauaggcuaccaugcuaacaacucgaccgacacuguugacacaguacuugaaaagaaugugacagugacacacucugucaaccugcuugagaacagucacaauggaaaacuaugucuauuaaaaggaauagccccacuacaauuggguaacugcagcguugccggguggaucuuaggaaacccagaaugcgaauuacugauuuccaaggagucaugguccuacauuguagaaaaaccaaauccugagaauggaacauguuacccagggcauuucgcugacuaugaggaacugagggaacaauugaguucaguaucuucauuugagagguucgaaauauuccccaaagauagcucauggcccaaccacaccguaaccggagugucagcaucauguucccauaauggggaaagcaguuuuuacagaaauuugcuauggcugacggggaagaaugguuuguacccaaaccugagcaaguccuaugcaaacaacaaagaaaaagaaguccuuguacuaugggguguucaucacccgccaagcauaaaugaccaaaagacccucuaucauacagaaaaugcuuauguuucuguagugucuucacauuauagcaggaaauucaccccagaaauagccaaaagacccaaaguaagagaucaagaaggaagaaucaacuacuacuggacucugcuugaacccggggauacaauaauauuugaggcaaauggaaaucuaauagcgccaagauaugcuuucgcacugaguagaggcuuuggaucaggaaucaucaacucaaaugcaccaauggauaaaugugaugcgaagugccaaacaccucagggagcuauaaacagcagucuuccuuuccagaacguacacccagucacaauaggagaguguccaaaguaugucaggagugcaaaauuaaggaugguuacaggacuaaggaacaucccauccauucaauccagagguuuguuuggagccauugccgguuucauugaagggggguggacuggaaugguagaugguugguaugguuaucaucaucagaaugagcaaggaucuggcuaugcugcagaucaaaaaagcacacaaaaugccauuaaugggauuacaaacaaggugaauucuguaauugagaaaaugaacacucaauucacagcagugggcaaagaauucaacaaauuggaaagaaggauggaaaacuugaauaaaaaaguugaugauggguuuauagacauuuggacauauaaugcagaacuguugguucuacuggaaaaugaaaggacuuuggauuuccaugacuccaaugugaagaaucuguaugagaaaguaaaaagccaguuaaagaauaaugcuaaagaaauaggaaauggguguuuugaauucuaucacaaguguaacgaugaaugcauggagaguguaaagaaugggacuuaugacuauccaaaauauuccgaagaaucaaaguuaaacagggagaaaauugauggagugaaauuggaaucaaugggagucuaucagauucugacgaucuacucaacagucgccaguucucugguucuuuuggucucccugggggcaaucagcuucuggauguguuccaaugggucuuugcaguguagaauaugcaucuaa

SEQ ID NO: 43351 - RNA, 1698 nt, Artificial Sequence
  derived and/or modified CDS sequence (wt) from hemagglutinin__InfluenzaA__AHL91022
augaaaguaaaacuacugguccugcuaugcacauuuacagcuacauaugcagacacaauauguauaggcuaccaugcuaacaacucgaccgacacuguugacacaguacuugaaaagaaugugacagugacacacucugucaaccugcuugagaacagucacaauggaaaacuaugucuauuaaaaggaauagccccacuacaauuggguaacugcagcguugccggguggaucuuaggaaacccagaaugcgaauuacugauuuccaaggagucaugguccuacauuguagaaaaaccaaauccugagaauggaacauguuacccagggcauuucgcugacuaugaggaacugagggaacaauugaguucaguaucuucauuugagagguucgaaauauuccccaaagauagcucauggcccaaccacaccguaaccggagugucagcaucauguucccauaauggggaaaacaguuuuuacagaaauuugcuauggcugacggggaagaaugguuuguacccaaaccugagcaaguccuaugcaaacaacaaagaaaaagaaguccuuguacuaugggguguucaucacccgccaagcauaaaugaccaaaagacccucuaucauacagaaaaugcuuauguuucuguagugucuucacauuauagcaggaaauucaccccagaaauagccaaaagacccaaaguaagagaucaagaaggaagaaucaacuacuacuggacucugcuugaacccggggauacaauaauauuugaggcaaauggaaaucuaauagcgccaagauaugcuuucgcacugaguagaggcuuuggaucaggaaucaucaacucaaaugcaccaauggauaaaugugaugcgaagugccaaacaccucagggagcuauaaacagcagucuuccuuuccagaacguacacccagucacaauaggagaguguccaaaguaugucaggagugcaaaauuaaggaugguuacaggacuaaggaacaucccauccauucaauccagagguuuguuuggagccauugccgguuucauugaagggggguggacuggaaugguagaugguugguaugguuaucaucaucagaaugagcaaggaucuggcuaugcugcagaucaaaaaagcacacaaaaugccauuaaugggauuacaaacaaggugaauucuguaauugagaaaaugaacacucaauucacagcagugggcaaagaauucaacaaauuggaaagaaggauggaaaacuugaauaaaaaaguugaugauggguuuauagacauuuggacauauaaugcagaacuguugguucuacuggaaaaugaaaggacuuuggauuuccaugacuccaaugugaagaaucuguaugagaagguaaaaagccaguuaaagaauaaugcuaaagaaauaggaaauggguguuuugaauucuaucacaaguguaacgaugaaugcauggagaguguaaagaaugggacuuaugacuauccaaaauauuccgaagaaucaaaguuaaacagggagaaaauugauggagugaaauuggaaucaaugggagucuaucagauucugacgaucuacucaacagucgccaguucucugguucuuuuggucucccugggggcaaucagcuucuggauguguuccaaugggucuuugcaguguagaauaugcaucuaa

SEQ ID NO: 43352 - RNA, 1701 nt, Artificial Sequence
  derived and/or modified CDS sequence (wt) from hemagglutinin__InfluenzaA__AHL91034
augaagacuaucauugcuuugagcuacauucuaugucugguuuucgcucaaaaacuuccuggaaaugacaacagcacggcaacgcugugccuugggcaccaugcaguaccaaacggaacgauagugaaaacaaucacgaaugaccaaauugaaguuacuaaugcuacugagcugguucagaguuccucaacaggugaaauaugcgacaguccucaucagauccuugauggagaaaacugcacacuaauagaugcucuauugggagacccucaaugugauggcuuccaaaauaagaaaugggaccuuuuuguugaacgcagcaaagccuacagcaacuguuacccuuaugaugugccggauuaugccucccuuaggucacuaguugccucauccggcacacuggaguuuaacaaugaaagcuucaauuggacuggagucacucaaaacggaacaagcucugcuugcauaaggagaucuaauaacaguuucuuuaguagauugaauugguugacccacuuaaaauucaaauacccagcauuaaacguaacuaugccaaacaaugaacaauuugacaaauuguacauuugggggguucaccacccggguacggacaaugaccaaaucuuccuguaugcucaagcaucaggaagaaucacagucucuaccaaaagaagccaacaaacuguaaucccgaauaucggaucuagacccagaguaaggaauaucccuagcagaauaagcaucuauuggacaauaguaaaaccgggagacauacuuuugauuaacagcacagggaaucuaauugcuccuagggguuacuuuaaaauacgaagugggaaaagcucaauaaugagaucagaugcacccauuggcaaaugcaauucugaaugcaucacuccaaauggaagcauucccaaugacaaaccauuccaaaauguaaacaggaucacauacggggccugucccagauauguuaagcaaaacacucugaaauuggcaacagggaugcgaaauguaccagagaaacaaacuagaggcauauuuggcgcaaucgcggguuucauagaaaaugguugggagggaaugguggaugguugguacgguuucaggcaucaaaauucugagggaagaggacaagcagcagaucucaaaagcacucaagcagcaaucgaucaaaucaaugggaagcugaauagauugaucgggaaaaccaacgagaaauuccaucagauugaaaaagaauucucagaagucgaagggagaauucaggaccuugagaaauauguugaggacaccaaaauagaucucuggucauacaacgcggagcuucuuguugcccuggagaaccaacauacaauugaucuaacugacucagaaaugaacaaacuguuugaaaaaacaaagaagcaacugagggaaaaugcugaggauaugggcaaugguuguuucaaaauauaccacaaaugugacaaugccugcauaggaucaaucagaaauggaacuuaugaccacgauguauacagagaugaagcauuaaacaaccgguuccagaucaagggaguugagcugaagucaggguacaaagauuggauccuauggauuuccuuugccauaucauguuuuuugcuuuguguugcuuuguugggguucaucaugugggccugccaaaaaggcaacauuaggugcaacauuugcauuuga

SEQ ID NO: 43353 - RNA, 1701 nt, Artificial Sequence
  derived and/or modified CDS sequence (wt) from hemagglutinin__InfluenzaA__AHL91046
augaagacuaucauugcuuugagcuacauucuaugucugguuuucgcucaaaaacuuccuggaaaugacaacagcacggcaacgcugugccuugggcaccaugcaguaccaaacggaacgauagugaaaacaauaacgaaugaccaaauugaaguuacuaaugcuacugagcugguucagaguuccucaacaggugaaauaugcgacaguccucaucagauccuugauggagaaaacugcacacuaauagaugcucuauugggagacccucagugugauggcuuccaaaauaagaaaugggaccuuuuuguugaacgcagcaaagccuacagcaacuguuacccuuaugaugugccggauuaugccucccuuaggucacuaguugccucauccggcacacuggaguuuaacaaugaaagcuucaauuggacuggagucacucaaaauggaacaagcucugcuugcauaaggagaucuaauaacaguuucuuuaguagauuaaauugguugacccacuuaagauucaaguacccagcauugaacgugacuaugccaaacaaugaacaauuugacaaauuguacauuugggggguucaccacccggguacggacaaugaccaaaucuuccuguaugcucaagcaucaggaagaaucacagucucuaccaaaagaagccaacaaacuguaaucccgaauaucggaucuagacccagaguaaggaauaucccuagcagaauaagcaucuauuggacaauaguaaaaccgggagacauacuuuugauuaacagcacagggaaucuaauugcuccuagggguuacuucaaaauacgaagugggaaaagcucaauaaugagaucagaugcacccauuggcaaaugcaauucugaaugcaucacaccaaauggaagcauucccaaugacaaaccauuccaaaauguaaacaggaucacauacggggccugucccagauauguuaagcaaaacacucugaaauuggcaacagggaugcgaaauguaccagagaaacaaacuagaggcauauuuggcgcaaucgcggguuucauagaaaaugguugggagggaaugguggaugguugguacgguuucaggcaucaaaauucugagggaagaggacaagcagcagaucucaaaagcacucaagcagcaaucgaucaaaucaaugggaagcugaauagauugaucggaaaaaccaacgagaaauuccaucagauugaaaaagaauucucagaagucgaagggagaauucaggaccuugagaaauauguugaggacaccaaaauagaucucuggucauacaacgcggagcuucuuguugcccuggagaaccaacauacaauugaucuaacugacucagaaaugaacaaacuguuugaaaaaacaaagaagcaacugagggaaaaugcugaggauaugggcaaugguuguuucaaaauauaccacaaaugugacaaugccugcauaggaucaaucagaaauggaacuuaugaccacgauguauacagagaugaagcauuaaacaaccgguuccagaucaagggaguugagcugaagucaggguacaaagauuggauccuauggauuuccuuugccauaucauguuuuuugcuuuguguugcuuuguugggguucaucaugugggccugccaaaaaggcaacauuaggugcaacauuugcauuuga

SEQ ID NO: 43354 - RNA, 1701 nt, Artificial Sequence
  derived and/or modified CDS sequence (wt) from hemagglutinin__InfluenzaA__AHL91058
augaagacuaucauugcuuugagcuacauucuaugucugguuuucgcucaaaaacuuccuggaaaugacaacagcacggcaacgcugugccuugggcaccaugcaguaccaaacggaacgauagugaaaacaaucacgaaugaccaaauugaaguuacuaaugcuacugagcugguucagaguuccucaacaggugaaauaugcgacaguccucaucagauccuugauggagaaaacugcacacuaauagaugcucuauugggagacccucagugugauggcuuccaaaauaagaaaugggaccuuuuuguugaacgcagcaaagccuacagcaacuguuacccuuaugaugugccggauuaugccucccuuaggucacuaguugccucauccggcacacuggaguuuaacaaugaaagcuucaauuggacuggagucacucaaaacggaacaagcucugcuugcauaaggagaucuaauaacaguuucuuuaguagauugaauugguugacccacuuaaaauucaaauacccagcauuaaacgugacuaugccaaacaaugaacaauuugacaaauuguacauuugggggguucaccacccggguacggacaaugaccaaaucuuccuguaugcucaagcaucaggaagaaucacagucucuaccaaaagaagccaacaaacuguaaucccgaauaucggaucuagacccagaguaaggaauaucccuagcagaauaagcaucuauuggacaauaguaaaaccgggagacauacuuuugauuaacagcacagggaaucuaauugcuccuagggguuacuuuaaaauacgaagugggaaaagcucaauaaugagaucagaugcgcccauuggcaaaugcaauucugaaugcaucacuccaaauggaagcauucccaaugacaaaccauuccaaaauguaaacagaaucacauacggggccugucccagauauguuaagcaaaacacucugaaauuggcaacagggaugcgaaauguaccagagaaacaaacuagaggcauauuuggugcaaucgcggguuucauagaaaaugguugggagggaaugguggaugguugguacgguuucaggcaucaaaauucugagggaagaggacaagcagcagaucucaaaagcacucaagcagcaaucgaucaaaucaaugggaagcugaauagauugaucgggaaaaccaacgagaaauuccaucagauugaaaaagaauucucagaagucgaagggagaauucaggaccuugagaaauauguugaggacaccaaaauagaucucuggucauacaacgcggagcuucuuguugccauggagaaccaacauacaauugaucuaacugacucagaaaugaacaaacuguuugaaaaaacaaagaagcaacugagggaaaaugcugaggauaugggcaaugguuguuucaaaauauaccacaaaugugacaaugccugcauaggaucaaucagaaauggaacuuaugaccacgauguauacagagaugaagcauuaaacaaccgguuccagaucaagggaguugagcugaagucaggguacaaggauuggauccuauggauuuccuuugccauaucauguuuuuugcuuuguguugcuuuguugggguucaucaugugggccugccaaaaaggcaacauuaggugcaacauuugcauuuga

SEQ ID NO: 43355 - RNA, 1701 nt, Artificial Sequence
  derived and/or modified CDS sequence (wt) from hemagglutinin__InfluenzaA__AHL91070
augaagacuaucauugcuuugagcuacauucuaugucugguuuucgcucaaaaacuuccuggaaaugacaacagcauggcaacgcugugccuugggcaccaugcaguaccaaacggaacgauagugaaaacaaucacgaaugaccaaauugaaguuacuaaugcuacugagcugguucagaguuccucaacaggugaaauaugcgacaguccucaucagauccuugauggagaaaacugcacacuaauagaugcucuauugggagacccucagugugauggcuuccaaaauaagaaaugggaccuuuuuguugaacgcagcaaagccuacagcaacuguuacccuuaugaugugccggauuaugccucccuuaggucacuaguugccucauccggcacacuggaguuuaacaaugaaagcuucaauuggacuggagucacucaaaacggaacaagcucugcuugcaugaggagaucuaauaacaguuucuuuaguagauugaauugguugacccacuuaaaauucaaauacccagcauuaaacgugacuaugccaaacaaugaacaauuugacaaauuguacauuugggggguucaccacccggguacggacaaugaccaaaucuuccuguaugcucaagcaucaggaagaaucacagucucuaccaaaagaagccaacaaacuguaaucccgaauaucggaucuagacccagaguaaggaauaucccuagcagaauaagcaucuauuggacaauaguaaaaccgggagacauacuuuugauuaacagcacagggaaucuaauugcuccuagggguuacuucaaaauacgaagugggaaaagcucaauaaugagaucagaugcacccauuggcaaaugcaauucugaaugcaucacuccaaauggaagcauucccaaugacaaaccauuccaaaauguaaacaggaucacauacggggccugucccagauaugucaagcaaaacacucugaaauuggcaacagggaugcgaaauguaccagagaaacaaacuagaggcauauuuggcgcaaucgcggguuucauagaaaaugguugggagggaaugguggaugguugguacgguuucaggcaucaaaauucugagggaagaggacaagcagcagaucucaaaagcacucaagcagcaaucgaucaaaucaauggaaagcugaauagacugaucgggaaaaccaacgagaaauuccaucagauugaaaaagaauucucagaagucgaagggagaauucaggaccuugagaaauauguugaggacaccaaaauagaucucuggucauacaacgcggagcuucuuguugcccuggagaaccaacauacaauugaucuaacugacucagaaaugaacaaacuguuugaaaaaacaaagaagcaacugagggaaaaugcugaggauaugggcaaugguuguuucaaaauauaccacaaaugugacaaugccugcauaggaucaaucagaaauggaacuuaugaccacgauguauacagagaugaagcauuaaacaaccgguuccagaucaagggaguugagcugaagucaggguacaaagauuggauccuauggauuuccuuugccauaucauguuuuuugcuuuguguugcuuuguugggguucaucaugugggccugccaaaaaggcaacauuaggugcaacauuugcauuuga

SEQ ID NO: 43356 - RNA, 1701 nt, Artificial Sequence
  derived and/or modified CDS sequence (wt) from hemagglutinin__InfluenzaA__AHL91082
augaagacuaucauugcuuugagcuacauucuaugucugguuuucgcucaaaaacuuccuggaaaugacaacagcacggcaacgcugugccuugggcaccaugcaguaccaaacggaacgauagugaaaacaaucacgaaugaccaaauugaaguuacuaaugcuacugagcugguucagaguuccucaacaggugaaauaugcgacaguccccaucagauccuugauggagaaaacugcacacuaauagaugcucuauugggagacccucagugugauggcuuccaaaauaagaaaugggaccuuuuuguugaacgaagcaaagccuacagcaacuguuacccuuaugaugugccggauuaugccucccuuaggucacuaguugccucauccggcacacuggaguuuaacaaugaaagcuucaauuggacuggagucacucaaaacggaacaagcucugcuugcauaaggagaucuaauaacaguuucuuuaguagauugaauugguugacccacuuaaaauucaaauacccagcauugaacgugacuaugccaaacaaugaacaauuugacaaauuguacauuugggggguucaccacccggguacggacaaugaccaaaucuuccuguaugcucaagcaucaggaagaaucacagucucuaccaaaagaagccaacaaacuguaaucccgaauaucggaucuagacccagaguaaggaauaucccuagcagaauaagcaucuauuggacaauaguaaaaccgggagacauacuuuugauuaacagcacagggaaucuaauugcuccuagggguuacuucaaaauacgaagugggaaaagcucaauaaugagaucagaugcacccauuggcaaaugcaauucugaaugcaucacuccaaauggaagcauucccaaugacaaaccauuccaaaaugugaacaggaucacauacggggccugucccauauauguuaagcaaaacacucugaaauuggcaacagggaugcgaaauguaccagagaaacaaacuagaggcauauuuggcgcaaucgcggguuucauagaaaaugguugggagggaaugguggaugguugguacgguuucaggcaucaaaauucugagggaagaggacaagcagcagaucucaaaagcacucaagcagcaaucgaucaaaucaaugggaagcugaauagauugaucgggaaaaccaacgagaaauuccaucagauugaaaaagaauucucagaagucgaagggagaauucaggaccuugagaaauauguugaggacacuaaaauagaucucuggucauacaacgcggagcuucuuguugcccuggagaaccaacauacaauugaucuaacugacucagaaaugaacaaacuguuugaaaaaacaaagaagcaacugagggaaaaugcugaggauaugggcaaugguuguuucaaaauauaccacaaaugugacaaugccugcauaggaucaaucagaaauggaacuuaugaccacgauguauacagagaugaagcauuaaacaaccgguuccagaucaagggaguugagcugaagucaggguacaaagauuggauccuauggauuuccuuugccauaucauguuuuuugcuuuguguugcuuuguugggguucaucaugugggccugccaaaaaggcaacauuaggugcaacauuugcauuuga

SEQ ID NO: 43357 - RNA, 1701 nt, Artificial Sequence; identical to SEQ ID NO: 38716
  derived and/or modified CDS sequence (wt) from hemagglutinin__InfluenzaA__AHL91094

SEQ ID NO: 43358 - RNA, 1701 nt, Artificial Sequence
  derived and/or modified CDS sequence (wt) from hemagglutinin__InfluenzaA__AHL91106
augaagacuaucauugcuuugagcuacauucuaugucugguuuucgcucaaaaacuuccuggaaaugacaacagcacggcaacgcugugccuugggcaccaugcaguaccaaacggaacgauagugaaaacaaucacgaaugaccaaauugaaguuacuaaugcuacugagcugguucagaguuccucaaaaggugaaauaugcgacaguccucaucagauccuugauggagaaaacugcacacuaauagaugcucuauugggagacccucagugugauggcuuccaaaauaagaaaugggaccuuuuuguugaacgcagcaaagccuacagcaacuguuacccuuaugaugugccggauuaugccucccuuaggucacuaguugccucauccggcacacuggaguuuaacaaugaaagcuucaauuggacuggagucacucaaaacggaacaagcucugcuugcauaaggagaucuaauaacaguuucuuuaguagauugaauugguugacccacuuaaaauucaaauacccagcauuaaacgugacuaugccaaacaaugaacaauuugacaaauuguacauuugggggguucaccacccggguacggacaaugaccaaaucuuccuguaugcucaagcaucaggaagaaucacagucucuaccaaaagaagccaacaaacuguaaucccgaauaucggaucuagacccagaguaaggaauaucccuagcagaauaagcaucuauuggacaauaguaaaaccgggagacauacuuuugauuaacagcacagggaaucuaauugcuccuagggguuacuucaaaauacgaagugggaaaagcucaauaaugagaucagaugcacccauuggcaaaugcaauucugaaugcaucacuccaaauggaagcauucccaaugacaaaccauuccaaaauguaaacaggaucacauacggggccugucccagauauguuaagcaaaacacucugaaauuggcaacagggaugcgaaauguaccagagaaacaaacuagaggcauauuuggcgcaaucgcggguuucauagaaaaugguugggagggaaugguggaugguugguacgguuucaggcaucaaaauucugagggaagaggacaagcagcagaucucaaaagcacucaagcagcaaucgaucaaaucaaugggaagcugaauagauugaucgggaaaaccaacgagaaauuccaucagauugaaaaagaauucucagaagucgaagggagaauucaggaccuugagaaauauguugaggacaccaaaauagaucucuggucauacaacgcggagcuucuuguugcccuggagaaccaacauacaauugaucuaacugacucagaaaugaacaaacuguuugaaaaaacaaagaagcaacugagggaaaaugcugaagauaugggcaaugguuguuucaaaauauaccacaaaugugacaaugccugcauaggaucaaucagaaauggaacuuaugaccacgauguauacagagaugaagcauuaaacaaccgguuccagaucaagggaguugagcugaagucaggguacaaagauuggauccuauggauuuccuuugccauaucauguuuuuugcuuuguguugcuuuguugggguucaucaugugggccugccaaaaaggcaacauuaggugcaacauuugcauuuga

SEQ ID NO: 43359 - RNA, 1701 nt, Artificial Sequence
  derived and/or modified CDS sequence (wt) from hemagglutinin__InfluenzaA__AHL91118
augaagacuaucauugcuuugagcuacauucuaugucugguuuucgcucaaaaacuuccuggaaaugacaacagcacggcaacgcugugccuugggcaccaugcaguaccaaacggaacgauagugaaaacaaucacgaaugaccaaauugaaguuacuaaugcuacugagcugguucagaguuccucaacgggugaaauaugcgacaguccucaucagauccuugauggagaaaacugcacacuaauagaugcucuauugggagacccucagugugauggcuuccaaaauaagaaaugggaccuuuuuguugaacgcagcaaagccuacagcaacuguuacccuuaugaugugccggauuaugccucccuuaggucacuaguugccucauccggcacacuggaguuuaacaaugaaagcuucaauuggacuggagucacucaaaacggaacaagcucugcuugcauaaggagaucuaauaacaguuucuuuaguaaauugaauugguugacccacuuaaaauucaaauacccagcauugaacgugacuaugccaaacaaugaacaauuugacaaauuguacauuugggggguucaccacccggguacggacaaugaccaaaucuuccuguaugcucaagcaucaggaagaaucacagucucuaccaaaagaagccaacaaacuguaaucccgaauaucggaucuagacccagaguaaggaauaucccuagcagaauaagcaucuauuggacaauaguaaaaccgggagacauacuuuugauuaacagcacagggaaucuaauugcuccuagggguuacuucaaaauacgaagugggaaaagcucaauaaugagaucagaugcacccauuggcaaaugcaauucugaaugcaucacuccaaauggaagcauucccaaugacaaaccauuccaaaauguaaacaggaucacauacggggccugucccagauauguuaagcaaaacacucugaaauuggcaacagggaugcgaaauguaccagagaaacaaacuagaggcauauuuggcgcaaucgcggguuucauagaaaaugguugggagggaaugguggaugguugguacgguuucagacaucaaaauucugagggaagaggacaagcagcagaucucaaaagcacucaagcagcaaucgaucaaaucaaugggaagcugaauagauugaucgggaaaaccaacgagaaauuccaucagauugaaaaagaauucucagaagucgaagggagaauucaggaccuugagaaauauguugaggacacuaaaauagaucucuggucauacaacgcggagcuucuuguuacccuggagaaccaacauacaauugaucuaacugacucagaaaugaacaaacuguuugaaaaaacaaagaagcaacugagggaaaaugcugaggauaugggcaaugguuguuucaaaauauaccacaaaugugacaaugccugcauaggaucaaucagaaauggaacuuaugaccacgauguauacagagaugaagcauuaaacaaccgguuccagaucaagggaguugagcugaagucaggguacaaagauuggauccuauggauuuccuuugccauaucauguuuuuugcuuuguguugcuuuguugggguucaucaugugggccugccaaaaaggcaacauuaggugcaacauuugcauuuga

SEQ ID NO: 43360 - RNA, 1701 nt, Artificial Sequence
  derived and/or modified CDS sequence (wt) from hemagglutinin__InfluenzaA__AHL91130
augaagacuaucauugcuuugagcuacauucuaugucugguuuucgcucaaaaacuuccuggaaaugacaacagcacggcaacgcugugccuugggcaccaugcaguaccaaacggaacgauagugaaaacaaucacgaaugaccaaauugaaguuacuaaugcuacugagcugguucagaguuccucaacaggugaaauaugcgacaguccucaucagauccuugauggagaaaacugcacacuaauagaugcucuauugggagacccucagugugauggcuuccaaaauaagaaaugggaccuuuuuguugaacgcagcaaagccuacagcaacuguuacccuuaugaugugccggauuaugccucccuuaggucacuaauugccucauccggcacacuggaguuuaacaaugaaagcuucaauuggacuggagucacucaaaacggaacaagcucugcuugcauaaggagaucuaauaacaguuucuuuaguagauugaauugguugacccacuuaaaauucaaauacccagcauuaaacgugacuaugccaaacaaugaacaauuugacaaauuguacauuugggggguucaccacccggguacggacaaugaccaaaucuuccuguaugcucaagcaucaggaagaaucacagucucuaccaaaagaagccaacaaacuguaaucccgaauaucggaucuagacccagaguaaggaauaucccuagcagaauaagcaucuauuggacaauaguaaaaccgggagacauacuuuugauuaacagcacagggaaucuaauugcuccuagggguuacuucaaaauacgaagugggaaaagcucaauaaugagaucagaugcacccauuggcaaaugcaauucugaaugcaucacuccaaauggaagcauucccaaugacaaaccauuccaaaauguaaacaggaucacauacggggccugucccagauauguuaagcaaaacacucugaaauuggcaacagggaugcgaaauguaccagagaaacaaacuagaggcauauuuggcgcaaucgcggguuucauagaaaaugguugggagggaaugguggaugguugguacgguuucaggcaucaaaauucugagggaagaggacaagcagcagaucucaaaagcacucaagcagcaaucgaucaaaucaaugggaagcugaauagauugaucgggaaaaccaacgagaaauuccaucagauugaaaaagaauucucagaagucgaagggagaauucaggaccuugagaaauauguugaggacaccaaaauagaucucuggucauacaacgcggagcuucuuguugcccuggagaaccaacauacaauugaucuaacugacucagaaaugaacaaacuguuugaaaaaacaaagaagcaacugagggaaaaugcugaggauaugggcaaugguuguuucaaaauauaccacaaaugugacaaugccugcauaggaucaaucagaaauggaacuuaugaccacaauguauacagagaugaagcauuaaacaaccgguuccagaucaagggaguugagcugaagucaggguacaaagauuggauccuauggauuuccuuugccauaucauguuuuuugcuuuguguugcuuuguugggguucaucaugugggccugccaaaaaggcaacauuaggugcaacauuugcauuuga

SEQ ID NO: 43361 - RNA, 1701 nt, Artificial Sequence
  derived and/or modified CDS sequence (wt) from hemagglutinin__InfluenzaA__AHL91142
augaagacuaucauugcuuugagcuacauucuaugucugguuuucgcucaaaaacuuccuggaaaugacaacagcacggcaacgcugugccuugggcaccaugcaguaccaaacggaacgauagugaaaacaaucacgaaugaccaaauugaaguuacuaaugcuacugagcugguucagaguuccucaacaggugaaauaugcgacaguccucaucagauccuugauggagaaaacugcacacuaauagaugcucuauugggagacccucagugugauggcuuccaaaauaagaaaugggaccuuuuuguugaacgcagcaaagccuacagcaacuguuacccuuaugaugugccggauuaugccucccuuaggucacuaguugccucauccggcacacuggaguuuaacaaugaaagcuucaauuggacuggagucacucaaaacggaacaagcucugcuugcauaaggagaucuaauaacaguuucuuuaguagauugaauugguugacccacuuaaaauucaaauacccagcauugaacgugacuaugccaaacaaugaacaauuugacaaauuguacauuugggggguucaccacccggguacggacaaugaccaaaucuuccuguaugcucaagcaucaggaagaaucacagucucuaccaaaagaagccaacaaacuguaaucccgaauaucggaucuagacccagaguaaggaauaucccuagcagaauaagcaucuauuggacaauaguaaaaccgggagacauacuuuugauuaacagcacagggaaucuaauugcuccuagggguuacuucaaaauacgaagugggaaaagcucaauaaugagaucagaugcacccauuggcaaaugcaauucugaaugcaucacuccaaauggaagcauucccaaugacaaaccauuccaaaauguaaacaggaucacauacggggccugucccagauauguuaagcaaaacacucugaaauuggcaacagggaugcgaaauguaccagagaaacaaacuagaggcauauuuggcgcaaucgcggguuucauagaaaaugguugggagggaaugguggaugguugguacgguuucaggcaucaaaauucugagggaagaggacaagcagcagaucucaaaagcacucaagcagcaaucgaucaaaucaaugggaagcugaauagauugaucggaaaaaccaacgagaaauuccaucagauugaaaaggaauucucagaagucgaagggagaauucaggaccuugagaaauauguugaggacacuaaaauagaucucuggucauacaacgcggagcuucuuguugcccuggagaaccaacauacaauugaucuaacugacucagaaaugaacaaacuguuugaaaaaacaaaaaagcaacugagggaaaaugcugaggauaugggcaaugguuguuucaaaauauaccacaaaugugacaaugccugcauaggaucaaucagaaauggaacuuaugaccacgauguauacagagaugaagcauuaaacaaccgguuccagaucaagggaguugagcugaagucaggguacaaagauuggauccuauggauuuccuuugccauaucauguuuuuugcuuuguguugcuuuguugggguucaucaugugggccugccaaaaaggcaacauuaggugcaacauuugcauuuga

SEQ ID NO: 43362 - RNA, 1701 nt, Artificial Sequence; identical to SEQ ID NO: 43361
  derived and/or modified CDS sequence (wt) from hemagglutinin__InfluenzaA__AHL91154

SEQ ID NO: 43363 - RNA, 1701 nt, Artificial Sequence; identical to SEQ ID NO: 32647
  derived and/or modified CDS sequence (wt) from hemagglutinin__InfluenzaA__AHL91166

SEQ ID NO: 43364 - RNA, 1701 nt, Artificial Sequence; identical to SEQ ID NO: 42479
  derived and/or modified CDS sequence (wt) from hemagglutinin__InfluenzaA__AHL94984

SEQ ID NO: 43365 - RNA, 1701 nt, Artificial Sequence; identical to SEQ ID NO: 42479
  derived and/or modified CDS sequence (wt) from hemagglutinin__InfluenzaA__AHL94996

SEQ ID NO: 43366 - RNA, 1701 nt, Artificial Sequence
  derived and/or modified CDS sequence (wt) from hemagglutinin__InfluenzaA__AHL95008
augaagaccaucauugcuuugagcuacauucuaugucuaguuuuugcucaagaacuuccuggaaaugacgacagcacggcaacgcugugccuugggcaccaugcagugccaaacggaacgauagugaaaacaaucacgaaugaccaaauugaaguuacuaaugcuacugaacugguucagaguuccucaacaggugaaauaugcaacaguccucaucagauccuugauggagaaaacugcacacuaauagaugcucuauugggagacccucagugugauggcuuccaaaacaagaaaugggaccuuuuuguugaacgaagcaaagcccacagcaacuguuacccuuaugaugugccggauuaugccucccuuaggucacuaguugccucauccggcacacuggaguuuaacaaugaaagcuucaauuggacuggagucacucaaaacggaacaagcucugcuugcauaaggagaucuaauaauaguuucuuuaguagauugaauugguugacccacuuaaacuucaaauacccagcauugaacgugacuaugccaaacaaugaacaauuugacaaauuguacauuugggggguucaccacccggguacggacaaggaccaaaucuuccuguaugcucaagcaucaggaagaaucacaguaucuaccaaaagaagccaacaagcuguaauuccgaauaucggaucuagacccagaguaaggaauaucccuagcagaguaagcaucuauuggacaauaguaaaaccgggagacauacuuuugauuaacagcacagggaaucuaauugcuccuagggguuacuucaaaauacgaagugggaaaagcucaauaaugagaucagaugcacccauuggcaaaugcaauucugcaugcaucacuccaaauggaagcauucccaaugacaaaccauuccaaaauguaaacaggaucacauacggggccugucccagauaugucaagcaaaacacucugaaauuggcaacaggaaugagaaauguaccagagaaacaaacuagaggcauauuuggcgcaauagcggguuucauagaaaaugguugggagggaaugguggaugguugguacgguuucaggcaucaaaauucugagggaaggggacaagcagcagaucucaaaagcacucaagcagcaaucgaucaaaucaaugggaagcugaauagauugauugggaaaaccaacgagaaauuccaucagauugaaaaagaauucucagaagucgaagggagaauucaggaccuugagaaauauguugaggacacuaaaauagaucucuggucauacaacgcggagcuucuuguugcccuggagaaccaacacacaauugaucuaacugacucagaaaugaacaaacuguuugaaaaaacaaagaagcaacugagggaaaaugcugaggauaugggcaaugguuguuucaaaauauaccacaaaugugacaaugccugcauaggaucaaucagaaauggaacuuaugaucacgauguguacagagaugaagcauuaaacaaccgauuccagaucaagggaguugagcugaagucaggguacaaagauuggauccuauggauuuccuuugccauaucauguuuuuugcuuuguguugcuuuguugggguucaucaugugggccugccaaaaaggcaacauuaggugcaacauuugcauuuga

SEQ ID NO: 43367 - RNA, 1701 nt, Artificial Sequence; identical to SEQ ID NO: 42510
  derived and/or modified CDS sequence (wt) from hemagglutinin__InfluenzaA__AHL95020

SEQ ID NO: 43368 - RNA, 1701 nt, Artificial Sequence; identical to SEQ ID NO: 42489
  derived and/or modified CDS sequence (wt) from hemagglutinin__InfluenzaA__AHL95032

SEQ ID NO: 43369 - RNA, 1701 nt, Artificial Sequence; identical to SEQ ID NO: 42492
  derived and/or modified CDS sequence (wt) from hemagglutinin__InfluenzaA__AHL95044

SEQ ID NO: 43370 - RNA, 1701 nt, Artificial Sequence; identical to SEQ ID NO: 41879
  derived and/or modified CDS sequence (wt) from hemagglutinin__InfluenzaA__AHL95056

SEQ ID NO: 43371 - RNA, 1701 nt, Artificial Sequence
  derived and/or modified CDS sequence (wt) from hemagglutinin__InfluenzaA__AHL95068
augaagacuaucauugcuuugagcuacauucuaugucuaguuuucgcucaaaaacuuccuggaaaugacaauagcacggcaacgcugugccuugggcaccaugcaguaccaaacggaacgauagugaaaacaaucacgaaugaccaaauugaaguuacuaaugcuacugagcugguucagaauuccucaauaggugaaauaugcgacaguccucaucagauccuugauggagaaaacugcacacuaauagaugcucuauugggagacccucagugugauggcuuucaaaauaagaaaugggaccuuuuuguugaacgaagcaaagccuacagcaacuguuacccuuaugaugugccggauuaugccucccuuaggucacuaguugccucauccggcacacuggaguuuaacaaugaaagcuucaauugggcuggagucacucaaaacggaacaaguucugcuugcauaaggggaucuaauaguaguuucuuuaguagauuaaauugguugacccacuuaaacuucaaguacccagcauugaacgugacuaugccaaacaaugaacaauuugacaaauuguacauuugggggguucaccacccggguacggacaaggaccaaaucuuccuguaugcucaaucaucaggaagaaucacaguaucuaccaaaagaagccaacaagcuguaaucccgaauaucggaucuagacccagaauaaggaauaucccuagcagaauaagcaucuauuggacaauaguaaaaccgggagacauacuuuugauuaacagcacagggaaucuaauugcuccuagggguuacuucaaaauacgaagugggaaaagcucaauaaugagaucagaugcacccauuggcaaaugcaagucugaaugcaucacuccaaauggaagcauucccaaugacaaaccauuccaaaauguaaacaggaucacauacggggccugucccagauauguuaagcaaagcacucugaaauuggcaacaggaaugcgaaauguaccagagaaacaaacuagaggcauauuuggcgcaauagcggguuucauagaaaaugguugggagggaaugguggaugguugguacgguuucaggcaucaaaauucugagggaagaggacaagcagcagaucucaaaagcacucaagcagcaaucgaucaaaucaaugggaagcugaaucgauugaucgggaaaaccaacgagaaauuccaucagauugagaaagaauucucagaaguagaagggagaauucaggaccuugagaaauauguugaggacacaaaaauagaucucuggucauacaacgcagagcuucuuguugcccuggagaaccaacauacaauugaucuaacugacucagaaaugaacaaacuguuugaaaaaacaaagaagcaacugagggaaaaugcugaggauaugggcaaugguuguuucaaaauauaccacaaaugugacaaugccugcauaggaucaaucagaaauggaacuuaugaccacgauguauacagggaugaagcauuaaacaaccgguuccagaucaagggaguugagcugaagucaggguacaaagauuggauccuauggauuuccuuugccauaucauguuuuuugcuuuguguugcuuuguugggguucaucaugugggccugccaaaagggcaacauuaggugcaacauuugcauuuga

SEQ ID NO: 43372 - RNA, 1701 nt, Artificial Sequence; identical to SEQ ID NO: 42557
  derived and/or modified CDS sequence (wt) from hemagglutinin__InfluenzaA__AHL95080

SEQ ID NO: 43373 - RNA, 1701 nt, Artificial Sequence
  derived and/or modified CDS sequence (wt) from hemagglutinin__InfluenzaA__AHL95092
augaagacuaucauugcuuugagcuacauucuaugucugguuuucgcucaaaaacuuccuggaaaugacaauagcacggcaacgcugugccuugggcaccaugcaguaccaaacggaacgauagugaaaacaaucacgaaugaccgaauugaaguuacuaaugcuacugagcugguucagaauuccucaauaggugaaauaugcgacaguccucaucaaauccuugauggagaaaauugcacacuaauagaugcucuauugggagacccucagugugauggcuuucaaaauaagaaaugggaccuuuuuguugaacgaagcaaagccuacagcaacuguuacccuuaugaugugccggauuaugccucccuuaggucacuaguugccucauccggcacacuggaguuuaacaaugaaagcuucaauugggcuggagucacucaaaacggaacaaguucugcuugcauaaggggaucuaauaguaguuucuuuaguagauuaaauugguugacccacuuaaacuucaaauacccagcauugaacgugacuaugccaaacaaugaacaauuugacaaauuguacauuugggggguucaccacccggguacggacaaggaccaaaucuuccuguaugcucaaucaucaggaagaaucacaguaucuaccaaaagaagccaacaagcuguaaucccgaauaucggaucuagacccagaauaaggaauaucccuagcagaauaagcaucuauuggacaauaguaaaaccgggagacauacuuuugauuaacagcacagggaaucuaauugcuccuagggguuacuucaaaauacgaagugggaaaagcucaauaaugagaucagaugcacccauuggcaaaugcaagucugaaugcaucacuccaaauggaagcauucccaaugacaaaccauuccaaaauguaaacaggaucacauacggggccugucccagauauguuaagcaaagcacucugaaauuggcaacaggaaugcgaaauguaccagagaaacaaacuagaggcauauuuggcgcaauagcggguuucauagaaaaugguugggagggaaugauggaugguugguacgguuucaggcaucaaaauucugagggaagaggacaagcagcagaucucaaaagcacucaagcagcaaucgaucaaaucaaugggaagcugaaucgauugaucgggaaaaccaacgagaaauuccaucagauugaaaaagaauucucagaaguagaagggagaauucaggaccuugagaaauauguugaggacacaaaaauagaucucuggucauacaacgcggagcuucuuguugcccuggagaaccaacauacaauugaucuaacugacucagaaaugaacaaacuguuugaaaaaacaaagaagcaacugagggaaaaugcugaggauaugggcaaugguuguuucaaaauauaccacaaaugugacaaugccugcauaggaucaaucagaaauggaacuuaugaccacgauguauacagggaugaagcauuaaacaaccgguuccagaucaagggaguugagcugaagucaggguacaaagauuggauccuauggauuuccuuugccauaucauguuuuuugcuuuguguugcuuuguugggguucaucaugugggccugccaaaagggcaacauuaggugcaacauuugcauuuga

SEQ ID NO: 43374 - RNA, 1701 nt, Artificial Sequence
  derived and/or modified CDS sequence (wt) from hemagglutinin__InfluenzaA__AHL95104
augaagacuaucauugcuuugagcuacauucuaugucugguuuucgcucaaaaacuuccuggaaaugacaauagcacggcaacgcugugccuugggcaccaugcaguaccaaacggaacgauagugaaaacaaucacgaaugaccgaauugaaguuacuaaugcuacugagcugguucagaauuccucaauaggugaaauaugcgacaguccucaucagauccuugauggagaaaauugcacacuaauagaugcucuauugggagacccucagugugauggcuuucaaaauaagaaaugggaccuuuuuguugaacgaagcaaagccuacagcaacuguuacccuuaugaugugccggauuaugccucccuuaggucacuaguugccucauccggcacacuggaguuuaacaaugaaagcuucaauugggcuggagucacucaaaacggaacaaguucugcuugcaugaggggaucuaauaguaguuucuuuaguagauuaaauugguugacccacuuaaacuucaaauacccagcauugaacgugacuaugccaaacaaugaacaauuugacaaauuguacauuugggggguucaccacccggguacggacaaggaucaaaucuuccuguaugcucaaucaucaggaagaaucacaguaucuaccaaaagaagccaacaagcuguaaucccgaauaucggaucuagacccagaauaaggaauaucccuagcagaauaagcaucuauuggacaauaguaaaaccgggagacauacuuuugauuaacagcacagggaaucuaauugcuccuagggguuacuucaaaauacgaagugggaaaagcucaauaaugagaucagaugcacccauuggcaaaugcaagucugaaugcaucacuccaaauggaagcauucccaaugacaaaccauuccaaaauguaaacaggaucacauacggggccugucccagauauguuaagcaaagcacucugaaauuggcaacaggaaugcgaaauguaccagagaaacaaacuagaggcauauuuggcgcaauagcggguuucauagaaaaugguugggagggaaugauggaugguugguacgguuucaggcaucaaaauucugagggaagaggacaagcagcagaucucaaaagcacucaagcagcaaucgaucaaaucaaugggaagcugaaucgauugaucgggaaaaccaacgagaaauuccaucagauugaaaaagaauucucagaaguagaagggagaauucaggaccuugagaaauauguugaggacacaaaaauagaucucuggucauacaacgcggagcuucuuguugcccuggagaaccaacauacaauugaucuaacugacucagaaaugaacaaacuguuugaaaaaacaaagaagcaacugagggaaaaugcugaggauaugggcaaugguuguuucaaaauauaccacaaaugugacaaugccugcauaggaucaaucagaaauggaacuuaugaccacgauguauacagggaugaagcauuaaacaaccgguuccagaucaagggaguugagcugaagucaggguacaaagauuggauccuauggauuuccuuugccauaucauguuuuuugcuuuguguugcuuuguugggguucaucaugugggccugccaaaagggcaacauuaggugcaacauuugcauuuga

SEQ ID NO: 43375 - RNA, 1701 nt, Artificial Sequence
  derived and/or modified CDS sequence (wt) from hemagglutinin__InfluenzaA__AHL95116
augaagaccaucauugcuuugagcuacauucuaugucuaguuuucgcucaagaacuuccuggaaaugacgacagcacggcaacgcugugccuugggcacuaugcagugccaaacggaacgauagugaaaacaaucacgaaugaccaaauugaaguuacuaaugcuacugagcugguucagaguuccucaacaggugaaauaugcaacaguccucaucagauccuugauggagaaaacugcacacuaauagaugcucuauugggagacccucagugugauggcuuccaaaacaagaaaugggaccuuuuuguugaacgaagcaaagcccacagcaacuguuacccuuaugaugugccggauuaugccucccuuaggucacuaguugccucauccggcacacuggaguuuaacaaugaaagcuucaauuggacuggagucacucaaaacggaacaagcucugcuugcauaaggagaucuaauaauaguuucuuuaguagauugaauugguugacccacuuaaacuucaaauacccagcauugaacgugacuaugccaaacaaugaacaauuugacaaauuguacauuugggggguucaccacccggguacagacaaggaccaaaucuuccuguaugcuaaagcaucaggaagaaucacaguaucuaccaaaagaagccaacaagcuguaauuccgaauaucggaucuagacccagaguaaggaauaucccuagcagaguaagcaucuauuggacaauaguaaaaccgggagacauacuuuugauuaacagcacagggaaucuaauugcuccuagggguuacuucaaaauacgaagugggaaaagcucaauaaugagaucagaugcacccauuggcaaaugcaauucugcaugcaucacuccaaauggaagcauucccaaugacaaaccauuccaaaauguaaacaggaucacauacggggccugucccagauaugucaagcaaaacacucugaaauuggcaacaggaaugagaaauguaccagagaaacaaacuagaggcauauuuggcgcaauagcggguuucauagaaaaugguugggagggaaugguggaugguugguacgguuucaggcaucaaaauucugagggaaggggacaagcagcagaucucaaaagcacucaagcagcaaucgaucaaaucaaugggaagcugaauagauugaucgggaaaaccaacgagaaauuccaucagauugaaaaagaauucucagaagucgaagggagaauucaggaccuugagaaauauguugaggacacuaaaauagaucucuggucauacaacgcggagcuucuuguugcccuggagaaccaacacacaauugaucuaacugacucagaaaugaacaaacuguuugaaaaaacaaagaagcaacugagggaaaaugcugaggauaugggcaaugguuguuucaaaauauaccacaaaugugacaaugccugcauaggaucaaucagaaauggaacuuaugaucacgauguguacagagaugaagcauuaaauaaccgauuccagaucaagggaguugagcugaagucaggguacaaagauuggauccuauggauuuccuuugccauaucauguuuuuugcuuuguguugcuuuguugggguucaucaugugggccugccaaaaaggcaacauuaggugcaacauuugcauuuga

SEQ ID NO: 43376 - RNA, 1701 nt, Artificial Sequence
  derived and/or modified CDS sequence (wt) from hemagglutinin__InfluenzaA__AHL95128
augaagaccaucauugcuuugagcuacauucuaugucuaguuuucgcucaagaacuuccuggaaaugacgacagcacggcaacgcugugccuugggcaccaugcagugccaaacggaacgauagugaaaacaaucacgaaugaccaaauugaaguuacuaaugcuacugagcugguucagaguuccucaacaggugaaauaugcaacaguccucaucagauccuugauggagaaaacugcacacuaauagaugcucuauugggagacccucagugugauggcuuccaaaacaagaaaugggaccuuuuuguugaacgaagcaaagcccacagcaacuguuacccuuaugaugugccggauuaugccucccuuaggucacuaguugccucauccggcacacuggaguuuaacaaugaaagcuucaauuggacuggagucacucaaaacggaacaagcucugcuugcauaaggagaucuaauaauaguuucuuuaguagauugaauugguugacccacuuaaacuucaaauacccagcauugaacgugacuaugccaaacaaugaacaauuugacaaauuguacauuugggggguucaccacccggguacggacaaggaccaaaucuuccuguaugcucaagcaucagggagaaucacaguaucuaccaaaagaagccaacaagcuguaauuccgaauaucggaucuagacccagaguaaggaauaucccuagcagaguaagcaucuauuggacaauaguaaaaccgggagacauacuuuugauuaacagcacagggaaucuaauugcuccuagggguuacuucaaaauacgaagugggaaaagcucaauaaugagaucagaugcacccauuggcaaaugcaauucugcaugcaucacuccaaauggaagcauucccaaugacaaaccauuccaaaauguaaacaggaucacauacggggccugucccagauaugucaagcaaaacacucugaaauuggcaacaggaaugagaaauguaccagagaaacaaacuagaggcauauuuggcgcaauagcggguuucauagaaaaugguugggaaggaaugguggaugguugguacgguuucaggcaucaaaauucugagggaaggggacaagcagcagaucucaaaagcacucaagcagcaaucgaucaaaucaaugggaagcugaauagauugaucgggaaaaccaacgagaaauuccaucagauugaaaaagaauucucagaagucgaagggagaauucaggaccuugagaaauauguugaggacacuaaaauagaucucuggucauacaacgcggagcuucuuguugcccuggagaaccaacacacaauugaucuaacugacucagaaaugaacaaacuguuugaaaaaacaaagaagcaacugagggaaaaugcugaggauaugggcaaugguuguuucaaaauauaccacaaaugugacaaugccugcauaggaucaaucagaaaugggacuuaugaucacgauguguacagagaugaagcauuaaacaaccgauuccagaucaagggaguugagcugaagucaggguacaaagauuggauccuauggauuuccuuugccauaucauguuuuuugcuuuguguugcuuuguugggguucaucaugugggccugccaaaaaggcaacauuaggugcaacauuugcauuuga

SEQ ID NO: 43377 - RNA, 1701 nt, Artificial Sequence; identical to SEQ ID NO: 42496
  derived and/or modified CDS sequence (wt) from hemagglutinin__InfluenzaA__AHL95140

SEQ ID NO: 43378 - RNA, 1701 nt, Artificial Sequence; identical to SEQ ID NO: 41880
  derived and/or modified CDS sequence (wt) from hemagglutinin__InfluenzaA__AHL95152

SEQ ID NO: 43379 - RNA, 1701 nt, Artificial Sequence; identical to SEQ ID NO: 42100
  derived and/or modified CDS sequence (wt) from hemagglutinin__InfluenzaA__AHL95164

SEQ ID NO: 43380 - RNA, 1701 nt, Artificial Sequence
  derived and/or modified CDS sequence (wt) from hemagglutinin__InfluenzaA__AHL95176
augaagacuaucauugcuuugagcuacauucuaugucugguuuucgcucaaaaacuuccuggaaaugacaauagcacggcaacgcugugccuugggcaccaugcaguaccaaacggaacgauagugaaaacaaucacgaaugaccgaauugaaguuacuaaugcuacugagcugguucagaauuccucaauaggagaaauaugcgacaguccucaucagauccuugauggagaaaauugcacacuaauagaugcucuauugggagacccucagugugauggcuuucaaaauaagaaaugggaccuuuuuguugaacgaagcaaagccuacagcaacuguuacccuuaugaugugccggauuaugccucccuuaggucacuaguugccucauccggcacacuggaguuuaacaaugaaagcuucaauugggcuggagucacucaaaacggaacaaguucugcuugcauaaggggaucuaauaguaguuucuuuaguagauuaaauugguugacccacuuaaacuucaaauacccagcauugaacgugacuaugccaaacaaugaacaauuugacaaauuguacauuugggggguucaccacccggguacggacaaggaccaaaucuuccuguaugcucaaucaucaggaagaaucacaguaucuaccaaaagaagccaacaagcuguaaucccgaauaucggaucuagacccagaauaaggaauaucccuagcagaauaagcaucuauuggacaauaguaaaaccgggagacauacuuuugauuaacagcacagggaaucuaauugcuccuagggguuacuucaaaauacgaagugggaaaagcucaauaaugagaucagaugcacccauuggcaaaugcaagucugaaugcaucacuccaaauggaagcauucccaaugacaaaccauuccaaaauguaaacaggaucacauacggggccugucccagauauguuaagcaaagcacucugaaauuggcaacaggaaugcgaaauguaccagagaaacaaacuagaggcauauuuggcgcaauagcggguuucauagaaaaugguugggagggaaugauggaugguugguacgguuucaggcaucaaaauucugagggaagaggacaagcagcagaucucaaaagcacucaagcagcaaucgaucaaaucaaugggaagcugaaucgauugaucgggaaaaccaacgagaaauuccaucagauugaaaaagaauucucagaaguagaagggagaauucaggaccuugagaaauauguugaggacacaaaaauagaucucuggucauacaacgcggagcuucuuguugcccuggagaaccaacauacaauugaucuaacugacucagaaaugaacaaacuguuugaaaaaacaaagaagcaacugagggaaaaugcugaggauaugggcaaugguuguuucaaaauauaccacaaaugugacaaugccugcauaggaucaaucagaaauggaacuuaugaccacgauguauacagggaugaagcauuaaacaaccgguuccagaucaagggaguugagcugaagucaggguacaaagauuggauccuauggauuuccuuugccauaucauguuuuuugcuuuguguugcuuuguugggguucaucaugugggccugccaaaagggcaacauuaggugcaacauuugcauuuga

SEQ ID NO: 43381 - RNA, 1701 nt, Artificial Sequence; identical to SEQ ID NO: 42492
  derived and/or modified CDS sequence (wt) from hemagglutinin__InfluenzaA__AHL95188

SEQ ID NO: 43382 - RNA, 1701 nt, Artificial Sequence; identical to SEQ ID NO: 42505
  derived and/or modified CDS sequence (wt) from hemagglutinin__InfluenzaA__AHL95200

SEQ ID NO: 43383 - RNA, 1701 nt, Artificial Sequence; identical to SEQ ID NO: 42492
  derived and/or modified CDS sequence (wt) from hemagglutinin__InfluenzaA__AHL95212

SEQ ID NO: 43384 - RNA, 1701 nt, Artificial Sequence; identical to SEQ ID NO: 41879
  derived and/or modified CDS sequence (wt) from hemagglutinin__InfluenzaA__AHL95224

SEQ ID NO: 43385 - RNA, 1701 nt, Artificial Sequence; identical to SEQ ID NO: 42558
  derived and/or modified CDS sequence (wt) from hemagglutinin__InfluenzaA__AHL95236

SEQ ID NO: 43386 - RNA, 1701 nt, Artificial Sequence
  derived and/or modified CDS sequence (wt) from hemagglutinin__InfluenzaA__AHL95248
augaagacuaucauugcuuugagcuacauucuaugucugguuuucgcucaaaaacuuccuggaaaugacaauagcacggcaacgcugugccuugggcaccaugcaguaccaaacggaacgauagugaaaacaaucacgaaugaccgaauugaaguuacuaaugcuacugagcugguucagaauuccucaauaggugaaauaugcgacaguccucaucagauccuugauggagaaaacuguacacuaauagaugcucuauugggagacccucagugugauggcuuucaaaauaagaaaugggaccuuuuuguugaacgaagcaaagccuacagcaacuguuacccuuaugaugugccggauuaugccucccuuaggucacuaguugccucauccggcacacuggaguuuaacaaugaaagcuucaauuggacuggagucacucaaaacggaacaaguucugcuugcauaaggagaucuaauaguaguuucuuuaguagauuaaauugguugacccacuuaaacuucaaauacccagcauugaacgugacuaugccaaacaaugaacaauuugacaaauuguacauuugggggguucaccacccgggcacggacaaggaccaaaucuuccuguaugcucaaucaucaggaagaaucacaguaucuaccaaaagaagccaacaagcuguaaucccgaauaucgggucuagacccagaauaaggaauaucccuagcagaauaagcaucuauuggacaauaguaaaaccaggagacauacuuuugauuaacagcacagggaaucuaauugcuccuagggguuacuucaaaauacgaagugggaaaagcucaauaaugagaucagaugcacccauuggcaaaugcaagucugaaugcaucacuccaaauggaagcauuccaaaugacaaaccauuccaaaauguaaacaggaucacauacggggccugucccagauauguuaagcaaagcacucugaaauuggcaacaggaaugcgaaauguaccagagaaacaaacuagaggcauauuuggcgcaauagcggguuucauagaaaaugguugggagggaaugguggaugguugguacgguuucaggcaucaaaauucugagggaagaggacaagcagcagaucucaaaagcacucaagcagcaaucgaucaaaucaaugggaagcugaaucgauugaucgggaaaaccaacgagaaauuccaucagauugaaaaagaauucucagaaguagaagggagaauucaggaccuugagaaauauguugaggacacuaaaauagaucucuggucauacaacgcggagcuucuuguugcccuggagaaccaacauacaauugaucuaacugacucagaaaugaacaaacuguuugaaaaaacaaagaagcaacugagggaaaaugcugaggauaugggcaaugguuguuucaaaauauaccacaaaugugacaaugccugcauaggaucaaucagaaauggaacuuaugaccacgauguauacagggaugaagcauuaaacaaccgguuccagaucaagggaguugagcugaagucaggguacaaagauuggauccuauggauuuccuuugccauaucauguuuuuugcuuuguguugcuuuguugggguucaucaugugggccugccaaaagggcaacauuaggugcaacauuugcauuuga

SEQ ID NO: 43387 - RNA, 1701 nt, Artificial Sequence
  derived and/or modified CDS sequence (wt) from hemagglutinin__InfluenzaA__AHL95260
augaagacuaucauugcuuugagcuacauucuaugucugguuuucgcucaaaaacuuccuggaaaugacaauagcacggcaacgcugugccuugggcaccaugcaguaccaaacggaacgauagugaaaacaaucacgaaugaccgaauugaagucacuaaugcuacugagcugguucagaauuccucaauaagugaaauaugcgacaguccucaucagauccuugauggagaaaacugcacacuaauagaugcucuauugggagacccucagugugauggcuuucaaaauaagaaaugggaccuuuuuguugaacgaagcaaagccuacagcaacuguuacccuuaugaugugccggauuaugccucccuuaggucacuaguugccucauccggcacacuggaguuuaacaaugaaagcuucaauugggcuggggucacucaaaacggaacaaguucugcuugcauaaggggaucuaauaguaguuucuuuaguagauuaaauugguugacccacuuaaacuucaaauacccagcauugaacgugacuaugccaaacaaugaacaauuugacaaauuguacauuugggggguucaccacccggguacggacaaggaccaaaucuuccuguaugcucaaucaucaggaagaaucacaguaucuaccaaaagaagccaacaagcuguaaucccgaauaucggaucuagacccagaauaaggaauaucccuagcagaauaagcaucuauuggacaauaguaaaaccgggagacauacuuuugauuaacagcacagggaaucuaauugcuccuagggguuacuucaaaauacgaagugggaaaagcucaauaaugagaucagaugcacccauuggcaaaugcaagucugaaugcaucacuccaaauggaagcauucccaaugacaaaccauuccaaaauguaaacaggaucacauacggggccugucccagauauguuaagcaaagcacucugaaauuggcaacaggaaugcgaaauguaccagagaaacaaaccagaggcauauuuggcgcaauagcggguuucauagaaaaugguugggagggaaugguggaugguugguacgguuucaggcaucaaaauucugagggaagaggacaagcagcagaucucaaaagcacucaagcagcaaucgaucaaaucaaugggaagcugaaucgauugaucgggaaaaccaacgagaaauuccaucagauugaaaaagaauucucagaaguagaagggagaauucaggaccuugagaaauauguugaggacacaaaaauagaucucuggucauacaaugcggagcuucuuguugcccuggagaaccaacauacaauugaucuaacugacucagaaaugaacaaacuguuugaaaaaacaaagaagcaacugagggaaaaugcugaggauaugggcaaugguuguuucaaaauauaccacaaaugugacaaugccugcauaggaucaaucagaaauggaacuuaugaccacgauguauacagggaugaagcauuaaacaaccgguuccagaucaagggaguugagcugaagucaggguacaaagauuggauccuauggauuuccuuugccauaucauguuuuuugcuuuguguugcuuuguugggguucaucaugugggccugccaaaagggcaacauuaggugcaacauuugcauuuga

SEQ ID NO: 43388 - RNA, 1701 nt, Artificial Sequence
  derived and/or modified CDS sequence (wt) from hemagglutinin__InfluenzaA__AHL95272
augaagacuaucauugcuuugagcuacauucuaugucugguuuucgcucaaaaacuuccuggaaaugacaauagcacggcaacgcugugccuugggcaccaugcaguaccaaacggaacgauagugaaaacaaucacgaaugaccgaauugaaguuacuaaugcuacugagcugguucagaauuccucaauaggugaaauaugcgacaguccucaucagauccuugauggagaaaauugcacacuaauagaugcucuauugggagacccucagugcgauggcuuucaaaauaagaaaugggaccuuuuuguugaacgaagcaaagccuacagcaacuguuacccuuaugaugugccggauuaugccucccuuaggucacuaguugccucauccggcacacuggaguuuaacaaugaaagcuucaauugggcuggagucacucaaaacggaacaaguucugcuugcauaaggggaucuaauaguaguuucuuuaguagauuaaauugguugacccacuuaaacuucaaauacccagcauugaacgugacuaugccaaacaaugaacaauuugacaaauuguacauuugggggguucaccacccggguacggacaaggaccaaaucuuccuguaugcucaaucaucaggaagaaucacaguaucuaccaaaagaagccaacaagcuguaaucccgaauaucggaucuagacccagaauaaggaauaucccuagcagaauaagcaucuauuggacaauaguaaaaccgggagacauacuuuugauuaacagcacagggaaucuaauugcuccuagggguuacuucaaaauacgaagugggaaaagcucaauaaugagaucagaugcacccauuggcaaaugcaagucugaaugcaucacuccaaauggaagcauucccaaugacaaaccauuccaaaauguaaacaggaucacauacggggccugucccagauauguuaagcaaagcacucugaaauuggcaacaggaaugcgaaauguaccagagaaacaaacuagaggcauauuuggcgcaauagcggguuucauagaaaaugguugggagggaaugauggaugguugguacgguuucaggcaucaaaauucugagggaagaggacaagcagcagaucucaaaagcacucaagcagcaaucgaucaaaucaaugggaagcugaaucgauugaucgggaaaaccaacgagaaauuccaucagauugaaaaagaauucucagaaguagaagggagaauucaggaccuugagaaauauguugaggacacaaaaauagaucucuggucauacaacgcggagcuucuuguugcccuggagaaccaacauacaauugaucuaacugacucagaaaugaacaaacuguuugaaaaaacaaagaagcaacugagggaaaaugcugaggauaugggcaaugguuguuucaaaauauaccacaaaugugacaaugccugcauaggaucaaucagaaauggaacuuaugaccacgauguauacagggaugaagcauuaaacaaccgguuccagaucaagggaguugagcugaagucaggguacaaagauuggauccuauggauuuccuuugccauaucauguuuuuugcuuuguguugcuuuguugggguucaucaugugggccugccaaaagggcaacauuaggugcaacauuugcauuuga

SEQ ID NO: 43389 - RNA, 1701 nt, Artificial Sequence; identical to SEQ ID NO: 42489
  derived and/or modified CDS sequence (wt) from hemagglutinin__InfluenzaA__AHL95284

SEQ ID NO: 43390 - RNA, 1701 nt, Artificial Sequence
  derived and/or modified CDS sequence (wt) from hemagglutinin__InfluenzaA__AHL95296
augaaggcaauacuaguaguucugcuauacacauuugcaaccgcaaaugcagacacauuauguauagguuaucaugcgaacaauucaacagacacuguagacacaguacuagaaaagaauguaacaguaacacacucuguuaaccuucuagaagacaagcauaacgggaaacuaugcaaacuaagagggguagccccauugcauuuggguaaauguaacauugcuggcuggauccugggaaauccagagugugaaucacucuccacagcaaguucaugguccuacauuguggaaacaucuaguucagacaauggaacguguuacccaggagauuucaucaauuaugaggagcuaagagagcaauugagcucagugucaucauuugaaagguuugagauguuccccaagacaaguucauggcccaaucaugacucgaacaaagguguaacggcagcauguccucaugcuggagcaaaaagcuucuacaaaaauuuaauauggcuaguuaaaaaaggaaauucauacccaaagcucagcaaauccuacauuaaugauaaagggaaagaaguccucgugcuguggggcauucaccauccaucuacuacugcugaccaacaaagucucuaucagaaugcagaugcauauguuuuuguggggacaucaaaauacagcaagaaguucaagccggaaauagcaauaagacccaaagugagggaucaagaagggagaaugaacuauuacuggacacuaauagagccgggagacaaaauaacauucgaagcaacuggaaaucuagugguaccgagauaugcauucgcaauggaaagaaaugcuggaucugguauuaucauuucagauacaccaguccacgauugcaauacaacuugucagacacccgagggugcuauaaacaccagccucccauuucagaauauacauccgaucacaauuggaaaauguccaaaguauguaaaaagcacaaaauugagacuggccacaggauugaggaaugucccgucuauucaaucuagaggccuauucggggccauugccggcuucauugaagggggguggacagggaugguagauggaugguacgguuaucaccaucaaaaugagcaggggucaggauaugcagccgaccugaagagcacacaaaaugccauugacaagauuacuaacaaaguaaauucuguuauugaaaagaugaauacacaguucacagcaguggguaaagaguucaaccaccuggaaaaaagaauagagaauuuaaauaaaaaaguugaugaugguuuccuggacauuuggacuuacaaugccgaacuguugguucuauuggaaaaugaaagaacuuuggacuaccacgauucaaaugugaagaacuuguaugaaaagguaagaaaccaguuaaaagacaaugccaaggaaauuggaaacggcugcuuugaauuuuaccacaaaugcgauaacacgugcauggaaagugucaaaaaugggacuuaugacuacccaaaauacucagaggaagcaaaauuaaacagagaaaaaauagaugggguaaagcuggaaucaacaaggauuuaccagauuuuggcgaucuauucaacugucgccaguucauugguacugguagucucccugggggcaaucaguuucuggaugugcucuaaugggucucuacaguguagaauauguauuuaa

SEQ ID NO: 43391 - RNA, 1701 nt, Artificial Sequence
  derived and/or modified CDS sequence (wt) from hemagglutinin__InfluenzaA__AHL95307
augaagaccaucauugcuuugagcuacauucuaugucuaguuuuugcucaagaacuuccuggaaaugacgacagcacggcaacgcugugccuugggcaccaugcagugccaaacggaacgauagugaaaacaaucacgaaugaccaaauugaaguuacuaaugcuacugaacugguucagaguuccucaacaggugaaauaugcaacaguccucaucagauccuugauggagaaaacugcacacuaauagaugcucuauugggagacccucagugugauggcuuccaaaacaagaaaugggaccuuuuuguugaacgaagcaaagcccacagcaacuguuacccuuaugaugugccggauuaugccucccuuaggucacuaguugccucauccggcacacuggaguuuaacaaugaaagcuucaauuggacuggagucacucaaaacggaacaagcucugcuugcauaaggagaucuaauaauaguuucuuuaguagauugaauugguugacccacuuaaacuucaaauacccagcauugaacgugacuaugccaaacaaugaacaauuugacaaauuguacauuugggggguucaccacccggguacggacaaggaccaaaucuuccuguaugcucaagcaucaggaagaaucacaguaucuaccaaaagaagccaacaagcuguaauuccgaauaucggaucuagacccagaguaaggaauaucccuagcagaguaagcaucuauuggacaauaguaaaaccgggagacauacuuuugauuaacagcacagggaauuuaauugcuccuagggguuacuucaaaauacgaagugggaaaagcucaauaaugagaucagaugcacccauuggcaaaugcaauucugcaugcaucacuccaaauggaagcauucccaaugacaaaccauuccaaaauguaaacaggaucacauacggggccugucccagauaugucaagcaaaacacucugaaauuggcaacaggaaugagaaauguaccagagaaacaaacuagaggcauauuuggcgcaauagcggguuucauagaaaaugguugggagggaaugguggaugguugguacgguuucaggcaucaaaauucugagggaaggggacaagcagcagaucucaaaagcacucaagcagcaaucgaucaaaucaaugggaagcugaauagauugaucgggaaaaccaacgagaaauuccaucagauugaaaaagaauucucagaagucgaagggagaauucaggaccuugagaaauauguugaggacacuaaaauagaucucuggucauacaacgcggagcuucuuguugcccuggagaaccaacacacaauugaucuaacugacucagaaaugaacaaacuguuugaaaaaacaaagaagcaacugagggaaaaugcugaggauaugggcaaugguuguuucaaaauauaccacaaaugugacaaugccugcauaggaucaaucagaaauggaacuuaugaucacgauguguacagagaugaagcauuaaacaaccgauuccagaucaagggaguugagcugaagucaggguacaaagauuggauccuauggauuuccuuugccauaucauguuuuuugcuuuguguugcuuuguugggguucaucaugugggccugccaaaaaggcaacauuaggugcaacauuugcauuuga

SEQ ID NO: 43392 - RNA, 1701 nt, Artificial Sequence; identical to SEQ ID NO: 41879
  derived and/or modified CDS sequence (wt) from hemagglutinin__InfluenzaA__AHL95319

SEQ ID NO: 43393 - RNA, 1701 nt, Artificial Sequence
  derived and/or modified CDS sequence (wt) from hemagglutinin__InfluenzaA__AHL95331
augaagacuaucauugcuuugagcuacauucuaugucugguuuucgcucaaaaacuuccuggagaugacaauagcacggcaacgcugugccuugggcaccaugcaguaccaaacggaacgauagugaaaacaaucacgaaugaccgaauugaaguuacuaaugcuacugagcugguucagaauuccucaauaggugaaauaugcgacaguccucaucagauccuugauggagaaaacugcacacuaauagaugcucuauugggagacccucagugugauggcuuccaaaauaagaaaugggaccuuuuuguugaacgaagcaaagccuacagcaacuguuacccuuaugaugugccggauuaugccucccuuaggucacuaguugccucauccggcacacuggaguuuaacaaugaaagcuucaauugggcuggagucacucaaaacggaacaaguucugcuugcauaaggggaucuaauaguaguuucuuuaguagauuaaauugguugacccacuuaaacuucaaauacccagcauugaacgugacuaugccaaacaaugagcaauuugacaaauuguacauuugggggguucaccacccggguacggacaaggaccaaaucuuccuguaugcucaaucaucaggaagaaucacaguaucuaccaaaagaagccaacaagcuguaaucccgaauaucggaucuagacccagaauaaggaauaucccuagcagaauaagcaucuauuggacaauaguaaaaccgggagacauacuuuugauuaacagcacagggaaucuaauugcuccuagggguuacuucaaaauacgaagugggaaaagcucaauaaugagaucagaugcacccauuggcaaaugcaaaucugaauguaucacuccaaauggaagcauucccaaugacaaaccauuccaaaauguaaacaggaucacauacggggccugucccagauauguuaagcaaagcacucugaaauuggcaacaggaaugcgaaauguaccagagaaacaaacuagaggcauauuuggcgcaauagcggguuucauagaaaaugguugggagggaaugguggaugguugguacgguuucaggcaucaaaauucugagggaagaggacaagcagcagaucucaaaagcacucaagcagcaaucgaucaaaucaaugggaagcugaaucgauugaucgggaaaaccaacgagaaauuccaucagauugaaaaagaauucucagaaguagaagggagaauucaggaccuugagaaauauguugaggacacaaaaauagaucucuggucauacaacgcggagcuucuuguugcccuggagaaccaacauacaauugaucuaacugacucagaaaugaacaaacuguuugaaaaaacaaagaagcaacugagggaaaaugcugaggauaugggcaaugguuguuucaaaauauaccacaaaugugacaaugccugcauaggaucaaucagaaauggaacuuaugaccacgauguauacagggaugaagcauuaaacaaccgguuccagaucaagggaguugagcugaagucaggguacaaagauuggauccuauggauuuccuuugccauaucauguuuuuugcuuuguguugcuuuguugggguucaucaugugggccugccaaaagggcaacauuaggugcaacauuugcauuuga

SEQ ID NO: 43394 - RNA, 1701 nt, Artificial Sequence
  derived and/or modified CDS sequence (wt) from hemagglutinin__InfluenzaA__AHL95343
augaagacuaucauugcuuugagcuacauucuaugucugguuuucgcucaaaaacuuccuggaaaugacaauagcacggcaacgcugugccuugggcaccaugcaguaccaaacggaacgauagugaaaacaaucacgaaugaccgaauugaaguuacuaaugcuacugagcugguucagaauuccucaauaggugaaauaugcgacaguccucaucagauccuugauggagaaaacugcacacuaauagaugcucuauugggagacccucagugugauggcuuucaaaauaagaaaugggaccuuuuuguugaacgaagcaaagccuacagcaacuguuacccuuaugaugugccggauuaugccucccuuaggucacuaguugccucauccggcacacuggaguuuaacaaugaaagcuucaauugggcuggagucacucaaaacggaacaaguucugcuugcauaaggggaucuaauaguaguuucuuuaguagauuaaauugguugacccacuuaaacuucaaauacccagcauugaacgugacuaugccaaacaaugagcaauuugacaaauuguacauuugggggguucaccacccggguacggacaaggaccaaaucuuccuguaugcucaaucaucaggaagaaucacaguaucuaccaaaagaagccaacaagcuguaaucccgaauaucggaucuagacccagaauaaggaauaucccuagcagaauaagcaucuauuggacaauaguaaaaccgggagacauacuuuugauuaacagcacagggaaucuaauugcuccuagggguuacuucaaaauacgaagugggaaaagcucaauaaugagaucagaugcacccauuggcaaaugcaaaucugaauguaucacuccaaauggaagcauucccaaugacaaaccauuccaaaauguaaacaggaucacauacggggccugucccagauauguuaagcaaagcacucugaaauuggcaacaggaaugcgaaauguaccagagaaacaaacuagaggcauauuuggcgcaauagcggguuucauagaaaaugguugggagggaaugguggaugguugguacgguuucaggcaucaaaauucugagggaagaggacaagcagcagaucucaaaagcacucaagcagcaaucgaucaaaucaaugggaagcugaaucgauugaucgggaaaaccaacgagaaauuccaucagauugaaaaagaauucucagaaguagaagggagaauucaggaccuugagaaauauguugaggacacaaaaauagaucucuggucauacaacgcggagcuucuuguugcccuggagaaccaacauacaauugaucuaacugacucagaaaugaacaaacuguuugaaaaaacaaagaagcaacugagggaaaaugcugaggauaugggcaaugguuguuucaaaauauaccacaaaugugacaaugccugcauaggaucaaucagaaauggaacuuaugaccacgauguauacagggaugaagcauuaaacaaccgguuccagaucaggggaguugagcugaagucaggguacaaagauuggauccuauggauuuccuuugccauaucauguuuuuugcuuuguguugcuuuguugggguucaucaugugggccugccaaaagggcaacauuaggugcaacauuugcauuuga

SEQ ID NO: 43395 - RNA, 1701 nt, Artificial Sequence; identical to SEQ ID NO: 41879
  derived and/or modified CDS sequence (wt) from hemagglutinin__InfluenzaA__AHL95432

SEQ ID NO: 43396 - RNA, 1701 nt, Artificial Sequence; identical to SEQ ID NO: 42059
  derived and/or modified CDS sequence (wt) from hemagglutinin__InfluenzaA__AHL95444

SEQ ID NO: 43397 - RNA, 1701 nt, Artificial Sequence; identical to SEQ ID NO: 41879
  derived and/or modified CDS sequence (wt) from hemagglutinin__InfluenzaA__AHL95457

SEQ ID NO: 43398 - RNA, 1701 nt, Artificial Sequence
  derived and/or modified CDS sequence (wt) from hemagglutinin__InfluenzaA__AHL95470
augaagacuaucauugcuuugagcuacauucuaugucugguuuucgcucaaaaacuuccuggaaaugacaacagcacggcaacgcugugccuugggcaccaugcaguaccaaacggaacgauagugaaaacaaucacgaaugaccaaauugaaguuacuaaugcuacugaacugguucagaguuccucaacaggugaaauaugcaacaguccucaucagauucuugauggagaaaacugcacacuaauagaugcucuauugggagacccucagugugauggcuuccaaaauaagaagugggaccuuuuuguugaacgaagcaaagccuacagcaacuguuacccuuaugaugugccggauuaugccucccuuaggucacuaguugccucauccggcacacuggaguuuaacaaugaaagcuucaauuggacuggagucaagcaaaacggaacaagcucugcuugcauaaggagaucuaauaguaguuucuuuaguagauugaauugguugacccacuuaaacuucaaauacccagcauugaacgugacuaugccaaacaaugaacaauuugacaaauuguacauuugggggguucaccacccggguacggacaaggaccaaaucuuccuguaugcucaaucaucaggaagaaucacaguaucuaccaaaagaagccaacaagcuguaaucccgaauaucggaucuagacccagaauaaggaauaucccuagcagaauaagcaucuauuggacaauaguaagaccgggagacauacuuuugauuaacagcacagggaaucuaauugcuccuagggguuacuucaaaauacgaagugggaaaagcucaauaaugagaucagaugcacccauuggcaaaugcaauucugaaugcaucacuccaaauggaagcauucccaaugacaaaccauuccaaaaugugaacaggaucacauacggggccugucccagauauguuaagcaaagcacucugaaauuggcaacaggaaugcgaaauguaccagagaaacaaacuagaggcauauuuggcgcaauagcggguuucauagaaaaugguugggagggaaugguggaugguugguacgguuucaggcaucaaaauucugagggaagaggacaagcagcagaucucaaaagcacucaagcagcaaucgaucaaaucaaugggaagcugaaucgauugaucgggaaaaccaacgagaaauuccaucagauugaaaaagaauucucagaagucgaagggagaauucaggaccuugagaaauauguugaggacacuaaaauagaucucuggucauacaacgcggagcuucuuguugcccuggagaaccaacauacaauugaucuaacugacucagaaaugaacaaacuguuugaaaaaacaaagaagcaacugagggaaaaugcugaggauaugggcaaugguuguuucaaaauauaccacaaaugugacaaugccugcauaggaucaaucagaaauggaacuuauaaucacgauguauacagagaugaagcauuaaacaaccgguuccagaucaagggaguugagcugaagucaggguacaaagauuggauccuauggauuuccuuugccauaucauguuuuuugcuuuguguugcuuuguugggguucaucaugugggccugccaaaagggcaacauuaggugcaacauuugcauuuga

SEQ ID NO: 43399 - RNA, 1701 nt, Artificial Sequence; identical to SEQ ID NO: 42489
  derived and/or modified CDS sequence (wt) from hemagglutinin__InfluenzaA__AHL95482

SEQ ID NO: 43400 - RNA, 1701 nt, Artificial Sequence; identical to SEQ ID NO: 42489
  derived and/or modified CDS sequence (wt) from hemagglutinin__InfluenzaA__AHL95494

SEQ ID NO: 43401 - RNA, 1701 nt, Artificial Sequence
  derived and/or modified CDS sequence (wt) from hemagglutinin__InfluenzaA__AHL95506
augaagaccaucauugcuuugagcuacauucuaugucugguuuucgcucaaaaacuuccuggaaaugacaauagcacggcaacgcugugccuugggcaccaugcaguaccaaacggaacgauagugagaacaaucacgaaugaccgaauugaaguuacuaaugcuacugagcugguucagaauuccucaauaggugaaauaugcgacaguccucaucagauccuugauggagaaaacugcacacuaauagaugcucuauugggagacccucagugugauggcuuucaaaauaagaaaugggaccuuuuuguugaacgaagcaaagccuacagcaacuguuacccuuaugaugugccggauuaugccucccuuaggucacuaguugccucauccggcacacuggaguuuaacaaugaaagcuucaauugggcuggagucacucaaaacggaacaaguucugcuugcauaaggggaucuaauaguaguuucuuuaguagauuaaauugguugacccacuuaaacuucaaauacccagcauugaacgugacuaugccaaacaaugaacaauuugacaaauuguacauuugggggguucaccacccggguacggacaaggaccaaaucuuccuguaugcucaaucaucaggaagaaucacaguaucuaccaaaagaagccaacaagcuguaaucccgaauaucggaucuagacccagaauaaggaauaucccuagcagaauaagcaucuauuggacaauaguaaaaccgggagacauacuuuugauuaacagcacagggaaucuaauugcuccuagggguuacuucaaaauacgaagugggaaaagcucaauaaugagaucagaugcacccauuggcaaaugcaagucugaaugcaucacuccaaauggaagcauccccaaugacaaaccauuccaaaauguaaacaggaucacauacggggccugucccagauauguuaagcaaagcacucugaaauuggcaacaggaaugcgaaauguaccagagaaacaaaccagaggcauauuuggcgcaauagcggguuucauagaaaaugguugggagggaaugguggaugguugguacgguuucaggcaucaaaauucugagggaagaggacaagcagcagaucucaaaagcacucaagcagcaaucgaucaaaucaaugggaagcugaaucgauugaucgggaaaaccaacgagaaauuccaucagauugaaaaagaauucucagaaguagaagggagaauucaggaccuugagaaauauguugaggacacaaaaauagaucucuggucauacaacgcggagcuucuuguugcccuggagaaccaacauacaauugaucuaacugacucagaaaugaacaaacuguuugaaaaaacaaagaagcaacugagggaaaaugcugaggauaugggcaaugguuguuucaaaauauaccacaaaugugacaaugccugcauaggaucaaucagaaauggaacuuaugaccacgauguauacagggaugaagcauuaaacaaccgguuccagaucaagggaguugagcugaagucaggguacaaagauuggauccuauggauuuccuuugccauaucauguuuuuugcuuuguguugcuuuguugggguucaucaugugggccugccaaaagggcaacauuaggugcaacauuugcauuuga

SEQ ID NO: 43402 - RNA, 1701 nt, Artificial Sequence
  derived and/or modified CDS sequence (wt) from hemagglutinin__InfluenzaA__AHL95518
augaagacuaucauugcuuugagcuacauucuaugucugguuuucgcucaaaaacuuccuggaaaugacaauagcacggcaacgcugugccuugggcaccaugcaguaccaaacggaacgauagugaaaacaaucacgaaugaccgaauugaaguuacuaaugcuacugagcugguucagaauuccucaauaggugaaauaugcgacaguccucaucagauccuugauggagaaaauugcacacuaauagaugcucuauugggagacccucagugugauggcuuucaaaauaagaaaugggaccuuuuuguugaacgaagcaaagccuacagcaacuguuacccuuaugaugugccggauuaugccucccuuaggucacuaguugccucauccggcacacuggaguuuaacaaugaaagcuucaauugggcuggagucacucaaaacggaacaaguucugcuugcauaaggggaucuaauaguaguuucuuuaguagauuaaauugguugacccacuuaaacuucaaauacccagcauugaacgugacuaugccaaacaaugaacaauuugacaaauuguacauuugggggguucaccacccggguacggacaaggaccaaaucuuccuguaugcucaaucaucaggaagaaucacaguaucuaccaaaagaagccaacaagcuguaaucccgaauaucggaucuagacccagaauaaggaaugucccuagcagaauaagcaucuauuggacaauaguaaaaccgggagacauacuuuugauuaacagcacagggaaucuaauugcuccuagggguuacuucaaaauacgaagugggaaaagcucaauaaugagaucagaugcacccauuggcaaaugcaagucugaaugcaucacuccaaauggaagcauucccaaugacaaaccauuccaaaauguaaacaggaucacauacggggccugucccagauauguuaagcaaagcacucugaaauuggcaacaggaaugcgaaauguaccagagaaacaaacuagaggcauauuuggcgcaauagcggguuucauagaaaaugguugggagggaaugauggaugguugguacgguuucaggcaucaaaauucugagggaagaggacaagcagcagaucucaaaagcacucaagcagcaaucgaucaaaucaaugggaagcugaaucgauugaucgggaaaaccaacgagaaauuccaucagauugaaaaagaauucucagaaguagaagggagaauucaggaccuugagaaauauguugaggacacaaaaauagaucucuggucauacaacgcggagcuucuuguugcccuggagaaccaacauacaauugaucuaacugacucagaaaugaacaaacuguuugaaaaaacaaagaagcaacugagggaaaaugcugaggauaugggcaaugguuguuucaaaauauaccacaaaugugacaaugccugcauaggaucaaucagaaauggaacuuaugaccacgauguauacagggaugaagcauuaaacaaccgguuccagaucaagggaguugagcugaagucaggguacaaagauuggauccuauggauuuccuuugccauaucauguuuuuugcuuuguguugcuuuguugggguucaucaugugggccugccaaaagggcaacauuaggugcaacauuugcauuuga

SEQ ID NO: 43403 - RNA, 1701 nt, Artificial Sequence
  derived and/or modified CDS sequence (wt) from hemagglutinin__InfluenzaA__AHL95530
augaagacuaucauugcuuugagcuacauucuaugucugguuuucgcucaaaaacuuccuggaaaugacaauagcacggcaacgcugugccuugggcaccaugcaguaccaaacggaacgauagugaaaacaaucacgaaugaccgaauugaaguuacuaaugcuacugagcugguucagaauuccucaauaggugaaauaugcgacaguccucaucagauccuugauggagaaaauugcacacuaauagaugcucuauugggagacccucagugugauggcuuucaaaauaagaaaugggaccuuuuuguugaacgaagcaaagccuacagcaacuguuacccuuaugaugugccggauuaugccucccuuaggucacuaguugccucauccggcacacuggaguuuaacaaugaaagcuucaauugggcuggagucacucaaaacggaacaaguucugcuugcauaaggggaucuaauaguaguuucuuuaguagauuaaauugguugacccacuuaaacuucaaauacccagcauugaacgugacuaugccaaacaaugaacaauuugacaaauuguacauuugggggguucaccacccggguacggacaaggaccaaaucuuccuguaugcucaaucaucaggaagaaucacaguaucuaccaaaagaagccaacaagcuguaaucccgaauaucggaucuagacccagaauaaggaauaucccuagcagaauaagcaucuauuggacaauaguaaaaccgggagacauacuuuugauuaacagcacagggaaucuaauugcuccuagggguuacuuuaaaauacgaagugggaaaagcucaauaaugagaucagaugcacccauuggcaaaugcaagucugaaugcaucacuccaaauggaagcauucccaaugacaaaccauuccaaaauguaaacaggaucacauacggggccugucccagauauguuaagcaaagcacucugaaauuggcaacaggaaugcgaaauguaccagagaaacaaacuagaggcauauuuggcgcaauagcggguuucauagaaaaugguugggagggaaugauggaugguugguacgguuucaggcaucaaaauucugagggaagaggacaagcagcagaucucaaaagcacucaagcagcaaucgaucaaaucaaugggaagcugaaucgauugaucgggaaaaccaacgagaaauuccaucagauugaaaaagaauucucagaaguagaagggagaauucaggaccuugagaaauauguugaggacacaaaaauagaucucuggucauacaacgcggagcuucuuguugcccuggagaaccaacauacaauugaucuaacugacucagaaaugaacaaacuguuugaaaaaacaaagaagcaacugagggaaaaugcugaggauaugggcaaugguuguuucaaaauauaccacaaaugugacaaugccugcauaggaucaaucagaaauggaacuuaugaccacgauguauacagggaugaagcauuaaacaaccgguuccagaucaagggaguugagcugaagucaggguacaaagauuggauccuauggauuuccuuugccauaucauguuuuuugcuuuguguugcuuuguugggguucaucaugugggccugccaaaagggcaacauuaggugcaacauuugcauuuga

SEQ ID NO: 43404 - RNA, 1701 nt, Artificial Sequence
  derived and/or modified CDS sequence (wt) from hemagglutinin__InfluenzaA__AHL95542
augaagacuaucauugcuuugagcuacauucuaugucugguuuucgcucaaaaacuuccuggaaaugacaauagcacggcaacgcugugccuugggcaccaugcaguaccaaacggaacgauagugaaaacaaucacgaaugaccgaauugaaguuacuaaugcuacugagcugguucagaauuccucaauaggugaaauaugcgacaguccucaucagauccuugauggagaaaauugcacacuaauagaugcucuauugggagacccucagugugauggcuuucaaaauaagaaaugggaccuuuuuguugaacgaagcaaagccuacagcaacuguuacccuuaugaugugccggauuaugccucccuuaggucacuaguugccucauccggcacacuggaguuuaacaaugaaagcuucaauugggcuggagucacucaaaacggaacaaguucugcuugcauaaggggaucuaauaguaguuucuuuaguagauuaaauugguugacccacuuaaacuucaaauacccagcauugaacgugacuaugccaaacaaugaacaauuugacaaauuguacauuugggggguucaccacccggguacggacaaggaccaaaucuuccuguaugcucaaucaucaggaagaaucacaguaucuaccaaaagaagccaacaagcuguaaucccgaauaucggaucuagacccagaauaagaaauaucccuagcagaauaagcaucuauuggacaauaguaaaaccgggagacauacuuuugauuaacagcacagggaaucuaauugcuccuagggguuacuucaaaauacgaagugggaaaagcucaauaaugagaucagaugcacccauuggcaaaugcaagucugaaugcaucacuccaaauggaagcauucccaaugacaaaccauuccaaaauguaaacaggaucacauacggggccugucccagauauguuaagcaaagcacucugaaauuggcaacaggaaugcgaaauguaccagagaaacaaacuagaggcauauuuggcgcaauagcggguuucauagaaaaugguugggagggaaugauggaugguugguacgguuucaggcaucaaaauucugagggaagaggacaagcagcagaucucaaaagcacucaagcagcaaucgaucaaaucaaugggaagcugaaucgauugaucgggaaaaccaacgagaaauuccaucagauugaaaaagaauucucagaaguagaagggagaauucaggaccuugagaaauauguugaggacacaaaaauagaucucuggucauacaacgcggagcuucuuguugcccuggagaaccaacauacaauugaucuaacugacucagaaaugaacaaacuguuugaaaaaacaaagaagcaacugagggaaaaugcugaggauaugggcaaugguuguuucaaaauauaccacaaaugugacaaugccugcauaggaucaaucagaaauggaacuuaugaccacgauguauacagggaugaagcauuaaacaaccgguuccagaucaagggaguugagcugaagucaggguacaaagauuggauccuauggauuuccuuugccauaucauguuuuuugcuuuguguugcuuuguugggguucaucaugugggccugccaaaagggcaacauuaggugcaacauuugcauuuga

SEQ ID NO: 43405 - RNA, 1701 nt, Artificial Sequence
  derived and/or modified CDS sequence (wt) from hemagglutinin__InfluenzaA__AHL95554
augaagacuaucauugcuuugagcuacauucuaugucugguuuucgcucaaaaacuuccuggaaaugacaauagcauggcaacgcugugccuugggcaccaugcaguaccaaacggaacgauagugaaaacaaucacgaaugaccgaauugaaguuacuaaugcuacugagcugguucagaauucuucaauaggugaaauaugcgacaguccucaucagauucuugauggagaaaacugcacacuaauagaugcucuauugggagacccucagugugauggcuuucaaaauaagaaaugggaccuuuuuguugaacgaagcaaagccuacagcaacuguuacccuuaugaugugccggauuaugccucccuuaggucacuaguugccucauccggcacacuggaguuuaacaaugaaagcuucaauuggacuggagucacucaaaacggaacaaguucugcuugcauaaggagaucuaauaguaguuucuuuaguagauuaaauugguugacccacuuaaacuucaaauacccagcauugaacgugacuaugccaaacaaugaacaauuugacaaauuguacauuugggggguucaccacccggguacggacaaggaccaaaucuuccuguaugcucaaucaucaggaagaaucacaguaucuaccaaaagaagccaacaagcuguaaucccaaauaucggaucuagacccagaauaaggaauauuccuagcagaauaagcaucuauuggacaauaguaaaaccgggagacauacuuuugauuaacagcacagggaaucuaauugcuccuagggguuacuucaaaauacgaagugggaaaagcucaauaaugagaucagaugcacccauuggcaaaugcaagucugaaugcaucacuccaaauggaagcauucccaaugacaaaccauuccaaaauguaaacaggaucacauacggggccugucccagauauguuaagcaaagcacucugaaauuggcaacaggaaugcgaaauguaccagagaaacaaacuagaggcauauuuggcgcaauagcagguuucauagaaaaugguugggaggggaugguggaugguugguacgguuucaggcaucaaaauucugagggaagaggacaagcagcagaucucaaaagcacccaagcagcaaucgaucaaaucaaugggaagcuaaaucgauugaucgggaaaaccaacgagaaauuccaucagauugaaaaagaauucucagaaguagaagggagaauucaggaccuugagaaauauguugaggacacuaaaauagaucucuggucauacaacgcggagcuucuuguugcccuggagaaccaacauacaauugaucuaacugacucagaaaugaacaaacuguuugaaaaaacaaagaagcaacugagggaaaaugcugaggauaugggcaaugguuguuucaaaauauaccacaaaugugacaaugccugcauaggaucaauaagaaauggaacuuaugaccacaauguguacagggaugaagcauuaaacaaccgguuccagaucaagggaguugagcugaagucaggguacaaagauuggauccuauggauuuccuuugccauaucauguuuuuugcuuuguguugcuuuguugggguucaucaugugggccugccaaaagggcaacauuaggugcaacauuugcauuuga

SEQ ID NO: 43406 - RNA, 1701 nt, Artificial Sequence
  derived and/or modified CDS sequence (wt) from hemagglutinin__InfluenzaA__AHL95566
augaagacuaucauugcuuugagcuacauucuaugucuaguuuucgcucaaaaacuuccuggaaaugacaauagcacggcaacgcugugccuugggcaccaugcaguaccaaacggaacgauagugaaaacaaucacgaaugaccgaauugaaguuacuaaugcuacugagcugguucagaauuccucaauaggugaaauaugcgacaguccucaucagauccuugauggagaaaacugcacacuaauagaugcucuauugggagacccucagugugauggcuuccaaaauaagaaaugggaccuuuuuguugaacgaagcaaagccuacagcaacuguuacccuuaugaugugccggauuaugccucccuuaggucacuaguugccucauccggcacacuggaguuuaacaaugaaagcuucaauugggcuggagucacucaaaacggaacaaguucugcuugcauaaggggaucuaauaguaguuucuuuaguagauuaaauugguugacccacuuaaacuucaaauacccagcauugaacgugacuaugccaaacaaugagcaauuugacaaauuguacauuugggggguucaccacccggguacggacaaggaccaaaucuuccuguaugcucgaucaucaggaagaaucacaguaucuaccaaaagaagccaacaagcuguaaucccgaauaucggaucuagacccagaauaaggaauaucccuagcagaauaagcaucuauuggacaauaguaaaaccgggagacauacuuuugauuaacagcacagggaaucuaauugcuccuagggguuacuucaaaauacgaagugggaaaagcucaauaaugagaucagaugcacccauuggcaaaugcaaaucugaauguaucacuccaaauggaagcauucccaaugacaaaccauuccaaaauguaaacaggaucacauacggggccugucccagauauguuaagcaaagcacucugaaauuggcaacaggaaugcgaaauguaccagagaaacaaacuagaggcauauuuggcgcaauagcggguuucauagaaaaugguugggagggaaugguggaugguugguacgguuucaggcaucaaaauucugagggaagaggacaagcagcagaucucaaaagcacucaagcagcaaucgaucaaaucaaugggaagcugaaucgauugaucgggaaaaccaacgagaaguuccaucagauugaaaaagaauucucagaaguagaagggagaauucaggaccuugagaaauauguugaggacacaaaaauagaucucuggucauacaacgcggagcuucuuguugcccuggagaaccaacauacaauugaucuaacugacucagaaaugaacaaacuguuugaaaaaacaaagaagcaacugagggaaaaugcugaggauaugggcaaugguuguuucaaaauauaccacaaaugugacaaugccugcauaggaucaaucagaaauggaacuuaugaccacgauguauacagggaugaagcauuaaacaaccgguuccagaucaagggaguugagcugaagucaggguacaaagauuggauccuauggauuuccuuugccauaucauguuuuuugcuuuguguugcuuuguugggguucaucaugugggccugccaaaagggcaacauuaggugcaacauuugcauuuga

SEQ ID NO: 43407 - RNA, 1701 nt, Artificial Sequence
  derived and/or modified CDS sequence (wt) from hemagglutinin__InfluenzaA__AHL95578
augaagacuaucauugcuuugagcuacauucuaugucugguuuucgcucaaaaacuuccuggaaaugacgauagcacggcaacgcugugccuugggcaccaugcaguaccaaacggaacgauagugaaaacaaucacgaaugaccgaauugaaguuacuaaugcuacugagcugguucagaauuccucaauaggugaaauaugcgacaguccucaucagauccuugauggagaaaacugcacacuaauagaugcucuauugggagacccucagugugauggcuuucaaaauaagaaaugggaccuuuuuguugaacgaagcaaagccuacagcaacuguuacccuuaugaugugccggauuaugccucccuuaggucacuaguugccucauccggcacacuggaguuuaacaaugaaagcuucaauugggcuggagucacucaaaacggaacaaguucugcuugcauaaggggaucuaauaguaguuucuuuaguagauuaaauugguugacccacuuaaacuucaaauacccagcauugaacgugacuaugccaaacaaugaacaauuugacaaauuguacauuugggggguucaccacccggguacggacaaggaccaaaucuuccuguaugcucaaucaucaggaagaaucacaguaucuaccaaaagaagccaacaagcuguaaucccgaauaucggaucuagacccagaauaaggaauaucccuagcagaauaagcaucuauuggacaauaguaaaaccgggagacauacuuuugauuaacagcacagggaaucuaauugcuccuagggguuacuucaaaauacgaagugggaaaagcucaauaaugagaucagaugcacccauuggcaaaugcaagucugaaugcaucacuccaaauggaagcauucccaaugacaaaccauuccagaauguaaacagaaucacauacggggccugucccagauauguuaagcaaagcacucugaaauuggcaacaggaaugcgaaauguaccagagaaacaaacuagaggcauauuuggcgcaauagcggguuucauagaaaaugguugggagggaaugauggaugguugguacgguuucaggcaucaaaauucugagggaagaggacaagcagcagaucucaaaagcacucaagcagcaaucgaucaaaucaaugggaagcugaaucgauugaucgggaaaaccaacgagaaauuccaucagauugaaaaagaauucucagaaguagaagggagaauucaggaccuugagaaauauguugaggacacaaaaauagaucucuggucauacaacgcggagcuucuuguugcccuggagaaccaacauacaauugaucuaacugacucagaaaugaacaaacuguuugaaaaaacaaagaagcaacugagggaaaaugcugaggauaugggcaaugguuguuucaaaauauaccacaaaugugacaaugccugcauaggaucaaucagaaauggaacuuaugaccacgauguauacagggaugaagcauuaaacaaccgguuccagaucaagggaguugagcugaagucaggguacaaagauuggauccuauggauuuccuuugccauaucauguuuuuugcuuuguguugcuuuguugggguucaucaugugggccugccaaaagggcaacauuaggugcaacauuugcauuuga

SEQ ID NO: 43408 - RNA, 1701 nt, Artificial Sequence
  derived and/or modified CDS sequence (wt) from hemagglutinin__InfluenzaA__AHL95590
augaagacuaucauugcuuugagcuacauucuaugucugguuuucgcucaaaaacuuccuggaaaugacaauagcacggcaacgcugugccuugggcaccaugcaguaccaaacggaacgauagugaaaacaaucacgaaugaccgaauugaaguuacuaaugcuacugagcugguucagaauuccucaauaggugaaauaugcgacaguccucaucagauucuugauggagaaaacugcacacuaauagaugcucuauugggagacccucagugugauggcuuucaaaauaagaaaugggaccuuuuuguugaacgaagcaaagccuacagcaacuguuacccuuaugaugugccggauuaugccucccuuaggucacuaguugccucauccggcacacuggaguuuaacaaugaaagcuucaauuggacuggagucacucaaaacggaacaaguucuucuugcauaaggagaucuaauaguaguuucuuuaguagauuaaauugguugacccacuuaaacuucaaauacccagcauugaacgugacuaugccaaacaaugaacaauuugacaaauuguacauuugggggguucaccacccggguacggacaaggaccaaaucuuccuguaugcucaaucaucaggaagaaucacaguaucuaccaaaagaagccaacaagcuguaaucccaaauaucggaucuagacccagaauaaggaauauuccuagcagaauaagcaucuauuggacaauaguaaaaccgggagacauacuuuugauuaacagcacagggaaucuaauugcuccuagggguuacuucaaaauacgaagugggaaaagcucaauaaugagaucagaugcacccauuggcaaaugcaagucugaaugcaucacuccaaauggaagcauucccaaugacaaaccauuccaaaauguaaacaggaucacauacggggccugucccagauauguuaagcaaagcacucugaaauuggcaacaggaaugcgaaauguaccagagaaacaaacuagaggcauauuuggcgcaauagcagguuucauagaaaaugguugggaggggaugguggaugguugguacgguuucaggcaucaaaauucugagggaagaggacaagcagcagaucucaaaagcacccaagcagcaaucgaucaaaucaaugggaagcugaaucgauugaucgggaaaaccaacgagaaauuccaucagauugaaaaagaauucucagaaguagaagggagaauucaggaccuugagaaauauguugaggacacuaaaauagaucucuggucauacaacgcggagcuucuuguugcccuggagaaccaacauacaauugaucuaacugacucagaaaugaacaaacuguuugaaaaaacaaagaagcaacugagggaaaaugcugaggauaugggcaaugguuguuucaaaauauaccacaaaugugacaaugccugcauaggaucaauaagaaauggaacuuaugaccacaauguguacagggaugaagcauuaaacaaccgguuccagaucaagggaguugagcugaagucaggguacaaagauuggauccuauggauuuccuuugccauaucauguuuuuugcuuuguguugcuuuguugggguucaucaugugggccugccaaaagggcaacauuaggugcaacauuugcauuuga

SEQ ID NO: 43409 - RNA, 1701 nt, Artificial Sequence; identical to SEQ ID NO: 42492
  derived and/or modified CDS sequence (wt) from hemagglutinin__InfluenzaA__AHL95602

SEQ ID NO: 43410 - RNA, 1701 nt, Artificial Sequence; identical to SEQ ID NO: 42492
  derived and/or modified CDS sequence (wt) from hemagglutinin__InfluenzaA__AHL95614

SEQ ID NO: 43411 - RNA, 1701 nt, Artificial Sequence
  derived and/or modified CDS sequence (wt) from hemagglutinin__InfluenzaA__AHL95626
augaagacuaucauugcuuugagcuacguucuaugucugguuuucgcucaaaaacuuccuggaaaugacaauagcacggcaacgcugugccuugggcaccaugcaguaccaaacggaacgauagugaaaacaaucacgaaugaccgaauugaagucacuaaugcuacugagcugguucagaauuccucaauaggugaaauaugcgacaguccucaucagauccuugauggagaaaacugcacacuaauagaugcucuauugggagacccucagugugauggcuuucaaaauaagaaaugggaccuuuuuguugaacgaagcaaagccuacagcaacuguuacccuuaugaugugccggauuaugccucccuuaggucacuaguugccucauccggcacacuggaguuuaacaaugaaagcuucaauugggcuggggucacucaaaacggaacaaguucugcuugcauaaggggaucuaauaguaguuucuuuaguagauuaaauugguugacccacuuaaacuucaaauacccagcauugaacgugacuaugccaaacaaugaacaauuugacaaauuguacauuugggggguucaccacccggguacggacaaggaccaaaucuuccuguaugcucaaucaucaggaagaaucacaguaucuaccaaaagaagccaacaagcuguaauuccgaauaucggaucuagacccagaauaaggaauaucccuagcagaauaagcaucuauuggacaauaguaaaaccgggagacauacuuuugauuaacagcacagggaaucuaauugcuccuagggguuacuucaaaauacgaagugggaaaagcucaauaaugagaucagaugcacccauuggcaaaugcaagucugaaugcaucacuccaaauggaagcauucccaaugacaaaccauuccaaaauguaaacaggaucacauacggggccugucccagauauguuaagcaaagcacucugaaauuggcaacaggaaugcgaaauguaccagagaaacaaaccagaggcauauuuggcgcaauagcggguuucauagaaaaugguugggagggaaugguggaugguugguacgguuucaggcaucaaaauucugagggaagaggacaagcagcagaucucaaaagcacucaagcagcaaucgaucaaaucaaugggaagcugaaucgauugaucgggaaaaccaacgagaaauuccaucagauugaaaaagaauucucagaaguagaagggagaauucaggaccuugagaaauauguugaggacacaaaaauagaucucuggucauacaacgcggagcuucuuguugcccuggagaaccaacauacaauugaucuaacugacucagaaaugaacaaacuguuugaaaaaacaaagaagcaacugagggaaaaugcugaggauaugggcaaugguuguuucaaaauauaccacaaaugugacaaugccugcauaggaucaaucagaaauggaacuuaugaccacgauguauacagggaugaagcauuaaacaaccgguuccagaucaagggaguugagcugaagucaggguacaaagauuggauccuauggauuuccuuugccauaucauguuuuuugcuuuguguugcuuuguugggguucaucaugugggccugccaaaagggcaacauuaggugcaacauuugcauuuga

SEQ ID NO: 43412 - RNA, 1701 nt, Artificial Sequence; identical to SEQ ID NO: 41880
  derived and/or modified CDS sequence (wt) from hemagglutinin__InfluenzaA__AHL95638

SEQ ID NO: 43413 - RNA, 1701 nt, Artificial Sequence
  derived and/or modified CDS sequence (wt) from hemagglutinin__InfluenzaA__AHL95650
augaagacuaucauugcuuugagcuacauucuaugucugguuuucgcucaaaaacuuccuggaaaugacaauagcacggcaacgcugugucuugggcaccaugcaguaccaaacggaacgauagugaaaacaaucacgaaugaccgaauugaaguuacuaaugcuacugagcugguucagaauuccucaauaggugaaauaugcgacaguccucaucagauccuugauggagaaaacugcacacuaauagaugcucuauugggagacccucagugugauggcuuucaaaauaagaaaugggaccuuuuuguugaacgaagcaaagccuacagcaacuguuacccuuaugaugugccggauuaugccucccuuaggucacuaguugccucauccggcacacuggaguuuaacaaugaaagcuucaauugggcuggagucacucaaaacggaacaaguucugcuugcauaaggggaucuaauaguaguuucuuuaguagauuaaacugguugacccacuuaaacuucaaauacccagcauugaacgugacuaugccaaacaaugaacaauuugacaaauuguacauuugggggguucaccacccggguacggacaaggaccaaaucuuccuguaugcucaaucaucaggaagaaucacaguaucuaccaaaagaagccaacaagcuguaaucccgaauaucggaucuagacccagaauaaggaauaucccuagcagaauaagcaucuauuggacaauaguaaaaccgggagacauacuuuugauuaacagcacagggaaucuaauugcuccuagggguuacuucaaaauacgaagugggaaaagcucaauaaugagaucagaugcacccauuggcaaaugcaagucugaaugcaucacuccaaauggaagcauucccaaugacaaaccauuccaaaauguaaacaggaucacauacggggccugucccagauauguuaagcaaagcacucugaaauuggcaacaggaaugcgaaauguaccagagaaacaaacuagaggcauauuuggcgcaauagcggguuucauagaaaaugguugggagggaaugauggaugguugguacgguuucaggcaucaaaauucugagggaagaggacaagcagcagaucucaaaagcacucaagcagcaaucgaucaaaucaaugggaagcugaaucgauugaucgggaaaaccaacgagaaauuccaucagauugaaaaagaauucucagaaguagaagggagaauucaggaccuugagaaauauguugaggacacaaaaauagaucucuggucauacaacgcggagcuucuuguugcccuggagaaccaacauacaauugaucuaacugacucagaaaugaacaaacuguuugaaaaaacaaagaagcaacugagggaaaaugcugaggauaugggcaaugguuguuucaaaauauaccacaaaugugacaaugccugcauaggaucaaucagaaauggaacuuaugaccacgauguauacagggaugaagcauuaaacaaccgguuccagaucaagggaguugagcugaagucaggguacaaagauuggauccuauggauuuccuuugccauaucauguuuuuugcuuuguguugcuuuguugggguucaucaugugggccugccaaaagggcaacauuaggugcaacauuugcauuuga

SEQ ID NO: 43414 - RNA, 1701 nt, Artificial Sequence
  derived and/or modified CDS sequence (wt) from hemagglutinin__InfluenzaA__AHL95662
augaagacuaucauugcuuugagcuacauucuaugucugguuuucgcucaaaaacuuccuggaaaugacaauagcacggcaacgcugugccuugggcaccaugcaguaccaaacggaacgauagugaaaacaaucacgaaugaccgaauugaaguuacuaaugcuacugagcugguucagaauuccucaauaggugaaauaugcgacaguccucaucagauccuugauggagaaaauugcacacuaauagaugcucuauugggagacccucagugugauggcuuucaaaauaagaaaugggaccuuuuuguugaacgaagcaaagccuacagcaacuguuacccuuaugaugugccggauuaugccucccuuaggucacuaguugccucauccggcacacuggaguuuaacaaugaaagcuucaauugggcuggagucacucaaaacggaacaaguucugcuugcauaaggggaucuaauaguaguuucuuuaguagauuaaauugguugacccacuuaaacuucaaauacccagcauugaacgugacuaugccaaacaaugaacaauuugacaaauuguacauuugggggguucaccacccggguacggacaaggaccaaaucuuccuguaugcucaaucaucaggaagaaucacaguaucuaccaaaagaagccaacaagcuguaaucccgaauaucggaucuagacccagaauaaggaauaucccuagcagaauaagcaucuauuggacaauaguaaaaccgggagacauacuuuugauuaacagcacagggaaucuaauugcuccuagggguuacuucaaaauacgaagugggaaaagcucaauaaugagaucagaugcacccauuggcaaaugcaagucugaaugcaucacuccaaauggaagcauucccaaugacaaaccauuccaaaauguaaacaggaucacauacggggccugucccagauauguuaagcaaagcacucugaaauuggcaacaggaaugcgaaauguaccagagaaacaaacuagaggcauauuuggcgcaauagcggguuucauagaaaaugguugggagggaaugauggaugguugguacgguuucaggcaucaaaauucugagggaagaggacaagcagcagaucucaaaagcacucaagcagcaaucgaucaaaucaaugggaagcugaaucgauugaucgggaaaaccaacgagaaauuccaucagauugaaaaagaauucucagaaguagaagggagaauucaggaccuugagaaauauguugaggacacaaaaauagaucucuggucauacaacgcggagcuucuuguuacccuggagaaccaacauacaauugaucuaacugacucagaaaugaacaaacuguuugaaaaaacaaagaagcaacugagggaaaaugcugaggauaugggcaaugguuguuucaaaauauaccacaaaugugacaaugccugcauaggaucaaucagaaauggaacuuaugaccacgauguauacagggaugaagcauuaaacaaccgguuccagaucaagggaguugagcugaagucaggguacaaagauuggauccuauggauuuccuuugccauaucauguuuuuugcuuuguguugcuuuguugggguucaucaugugggccugccaaaagggcaacauuaggugcaacauuugcauuuga

SEQ ID NO: 43415 - RNA, 1701 nt, Artificial Sequence
  derived and/or modified CDS sequence (wt) from hemagglutinin__InfluenzaA__AHL95686
augaagacuaucauugcuuugagcuacauucuaugucugguuuucgcucaaaaacuuccuggaaaugacaauagcacggcaacgcugugccuugggcaccaugcaguaccaaacggaacgauagugaaaacaaucacgaaugaccgaauugaaguuacuaaugcuacugagcugguucagaauuccucaauaggugaaauaugcgacaguccucaucagauccuugauggagaaaacugcacacuaauagaugcucuauugggagacccucagugugauggcuuucaaaauaagaaaugggaccuuuuuguugaacgaagcaaagccuacagcaacuguuacccuuaugaugugccggauuaugccucccuuaggucacuaguugccucauccggcacacuggaguuuaacaaugaaagcuucaauugggcuggagucacucaaaacggaacaaguucugcuugcauaaggggaucuaauaguaguuucuuuaguagauuaaauugguugacccacuuaaacuucaaauacccagcauugaacgugacuaugccaaacaaugagcaauuugacaaauuguacauuugggggguucaccacccggguacggacaaggaccaaaucuuccuguaugcucaaucaucaggaagaaucacaguaucuaccaaaagaagccaacaagcuguaaucccgaauaucggaucuagacccagaauaaggaauaucccuagcagaauaagcaucuauuggacaauaguaaaaccgggagacauacuuuugauuaacagcacagggaaucuaauugcuccuagggguuacuucaaaauacgaagugggaaaagcucaauaaugagaucagaugcacccauuggcaaaugcaaaucugaauguaucacuccaaauggaagcauucccaaugacaaaccauuccaaaauguaaacaggaucacauacggggccugucccagauauguuaagcaaagcacucugaaauuggcaacaggaaugcgaaauguaccagagaaacaaacuagaggcauauuuggcgcaauagcggguuucauagaaaaugguugggagggaaugguggaugguugguacgguuucaggcaucaaaauucugagggaagaggacaagcagcagaucucaaaagcacucaagcagcaaucgaucaaaucaaugggaagcugaaucgauugaucgggaaaaccaacgagaaauuccaucagauugaaaaagaauucucagaaguagaagggagaauucaggaccuugagaaauauguugaggacacaaaaauagaucucuggucauacaacgcggagcuucuuguugcccuggagaaccaacauacaauugaucuaacugacucagaaaugaacaaacuguuugaaaaaacaaagaagcaacugagagaaaaugcugaggauaugggcaaugguuguuucaaaauauaccacaaaugugacaaugccugcauaggaucaaucagaaauggaacuuaugaccacgauguauacagggaugaagcauuaaacaaccgguuccagaucaagggaguugagcugaagucaggguacaaagauuggauccuauggauuuccuuugccauaucauguuuuuugcuuuguguugcuuuguugggguucaucaugugggccugccaaaagggcaacauuaggugcaacauuugcauuuga

SEQ ID NO: 43416 - RNA, 1701 nt, Artificial Sequence; identical to SEQ ID NO: 42030
  derived and/or modified CDS sequence (wt) from hemagglutinin__InfluenzaA__AHL95698

SEQ ID NO: 43417 - RNA, 1701 nt, Artificial Sequence
  derived and/or modified CDS sequence (wt) from hemagglutinin__InfluenzaA__AHL95710
augaagacuaucauugcuuugagcuacauucuaugucugguuuucgcucaaaaacuuccuggaaaugacaauagcacggcaacgcugugccuugggcaccaugcaguaccaaacggaacgauagugaaaacaaucacgaaugaccgaauugaaguuacuaaugcuacugagcugguucagaauuccucaauaggugaaauaugcgacaguccucaucagauccuugauggagaaaacugcacacuaauagaugcucuauugggagacccucagugugauggcuuucaaaauaagaaaugggaccuuuuuguugaacgaagcaaagccuacagcaacuguuacccuuaugaugugccggauuaugccucccuuaggucacuaguugccucauccggcacacuggaguuuaacaaugaaagcuucaauugggcuggagucacucaaaacggaacaaguucugcuugcauaaggggaucuaauaguaguuucuuuaguagauuaaauugguugacccacuuaaacuucaaauacccagcauugaacgugacuaugccaaacaaugaacaauuugacaaauuguacauuugggggguucaccacccggguacggacaaggaccaaaucuuccuguaugcucaaucaucaggaagaaucacaguaucuaccaaaagaagccaacaagcuguaaucccgaauaucggaucuagacccagaauaaggaauaucccuagcagaauaagcaucuauuggacaauaguaaaaccgggagacauacuuuugauuaacagcacagggaaucuaauugcuccuagggguuacuucaaaauacgaagugggaaaagcucaauaaugagaucagaugcacccauuggcaaaugcaagucugaaugcaucacuccaaauggaagcauucccaaugacaaaccauuccaaaauguaaacaggaucacauacggggccugucccagauauguuaagcaaagcacucugaaauuggcaacaggaaugcgaaauguaccagagaaacaaacuagaggcauauuuggugcaauagcggguuucauagaaaaugguugggagggaaugauggaugguugguacgguuucaggcaucaaaauucugagggaagaggacaagcagcagaucucaaaagcacucaagcagcaaucgaucaaaucaaugggaagcugaaucgauugaucgggaaaaccaacgagaaauuccaucagauugaaaaagaauucucagaaguagaagggagaauucaggaccuugagaaauauguugaggacacaaaaauagaucucuggucauacaacgcggagcuucuuguugcccuggagaaccaacauacaauugaucuaacugacucagaaaugaacaaacuguuugaaaaaacaaagaagcaacugagggaaaaugcugaggauaugggcaaugguuguuucaaaauauaccacaaaugugacaaugccugcauaggaucaaucagaaauggaacuuaugaccacgauguauacagggaugaagcauuaaacaaccgguuccagaucaagggaguugagcugaagucaggguacaaagauuggauccuauggauuuccuuugccauaucauguuuuuugcuuuguguugcuuuguugggguucaucaugugggccugccaaaagggcaacauuaggugcaacauuugcauuuga

SEQ ID NO: 43418 - RNA, 1701 nt, Artificial Sequence; identical to SEQ ID NO: 43394
  derived and/or modified CDS sequence (wt) from hemagglutinin__InfluenzaA__AHL95722

SEQ ID NO: 43419 - RNA, 1701 nt, Artificial Sequence
  derived and/or modified CDS sequence (wt) from hemagglutinin__InfluenzaA__AHL95734
augaagacuaucauugcuuugagcuacauucuaugucugguuuucgcucaaaaacuuccuggaaaugacaauagcacggcaacgcugugccuugggcaccaugcaguaccaaacggaacgauagugaaaacaaucacgaaugaccgaauugaaguuacuaaugcuacugagcugguucagaauuccucaauaggugaaauaugcgacaguccucaucagauccuugauggagaaaauugcacacuaauagaugcucuauugggagacccucagugugauggcuuucaaaauaagaaaugggaccuuuuuguugaacgaagcaaagccuacagcaacuguuacccuuaugaugugccggauuaugccucccuuaggucacuaguugccucauccggcacacuggaguuuaacaaugaaagcuucaauuggacuggagucacucaaaacggaacaaguucugcuugcauaaggagaucuaauaguaguuucuuuaguagauuaaauugguugacccacuuaaacuucaaauacccagcauugaacgugacuaugccaaacaaugaacaauuugacaaauuguacauuuggggaguucaccacccggguacggacaaggaccaaaucuuccuguaugcucaaucaucaggaagaaucacaguaucuaccaaaagaagccaacaagcuguaaucccaaauaucggaucuagacccagaauaaggaauaucccuagcagaauaagcaucuauuggacaauaguaaaaccgggagacauacuuuugauuaacagcacagggaaucuaauugcuccuagggguuacuucaaaauacgaagugggaaaagcucaauaaugagaucagaugcacccauuggcaaaugcaagucugaaugcaucacuccaaauggaagcauucccaaugacaaaccauuccaaaauguaaacaggaucacauacggggcuugucccagauauguuaagcaaagcacucugaaauuggcaacaggaaugcgaaauguaccagagaaacaaacuagaggcauauuuggcgcaauagcggguuucauagaaaaugguugggagggaaugguggaugguugguacgguuucaggcaucaaaauucugagggaagaggacaagcagcagaucucaaaagcacucaagcagcaaucgaucaaaucaaugggaagcugaaucgauugaucgggaaaaccaacgagaaauuccaucagauugaaaaagaauucucagaaguagaagggagaauucaggaccuugagaaauauguugaggacacuaaaauagaucucuggucauacaacgcggagcuucuuguugcccuggagaaucaacauacaauugaucuaacugacucagaaaugaacaaacuguuugaaaaaacaaagaagcaacugagggaaaaugcugaggauaugggcaaugguuguuucaaaauauaccacaaaugugacaaugccugcauaggaucaaucagaaauggaacuuaugaccacaauguguacagggaugaagcauuaaacaaccgguuccagaucaagggaguugagcuuaagucaggguacaaagauuggauccuauggauuuccuuugccauaucauguuuuuugcuuuguguugcuuuguugggguucaucaugugggccugccaaaagggcaacauuaggugcaacauuugcauuuga

SEQ ID NO: 43420 - RNA, 1701 nt, Artificial Sequence
  derived and/or modified CDS sequence (wt) from hemagglutinin__InfluenzaA__AHL95746
augaagacuaucauugcuuugagcuacauucuaugucugguuuucgcucaaaaacuuccuggaaaugacaauagcacggcaacgcugugccuugggcaccaugcaguaccaaacggaacgauagugaaaacaaucacgaaugaccgaauugaaguuacuaaugcuacugagcugguucagaauuccucaauaggugaaauaugcgacaguccucaucagauucuugauggagaaaacugcacacuaauagaugcucuauugggagacccucagugugauggcuuucaaaauaagaaaugggaccuuuuuguugaacgaagcaaagccuacagcaacuguuacccuuaugaugugccggauuaugccucccuuaggucacuaguugccucauccggcacacuggaguuuaacaaugaaagcuucaauuggacuggagucacucaaaacggaacaaguucugcuugcauaaggagaucuaauaguaguuucuuuaguagauuaaauugguugacccacuuaaacuucaaauacccagcauugaacgugacuaugccaaacaaugaacaauuugacaaauuguacauuugggggguucaccacccggguacggacaaggaccaaaucuuccuguaugcucaaucaucaggaagaaucacaguaucuaccaaaagaagccaacaagcuguaaucccaaauaucggaucuagacccagaauaaggaauauuccuagcagaauaagcaucuauuggacaauaguaaaaccgggagacauacuuuugauuaacagcacagggaaccuaauugcuccuagggguuacuucaaaauacgaagugggaaaagcucaauaaugagaucagaugcacccauuggcaaaugcaagucugaaugcaucacuccaaauggaagcauucccaaugacaaaccauuccaaaauguaaacaggaucacauacggggccugucccagauauguuaagcaaagcacucugaaauuggcaacaggaaugcgaaauguaccagagaaacaaacuagaggcauauuuggcgcaauagcagguuucauagaaaaugguugggaggggaugguggaugguugguacgguuucaggcaucaaaauucugagggaagaggacaagcagcagaucucaaaagcacccaagcagcaaucgaucaaaucaaugggaagcugaaucgauugaucgggaaaaccaacgagaaauuccaucagauugaaaaagaauucucagaaguagaagggagaauucaggaccuugagaaauauguugaggacacuaaaauagaucucuggucauacaacgcggagcuucuuguugcccuggagaaccaacauacaauugaucuaacugacucagaaaugaacaaacuguuugaaaaaacaaagaagcaacugagggaaaaugcugaggauaugggcaaugguuguuucaaaauauaccacaaaugugacaaugccugcauaggaucaauaagaaauggaacuuaugaccacaauguguacagggaugaagcauuaaacaaccgguuccagaucaagggaguugagcugaagucaggguacaaagauuggauccuauggauuuccuuugccauaucauguuuuuugcuuuguguugcuuuguugggguucaucaugugggccugccaaaagggcaacauuaggugcaacauuugcauuuga

SEQ ID NO: 43421 - RNA, 1701 nt, Artificial Sequence
  derived and/or modified CDS sequence (wt) from hemagglutinin__InfluenzaA__AHL95758
augaagacuaucauugcuuugagcuacauucuaugucugguuuucgcucaaaaacuuccuggaaaugacaauagcacggcaacgcugugccuugggcaccaugcaguaccaaacggaacgauagugaaaacaaucacgaaugaccaaauugaaguuacuaaugcuacugagcugguucagaauuccucaauaggugaaauaugcgacaguccucaucagauccuugauggagaaaacugcacacuaauagaugcucuauugggagacccucagugugauggcuuucaaaauaagaaaugggaccuuuuuguugaacgaagcaaagccuacagcaacuguuacccuuaugaugugccggauuaugccucccuuaggucacuaguugccucauccggcacacuggaguuuaacaaugaaagcuucaauugggcuggagucacucaaaacggaacaaguucugcuugcauaaggggaucuaauaguaguuucuuuaguagauuaaauugguugacccacuuaaacuucaaguacccagcauugaacgugacuaugccaaacaaugaacaauuugacaaauuguacauuugggggguucaccacccggguacggacaaggaccaaaucuuccuguaugcucaaucaucaggaagaaucacaguauccaccaaaagaagccaacaagcuguaaucccgaauaucggaucuagacccagaauaaggaauaucccuagcagaauaagcaucuauuggacaauaguaaaaccgggagacauacuuuugauuaacagcacaggaaaucuaauugcuccuagggguuacuucaaaauacgaagugggaaaagcucaauaaugagaucagaugcacccauuggcaaaugcaagucugaaugcaucacuccaaauggaagcauucccaaugacaaaccauuccaaaauguaaacaggaucacauacggggccugucccagauauguuaagcaaagcacucugaaauuggcaacaggaaugcgaaauguaccagagaaacaaacuagaggcauauuuggcgcaauagcggguuucauagaaaaugguugggagggaaugguggaugguugguacgguuucaggcaucaaaauucugagggaagaggacaagcagcagaucucaaaagcacucaagcagcaaucgaucaaaucaaugggaagcugaaucgauugaucgggaaaaccaacgagaaauuccaucagauugagaaagaauucucagaaguagaagggagaauucaggaccuugagaaauauguugaggacacaaaaauagaucucuggucauacaacgcagagcuucuuguugcccuggagaaccaacauacaauugaucuaacugacucagaaaugaacaaacuguuugaaaaaacaaagaagcaacugagggaaaaugcugaggauaugggcaaugguuguuucaaaauauaccacaaaugugacaaugccugcauaggaucaaucagaaauggaacuuaugaccacgauguauacagggaugaagcauuaaacaaccgguuccagaucaagggaguugagcugaagucaggguacaaagauuggaucuuauggauuuccuuugccauaucauguuuuuugcuuuguguugcuuuguugggguucaucaugugggccugccaaaagggcaacauuaggugcaacauuugcauuuga

SEQ ID NO: 43422 - RNA, 1701 nt, Artificial Sequence; identical to SEQ ID NO: 42492
  derived and/or modified CDS sequence (wt) from hemagglutinin__InfluenzaA__AHL95770

SEQ ID NO: 43423 - RNA, 1701 nt, Artificial Sequence
  derived and/or modified CDS sequence (wt) from hemagglutinin__InfluenzaA__AHL95782
augaagacuaucauugcuuugagcuacauucuaugucugguuuucgcucaaaaacuuccuggaaaugacaauagcacggcgacgcugugccuugggcaccaugcaguaccaaacggaacgauagugaaaacaaucacgaaugaccgaauugaaguuacuaaugcuacugagcugguucagaauuccucaauaggugaaauaugcaacaguccucaucagauccuugauggagaaaacugcacacuaauagaugcucuauugggagacccucagugugauggcuuucaaaauaagaaaugggaccuuuuuguugaacgaagcaaagccuacagcaacuguuacccuuaugaugugccggauuaugccucccuuaggucacuaguugccucauccggcacacuggaguuuaacaaugaaagcuucaauuggacuggagucacucaaaacggaacaaguucugcuugcauaaggagaucuaauaguaguuucuuuaguagauuaaauugguugacccacuuaaacuucaaauacccagcauugaacgugacuaugccaaacaaugaacaauuugacaaauuguacauuugggggguucaccacccggguacggacaaggaccaaaucuuccuguaugcucaaucaucaggaagaaucaccguaucuaccaaaagaagccaacaagcuguaaucccgaauaucggaucuagacccagaauaaggaauaucccuagcagaauaagcaucuauuggacaauaguaaaaccgggagacauacuuuugauuaacagcacagggaaucuaauugcuccuagggguuacuucaaaauacgaagugggaaaagcucaauaaugagaucagaugcacccauuggcaaaugcaagucugaaugcaucacuccaaauggaagcauucccaaugacaaaccauuccaaaauguaaacaggaucacauacggggccugucccagauauguuaagcaaagcacucuaaaauuggcaacaggaaugcgaaauguaccagagaaacaaacuagaggcauauuuggcgcaauagcggguuucauagaaaaugguugggagggaaugguggaugguugguacgguuucaggcaucaaaauucugagggaagaggacaagcagcagaucucaaaagcacucaagcagcaaucgaucaaaucaaugggaagcugaaucgauugaucgggaaaaccaacgagaaauuccaucagauugaaaaagaguucucagaaguagaagggagaauucaggaccuugagaaauauguugaggacacuaaaauagaucucuggucauacaacgcggagcuucuuguugcccuggagaaccaacauacaauugaucuaacugacucagaaaugaacaaacuguuugaaaaaacaaagaagcaacugagggaaaaugcugaggauaugggcaaugguuguuucaaaauauaccacaaaugugacaaugccugcauaggaucaaucagaaauggaacuuaugaccacgauguauacagggaugaagcauuaaacaaccgguuccagaucaagggaguugagcugaagucaggguacaaagauuggauccuauggauuuccuuugccauaucauguuuuuugcuuuguguugcuuuguugggguucaucaugugggccugccaaaagggcaacauuaggugcaacauuugcauuuga

SEQ ID NO: 43424 - RNA, 1701 nt, Artificial Sequence
  derived and/or modified CDS sequence (wt) from hemagglutinin__InfluenzaA__AHL95794
augaagacuaucauugcuuugagcuacauucuaugucugguuuucgcucaaaaacuuccuggaaaugacaauagcacggcaacgcugugccuugggcaccaugcaguaccaaacggaacgauagugaaaacaaucacgaaugaccgaauugaaguuacuaaugcuacugagcugguucagaauuccucaauaggugaaauaugcgacaguccucaucagauccuugauggagaaaacugcacacuaauagaugcucuauugggagacccucagugugauggcuuucaaaauaagaaaugggaccuuuuuguugaacgaaacaaagccuacagcaacuguuacccuuaugaugugccggauuaugccucccuuaggucacuaguugccucauccggcacacuggaguuuaacaaugaaagcuucaauugggcuggagucacucaaaacggaacaaguucugcuugcauaaggggaucuaauaguaguuucuuuaguagauuaaauugguugacccacuuaaacuucaaauacccagcauugaacgugacuaugccaaacaaugagcaauuugacaaauuguacauuugggggguucaccacccggguacggacaaggaccaaaucuuccuguaugcucaaucaucaggaagaaucacaguaucuaccaaaagaagccaacaagcuguaaucccgaauaucggaucuagacccagaauaaggaauaucccuagcagaauaagcaucuauuggacaauaguaaaaccgggagacauacuuuugauuaacagcacagggaaucuaauugcuccuagggguuacuucaaaauacgaagugggaaaagcucaauaaugagaucagaugcacccauuggcaaaugcaaaucugaauguaucacuccaaauggaagcauucccaaugacaaaccauuccaaaauguaaacaggaucacauacggggccugucccagauauguuaagcaaagcacucugaaauuggcaacaggaaugcgaaauguaccagagaaacaaacuagaggcauauuuggcgcaauagcggguuucauagaaaaugguugggagggaaugguggaugguugguacgguuucaggcaucaaaauucugagggaagaggacaagcagcagaucucaaaagcacucaagcagcaaucgaucaaaucaaugggaagcugaaucgauugaucgggaaaaccaacgagaaauuccaucagauugaaaaagaauucucagaaguagaagggagaauucaggaccuugagaaauauguugaggacacaaaaauagaucucuggucauacaacgcggagcuucuuguugcccuggagaaccaacauacaauugaucuaacugacucagaaaugaacaaacuguuugaaaaaacaaagaagcaacugagggaaaaugcugaggauaugggcaaugguuguuucaaaauauaccacaaaugugacaaugccugcauaggaucaaucagaaauggaacuuaugaccacgauguauacagggaugaagcauuaaacaaccgguuccagaucaagggaguugagcugaagucaggguacaaagauuggauccuauggauuuccuuugccauaucauguuuuuugcuuuguguugcuuuguugggguucaucaugugggccugccaaaagggcaacauuaggugcaacauuugcauuuga

SEQ ID NO: 43425 - RNA, 1701 nt, Artificial Sequence
  derived and/or modified CDS sequence (wt) from hemagglutinin__InfluenzaA__AHL95806
augaagacuaucauugcuuugagcuacauucuaugucugguuuucgcucaaaaacuuccuggaaaugacaauagcacggcaacgcugugccuugggcaccaugcaguaccaaacggaacgauagugaaaacaaucacgaaugaccgaauugaagucacuaaugcuacugagcugguucagaauuccucaauaggugaaauaugcgacaguccucaucagauccuugauggagaaaacugcacacuaauagaugcucuauugggagacccucagugugauggcuuucaaaauaagaaaugggaccuuuuuguugaacgaagcaaagccuacagcaacuguuacccuuaugaugugccggauuaugccucccuuaggucacuaguugccucauccggcacacuggaguuuaacaaugaaagcuucaauugggcuggggucacucaaaacggaacaaguucugcuugcauaaggggaucuaauaguaguuucuuuaguagauuaaauugguugacccacuuaaacuucaaauacccagcauugaacgugacuaugccaaacaaugaacaauuugacaaauuguacauuugggggguucaccacccggguacggacaaggaccaaaucuuccuguaugcucaaucaucaggaagaaucacaguaucuaccaaaagaagccaacaagcuguaaucccgaauaucggaucuagacccagaauaaggaauaucccuagcagaauaagcaucuauuggacaauaguaaaaccgggagacauacuuuugauuaacagcacagggaaucuaauugcuccuagggguuacuucaaaauacgaagugggaaaagcucaauaaugagaucagaugcacccauuggcaaaugcaagucugaaugcaucacuccaaauggaagcauucccaaugacaaaccauuccaaaauguaaacaggaucacauacggggccugucccagauauguuaagcaaagcacucugaaauuggcaacaggaaugcgaaauguaccagagaaacaaaccagaggcauauuuggcgcaauagcggguuucauagaaaaugguugggagggaaugguggaugguugguacgguuucaggcaucaaaauucugagggaagaggacaagcagcagaucucaaaagcacucaagcagcaaucgaucaaaucaaugggaagcugaaucgauugaucgggaaaaccaacgagaaauuccaucagauugaaaaagaauucucagaaguagaagggagaauucaggaccuugagaaauauguugaggacacaaaaauagaucucuggucauacaacgcggagcuucuuguugcccuggagaaccaacauacaauugaucuaacugacucagaaaugaacaaacuguuugaaaaaacaaagaagcaacugagggaaaaugcugaggauaugggcaaugguuguuucaaaauauaccacaaaugugacaaugccugcauaggaucaaucagaaauggaacuuaugaccacgauguauacagggaugaagcauuaaacaaccgguuccagaucaagggaguugagcugaagucaggguacaaagauuggauccuauggauuuccuuugccauaucauguuuuuugcuuuguguugcuuuguugggguccaucaugugggccugccaaaaaggcaacauuaggugcaacauuugcauuuga

SEQ ID NO: 43426 - RNA, 1701 nt, Artificial Sequence; identical to SEQ ID NO: 42059
  derived and/or modified CDS sequence (wt) from hemagglutinin__InfluenzaA__AHL95818

SEQ ID NO: 43427 - RNA, 1701 nt, Artificial Sequence; identical to SEQ ID NO: 41879
  derived and/or modified CDS sequence (wt) from hemagglutinin__InfluenzaA__AHL95830

SEQ ID NO: 43428 - RNA, 1701 nt, Artificial Sequence
  derived and/or modified CDS sequence (wt) from hemagglutinin__InfluenzaA__AHL95842
augaagacuaucauugcuuugagcuacauucuaugucugguuuucgcucaaaaacuuccuggaaaugacaauagcacggcaacgcugugccuugggcaccaugcaguaccaaacggaacgauagugaaaacaaucacgaaugaccgaauugaaguuacuaaugcuacugagcugguucagaauuccucaauaggugaaauaugcgacaguccucaucagauccuugauggagaaaacugcacacuaauagaugcucuauugggagacccucagugugauggcuuucaaaauaagaaaugggaccucuuuguugaacgaagcaaagccuacagcaacuguuacccuuaugaugugccggauuaugccucccuuaggucacuaguugccucauccggcacacuggaguuuaacaaugaaagcuucaauugggcuggagucacucaaaacggaacaaguucugcuugcauaaggggaucuaauaguaguuucuuuaguagauuaaauugguugacccacuuaaacuucaaauacccagcauugaacgugacuaugccaaacaaugagcaauuugacaaauuguacauuugggggguucaccacccggguacggacaaggaccaaaucuuccuguaugcucaaucaucaggaagaaucacaguaucuaccaaaagaagccaacaagcuguaaucccgaauaucggaucuagacccagaauaaggaacaucccuagcagaauaagcaucuauuggacaauaguaaaaccgggagacauacuuuugauuaacagcacagggaaucuaauugcuccuagggguuacuucaaaauacgaagugggaaaagcucaauaaugagaucagaugcacccauuggcaaaugcaaaucugaauguaucacuccaaauggaagcauucccaaugacaaaccauuccaaaauguaaacaggaucacauacggggccugucccagauauguuaagcaaagcacucugaaauuggcaacaggaaugcgaaauguaccagagaaacaaacuagaggcauauuuggcgcaauagcggguuucauagaaaaugguugggagggaaugguggaugguugguacgguuucaggcaucaaaauucugagggaagaggacaagcagcagaucucaaaagcacucaagcagcaaucgaucaaaucaaugggaagcugaaucgauugaucgggaaaaccaacgagaaauuccaucagauugaaaaagaauucucagaaguagaagggagaauucaggaccuugagaaauauguugaggacacaaaaauagaucucuggucauacaacgcggagcuucuuguugcccuggagaaccaacauacaauugaucuaacugacucagaaaugaacaaacuguuugaaaaaacaaagaagcaacugagggaaaaugcugaggauaugggcaaugguuguuucaaaauauaccacaaaugugacaaugccugcauaggaucaaucagaaauggaacuuaugaccacgauguauacagggaugaagcauuaaacaaccgguuccagaucaagggaguugagcugaagucaggguacaaagauuggauccuauggauuuccuuugccauaucauguuuuuugcuuuguguugcuuuguugggguucaucaugugggccugccaaaagggcaacauuagaugcaacauuugcauuuga

SEQ ID NO: 43429 - RNA, 1701 nt, Artificial Sequence
  derived and/or modified CDS sequence (wt) from hemagglutinin__InfluenzaA__AHL95854
augaagacuaucauugcuuugagcuacauucuaugucugguuuucgcucaaaaacuuccuggaaaugacaauagcacggcaacgcugugccuugggcaccaugcaguaccaaacggaacgauagugaaaacaaucacgaaugaccgaauugaaguuacuaaugcuacugagcugguucagaauuccucaauaggugaaauaugcgacaguccucaucagauccuugauggagaaaacugcacacuaauagaugcucuauugggagacccucaaugugauggcuuccaaaauaagaaaugggaccuuuuuguugaacgaagcaaagccuacagcaacuguuacccguaugaugugccggauuaugccucccuuaggucacuaguugccucauccggcacacuggaguuuaacaaugaaagcuucaauuggacaggagucacucaaaacggaacaaguucugcuugcauaaggagaucuaauaguaguuucuuuaguagauuaaauugguugacccacuuaaacuucaaauacccagcauugaacgugacuaugccaaacaaugaacaauuugacaaauuguacauuugggggguucaccacccggguacggacaaggaccaaaucuuccuguaugcucaaucaucaggaagaaucacaguaucuaccaaaagaagccaacaagcuguaaucccgaauaucggaucuagacccagaauaaggaauaucccuagcagaauaagcaucuauuggacaauaguaaaaccgggagacauacuuuugauuaacagcacagggaaucuaauugcuccuagggguuacuucaaaauacgaagugggaaaagcucaauaaugagaucagaugcacccauuggcaaaugcaagucugaaugcaucacuccaaauggaagcauucccaaugacaaaccauuccaaaauguaaacaggaucacauacggggccugucccagauauguuaagcaaagcacucugaaauuggcaacaggaaugcgaaauguaccagagaaacaaacuagaggcauauuuggcgcaauagcggguuucauagaaaaugguugggagggaaugguggaugguugguacgguuucaggcaucaaaauucugagggaagaggacaagcagcagaucucaaaagcacucaagcagcaaucgaucaaaucaaugggaagcuaaaucgauugaucgggaaaaccaacgagaaauuccaucagauugaaaaagaauucucagaaguagaaggaagaauucaggaccuugagaaauauguugaggacacuaaaauagaucucuggucauacaacgcggagcuucuuguugcccuggagaaccaacauacaauugaucuaacugacucagaaaugaacaaacuguucgaaaaaacaaagaagcaacugagggaaaaugcugaggauaugggcaaugguuguuucaaaauauaccacaaaugugacaaugccugcauaggaucaaucagaaauggaacuuaugaccacaauguauacagagaugaagcauuaaacaaccgguuccagaucaagggaguugagcugaagucaggguacaaagauuggauccuauggauuuccuuugccauaucauguuuuuugcuuuguguugcuuuguugggguucaucaugugggccugccaaaagggcaacauuaggugcaacauuugcauuuga

SEQ ID NO: 43430 - RNA, 1701 nt, Artificial Sequence; identical to SEQ ID NO: 42492
  derived and/or modified CDS sequence (wt) from hemagglutinin__InfluenzaA__AHL95866

SEQ ID NO: 43431 - RNA, 1701 nt, Artificial Sequence
  derived and/or modified CDS sequence (wt) from hemagglutinin__InfluenzaA__AHL95878
augaaggcaauacuaguaauuaugcuauauacauuugcaaccgcaaaugcagacacauuauguauagguuaucaugcgaacaauucaacagacacuguagacacaguacuagaaaagaauguaacaguaacacacucuguuaaucuucuagaagacaagcauaacgggaaacuaugcaaacuaagagggguauccccauugcauuuggguaaauguaacauugcuggcuggauccugggaaauccagagugugaaucacucuccacagcaagcucaugguccuacauuguggaaacaucugguucagacaauggaacguguuacccaggagauuucaucgauuaugaggagcuaagagagcaauugagcucagugucaucauuugaaagguuugagauauuccccaaaacaaguucauggcccaaucaugacucgaacaaagguguaacggcagcauguccucaugcuggagcaaaaggcuucuacaaaaauuuaauauggcuaguuaaaaaaggaaauucauacccaaagcucagcauauccuauauuaaugauaaagggaaagaaguccucgugcuauggggcauucaccauccaucuacuacugcugaccaacaaagucucuaucagaaugcagauacauauguuuuuguggggacaucaagauacagcaagaaguucaagccggaaauagcaauaagacccaaagugagggaucaagaagggagaaugaacuauuacuggacacuaguagagccgggagacaaaauaacauucgaagcaacuggaaaucuagugguaccgagauaugcauuugcaauggaaagaaaugcuggaucugguauuaucauuucagauacaccaguucacgauugcaauacaacuugucagacacccaagggugcuauaaacaccagccucccauuucagaauauacauccgaucacaauuggaaaauguccaaaauauguaaaaagcacaaaauugagacuggccacaggauugaggaaugucccuucuauucaaucuagaggccuauuuggggccauugcuggcuucauugaagggggguggacagggaugguagauggaugguacgguuaucaccaucaaaaugagcaggggucaggauaugcagccgaccugaagagcacacagaaugccauugacaagauuacuaacaaaguaaauucuguuauugaaaagaugaauacacaguucacagcaguagguaaagaguucaaccaccuggaaaaaagaauagagaauuuaaauaaaaaaguugaugaugguuuccuggacauuuggacuuacaaugccgaacuguugguucuauuggaaaaugaaagaacuuuggacuaccacgauucaaaugugaagaacuuauaugaaaagguaagaaaccaguuaaaaaacaaugccaaggaaauuggaaauggcugcuuugaauuuuaccacaaaugcgauaacacgugcauggaaagugucaaaaaugggacuuaugauuacccaaaauacucagaggaagcaaaauuaaacagagaagaaauagaugggguaaagcuggaaucaacaaggauuuaccagauuuuggcgaucuauucaacugccgcuaguucauugguacugguagucucccugggggcaaucaguuuuuggaugugcucuaaugggucucuacaguguagaauauguauuuaa

SEQ ID NO: 43432 - RNA, 1701 nt, Artificial Sequence; identical to SEQ ID NO: 41880
  derived and/or modified CDS sequence (wt) from hemagglutinin__InfluenzaA__AHL95889

SEQ ID NO: 43433 - RNA, 1701 nt, Artificial Sequence; identical to SEQ ID NO: 42489
  derived and/or modified CDS sequence (wt) from hemagglutinin__InfluenzaA__AHL95901

SEQ ID NO: 43434 - RNA, 1701 nt, Artificial Sequence
  derived and/or modified CDS sequence (wt) from hemagglutinin__InfluenzaA__AHL95913
augaagacuaucauugcuuugagcuacauucuaugucugguuuucgcucaaaaacuuccuggaaaugacaauagcacggcaacgcugugccuugggcaccaugcaguaccaaacggaacgauagugaaaacaaucacgaaugaccgaauugaagucacuaaugcuacugagcugguucagaauuccucaauaggugaaauaugcgacaguccucaucagauccuugauggagaaaacugcacacuaauagaugcucuauugggagacccucagugugauggcuuucaaaauaagaaaugggaccuuuuuguugaacgaagcaaagccuacagcaacuguuacccuuaugaugugccggauuaugccucccucaggucacuaguugccucauccggcacacuggaguuuaacaaugaaagcuucaauugggcuggggucacucaaaacggaacaaguucugcuugcauaaggggaucuaauaguaguuucuuuaguagauuaaauugguugacccacuuaaacuucaaauacccagcauugaacgugacuaugccaaacaaugaacaauuugacaaauuguacauuugggggguucaccacccggguacggacaaggaccaaaucuuccuguaugcucaaucaucaggaagaaucacaguaucuaccaaaagaagccaacaagcuguaaucccgaauaucggaucuagacccagaauaaggaauaucccuagcagaauaagcaucuauuggacaauaguaaaaccgggagacauacuuuugauuaacagcacagggaaucuaauugcuccuagggguuacuucaaaauacgaagugggaaaagcucaauaaugagaucagaugcacccauuggcaaaugcaagucugaaugcaucacuccaaauggaagcauucccaaugacaaaccauuccaaaauguaaacaggaucacauacggggccugucccagauauguuaagcaaagcacucugaaauuggcaacaggaaugcgaaauguaccagagaaacaaaccagaggcauauuuggcgcaauagcggguuucauagaaaaugguugggagggaaugguggaugguugguacgguuucaggcaucaaaauucugagggaagaggacaagcagcagaucucaaaagcacucaagcagcaaucgaucaaaucaaugggaagcugaaucgauugaucgggaaaaccaacgagaaauuccaucagauugaaaaagaauucucagaaguagaagggagaauucaggaccuugagaaauauguugaggacacaaaaauagaucucuggucauacaacgcggagcuucuuguugcccuggagaaccaacauacaauugaucuaacugacucagaaaugaacaaacuguuugaaaaaacaaagaagcaacugagggaaaaugcugaggauaugggcaaugguuguuucaaaauauaccacaaaugugacaaugccugcauaggaucaaucagaaauggaacuuaugaccacgauguauacagggaugaagcauuaaacaaccgguuccagaucaagggaguugagcugaagucaggguacaaagauuggauccuauggauuuccuuugccauaucauguuuuuugcuuuguguugcuuuguugggguucaucaugugggccugccaaaagggcaacauuaggugcaacauuugcauuuga

SEQ ID NO: 43435 - RNA, 1701 nt, Artificial Sequence
  derived and/or modified CDS sequence (wt) from hemagglutinin__InfluenzaA__AHL95937
augaagacuaucauugcuuugagcuacauucuaugucugguuuucgcucaaaaacuuccuggaaaugacaauagcacggcaacgcugugccuugggcaccaugcaguaccaaacggaacgauagugaaaacaaucacgaaugaccgaauugaaguuacuaaugcuacugagcugguucagaauuccucaauaggugaaauaugcgacaguccucaucagauccuugauggagaaaacugcacacuaauagaugcucuauugggagacccucagugugauggcuuucaaaauaagaaaugggaccuuuuuguugaacgaagcaaagccuacagcaacuguuacccuuaugaugugccggauuaugccucccuuaggucacuaguugccucauccggcacacuggaguuuaacaaugaaagcuucaauugggcuggagucacucaaaacggaacaaguucugcuugcauaaggggaucuaauaguaguuucuuuaguagauuaaauugguugacccacuuaaacuucaaauacccagcauugaacgugacuaugccaaacaaugagcaauuugacaaauuguacauuugggggguucaccacccggguacggacaaggaccaaaucuuccuguaugcucaaucaucaggaagaaucacaguaucuaccaaaagaagccaacaagcuguaaucccgaauaucggaucuagacccagaauaaggaauaucccuagcagaauaagcaucuauuggacaauaguaaaaccgggagacauacuuuugauuaacagcacagggaaucuaauugcuccuagggguuacuucaaaauacgaagugggaaaagcucaauaaugagaucagaugcacccauuggcaaaugcaaaucugaauguaucacuccaaauggaagcauucccaaugacaaaccauuccaaaauguaaacaggaucacauacggggccugucccagauauguuaagcaaagcacucugaaauuggcaacaggaaugcgaaauguaccagagaaacaaacuagaggcauauuuggcgcaauagcggguuucauagaaaaugguugggagggaaugguggaugguugguacgguuucaggcaucaaaauucugagggaagaggacaagcagcagaucucaaaagcacucaagcagcaaucgaucaaaucaaugggaagcugaaucgauugaucgggaaaaccaacgagaaauuccaucagauugaaaaagaauucucagaaguagaagggagaauucaggaccuugagaaauauguugaggacacaaaaacagaucucuggucauacaacgcggagcuucuuguugcccuggagaaccaacauacaauugaucuaacugacucagaaaugaacaaacuguuugaaaaaacaaagaagcaacugagggaaaaugcugaggauaugggcaaugguuguuucaaaauauaccacaaaugugacaaugccugcauaggaucaaucagaaauggaacuuaugaccacgauguauacagggaugaagcauuaaacaaccgguuccagaucaagggaguugagcugaagucaggguacaaagauuggauccuauggauuuccuuugccauaucauguuuuuugcuuuguguugcuuuguugggguucaucaugugggccugccaaaagggcaacauuaggugcaacauuugcauuuga

SEQ ID NO: 43436 - RNA, 1701 nt, Artificial Sequence
  derived and/or modified CDS sequence (wt) from hemagglutinin__InfluenzaA__AHL95949
augaagacuaucauugcuuugagcuacauucuaugucuaguuuucgcucaaaaacuuccuggaaaugacaauagcacggcaacgcugugccuugggcaccaugcaguaccaaacggaacgauagugaaaacaaucacgaaugaccgaauugaaguuacuaaugcuacugagcugguucagaauuccucaauaggugaaauaugcgacaguccucaucagauccuugauggagaaaacugcacacuaauagaugcucuauugggagacccucagugugauggcuuccaaaauaagaaaugggaccuuuuuguugaacgaagcaaagccuacagcaacuguuacccuuaugaugugccggauuaugccucccuuaggucacuaguugccucauccggcacacuggaguuuaacaaugaaagcuucaauuggacuggagucacucaaaacggaacaaguucugcuugcauaaggagaucuaauaauaguuucuuuaguagauuaaauugguugacccacucaaacuucaaauacccagcauugaacaugacuaugccaaacaaugaacaauuugacaaauuguacauuugggggguucaccacccggguacggacaaggaccaaaucuuccuguaugcucaaucaucaggaagaaucacaguaucuaccaaaagaagccaacaagcuguaaucccgaauaucggaucuagacccagaauaaggaauaucccuagcagaauaagcaucuauuggacaauaguaaaaccgggagacauacuuuugauuaacagcacagggaaucuaauugcuccuagggguuacuucaaaauacgaagugggaaaagcucaauaaugagaucagaugcacccauuggcaaaugcaagucugaaugcaucacuccaaacggaagcauucccaaugacaaaccauuccaaaauguaaacaggaucacauacggggccugucccagauauguuaagcaaagcacucugaaauuggcaacaggaaugcgaaauguaccagagaaacaaacuagaggcauauuuggugcaauagcggguuucauagaaaaugguugggagggaaugauggaugguugguacgguuucaggcaccaaaauucugagggaagaggacaagcagcagaucucaaaagcacucaagcagcaaucgaucaaaucaaugggaagcugaaucgauugaucgggaaaaccaacgagaaauuccaucagauugaaaaagaauuuucagaaguagaagggagaauucaggaccuugagaaauauguugaggacacuaaaauagaucucuggucauacaacgcggagcuucuuguugcccuggagaaccaacauacaauugaucuaacugacucagaaaugaacaaacuguuugaaaaaacaaagaagcaacugagggaaaaugcugaggauaugggcaaugguuguuucaaaauauaccacaaaugugacaaugccugcauaggaucaaucagaaauggaacuuaugaccacgauguauacagagaugaagcauuaaacaaccgguuccagaucaagggaguugagcugaagucaggguacaaagauuggauccuauggauuuccuuugccauaucauguuuuuugcuuuguguugcuuuguugggguucaucaugugggccugccaaaagggcaacauuaggugcaacauuugcauuuga

SEQ ID NO: 43437 - RNA, 1701 nt, Artificial Sequence; identical to SEQ ID NO: 42492
  derived and/or modified CDS sequence (wt) from hemagglutinin__InfluenzaA__AHL95961

SEQ ID NO: 43438 - RNA, 1701 nt, Artificial Sequence
  derived and/or modified CDS sequence (wt) from hemagglutinin__InfluenzaA__AHL95973
augaagacuaucauugcuuugagcuacauucuaugucugguuuucgcucaaaaacuuccuggaaaugacaauagcacggcaacgcugugccuugggcaccaugcaguaccaaacggaacgauagugaaaacaaucacaaaugaccgaauugaaguuacuaaugcuacugagcugguucagaauuccucaauaggugaaauaugcgacaguccucaucagauccuugauggagaaaacugcacacuaauagaugcucuauugggagacccucagugugauggcuuucaaaauaagaaaugggaccuuuuuguugaacgaagcaaagccuacagcaacuguuacccuuaugaugugccggauuaugccucccuuaggucacuaguugccucauccggcacacuggaguuuaacaaugaaagcuucaauugggcuggagucacucaaaacggaacaaguucugcuugcauaaggggaucuaauaguaguuucuuuaguagauuaaauugguugacccacuuaaacuucaaauacccagcauugaacgugacuaugccaaacaaugaacaauuugacaaauuguacauuugggggguucaccacccggguacggacaaggaccaaaucuuccuguaugcucaaucaucaggaagaaucacaguaucuaccaaaagaagccaacaagcuguaaucccgaauaucggaucuagacccagaauaaggaauaucccuagcagaauaagcaucuauuggacaauaguaaaaccgggagacauacuuuugauuaacagcacagggaaucuaauugcuccuagggguuacuucaaaauacgaagugggaaaagcucaauaaugagaucagaugcacccauuggcaaaugcaagucugaaugcaucacuccaaauggaagcauucccaaugacaaaccauuccaaaauguaaacaggaucacauacggggccugucccagauauguuaagcaaagcacucugaaauuggcaacaggaaugcgaaauguaccagagaaacaaacuagaggcauauuuggcgcaauagcggguuucauagaaaaugguugggagggaaugauggaugguugguacgguuucaggcaucaaaauucugagggaagaggacaagcagcagaucucaaaagcacucaagcagcaaucgaucaaaucaaugggaagcugaaucgauugaucgggaaaaccaacgagaaauuccaucagauugaaaaagaauucucagaaguagaagggagaauucaggaccuugagaaauauguugaggacacaaaaauagaucucuggucauacaacgcggagcuucuuguugcccuggagaaccaacauacaauugaucuaacugacucagaaaugaacaaacuguuugaaaaaacaaagaagcaacugagggaaaaugcugaggauaugggcaaugguuguuucaaaauauaccacaaaugugacaaugccugcauaggaucaaucagaaauggaacuuaugaccacgauguauacagggaugaagcauuaaacaaccgguuccagaucaagggaguugagcugaagucaggguacaaagauuggauccuauggauuuccuuugccauaucauguuuuuugcuuuguguugcuuuguugggguucaucaugugggccugccaaaagggcaacauuaggugcaacauuugcauuuga

SEQ ID NO: 43439 - RNA, 1701 nt, Artificial Sequence
  derived and/or modified CDS sequence (wt) from hemagglutinin__InfluenzaA__AHL95985
augaagacuaucauugcuuugagcuacauucuaugucugguuuucgcucaaaaacuuccuggaaaugacaauagcacggcaacgcugugccuugggcaccaugcaguaccaaacggaacgauagugaaaacaaucacgaaugaccgaauugaaguuacuaaugcuacugagcugguucagaauuccucaauaggugaaauaugcgacaguccucaucagauccuugauggagaaaacugcacacuaauagaugcucuauugggagacccucagugugauggcuuucaaaauaagaaaugggaccuuuuuguugaacgaagcaaagccuacagcaacuguuacccuuaugaugugccggauuaugccucccuuaggucacuaguugccucauccggcacacuggaguuuaacaaugaaagcuucaauugggcuggagucacucaaaacggaacaaguucugcuugcauaaggggaucuaauaguaguuucuuuaguagauuaaauugguugacccacuuaaacuucaaauacccagcauugaacgugacuaugccaaacaaugaacaauuugacaaauuguacauuugggggguucaccacccggguacggacaaggaccaaaucuuccuguaugcucaaucaucaggaagaaucacaguaucuaccaaaagaagccaacaagcuguaaucccgaauaucggaucuagacccagaauaaggaauaucccuagcagaauaagcaucuauuggacaauaguaaaaccgggagacauacuuuugauuaacagcacagggaaucuaauugcuccuagggguuacuucaaaauacgaagugggaaaagcucaauaaugagaucagaugcacccauuggcaaaugcaagucugaaugcaucacuccaaauggaagcauucccaaugacaaaccauuccaaaauguaaacaggaucacauacggggccugucccagauauguuaagcaaagcacucugaaauuggcaacaggaaugcgaaauguaccagagaaacaaacuagaggcauauuuggugcaauagcggguuucauagaaaaugguugggagggaaugauggaugguugguacgguuucaggcaucaaaauucugagggaagaggacaagcagcagaucucaaaagcacucaagcagcaaucgaucaaaucaaugggaagcugaaucgauugaucgggaaaaccaacgagaaauuccaccagauugaaaaagaauucucagaaguagaagggagaauucaggaccuugagaaauauguugaggacacaaaaauagaucucuggucauacaacgcggagcuucuuguugcccuggagaaccaacauacaauugaucuaacugacucagaaaugaacaaacuguuugaaaaaacaaagaagcaacugagggaaaaugcugaggauaugggcaaugguuguuucaaaauauaccacaaaugugacaaugccugcauaggaucaaucagaaauggaacuuaugaccacgauguauacagggaugaagcauuaaacaaccgguuccagaucaagggaguugagcugaagucaggguacaaagauuggauccuauggauuuccuuugccauaucauguuuuuugcuuuguguugcuuuguugggguucaucaugugggccugccaaaagggcaacauuaggugcaacauuugcauuuga

SEQ ID NO: 43440 - RNA, 1701 nt, Artificial Sequence
  derived and/or modified CDS sequence (wt) from hemagglutinin__InfluenzaA__AHL95997
augaagacuaucauugcuuugagcuacauucuaugucugguuuucgcucaaaaacuuccuggaaaugacaauagcacggcaacgcugugccuugggcaccaugcaguaccaaacggaacgauagugaaaacaaucacgaaugaccgaauugaaguuacuaaugcuacugagcugguucagaauuccucaauaggugaaauaugcgacaguccucaucagauccuugauggagaaaauugcacacuaauagaugcucuauugggagacccucagugugauggcuuucaaaauaagaaaugggaccuuuuuguugaacgaagcaaagccuacagcaacuguuacccuuaugaugugccggauuaugccucccuuaggucacuaguugccucauccggcacacuggaguuuaacaaugaaagcuucaauugggcuggagucacucaaaacggaacaaguucuucuugcauaaggggaucuaagaguaguuucuuuaguagauuaaauugguugacccacuuaaacuucaaauacccagcauugaacgugacuaugccaaacaaugaacaauuugacaaauuguacauuugggggguucaccacccggguacggacaaggaccaaaucuuccuguaugcucaaucaucaggaagaaucacaguaucuaccaaaagaagccaacaagcuguaaucccgaauaucggaucuagacccagaauaaggaauaucccuagcagaauaagcaucuauuggacaauaguaaaaccgggagacauacuuuugauuaacagcacagggaaucuaauugcuccuagggguuacuucaaaauacgaagugggaaaagcucaauaaugagaucagaugcacccauuggcaaaugcaagucugaaugcaucacuccaaauggaagcauucccaaugacaaaccauuccaaaauguaaacaggaucacauacggggccugucccagauauguuaagcaaagcacucugaaauuggcaacaggaaugcgaaauguaccagagaaacaaacuagaggcauauuuggcgcaauagcggguuucauagaaaaugguugggagggaaugauggaugguugguacgguuucaggcaucaaaauucugagggaagaggacaagcagcagaucucaaaagcacucaagcagcaaucgaucaaaucaaugggaagcugaaucgauugaucgggaaaaccaacgagaaauuccaucagauugaaaaagaauucucagaaguagaagggagaauucaggaccuugagaaauauguugaggacacaaaaauagaucucuggucauacaacgcggagcuucuuguugcccuggagaaccaacauacaauugaucuaacugacucagaaaugaacaaacuguuugaaaaaacaaagaagcaacugagggaaaaugcugaggauaugggcaaugguuguuucaaaauauaccacaaaugugacaaugccugcauaggaucaaucagaaauggaacuuaugaccacgauguauacagggaugaagcauuaaacaaccgguuccagaucaagggaguugagcugaagucaggguacaaagauuggauccuauggauuuccuuugccauaucauguuuuuugcuuuguguugcuuuguugggguucaucaugugggccugccaaaagggcaacauuaggugcaacauuugcauuuga

SEQ ID NO: 43441 - RNA, 1701 nt, Artificial Sequence
  derived and/or modified CDS sequence (wt) from hemagglutinin__InfluenzaA__AHL96021
augaagacuaucauugcuuugagcuacauucuaugucugguuuucgcucaaaaacuuccuggaaaugacaauagcacggcaacgcugugccuugggcaccaugcaguaccaaacggaacgauagugaaaacaaucacgaaugaccgaauugaaguuacuaaugcuacugagcugguucagaauuccucaauaggugaaauaugcgacaguccucaucagauccuugauggagaaaauugcacacuaauagaugcucuauugggagacccucagugugauggcuuucaaaauaagaaaugggaccuuuuuguugaacgaagcaaagccuacagcaacuguuacccuuaugaugugccggauuaugccucccuuaggucacuaguugccucauccggcacacuggaguuuaacaaugaaagcuucaauugggcuggagucacucaaaacggaacaaguucugcuugcauaaggggaucuaagaguaguuucuuuaguagauuaaauugguugacccacuuaaacuucaaauacccagcauugaacgugacuaugccaaacaaugaacaauuugacaaauuguacauuugggggguucaccacccggguacggacaaggaccaaaucuuccuguaugcucaaucaucaggaagaaucacaguaucuaccaaaagaagccaacaagcuguaaucccgaauaucggaucuagacccagaauaaggaauaucccuagcagaauaagcaucuauuggacaauaguaaaaccgggagacauacuuuugauuaacagcacagggaaucuaauugcuccuagggguuacuucaaaauacgaagugggaaaagcucaauaaugagaucagaugcacccauuggcaaaugcaagucugaaugcaucacuccaaauggaagcauucccaaugacaaaccauuccaaaauguaaacaggaucacauacggggccugucccagauauguuaagcaaagcacucugaaauuggcaacaggaaugcgaaauguaccagagaaacaaacuagaggcauauuuggcgcaauagcggguuucauagaaaaugguugggagggaaugauggaugguugguacgguuucaggcaucaaaauucugagggaagaggacaagcagcagaucucaaaagcacucaagcagcaaucgaucaaaucaaugggaagcugaaucgauugaucgggaaaaccaacgagaaauuccaucagauugaaaaagaauucucagaaguagaagggagaauucaggaccuugagaaauauguugaggacacaaaaauagaucucuggucauacaacgcggagcuucuuguugcccuggagaaccaacauacaauugaucuaacugacucagaaaugaacaaacuguuugaaaaaacaaagaagcaacugagggaaaaugcugaggauaugggcaaugguuguuucaaaauauaccacaaaugugacaaugccugcauaggaucaaucagaaauggaacuuaugaccacgauguauacagggaugaagcauuaaacaaccgguuccagaucaagggaguugagcugaagucaggguacaaagauuggauccuauggauuuccuuugccauaucauguuuuuugcuuuguguugcuuuguugggguucaucaugugggccugccaaaagggcaacauuaggugcaacauuugcauuuga

SEQ ID NO: 43442 - RNA, 1701 nt, Artificial Sequence; identical to SEQ ID NO: 41880
  derived and/or modified CDS sequence (wt) from hemagglutinin__InfluenzaA__AHL96033

SEQ ID NO: 43443 - RNA, 1701 nt, Artificial Sequence
  derived and/or modified CDS sequence (wt) from hemagglutinin__InfluenzaA__AHL96045
augaaggcaauacuaguaguucugcuauacacauuugcaaccgcaaaugcagacacauuauguauagguuaucaugcgaacaauucaacagacacuguagacacaguacuagaaaagaauguaacaguaacacacucuguuaaccuucuagaagacaagcauaacgggaaacuaugcaaacuaagagggguagccccauugcauuuggguaaauguaacauugcuggcuggauccugggaaauccagagugugaaucacucuccacagcaaguucaugguccuacauuguggaaacaucuaguucagacaauggaacguguuacccaggagauuucaucaauuaugaggagcuaagagagcaauugagcucagugucaucauuugaaagguuugagauauuccccaagacaaguucauggcccaaucaugacucgaacaaaggugugacggcagcauguccucaugcuggagcaaaaagcuucuacaaaaauuuaauauggcuaguuaaaaaaggaaauucauacccaaagcucagcaaauccuacauuaaugauaaagggaaagaaguccucgugcuguggggcauucaccauccaucuacuacugcugaccaacaaagucucuaucagaaugcagaugcauauguuuuuguggggacaucaagauacagcaagaaguucaagccggaaauagcaauaagacccaaagugagggaucaagaagggagaaugaacuauuacuggacacuaauagagccgggagacaaaauaacauucgaagcaacuggaaaucuagugguaccgagauaugcguucgcaauggaaagaaaugcuggaucugguauuaucauuucagauacaccaguccacgauugcaauacaacuugucagacacccgagggugcuauaaacaccagccucccauuucagaauauacauccgaucacaauuggaaaauguccaaaguauguaaaaagcacaaaauugagacuggccacaggauugaggaaugucccgucuauucaaucuagaggccuauucggggccauugccggcuucauugaagggggguggacagggaugguagauggaugguacgguuaucaccaucaaaaugagcaggggucaggauaugcagccgaccugaagagcacacaaaaugccauugacaagauuacuaacaaaguaaauucuguuauugaaaagaugaauacacaguucacagcaguggguaaagaguucaaccaccuggaaaaaagaauagagaauuuaaauaaaaaaguugaugaugguuuccuggacauuuggacuuacaaugccgaacuguugguucuauuggaaaaugaaagaacuuuggacuaccacgauucaaaugugaagaacuuguaugaaaagguaagaaaccaguuaaaaaacaaugccaaggaaauuggaaacggcugcuuugaauuuuaccacaaaugcgauaacacgugcauggaaagugucaaaaaugggacuuaugacuacccaaaauacucagaggaagcaaaauuaaacagagaaaaaauagaugggguaaagcuggaaucaacaaggauuuaccagauuuuggcgaucuauucaacugucgccaguucauugguacugguagucucccugggggcaaucaguuucuggaugugcucuaaugggucucuacaguguagaauauguauuuaa

SEQ ID NO: 43444 - RNA, 1701 nt, Artificial Sequence; identical to SEQ ID NO: 42489
  derived and/or modified CDS sequence (wt) from hemagglutinin__InfluenzaA__AHL96056

SEQ ID NO: 43445 - RNA, 1701 nt, Artificial Sequence; identical to SEQ ID NO: 42558
  derived and/or modified CDS sequence (wt) from hemagglutinin__InfluenzaA__AHL96068

SEQ ID NO: 43446 - RNA, 1701 nt, Artificial Sequence; identical to SEQ ID NO: 42492
  derived and/or modified CDS sequence (wt) from hemagglutinin__InfluenzaA__AHL96080

SEQ ID NO: 43447 - RNA, 1701 nt, Artificial Sequence
  derived and/or modified CDS sequence (wt) from hemagglutinin__InfluenzaA__AHL96092
augaagacuaucauugcuuugagcuacauucuaugucugguuuucgcucaaaaacuuccuggaaaugacaauagcacggcaacgcugugccuugggcaccaugcaguaccaaacggaacgauagugaaaacaaucacgaaugaccgaauugaagucacuaaugcuacugagcugguucagaauuccucaauaggugaaauaugcgacaguccucaucagauccuugauggagaaaacugcacacuaauagaugcucuauugggagacccucagugugauggcuuucaaaauaagaaaugggaccuuuuuauugaacgaagcaaagccuacagcaacuguuacccuuaugaugugccggauuaugccucccuuaggucacuaguugccucauccggcacacuggaguuuaacaaugaaagcuucaauugggcuggggucacucaaaacggaacaaguucugcuugcauaaggggaucuaauaguaguuucuuuaguagauuaaauugguugacccacuuaaacuucaaauacccagcauugaacgugacuaugccaaacaaugaacaauuugacaaauuguacauuugggggguucaccacccggguacggacaaggaccaaaucuuccuguaugcucaaucaucaggaagaaucacaguaucuaccaaaagaagccaacaagcuguaaucccgaauaucggaucuagacccagaauaaggaauaucccuagcagaauaagcaucuauuggacaauaguaaaaccgggagacauacuuuugauuaacagcacagggaaucuaauugcuccuagggguuacuucaaaauacgaagugggaaaagcucaauaaugagaucagaugcacccauuggcaaaugcaagucugaaugcaucacuccaaauggaagcauucccaaugacaaaccauuccaaaauguaaacaggaucacauacggggccugucccagauauguuaagcaaagcacucugaaauuggcaacaggaaugcgaaauguaccagagaaacaaaccagaggcauauuuggcgcaauagcggguuucauagaaaaugguugggagggaaugguggaugguugguacgguuucaggcaucaaaauucugagggaagaggacaagcagcagaucucaaaagcacucaagcagcaaucgaucaaaucaaugggaagcugaaucgauugaucgggaaaaccaacgagaaauuccaucagauugaaaaagaauucucagaaguagaagggagaauucaggaccuugagaaauauguugaggacacaaaaauagaucucuggucauacaacgcggagcuucuuguugcccuggagaaccaacauacaauugaucuaacugacucagaaaugaacaaacuguuugaaaaaacaaagaagcaacugagggaaaaugcugaggauaugggcaaugguuguuucaaaauauaccacaaaugugacaaugccugcauaggaucaaucagaaauggaacuuaugaccacgauguauacagggaugaagcauuaaacaaccgguuccagaucaagggaguugagcugaagucaggguacaaagauuggauccuauggauuuccuuugccauaucauguuuuuugcuuuguguugcuuuguugggguucaucaugugggccugccaaaaaggcaacauuaggugcaacauuugcauuuga

SEQ ID NO: 43448 - RNA, 1701 nt, Artificial Sequence
  derived and/or modified CDS sequence (wt) from hemagglutinin__InfluenzaA__AHL96104
augaagacuaucauugcuuugagcuacauucuaugucugguuuucgcucaaaaacuuccuggaaaugacaauagcacggcaacgcugugccuugggcaccaugcaguaccaaacggaacgauagugaaaacaaucacgaaugaccgaauugaaguuacuaaugcuacugagcugguucagaauuccucaauaggugaaauaugcgacaguccucaucagauccuugauggagaaaauugcacacuaauagaugcucuauugggagacccucagugugauggcuuucaaaauaagaaaugggaccuuuuuguugaacgaagcaaagccuacagcaacuguuacccuuaugaugugccggauuaugccucccuuaggucacuaguugccucauccggcacacuggaguuuaacaaugaaagcuucaauuggacuggagucacucaaaacggaacaaguucugcuugcauaaggagaucuaauaguaguuucuuuaguagauuaaauugguugacccacuuaaacuucaaauacccagcauugaacgugacuaugccaaacaaugaacaauuugacaaauuguacauuuggggaguucaccacccggguacggacaaggaccaaaucuuccuguaugcucaaucaucaggaagaaucacaguaucuaccaaaagaagccaacaagcuguaaucccaaauaucggaucuagacccagaauaaggaauaucccuagcagaauaagcaucuauuggacaauaguaaaaccgggagacauacuuuugauuaacagcacagggaaucuaauugcuccuagggguuacuucaaaauacgaagugggaaaagcucaauaaugagaucagaugcacccauuggcaaaugcaagucugaaugcaucacuccaaauggaagcauucccaaugacaaaccauuccaaaauguaaacaggaucacauacggggccugucccagauauguuaagcaaagcacucugaaauuggcaacaggaaugcgaaauguaccagagagacaaacuagaggcauauuuggcgcaauagcggguuucauagaaaaugguugggagggaaugguggaugguugguacgguuucaggcaucaaaauucugagggaagaggacaagcagcagaucucaaaagcacucaagcagcaaucgaucaaaucaaugggaagcugaaucgauugaucgggaaaaccaacgagaaauuccaucagauugaaaaagaauucucagaaguagaagggagaauucaggaccuugagaaauauguugaggacacuaaaauagaucucuggucauacaacgcggagcuucuuguugcccuggagaaucaacauacaauugaucuaacugacucagaaaugaacaaacuguuugaaaaaacaaagaagcaacugagggaaaaugcugaggauaugggcaaugguuguuucaaaauauaccacaaaugugacaaugccugcauaggaucaaucagaaauggaacuuaugaccacaauguguacagggaugaagcauuaaacaaccgguuccagaucaagggaguugagcuuaagucaggguacaaagauuggauccuauggauuuccuuugccauaucauguuuuuugcuuuguguugcuuuguugggguucaucaugugggccugccaaaagggcaacauuaggugcaacauuugcauuuga

SEQ ID NO: 43449 - RNA, 1701 nt, Artificial Sequence
  derived and/or modified CDS sequence (wt) from hemagglutinin__InfluenzaA__AHL96116
augaagacuaucauugcuuugagcuacauucuaugucugguuuucgcucaaaaacuuccuggaaaugacaauagcacggcaacgcugugccuugggcaccaugcaguaccaaacggaacgauagugaaaacaaucacgaaugaccgaauugaaguuacuaaugcuacugagcugguucagaauuccucaauaggugaaauaugcgacaguccucaucagauccuugauggagaaaacuguacacuaauagaugcucuauugggagacccucagugugauggcuuucaaaauaagaaaugggaccuuuuuguugaacgaagcaaagccuacagcaacuguuacccuuaugaugugccggauuauaccucccuuaggucacuaguugccucauccggcacacuggaguuuaacaaugaaagcuucaauuggacuggagucacucaaaacggaacaaguucugcuugcauaaggagaucuaauaguaguuucuuuaguagauuaaauugguugacccacuuaaacuucaaauacccagcauugaacgugacuaugccaaacaaugaacaauuugacaaauuguacauuugggggguucaccacccggguacggacaaggaccaaaucuuccuguaugcucaaucaucaggaagaaucacaguaucuaccaaaagaagccaacaagcuguaaucccgaauaucggaucuagacccagaauaaggaauaucccuagcagaauaagcaucuauuggacaauaguaaaaccaggagacauacuuuugauuaacagcacagggaaucuaauugcuccuagggguuacuucaaaauacgaagugggaaaagcucaauaaugagaucagaugcacccauuggcaaaugcaagucugaaugcaucacuccaaauggaagcauuccaaaugacaaaccauuccaaaauguaaacaggaucacauacggggccugucccagauauguuaagcaaagcacucugaaauuggcaacaggaaugcgaaauguaccagagaaacaaacuagaggcauauuuggcgcaauagcggguuucauagaaaaugguugggagggaaugguggaugguugguacgguuucaggcaucaaaauucugagggaagaggacaagcagcagaucucaaaagcacccaagcagcaaucgaucaaaucaaugggaagcugaaucgauugaucgggaaaaccaacgagaaauuccaucagauugaaaaagaauucucagaaguagaagggagaauucaggaccuugagaaauauguugaggacacuaaaauagaucucuggucauacaacgcggagcuucuuguugcccuggagaaccaacauacaauugaucuaacugacucagaaaugaacaaacuguuugaaaaaacaaagaagcaacugagggaaaaugcugaggauaugggcaaugguuguuucaaaauauaccacaaaugugacaaugccugcauaggaucaaucagaaauggaacuuaugaccacgauguauacagggaugaagcauuaaacaaccgguuccagaucaagggaguugagcugaagucaggguacaaagauuggauccuauggauuuccuuugccauaucauguuuuuugcuuuguguugcuuuguugggguucaucaugugggccugccaaaagggcaacauuaggugcaacauuugcauuuga

SEQ ID NO: 43450 - RNA, 1701 nt, Artificial Sequence; identical to SEQ ID NO: 41879
  derived and/or modified CDS sequence (wt) from hemagglutinin__InfluenzaA__AHL96128

SEQ ID NO: 43451 - RNA, 1701 nt, Artificial Sequence; identical to SEQ ID NO: 42489
  derived and/or modified CDS sequence (wt) from hemagglutinin__InfluenzaA__AHL96152

SEQ ID NO: 43452 - RNA, 1701 nt, Artificial Sequence
  derived and/or modified CDS sequence (wt) from hemagglutinin__InfluenzaA__AHL96164
augaagacuaucauugcuuugagcuacauucuaugucugguuuucgcucaaaaacuuccuggaaaugacaauagcacggcaacgcugugccuugggcaccaugcaguaccaaacggaacgauagugaaaacaaucacgaaugaccgaauugaagucacuaaugcuacugagcugguucagaauuccucaauaggugaaauaugcgacaguccucaucagauccuugauggagaaaacugcacacuaauagaugcucuauugggagacccucagugugauggcuuucaaaauaagaaaugggaccuuuuuguugaacgaagcaaagccuacagcaacuguuacccuuaugaugugccggauuaugccucccuuaggucacuaguugccucauccggcacacuggaguuuaacaaugaaagcuucaauugggcuggggucacucaaaacggaacaaguucugcuugcauaaggggaucuaauaguaguuucuuuaguagauuaaauugguugacccacuuaaacuucaaauacccagcauugaacgugacuaugccaaacaaugaacaauuugacaaauuguacauuugggggguucaccacccggguacggacaaggaccaaaucuuccuguaugcucaaucaucaggaagaaucacaguaucuaccaaaagaagccaacaagcuguaaucccgaauaucggaucuagacccagaauaaggaauaucccuagcagaauaagcaucuauuggacaauaguaaaaccgggagacauacuuuugauuaacagcacagggaaucuaauugcuccuagggguuacuucaaaauacgaagugggaaaagcucaauaaugagaucagaugcacccauuggcaaaugcaagucugaaugcaucacuccaaauggaagcauucccaaugacaaaccauuccaaaauguaaacaggaucacauacggggccugucccagauauguuaagcaaagcacucugaaauuggcaacaggaaugcgaaauguaccagagaaacaaaccagaggcauauuuggcgcaauagcggguuucauagaaaaugguugggagggaaugguggaugguugguacgguuucaggcaucaaaauucugagggaagaggacaagcagcagaucucaaaagcacucaagcagcaaucgaucaaaucaaugggaagcugaaucgauugaucgggaaaaccaacgagaaauuccaucagauugaaaaagaauucucagaaguagaagggagaauucaggaccuugagaaauauguugaggacacaaaaauagaucucuggucauacaacgcggagcuucuuguugcccuggagaaccaacauacaauugaucuaacugacucagaaaugaacaaacuguuugaaaaaacaaagaagcaacugagggaaaaugcugaggauaugggcaaugguuguuucaaaauauaccacaaaugugacaaugccugcauaggaucaaucagaaauggaacuuaugaccacgauguauacagggaugaagcauuaaacaaccgguuccagaucaagggaguugagcugaagucaggguacaaaaauuggauccuauggauuuccuuugccauaucauguuuuuugcuuuguguugcuuuguugggguucaucaugugggccugccaaaagggcaacauuaggugcaacauuugcauuuga

SEQ ID NO: 43453 - RNA, 1701 nt, Artificial Sequence; identical to SEQ ID NO: 42489
  derived and/or modified CDS sequence (wt) from hemagglutinin__InfluenzaA__AHL96176

SEQ ID NO: 43454 - RNA, 1701 nt, Artificial Sequence
  derived and/or modified CDS sequence (wt) from hemagglutinin__InfluenzaA__AHL96188
augaagacuaucauugcuuugagcuacauucuaugucugguuuucgcucaaaaacuuccuggaaaugacaauagcacggcaacgcugugccuugggcaccaugcaguaccaaacggaacgauagugaaaacaaucacgaaugaccgaauugaaguuacuaaugcuacugagcugguucagaauuccucaauaggugaaauaugcgacaguccucaucagauccuugauggagaaaacugcacacuaauagaugcucuauugggagacccucagugugauggcuuucaaaauaagaaaugggaccuuuuuguugaacgaagcaaagccuacagcaacuguuacccuuaugaugugccggauuaugccucccuuaggucacuaguugccucauccggcacacuggaguuuaacaaugaaagcuucaauugggcuggagucacucaaaacggaacaaguucugcuugcauaaggggaucuaauaguaguuucuuuaguagauuaaauugguugacccacuuaaacuucaaauacccagcauugaacgugacuaugccaaacaaugagcaauuugacaaauuguacauuugggggguccaccacccggguacggacaaggaccaaaucuuccuguaugcucaaucaucaggaagaaucacaguaucuaccaaaagaagccaacaagcuguaaucccgaauaucggaucuagacccagaauaaggaauaucccuagcagaauaagcaucuauuggacaauaguaaaaccgggagacauacuuuugauuaacagcacagggaaucuaauugcuccuagggguuacuucaaaauacgaagugggaaaagcucaauaaugagaucagaugcacccauuggcaaaugcaaaucugaauguaucacuccaaauggaagcauucccaaugacaaaccauuccaaaauguaaacaggaucacauacggggccugucccagauauguuaagcaaagcacucugaaauuggcaacaggaaugcgaaauguaccagagaaacaaacuagaggcauauuuggcgcaauagcggguuucauagaaaaugguugggagggaaugguggaugguugguacgguuucaggcaucaaaauucugagggaagaggacaagcagcagaucucaaaagcacucaagcagcaaucgaucaaaucaaugggaagcugaauagauugaucgggaaaaccaacgagaaauuccaucagauugaaaaagaauucucagaaguagaagggagaauucaggaccuugagaaauauguugaggacacaaaaauagaucucuggucauacaacgcggagcuucuuguugcccuggagaaccaacauacaauugaucuaacugacucagaaaugaacaaacuguuugaaaaaacaaagaagcaacugagggaaaaugcugaggauaugggcaaugguuguuucaaaauauaccacaaaugugacaaugccugcauaggaucaaucagaaauggaacuuaugaccacgauguauacagggaugaagcauuaaacaaccgguuccagaucaagggaguugagcugaagucaggguacaaagauuggauccuauggauuuccuuugccauaucauguuuuuugcuuuguguugcuuuguugggguucaucaugugggccugccaaaagggcaacauuaggugcaacauuugcauuuga

SEQ ID NO: 43455 - RNA, 1701 nt, Artificial Sequence
  derived and/or modified CDS sequence (wt) from hemagglutinin__InfluenzaA__AHL96200
augaagacuaucauugcuuugagcuacauucuaugucugguuuucgcucaaaaacuuccuggaaaugacaauagcacggcaacgcugugccuugggcaccaugcaguaccaaacggaacgauagugaaaacaaucacgaaugaccgaauugaaguuacuaaugcuacugagcugguucagaauuccucaauaggugaaauaugcgacaguccucaucagguccuugauggagaaaacugcacacuaauagaugcucuauugggagacccucagugugauggcuuucaaaauaagaaaugggaccuuuuuguugaacgaagcaaagccuacagcaacuguuacccuuaugaugugccggauuaugccucccuuaggucacuaguugccucauccggcacacuggaguuuaacaaugaaagcuucaauugggcuggagucacucaaaacggaacaaguucugcuugcauaaggggaucuaauaguaguuucuuuaguagauuaaauugguugacccacuuaaacuucaaauacccagcauugaacgugacuaugccaaacaaugagcaauuugacaaauuguacauuugggggguucaccacccggguacggacaaggaccaaaucuuccuguaugcucaaucaucaggaagaaucacaguaucuaccaaaagaagccaacaagcuguaaucccgaauaucggaucuagacccagaauaaggaauaucccuagcagaauaagcaucuauuggacaauaguaaaaccgggagacauacuuuugauuaacagcacagggaaucuaauugcuccuagggguuacuucaaaauacgaagugggaaaagcucaauaaugagaucagaugcacccauuggcaaaugcaaaucugaauguaucacuccaaauggaagcauucccaaugacaaaccauuccaaaauguaaacaggaucacauacggggccugucccagauauguuaagcaaagcacucugaaauuggcaacaggaaugcgaaauguaccagagaaacaaacuagaggcauauuuggcgcaauagcggguuucauagaaaaugguugggagggaaugguggaugguugguacgguuucaggcaucaaaauucugagggaagaggacaagcagcagaucucaaaagcacucaagcagcaaucgaucaaaucaaugggaagcugaaucgauugaucgggaaaaccaacgagaaauuccaucagauugaaaaagaauucucagaaguagaagggagaauucaggaccuugagaaauauguugaggacacaaaaauagaucucuggucauacaacgcggagcuucuuguugcccuggagaaccaacauacaauugaucuaacugacucagaaaugaacaaacuguuugaaaaaacaaagaagcaacugagggaaaaugcugaggauaugggcaaugguuguuucaaaauauaccacaaaugugacaaugccugcauaggaucaaucagaaauggaacuuaugaccacgauguauacagggaugaagcauuaaacaaccgguuccagaucaagggaguugagcugaagucaggguacaaagauuggauccuauggauuuccuuugccauaucauguuuuuugcuuuguguugcuuuguugggguucaucaugugggccugccaaaagggcaacauuaggugcaacauuugcauuuga

SEQ ID NO: 43456 - RNA, 1701 nt, Artificial Sequence
  derived and/or modified CDS sequence (wt) from hemagglutinin__InfluenzaA__AHL96212
augaagacuaucauugcuuugagcuacauucuaugucugguuuucgcucaaaaacuuccuggaaaugacaauagcacggcaacgcugugccuugggcaccaugcaguaccaaacggaacgauagugaaaacaaucacgaaugaccgaauugaaguuacuaaugcuacugagcugguucagaauuccucaauaggugaaauaugcgacaguccucaucagauccuugauggagaaaauugcacacuaauagaugcucuauugggagacccucagugugauggcuuucaaaauaagaaaugggaccuuuuuguugaacgaagcaaagccuacagcaacuguuacccuuaugaugugccggauuaugccucccuuaggucacuaguugccucauccggcacacuggaguuuaacaaugaaagcuucaauuggacuggagucacucaaaacggaacaaguucugcuugcauaaggagaucuaauaguaguuucuuuaguagauuaaauugguugacccacuuaaacuucaaauacccagcauugaacgugacuaugccaaacaaugaacaauuugacaaauuguacauuuggggaguucaccacccggguacggacaaggaccaaaucuuccuguaugcucaaucaucaggaagaaucacaguaucuaccaaaagaagccaacaagcuguaaucccaaauaucggaucuagacccagaauaaggaauaucccuagcagaauaagcaucuauuggacaauaguaaaaccgggagacauacuuuugauuaacagcacagggaaucuaauugcuccuagggguuacuucaaaauacgaagugggaaaagcucaauaaugagaucagaugcacccauuggcaaaugcaagucugaaugcaucacuccaaauggaagcauucccaaugacaaaccauuccaaaauguaaacaggaucacauacggggccugucccagauauguuaagcaaagcacucugaaauuggcaacaggaaugcgaaauguaccagagaaacaaacuagaggcauauuuggcgcaauagcggguuucauagaaaaugguugggagggaaugguggaugguugguacgguuucaggcaucaaaauucugagggaagaggacaagcagcagaucucaaaagcacucaagcagcaaucgaucaaaucaauggaaagcugaaucgauugaucgggaaaaccaacgagaaauuccaucagauugaaaaagaauucucagaaguagaagggagaauucaggaccuugagaaauauguugaggacacuaaaauagaucucuggucauacaacgcggagcuucuuguugcccuggagaaucaacauacaauugaucuaacugacucagaaaugaacaaacuguuugaaaaaacaaagaagcaacugagggaaaaugcugaggauaugggcaaugguuguuucaaaauauaccacaaaugugacaaugccugcauaggaucaaucagaaauggaacuuaugaccacaauguguacagggaugaagcauuaaacaaccgguuccagaucaagggaguugagcuuaagucaggguacaaagauuggauccuauggauuuccuuugccauaucauguuuuuugcuuuguguugcuuuguugggguucaucaugugggccugccaaaagggcaacauuaggugcaacauuugcauuuga

SEQ ID NO: 43457 - RNA, 1701 nt, Artificial Sequence; identical to SEQ ID NO: 42479
  derived and/or modified CDS sequence (wt) from hemagglutinin__InfluenzaA__AHL96224

SEQ ID NO: 43458 - RNA, 1701 nt, Artificial Sequence
  derived and/or modified CDS sequence (wt) from hemagglutinin__InfluenzaA__AHL96236
augaagacuaucauugcuuugagcuacauucuaugucugguuuucgcucaaaaacuuccuggaaaugacaauagcacggcaacgcugugccuugggcaccaugcaguaccaaacggaacgauagugaaaacaaucacgaaugaccgaauugaaguuacuaaugcuacugagcugguucagaauuccucaaugggugaaauaugcgacaguccucaucagauccuugauggagaaaacuguacacuaauagaugcucuauugggagacccucagugugauggcuuucaaaauaagaaaugggaccuuuuuguugaacgaagcaaagccuacagcaacuguuacccuuaugaugugccggauuaugccucccuuaggucacuaguugccucauccggcacacuggaguuuaacaaugaaagcuucaauuggacuggagucacucaaaacggaacaaguucugcuugcauaaggagaucuaauaguaguuucuuuaguagauuaaauugguugacccacuuaaacuucaaauacccagcauugaacgugacuaugccaaacaaugaacaauuugacaaauuguacauuugggggguucaccacccggguacggacaaggaccaaaucuuccuguaugcucaaucaucaggaagaaucacaguaucuaccaaaagaagccaacaagcuguaaucccgaauaucggaucuagacccagaauaaggaauaucccuagcagaauaagcaucuauuggacaauaguaaaaccaggagacauacuuuugauuaacagcacagggaaucuaauugcuccuagggguuacuucaaaauacgaagugggaaaagcucaauaaugagaucagaugcacccauuggcaaaugcaagucugaaugcaucacuccaaauggaagcauuccaaaugacaaaccauuccaaaauguaaacaggaucacauacggggccugucccagauauguuaagcaaagcacucugaaauuggcaacaggaaugcgaaauguaccagagaaacaaacuagaggcauauuuggcgcaauagcggguuucauagaaaaugguugggagggaaugguggaugguugguacgguuucaggcaucaaaauucugagggaagaggacaagcagcagaucucaaaagcacucaagcagcaaucgaucaaaucaaugggaagcugaaucgauugaucgggaaaaccaacgagaaauuccaucagauugaaaaagaauucucagaaguagaagggagaauucaggaccuugagaaauauguugaagacacuaaaauagaucucuggucauacaacgcggagcuucuuguugcccuggagaaccaacauacaauugaucuaacugacucagaaaugaacaaacuguuugaaaaaacaaagaagcaacugagggaaaaugcugaggauaugggcaaugguuguuucaaaauauaccacaaaugugacaaugccugcauagaaucaaucagaaauggaacuuaugaccacgauguauacagggaugaagcauuaaacaaccgguuccagaucaagggaguugagcugaagucaggguacaaaaauuggauccuauggauuuccuuugccauaucauguuuuuugcuuuguguugcuuuguugggguucaucaugugggccugccaaaagggcaacauuaggugcaacauuugcauuuga

SEQ ID NO: 43459 - RNA, 1701 nt, Artificial Sequence
  derived and/or modified CDS sequence (wt) from hemagglutinin__InfluenzaA__AHL96248
augaagacuaucauugcuuugggcuacauucuaugucugguuuucgcucaaaaacuuccuggaaaugacaauagcacggcaacgcugugccuugggcaccaugcaguaccaaacggaacgauagugaaaacaaucacgaaugaccgaauugaaguuacuaaugcuacugagcugguucagaauuccucaauaggugaaauaugcgacaguccucaucagauccuugauggagaaaacuguacacuaauagaugcucuauugggagacccucagugugauggcuuucaaaauaagaaaugggaccuuuuuauugaacgaagcaaagccuacagcaacuguuacccuuaugaugugccggauuaugccucccuuaggucacuaguugccucauccggcacacuggaguuuaacaaugaaagcuucaauuggacuggagucacucaaaacggaacaaguucugcuugcauaaggagaucuaauaguaguuucuuuaguagauuaaauugguugacccacuuaaacuucaaauacccagcauugaacgugacuaugccaaacaaugaacaauuugacaaauuguacauuugggggguucaccacccggguacggacaaggaccaaaucuuccuguaugcucaaucaucaggaagaaucacaguaucuaccaaaagaagccaacaagcuguaaucccgaauaucggaucuagacccagaauaaggaauaucccuagcagaauaagcaucuauuggacaauaguaaaaccaggagacauacuuuugauuaacagcacagggaaucuaauugcuccuagggguuacuucaaaauacgaagugggaaaagcucaauaaugagaucagaugcacccauuggcaaaugcaagucugaaugcaucacuccaaauggaagcauuccaaaugacaaaccauuccaaaauguaaacaggaucacauacggggccugucccagauauguuaagcaaagcacucugaaauuggcaacaggaaugcgaaauguaccagagaaacaaacuagaggcauauuuggcgcaauagcggguuucauagaaaaugguugggagggaaugguggaugguugguacgguuucaggcaucaaaauucugagggaagaggacaagcagcagaucucaaaagcacucaagcagcaaucgaucaaaucaaugggaagcugaaucgauugaucgggaaaaccaacgagaaauuccaucagauugaaaaagaauucucagaaguagaagggagaauucaggaccuugagaaauauguugaggacacuaaaauagaucucuggucauacaacgcggagcuucuuguugcccuggagaaccaacauacaauugaucuaacugacucagaaaugaacaaacuguuugaaaaaacaaagaagcaacugagggaaaaugcugaggauaugggcaaugguuguuucaaaauauaccacaaaugugacaaugccugcauaggaucaaucagaaauggaacuuaugaccacgauguauacagggaugaagcauuaaacaaccgguuccagaucaagggaguugagcugaagucaggguacaaagauuggauccuauggauuuccuuugccauaucauguuuuuugcuuuguguugcuuuguugggguucaucaugugggccugccaaaagggcaacauuaggugcaacauuugcauuuga

SEQ ID NO: 43460 - RNA, 1701 nt, Artificial Sequence; identical to SEQ ID NO: 42489
  derived and/or modified CDS sequence (wt) from hemagglutinin__InfluenzaA__AHL96260

SEQ ID NO: 43461 - RNA, 1701 nt, Artificial Sequence; identical to SEQ ID NO: 41879
  derived and/or modified CDS sequence (wt) from hemagglutinin__InfluenzaA__AHL96274

SEQ ID NO: 43462 - RNA, 1701 nt, Artificial Sequence; identical to SEQ ID NO: 42489
  derived and/or modified CDS sequence (wt) from hemagglutinin__InfluenzaA__AHL96304

SEQ ID NO: 43463 - RNA, 1701 nt, Artificial Sequence; identical to SEQ ID NO: 42100
  derived and/or modified CDS sequence (wt) from hemagglutinin__InfluenzaA__AHL96318

SEQ ID NO: 43464 - RNA, 1701 nt, Artificial Sequence; identical to SEQ ID NO: 42489
  derived and/or modified CDS sequence (wt) from hemagglutinin__InfluenzaA__AHL96330

SEQ ID NO: 43465 - RNA, 1701 nt, Artificial Sequence
  derived and/or modified CDS sequence (wt) from hemagglutinin__InfluenzaA__AHL96342
augaagacuaucauugcuuugagcuacauucuaugucugguuuucgcucaaaaacuuccuggaaaugacaauagcacggcaacgcugugccuugggcaccaugcaguaccaaacggaacgauagugaaaacaaucacgaaugaccaaauugaaguuacuaaugcuacugagcugguucagaauuccucaauaggugaaauaugcgacaguccucaucagauccuugauggggaaaacugcacacuaauagaugcucuauugggagacccucagugugauggcuuucaaaauaagaaaugggaccuuuuuguugaacgaagcaaagccuacagcaacuguuacccuuaugaugugccggauuaugccucccuuaggucacuaguugccucauccggcacacuggaguuuaacaaugaaagcuucaauugggcuggagucacucaaaacggaacaaguucugcuugcauaaggggaucuaauaguaguuucuuuaguagauuaaauugguugacccacuuaaacuucaaguacccagcauugaacgugacuaugccaaacaaugaacaauuugacaaauuguacauuugggggguucaccacccggguacggacaaggaccaaaucuuccuguaugcucaaucaucaggaagaaucacaguaucuaccaaaagaagccaacaagcuguaaucccgaauaucggaucuagacccagaauaaggaauaucccuagcagaauaagcaucuauuggacaauaguaaaaccgggagacauacuuuugauuaacagcacagggaaucuaauugcuccuagggguuacuucaaaauacgaagugggaaaagcucaauaaugagaucagaugcacccauuggcaaaugcaagucugaaugcaucacuccaaauggaagcauucccaaugacaaaccauuccaaaauguaaacaggaucacauacggggccugucccagauauguuaagcaaagcacucugaaauuggcaacaggaaugcgaaauguaccagagaaacaaacuagaggcauauuuggcgcaauagcggguuucauagaaaaugguugggagggaaugguggaugguugguacgguuucaggcaucaaaauucugagggaagaggacaagcagcagaucucaaaagcacucaagcagcaaucgaucaaaucaaugggaagcugaaucgauugaucgggaaaaccaacgagaaauuccaucagauugagaaagaauucucagaaguagaagggagaauucaggaccuugagaaauauguugaggacacaaaaauagaucucuggucauacaacgcagagcuucuuguugcccuggagaaccaacauacaauugaucuaacugacucagaaaugaacaaacuguuugaaaaaacaaagaagcaacugagggaaaaugcugaggauaugggcaaugguuguuucaaaauauaccacaaaugugacaaugccugcauaggaucaaucagaaauggaacuuaugaccacgauguauacagggaugaagcauuaaacaaccgguuccagaucaagggaguugagcugaagucaggguacaaagauuggauccuauggauuuccuuugccauaucauguuuuuugcuuuguguugcuuuguugggguucaucaugugggccugccaaaagggcaacauuaggugcaacauuugcauuuga

SEQ ID NO: 43466 - RNA, 1701 nt, Artificial Sequence
  derived and/or modified CDS sequence (wt) from hemagglutinin__InfluenzaA__AHL96354
augaagacuaucauugcuuugagcuacauucuaugucugguuuucgcucaaaaacuuccuggaaaugacaauagcacggcaacgcugugccuugggcaccaugcaguaccaaacggaacgauagugaaaacaaucacgaaugaccgaauugaaguuacuaaugcuacugagcugguucagaauuccucaauaggugaaauaugcgacaguccucaucagauccuugauggagaaaacugcacacuaauagaugcucuauugggagacccucagugugauggcuuucaaaauaagaaaugggaccuuuuuguugaacgaagcaaagccuacagcaacuguuacccuuaugaugugccggauuaugccucccuuaggucacuaguugccucauccggcacacuggaguuuaacaaugaaagcuucaauugggcuggagucacucaaaacggaacaaguucugcuugcauaaggggaucuaauaguaguuucuuuaguagauuaaauugguugacccacuuaaacuucaaauacccagcauugaacgugacuaugccaaacaaugagcaauuugacaaauuguacauuugggggguucaccacccggguacggacaaggaccaaaucuuccuguaugcucaaucaucaggaagaaucacaguaucuaccaaaagaagccaacaagcuguaaucccgaauaucggaucuagacccagaauaaggaauaucccuagcagaauaagcaucuauuggacaauaguaaaaccgggagacauacuuuugauuaacagcacagggaaucuaauugcuccuagggguuacuucaaaauacgaagugggaaaagcucaauaaugagaucagaugcacccauuggcaaaugcaaaucugaauguaucacuccaaauggaagcauucccaaugacaaaccauuccaaaauguaaacaggaucacauacggggccugucccagauauguuaagcaaagcacucugaaauuggcaacaggaaugcgaaauguaccagagaaacaaacuagaggcauauuuggcgcaauagcggguuucauagaaaaugguugggagggaaugguggaugguugguacgguuucaggcaucuaaauucugagggaagaggacaagcagcagaucucaaaagcacucaagcagcaaucgaucaaaucaaugggaagcugaaucgauugaucgggaaaaccaacgagaaauuccaucagauugaaaaagaauucucagaaguagaagggagaauucaggaccuugagaaauauguugaggacacaaaaauagaucucuggucauacaacgcggagcuucuuguugcccuggagaaccaacauacaauugaucuaacugacucagaaaugaacaaacuguuugaaaaaacaaagaagcaacugagggaaaaugcugaggauaugggcaaugguuguuucaaaauauaccacaaaugugacaaugccugcauaggaucaaucagaaauggaacuuaugaccacgauguauacagggaugaagcauuaaacaaccgguuccagaucaagggaguugagcugaagucaggguacaaagauuggauccuauggauuuccuuugccauaucauguuuuuugcuuuguguugcuuuguugggguucaucaugugggccugccaaaagggcaacauuaggugcaacauuugcauuuga

SEQ ID NO: 43467 - RNA, 1701 nt, Artificial Sequence
  derived and/or modified CDS sequence (wt) from hemagglutinin__InfluenzaA__AHL96366
augaagacuaucauugcuuugagcuacauucuaugucugguuuucgcucaaaaacuuccugaaaaugacaauagcacggcaacgcugugccuugggcaccaugcaguaccaaacggaacgauagugaaaacaaucacgaaugaccgaauugaagucacuaaugcuacugagcugguucagaauuccucaauaggugaaauaugcgacaguccucaucagauccuugauggagaaaacugcacacuaauagaugcucuauugggagacccucagugugauggcuuucaaaauaagaaaugggaccuuuuuguugaacgaagcaaagccuacagcaacuguuacccuuaugaugugccggauuaugccucccuuaggucacuaguugccucauccggcacacuggaguuuaacaaugaaagcuucaauugggcuggggucacucaaaacggaacaaguucugcuugcauaaggggaucuaauaguaguuucuuuaguagauuaaauugguugacccacuuaaacuucaaauacccagcauugaacgugacuaugccaaacaaugaacaauuugacaaauuguacauuugggggguucaccacccggguacggacaaggaccaaaucuuccuguaugcucaaucaucaggaagaaucacaguaucuaccaaaagaagccaacaagcuguaaucccgaauaucggaucuagacccagaauaaggaauaucccuagcagaauaagcaucuauuggacaauaguaaaaccgggagacauacuuuugauuaacagcacagggaaucuaauugcuccuagggguuacuucaaaauacgaagugggaaaagcucaauaaugagaucagaugcacccauuggcaaaugcaagucugaaugcaucacuccaaauggaagcauucccaaugacaaaccauuccaaaauguaaacaggaucacauacggggccugucccagauauguuaagcaaagcacucugaaauuggcaacaggaaugcgaaauguaccagagaaacaaaccagaggcauauuuggcgcaauagcggguuucauagaaaaugguugggagggaaugguggaugguugguacgguuucaggcaucaaaauucugagggaagaggacaagcagcagaucucaaaagcacucaagcagcaaucgaucaaaucaaugggaagcugaaucgauugaucgggaaaaccaacgagaaauuccaucagauugaaaaagaauucucagaaguagaagggagaauucaggaccuugagaaauauguugaggacacaaaaauagaucucuggucauacaacgcggagcuucuuguugcccuggagaaccaacauacaauugaucuaacugacucagaaaugaacaaacuguuugaaaaaacaaagaagcaacugagggaaaaugcugaggauaugggcaaugguuguuucaaaauauaccacaaaugugacaaugccugcauaggaucaaucagaaauggaacuuaugaccacgauguauacagggaugaagcauuaaacaaccgguuccagaucaagggaguugagcugaagucaggguacaaagauuggauccuauggauuuccuuugccauaucauguuuuuugcuuuguguugcuuuguugggguucaucaugugggccugccaaaagggcaacauuaggugcaacauuugcauuuga

SEQ ID NO: 43468 - RNA, 1701 nt, Artificial Sequence; identical to SEQ ID NO: 42492
  derived and/or modified CDS sequence (wt) from hemagglutinin__InfluenzaA__AHL96378

SEQ ID NO: 43469 - RNA, 1701 nt, Artificial Sequence; identical to SEQ ID NO: 41879
  derived and/or modified CDS sequence (wt) from hemagglutinin__InfluenzaA__AHL96390

SEQ ID NO: 43470 - RNA, 1701 nt, Artificial Sequence
  derived and/or modified CDS sequence (wt) from hemagglutinin__InfluenzaA__AHL96402
augaagacuaucauugcuuugagcuacauucuaugucugguuuucgcucaaaaaauuccuggaaaugacaauagcacggcaacgcugugccuugggcaccaugcaguaccaaacggaacgauagugaaaacaaucacgaaugaccgaauugaaguuacuaaugcuacugagcugguucagaauuccucaauaggugaaauaugcgacaguccucaucagauccuugauggagaaaacuguacacuaauagaugcucuauugggagacccucagugugauggcuuucaaaauaagaaaugggaccuuuuuguugaacgaagcaaagccuacagcaacuguuacccuuaugaugugccggauuaugccucccuuaggucacuaguugccucauccggcacacuggaguuuaacaaugaaagcuucaauuggacuggagucacucaaaacggaacaaguucugcuugcauaaggggaucuaauaguaguuucuuuaguagauuaaauugguugacccacuuaaacuucaaauacccagcauugaacgugacuaugccaaacaaugaacaauuugacaaauuguacauuugggggguucaccacccggguacggacaaggaccaaaucuuccuguaugcucaaucaucaggaagaaucacaguaucuaccaaaagaagccaacaagcuguaaucccgaauaucggaucuagacccagaauaaggaauaucccuagcagaauaagcaucuauuggacaauaguaaaaccaggagacauacuuuugauuaacagcacagggaaucuaauugcuccuagggguuacuucaaaauaagaagugggaaaagcucaauaaugagaucagaugcacccauuggcaaaugcaagucugaaugcaucacuccaaauggaagcauuccaaaugacaaaccauuccaaaauguaaacaggaucacauacggggccugucccagauauguuaagcaaagcacucugaaauuggcaacaggaaugcgaaauguaccagagaaacaaacuagaggcauauuuggcgcaauagcggguuucauagaaaaugguugggagggaaugguggaugguugguacgguuucaggcaucaaaauucugagggaagaggacaagcagcagaucucaaaagcacucaagcagcaaucgaucaaaucaaugggaagcugaaucgauugaucgggaaaaccaacaagaaauuccaucagauugaaaaagaauucucagaaguagaagggagaauucaggaccuugagaaauauguugaggacacuaaaauagaucucuggucauacaacgcggagcuucuuguugcccuggagaaccaacauacaauugaucuaacugacucagaaaugaacaaacuguuugaaaaaacaaagaagcaacugagggaaaaugcugaggauaugggcaaugguuguuucaaaauauaccacaaaugugacaaugccugcauaggaucaaucagaaauggaacuuaugaccacgauguauacagggaugaagcauuaaacaaccgguuccagaucaagggaguugagcugaagucaggguacaaagauuggauccuauggauuuccuuugccauaucauguuuuuugcuuuguguugcuuuguugggguucaucaugugggccugccaaaagggcaacauuaggugcaacauuugcauuuga

SEQ ID NO: 43471 - RNA, 1701 nt, Artificial Sequence; identical to SEQ ID NO: 41880
  derived and/or modified CDS sequence (wt) from hemagglutinin__InfluenzaA__AHL96414

SEQ ID NO: 43472 - RNA, 1701 nt, Artificial Sequence; identical to SEQ ID NO: 42489
  derived and/or modified CDS sequence (wt) from hemagglutinin__InfluenzaA__AHL96426

SEQ ID NO: 43473 - RNA, 1701 nt, Artificial Sequence
  derived and/or modified CDS sequence (wt) from hemagglutinin__InfluenzaA__AHL96438
augaagaccaucauugcuuugagcuacauucuaugccuaguuuucgcucaagaacuuccuggaaaugacgacagcacggcaacgcugugccuugggcaccaugcagugccaaacggaacgauagugaaaacaaucacgaaugaccaaauugaaguuacuaaugcuacugagcugguucagaguuccucaacaggugaaauaugcaacaguccucaucagauccuugauggagaaaacugcacacuaauagaugcucuauugggagacccucagugugauggcuuccaaaacaagaaaugggaccuuuuuguugaacgaagcaaagcccacagcaacuguuacccuuaugaugugccggauuaugccucccuuaggucacuaguugccucauccggcacacuggaguuuaacaaugaaagcuucaauuggacuggagucacucaaaacggaacaagcucugcuugcauaaggagaucuaauaauaguuucuuuaguagauugaauugguugacccacuuaaacuucaaauacccagcauugaacgugacuaugccaaacaaugaacaauuugacaaauuguacauuugggggguucaccacccggguacggacaaggaccaaaucuuccuguaugcucaagcaucaggaagaaucacaguaucuaccaaaagaagccaacaagcuguaauuccgaauaucggaucuagacccagaguaaggaauaucccuagcagaguaagcaucuauuggacaauaguaaaaccgggagacauacuuuugauuaacagcacagggaaucuaauugcuccuagggguuacuucaaaauacgaagugggaaaagcucaauaaugagaucagaugcacccauuggcaaaugcaguuccgcaugcaucacuccaaauggaagcauucccaaugacaaaccauuccaaaauguaaacaggaucacauacggggccugucccagauaugucaagcaaaacacucugaaauuggcaacaggaaugagaaauguaccagagaaacaaacuagaggcauauuuggcgcaauagcggguuucauagaaaaugguugggagggaaugguggaugguugguacgguuucaggcaucaaaauucugagggaaggggacaagcagcagaucucaaaagcacucaagcagcaaucgaucaaaucaaugggaagcugaauagauugaucgggaaaaccaacgagaaauuccaucagauugaaaaagaauucucagaagucgaagggagaauucaggaccuugagaaauauguugaggacacuaaaauagaucucuggucauacaacgcggagcuucuuguugcccuggagaaccaacacacaauugaucuaacugacucagaaaugaacaaacuguuugaaaaaacaaagaagcaacugagggaaaaugcugaggauaugggcaaugguuguuucaaaauauaccacaaaugugacaaugccugcauaggaucaaucagaaauggaacuuaugaucacgauguguacagagaugaagcauuaaacaaccgauuccagaucaagggaguugagcugaagucaggguacaaagauuggauccuauggauuuccuuugccauaucauguuuuuugcuuuguguugcuuuguugggguucaucaugugggccugccaaaaaggcaacauuaggugcaacauuugcauuuga

SEQ ID NO: 43474 - RNA, 1701 nt, Artificial Sequence
  derived and/or modified CDS sequence (wt) from hemagglutinin__InfluenzaA__AHL96450
augaagacuaucauugcuuugagcuacauucuaugucugguuuucgcucaaaaacuuccuggaaaugacaauagcacggcaacgcugugccuugggcaccaugcaguaccaaacggaacgauagugaaaacaaucacgaaugaccgaauugaaguuacuaaugcuacugagcugguucagaauuccucaauaggugaaauaugcgacaguccucaucagauccuugauggagaaaacugcacacuaauagaugcucuauugggagacccucagugugauggcuuucaaaauaagaaaugggaccuuuuuguugaacgaagcaaagccuacagcaacuguuacccuuaugaugugccggauuaugccucccuuaggucacuaguugccucauccggcacacuggaguuuaacaaugaaagcuucaauugggcuggagucacucaaaacggaacaaguucugcuugcauaaggggaucuaauaguaguuucuuuaguagauuaaauugguugacccacuuaaacuucaaauacccagcauugaacgugacuaugccaaacaaugaacaauuugacaaauuguacauuugggggguucaccacccggguacggacaaggaccaaaucuuccuguaugcucaaucaucaggaagaaucacaguaucuaccaaaagaagccaacaagcuguaaucccgaauaucggaucuagacccagaauaaggaauaucccuagcagaauaagcaucuauuggacaauaguaaaaccgggagacauacuuuugauuaacagcacagggaaucuaauugcuccuagggguuacuucaaaauacgaagugggaaaagcucaauaaugagaucagaugcacccauuggcaaaugcaagucugaaugcaucacuccaaauggaagcauucccaaugacaaaccauuccaaaauguaaacaggaucacauacggggccugucccagauauguuaagcaaagcacucugaaauuggcaacaggaaugcgaaauguaccagagaaacaaacuagaggcauauuuggcgcaauagcggguuucauagaaaaugguugggagggaaugauggaugguugguacgguuucaggcaucaaaauucugagggaagaggacaagcagcagaucucaaaagcacucaagcagcaaucgaucaaaucaaugggaagcugaaucgauugaucgggaaaaccaacgagaaauuccaucagauugaaaaagaauucucagaaguggaagggagaauucaggaccuugagaaauauguugaggacacaaaaauagaucucuggucauacaacgcggagcuucuuguugcccuggagaaccaacauacaauugaucuaacugacucagaaaugaacaaacuguuugaaaaaacaaagaagcaacugagggaaaaugcugaggauaugggcaaugguuguuucaaaauauaccacaaaugugacaaugccugcauaggaucaaucagaaauggaacuuaugaccacgauguauacagggaugaagcauuaaacaaccgguuccagaucaagggaguugagcugaagucaggguacaaagauuggauccuauggauuuccuuugccauaucauguuuuuugcuuuguguugcuuuguugggguucaucaugugggccugccaaaagggcaacauuaggugcaacauuugcauuuga

SEQ ID NO: 43475 - RNA, 1701 nt, Artificial Sequence; identical to SEQ ID NO: 42489
  derived and/or modified CDS sequence (wt) from hemagglutinin__InfluenzaA__AHL96462

SEQ ID NO: 43476 - RNA, 1701 nt, Artificial Sequence
  derived and/or modified CDS sequence (wt) from hemagglutinin__InfluenzaA__AHL96474
augaaggcaauacuaguaguuaugcuauauacauuugcaaccgcaaaugcagacacauuauguauagguuaucaugcgaacaauucaacagacacuguagacacaguacuagaaaagaauguaacaguaacacacucuguuaaucuucuagaagacaagcauaacgggaaacuaugcaaacuaagagggguauccccauugcauuuggguaaauguaacauugcuggcuggauccugggaaauccagagugugaaucacucuccacagcaagcucaugguccuacauuguggaaacaucugguucagacaauggaacguguuacccaggagauuucaucgauuaugaggagcuaagagagcaauugagcucagugucaucauuugaaagguuugagauauuccccaaaacaaguucauggcccaaucaugacucgaacaaagguguaacggcagcauguccucaugcuggagcaaaaggcuucuacaaaaauuuaauauggcuaguuaaaaaaggaaauucauacccaaagcucaguauauccuacauuaaugauaaagggaaagaaguccucgugcuauggggcauucaccauccaucuacuacugcugaccaacaaagucucuaucagaaugcagauacauauguuuuuguggggacaucaagauacagcaagaaguucaagccggaaauagcaauaagacccaaagugagggaucaagaagggagaaugaacuauuacuggacacuaguagagccgggagacaaaauaacauucgaagcaacuggaaaucuagugguaccgagauaugcauuugcaauggaaagaaaugcuggaucugguauuaucauuucagauacaccaguucacgauugcaauacaacuugucagacacccaagggugcuauaaacaccagccucccauuucagaauauacauccgaucacaauuggaaaauguccaaaauauguaaaaagcacaaaauugagacuggccacaggauugaggaaugucccuucuauucaaucuagaggccuauuuggggccauugcuggcuucauugaagggggguggacagggaugguagauggaugguacgguuaucaccaucaaaaugagcaggggucaggauaugcagccgaccugaagagcacacagaaugccauugacaagauuacuaacaaaguaaauucuguuauugaaaagaugaauacacaguucacagcaguagguaaagaguucaaccaccuggaaaaaagaauagagaauuuaaauaaaaaaguugaugaugguuuccuggacauuuggacuuacaaugccgaacuguugguucuauuggaaaaugaaagaacuuuggacuaccacgacucaaaugugaagaacuuauaugaaaagguaagaaaccaguuaaaaaacaaugccaaggaaauuggaaauggcugcuuugaauuuuaccacaaaugcgauaacacgugcauggaaagugucaaaaaugggacuuaugauuacccaaaauacucagaggaagcaaaauuaaacagagaagaaauagaugggguaaagcuggaaucaacaaggauuuaccagauuuuggcgaucuauucaacugccgcuaguucauugguacugguagucucccugggggcaaucaguuuuuggaugugcucuaaugggucucuacaguguagaauauguauuuaa

SEQ ID NO: 43477 - RNA, 1701 nt, Artificial Sequence
  derived and/or modified CDS sequence (wt) from hemagglutinin__InfluenzaA__AHL96485
augaagacuaucauugcuuugagcuacauucuaugucugguuuucgcucaaaaacuuccuggaaaugacaauagcacggcaacgcugugccuugggcaccaugcaguaccaaacggaacgauagugaaaacaaucacgaaugaccgaauugaaguuacuaaugcuacugagcugguucagaauuccucaauaggugaaauaugcgacaguccucaucagauccuugauggagaaaauugcacacuaauagaugcucuauugggagacccucagugugauggcuuucaaaauaagaaaugggaccuuuuuguugaacgaagcaaagccuacagcaacuguuacccuuaugaugugccggauuaugccucccuuaggucacuaguugccucauccggcacacuggaguuuaacaaugaaagcuucaauuggacuggagucacucaaaacggaacaaguucugcuugcauaaggagaucuaauaguaguuucuuuaguagauuaaauugguugacccacuuaaacuucaaauacccagcauugaacgugacuaugccaaacaaugaacaauuugacaaauuguacauuuggggaguucaccacccggguacggacaaggaccaaaucuuccuguaugcucaaucaucaggaagaaucacaguaucuaccaaaagaagccaacaagcuguaaucccaaauaucggaucuagacccagaauaaggaauaucccuagcagaauaagcaucuauuggacaauaguaaaaccgggagacauacuuuugauuaacagcacagggaaucuaauugcuccuagggguuacuucaaaauacgaagugggaaaagcucaauaaugaaaucagaugcacccauuggcaaaugcaagucugaaugcaucacuccaaauggaagcauucccaaugacaaaccauuccaaaauguaaacaggaucacauacggggccugucccagauauguuaagcaaagcacucugaaauuggcaacaggaaugcgaaauguaccagagaaacaaacuagaggcauauuuggcgcaauagcggguuucauagaaaaugguugggagggaaugguggaugguugguacgguuucaggcaucaaaauucugagggaagaggacaagcagcagaucucaaaagcacucaagcagcaaucgaucaaaucaaugggaagcugaaucgauugaucgggaaaaccaacgagaaauuccaucagauugaaaaagaauucucagaaguagaagggagaauucaggaccuugagaaauauguugaggacacuaaaauagaucucuggucauacaacgcggagcuucuuguugcccuggagaaucaacauacaauugaucuaacugacucagaaaugaacaaacuguuugaaaaaacaaagaagcaacugagggaaaaugcugaggauaugggcaaugguuguuucaaaauauaccacaaaugugacaaugccugcauaggaucaaucagaaauggaacuuaugaccacaauguguacagggaugaagcauuaaacaaccgguuccagaucaagggaguugagcuuaagucaggguacaaagauuggauccuauggauuuccuuugccauaucauguuuuuugcuuuguguugcuuuguugggguucaucaugugggccugccaaaagggcaacauuaggugcaacauuugcauuuga

SEQ ID NO: 43478 - RNA, 1701 nt, Artificial Sequence; identical to SEQ ID NO: 42489
  derived and/or modified CDS sequence (wt) from hemagglutinin__InfluenzaA__AHL96497

SEQ ID NO: 43479 - RNA, 1701 nt, Artificial Sequence; identical to SEQ ID NO: 41880
  derived and/or modified CDS sequence (wt) from hemagglutinin__InfluenzaA__AHL96509

SEQ ID NO: 43480 - RNA, 1701 nt, Artificial Sequence; identical to SEQ ID NO: 42100
  derived and/or modified CDS sequence (wt) from hemagglutinin__InfluenzaA__AHL96521

SEQ ID NO: 43481 - RNA, 1701 nt, Artificial Sequence
  derived and/or modified CDS sequence (wt) from hemagglutinin__InfluenzaA__AHL96533
augaagacuaucauugcuuugagcuacauucuaugucugguuuucgcucaaaaacuuccuggaaaugacaauagcacggcaacgcugugccuugggcaccaugcaguaccaaacggaacgauagugaaaacaaucacgaaugaccgaauugaaguuacuaaugcuacugagcugguucagaauuccucaauaggugaaauaugcgacaguccucaucagauccuugauggagaaaacugcacacuaauagaugcucuauugggagacccucagugugauggcuuucaaaauaagaaaugggaccuuuuuguugaacgaagcaaagccuacagcaacuguuacccuuaugaugugccggauuaugccucccuuaggucacuaguugccucuuccggcacacuggaguuuaacaaugaaagcuucaauugggcuggagucacucaaaacggaacaaguucugcuugcauaaggggaucuaauaguaguuucuuuaguagauuaaauugguugacccacuuaaacuucaaauacccagcauugaacgugacuaugccaaacaaugaacaauuugacaaauuguacauuugggggguucaccacccggguacggacaaggaccaaaucuuccuguaugcucaaucaucaggaagaaucacaguaucuaccaaaagaagccaacaagcuguaaucccgaauaucggaucuagacccagaauaaggaauaucccuagcagaauaagcaucuauuggacaauaguaaaaccgggagacauacuuuugauuaacagcacagggaaucuaauugcuccuagggguuacuucaaaauacgaagugggaaaagcucaauaaugagaucagaugcacccauuggcaaaugcaagucugaaugcaucacuccaaauggaagcauucccaaugacaaaccauuccaaaauguaaacaggaucacauacggggccugucccagauauguuaagcaaagcacucugaaauuggcaacaggaaugcgaaauguaccagagaaacaaacuagaggcauauuuggcgcaauagcggguuucauagaaaaugguugggagggaaugguggaugguugguacgguuucaggcaucaaaauucugagggaagaggacaagcagcagaucucaaaagcacucaagcagcaaucgaucaaaucaaugggaagcugaaucgauugaucgggaaaaccaacgagaaauuccaucagauugaaaaagaauucucagaaguagaagggagaauucaggaccucgagaaauauguugaggacacaaaaauagaucucuggucauacaacgcggagcuucuuguugcccuggagaaccaacauacaauugaucuaacugacucagaaaugaacaaacuguuugaaaaaacaaagaagcaacugagggaaaaugcugaggauaugggcaaugguuguuucaaaauauaccacaaaugugacaaugccugcauaggaucaaucagaaauggaacuuaugaccacgauguauacagggaugaagcauuaaacaaccgguuccagaucaagggaguugagcugaagucaggguacaaagauuggauccuauggauuuccuuugccauaucauguuuuuugcuuuguguugcuuuguugggguucaucaugugggccugccaaaagggcaacauuaggugcaacauuugcauuuga

SEQ ID NO: 43482 - RNA, 1701 nt, Artificial Sequence; identical to SEQ ID NO: 42558
  derived and/or modified CDS sequence (wt) from hemagglutinin__InfluenzaA__AHL96545

SEQ ID NO: 43483 - RNA, 1701 nt, Artificial Sequence
  derived and/or modified CDS sequence (wt) from hemagglutinin__InfluenzaA__AHL96569
augaagacuaucauugcuuugagcuacauucuaugucugguuuucgcucaaaaacuuccuggaaaugacaauagcacggcaacgcugugccuugggcaccaugcaguaccaaacggaacgauagugaaaacaaucacgaaugaccgaauugaaguuacuaaugcuacugagcugguucagaauuccucaauaggugaaauaugcgacaguccucaucagauccuugauggagaaaacuguacacuaauagaugcucuauugggagacccucagugugauggcuuucaaaauaagaaaugggaccuuuuuguugaacgaagcaaagccuacagcaacuguuacccuuaugaugugccggauuaugccucccuuaggucacuaguugccucauccggcacacuggaguuuaacaaugaaagcuucaauuggacuggagucacucaaaacggaacaaguucugcuugcauaaggagaucuaauaguaguuucuuuaguagauuaaauugguugacccacuuaaacuucaaauacccagcauugaacgugacuaugccaaacaaugaacaauuugacaaauuguacauuugggggguucaccacccggguacggacaaggaccaaaucuuccuguaugcucaaucaucaggaagagucacaguaucuaccaaaagaagccaacaagcuguaaucccgaauaucggaucuagacccagaauaaggaauaucccuagcagaauaagcaucuauuggacaauaguaaaaccaggagacauacuuuugauuaacagcacagggaaucuaauugcuccuagggguuacuucaaaauacgaagugggaaaagcucaauaaugagaucagaugcacccauuggcaaaugcaagucugaaugcaucacuccaaauggaagcauuccaaaugacaaaccauuccaaaauguaaacaggaucacauacggggccugucccagauauguuaagcaaagcacucugaaauuggcaacaggaaugcgaaauguaccagagaaacaaacuagaggcauauuuggcgcaauagcggguuucauagaaaaugguugggagggaaugguggaugguugguacgguuucaggcaucaaaauucugagggaagaggacaagcagcagaucucaaaagcacucaagcagcaaucgaucaaaucaaugggaagcugaaucgauugaucgggaaaaccaacgagaaauuccaucagauugaaaaagaauucucagaaguagaagggagaauucaggaccuugagaaauauguugaggacacuaaaauagaucucuggucauacaacgcggagcuucuuguugcccuggagaaccaacauacaauugaucuaacugacucagaaaugaacaaauuguuugaaaaaacaaagaagcaacuaagggaaaaugcugaggauaugggcaaugguuguuucaaaauauaccacaaaugugacaaugccugcauaggaucaaucagaaauggaacuuaugaccacgauguauacagggaugaagcauuaaacaaccgguuccagaucaagggaguugagcugaagucaggguacaaagauuggauccuauggauuuccuuugccauaucauguuuuuugcuuuguguugcuuuguugggguucaucaugugggccugccaaaagggcaacauuaggugcaacauuugcauuuga

SEQ ID NO: 43484 - RNA, 1701 nt, Artificial Sequence; identical to SEQ ID NO: 43476
  derived and/or modified CDS sequence (wt) from hemagglutinin__InfluenzaA__AHL96581

SEQ ID NO: 43485 - RNA, 1701 nt, Artificial Sequence
  derived and/or modified CDS sequence (wt) from hemagglutinin__InfluenzaA__AHL96592
augaagacuaucauugcuuugggcuacauucuaugucugguuuucgcucaaaaaauuccuggaaaugacaauagcacggcaacgcugugccuugggcaccaugcaguaccaaacggaacgauagugaaaacaaucacgaaugaccgaauugaaguuacuaaugcuacugagcugguucagaauuccucaauaggugaaauaugcgacaguccucaucagauccuugauggagaaaacuguacacuaauagaugcucuauugggagacccucagugugauggcuuucaaaauaagaaaugggaccuuuuuauugaacgaagcaaagccuacagcaacuguuacccuuaugaugugccggauuaugccucccuuaggucacuaguugccucauccggcacacuggaguuuaacaaugaaagcuucaauuggacuggagucacucaaaacggaacaaguucugcuugcauaaggagaucuaauaguaguuucuuuaguagauuaaauugguugacccacuuaaacuucaaauacccagcauugaacgugacuaugccaaacaaugaacaauuugacaaauuguacauuugggggguucaccacccggguacggacaaggaccaaaucuuccuguaugcucaaucaucaggaagaaucacaguaucuaccaaaagaagccaacaagcuguaaucccgaauaucggaucuagacccagaauaaggaauaucccuagcagaauaagcaucuauuggacaauaguaaaaccaggagacauacuuuugauuaacagcacagggaaucuaauugcuccuagggguuacuucaaaauacgaagugggaaaagcucaauaaugagaucagaugcacccauuggcaaaugcaagucugaaugcaucacuccaaauggaagcauuccaaaugacaaaccauuccaaaauguaaacaggaucacauacggggccugucccagauauguuaagcaaagcacucugaaauuggcaacaggaaugcgaaauguaccagagaaacaaacuagaggcauauuuggcgcaauagcggguuucauagaaaaugguugggagggaaugguggaugguugguacgguuucaggcaucaaaauucugagggaagaggacaagcagcagaucucaaaagcacucaagcagcaaucgaucaaaucaaugggaagcugaaucgauugaucgggaaaaccaacgagaaauuccaucagauugaaaaagaauucucagaaguagaagggagaauucaggaccuugagaaauauguugaggacacuaaaauagaucucuggucauacaacgcggagcuucuuguugcccuggagaaccaacauacaauugaucuaacugacucagaaaugaacaaacuguuugaaaaaacaaagaagcaacugagggaaaaugcugaggauaugggcaaugguuguuucaaaauauaccacaaaugugacaaugccugcauaggaucaaucagaaauggaacuuaugaccacgauguauacagggaugaagcauuaaacaaccgguuccagaucaagggaguugagcugaagucaggguacaaagauuggauccuauggauuuccuuugccauaucauguuuuuugcuuuguguugcuuuguugggguucaucaugugggccugccaaaagggcaacauuaggugcaacauuugcauuuga

SEQ ID NO: 43486 - RNA, 1701 nt, Artificial Sequence; identical to SEQ ID NO: 42489
  derived and/or modified CDS sequence (wt) from hemagglutinin__InfluenzaA__AHL96604

SEQ ID NO: 43487 - RNA, 1701 nt, Artificial Sequence; identical to SEQ ID NO: 42489
  derived and/or modified CDS sequence (wt) from hemagglutinin__InfluenzaA__AHL96616

SEQ ID NO: 43488 - RNA, 1701 nt, Artificial Sequence
  derived and/or modified CDS sequence (wt) from hemagglutinin__InfluenzaA__AHL96628
augaagacuaucauugcuuugagcuacauucuaugucugguuuucgcucaaaaacuuccuggaaaugacaauagcacggcaacgcugugccuugggcaccaugcaguaccaaacggaacgauagugaaaacaaucacgaaugaccgaauugaaguuacuaaugcuacugagcugguucagaauuccucaauaggugaaauaugcgacaguccucaucagauccuugauggagaaaauugcacacuaauagaugcucuauugggagacccucagugugauggcuuucaaaauaagaaaugggaccuuuuuguugaacgaagcaaagccuacagcaacuguuacccuuaugaugugccggauuaugccucccuuaggucacuaguugccucauccggcacacuggaguuuaacaaugaaagcuucaauuggacuggagucacucaaaacggaacaaguucugcuugcauaaggagaucuaauaguaguuucuuuaguagauuaaauugguugacccacuuaaacuucaaauacccagcauugaacgugacuaugccaaacaaugaacaauuugacaaauuguacauuuggggaguucaccacccggguacggacaaggaccaaaucuuccuguaugcucaaucaucaggaagaaucacaguaucuaccaaaagaagccaacaagcuguaaucccaaauaucggaucuagacccagaauaaggaauaucccuagcagaauaagcaucuauuggacaauaguaaaaccgggagacauacuuuugauuaacagcacagggaaucuaauugcuccuagggguuacuucaaaauacgaagugggaaaagcucaauaaugagaucagaugcacccauuggcaaaugcaagucugaaugcaucacuccaaauggaagcauucccaaugacaaaccauuccaaaauguaaacaggaucacauacggggccugucccagauauguuaagcaaagcacucugaaauuggcaacaggaaugcgaaauguaccagagaaacaaacuagaggcauauuuggcgcaauagcggguuucauagaaaaugguugggggggaaugguggaugguugguacgguuucaggcaucaaaauucugagggaagaggacaagcagcagaucucaaaagcacucaagcagcaaucgaucaaaucaaugggaagcugaaucgauugaucgggaaaaccaacgagaaauuccaucagauugaaaaagaauucucagaaguagaagggagaauucaggaccuugagaaauauguugaggacacuaaaauagaucucuggucauacaacgcggagcuucuuguugcccuggagaaucaacauacaauugaucuaacugacucagaaaugaacaaacuguuugaaaaaacaaagaagcaacugagggaaaaugcugaggauaugggcaaugguuguuucaaaauauaccacaaaugugacaaugccugcauaggaucaaucagaaauggaacuuaugaccacaauguguacagggaugaagcauuaaacaaccgguuccagaucaagggaguugagcuuaagucaggguacaaagauuggauccuauggauuuccuuugccauaucauguuuuuugcuuuguguugcuuuguugggguucaucaugugggccugccaaaagggcaacauuaggugcaacauuugcauuuga

SEQ ID NO: 43489 - RNA, 1701 nt, Artificial Sequence; identical to SEQ ID NO: 43477
  derived and/or modified CDS sequence (wt) from hemagglutinin__InfluenzaA__AHL96640

SEQ ID NO: 43490 - RNA, 1701 nt, Artificial Sequence
  derived and/or modified CDS sequence (wt) from hemagglutinin__InfluenzaA__AHL96652
augaagacuaucauugcuuugagcuacauucuaugucugguuuucgcucaaaaacuuccuggaaaugacaauagcacggcaacgcugugccuugggcaccaugcaguaccaaacggaacaauagugaaaacaaucacgaaugaccgaauugaaguuacuaaugcuacugagcugguucaggauuccucaauaggugaaauaugcgacaguccucaucagauccuugauggagaaaacugcacacuaauagaugcucuauugggagacccucagugugauggcuuucaaaauaagaaaugggaccuuuuuguugaacgaagcaaagccuacagcaacuguuacccuuaugaugugccggauuaugccucccuuaggucacuaguugccucauccggcacacuggaguuuaacaaugaaagcuucaauugggcuggagucacucaaaacggaacaaguucugcuugcauaaggggaucuaauaguaguuucuuuaguagauuaaauugguugacccacuuaaacuucaaauacccagcauugaacgugacuaugccaaacaaugaacaauuugacaaauuguacauuugggggguucaccacccggguacggacaaggaccaaaucuuccuguaugcucaaucaucaggaagaaucacaguaucuaccaaaagaagccaacaagcuguaaucccgaauaucggaucuagacccagaauaaggaauaucccuagcagaauaagcaucuauuggacaauagugaaaccgggagacauacuuuugauuaacagcacagggaaucuaauugcuccuagggguuacuucaaaauacgaagugggaaaagcucaauaaugagaucagaugcacccauuggcaaaugcaagucugaaugcaucacuccaaauggaagcauucccaaugacaaaccauuccaaaauguaaacaggaucacauacggggccugucccagauauguuaagcaaagcacacugaaauuggcaacaggaaugcgaaauguaccagagaaacaaacuagaggaauauuuggcgcaauagcggguuucauagaaaaugguugggagggaaugguggaugguugguacgguuucaggcaucaaaauucugagggaagaggacaagcagcagaucucaaaagcacucaagcagcaaucgaucaaaucaaugggaagcugaaucgauugaucgggaaaaccaacgagaaauuccaucagauugaaaaagaauucucagaaguagaagggagaauucaggaccuugagaaauauguugaggacacaaaaauagaucucuggucauacaacgcggagcuucuuguugcccuggagaaccaacauacaauugaucuaacugacucagaaaugaacaaacuguuugaaaaaacaaagaagcaacugagggaaaaugcugaggauaugggcaaugguuguuucaaaauauaccacaaaugugacaaugccugcauaggaucaaucagaaauggaacuuaugaccacgauguauacagggaugaagcauuaaacaaccgguuccagaucaagggaguugagcugaagucaggguacaaagauuggauccuauggauuuccuuugccauaucauguuuuuugcuuuguguugcuuuguugggguucaucaugugggccugccaaaagggcaacauuaggugcaacauuugcauuuga

SEQ ID NO: 43491 - RNA, 1701 nt, Artificial Sequence; identical to SEQ ID NO: 42479
  derived and/or modified CDS sequence (wt) from hemagglutinin__InfluenzaA__AHL96664

SEQ ID NO: 43492 - RNA, 1701 nt, Artificial Sequence
  derived and/or modified CDS sequence (wt) from hemagglutinin__InfluenzaA__AHL96676
augaagacuaucauugcuuugagcuacauucuaugucugguuuucgcucaaaaacuuccuggaaaugacaauagcacggcaacgcugugccuugggcaccaugcaguaccaaacggaacgauagugaaaacaaucacgaaugaccgaauugaaguuacuaaugcuacugagcugguucagaauuccucaauaggugaaauaugcgacaguccucaucagauccuugauggagaaaacuguacacuaauagaugcucuauugggagacccucagugugauggcuuucaaaauaagaaaugggaccuuuuuguugaacgaagcaaagccuacagcaacuguuacccuuaugaugugccggauuaugccucccuuaggucacuaguugccucauccggcacacuggaguuuaacaaugaaagcuucaauuggacuggagucacucaaaacggaacaaguucugcuugcauaaggagaucuaauaguaguuucuuuaguagauuaaauugguugacccacuuaaacuucaaauacccagcauugaacgugacuaugccaaacaaugaacaauuugacaaauuguacauuugggggguucaccacccgggcacggacaaggaccaaaucuuccuguaugcucaaucaucaggaagaaucacaguaucuaccaaaagaagccaacaagcuguaaucccgaauaucgggucuagacccagaauaaggaauaucccuagcagaauaagcaucuauuggacaauaguaaaaccaggagacauacuuuugauuaacagcacagggaaucuaauugcuccuagggguuacuucaaaauacgaagugggaaaagcucaauaaugagaucagaugcacccauuggcaaaugcaagucugaaugcaucacuccaaauggaagcauuccaauugacaaaccauuccaaaauguaaacaggaucacauacggggccugucccagauauguuaagcaaagcacucugaaauuggcaacaggaaugcgaaauguaccagagaaacaaacuagaggcauauuuggcgcaauagcggguuucauagaaaaugguugggagggaaugguggaugguugguacgguuucaggcaucaaaauucugagggaagaggacaagcagcagaucucaaaagcacucaagcagcaaucgaucaaaucaaugggaagcugaaucgauugaucgggaaaaccaacgagaaauuccaucagauugaaaaagaauucucagaaguagaagggagaauucaggaccuugagaaauauguugaggacacuaaaauagaucucuggucauacaacgcggagcuucuuguugcccuggagaaccaacauacaauugaccuaacugacucagaaaugaacaaacuguuugaaaaaacaaagaagcaacugagggaaaaugcugaggauaugggcaaugguuguuucaaaauauaccacaaaugugacaaugccugcauaggaucaaucagaaauggaacuuaugaccacgauguauacagggaugaagcauuaaacaaccgguuccagaucaagggaguugagcugaagucaggguacaaagauuggauccuauggauuuccuuugccauaucauguuuuuugcuuuguguugcuuuguugggguucaucaugugggccugccaaaagggcaacauuaggugcaacauuugcauuuga

SEQ ID NO: 43493 - RNA, 1701 nt, Artificial Sequence; identical to SEQ ID NO: 42505
  derived and/or modified CDS sequence (wt) from hemagglutinin__InfluenzaA__AHL96688

SEQ ID NO: 43494 - RNA, 1701 nt, Artificial Sequence; identical to SEQ ID NO: 42489
  derived and/or modified CDS sequence (wt) from hemagglutinin__InfluenzaA__AHL96700

SEQ ID NO: 43495 - RNA, 1701 nt, Artificial Sequence; identical to SEQ ID NO: 42489
  derived and/or modified CDS sequence (wt) from hemagglutinin__InfluenzaA__AHL96712

SEQ ID NO: 43496 - RNA, 1701 nt, Artificial Sequence; identical to SEQ ID NO: 42492
  derived and/or modified CDS sequence (wt) from hemagglutinin__InfluenzaA__AHL96724

SEQ ID NO: 43497 - RNA, 1701 nt, Artificial Sequence; identical to SEQ ID NO: 41879
  derived and/or modified CDS sequence (wt) from hemagglutinin__InfluenzaA__AHL96748

SEQ ID NO: 43498 - RNA, 1701 nt, Artificial Sequence
  derived and/or modified CDS sequence (wt) from hemagglutinin__InfluenzaA__AHL96784
augaagacuaucauugcuuugagcuacauucuaugucugguuuucgcucaaaaacuuccuggaaaugacaauagcacggcaacgcugugccuugggcaccaugcaguaccaaacggaacgauagugaaaacaaucacgaaugaccgaauugaaguuacuaaugcuacugagcugguucagaauuccucaauaggugaaauaugcgacaguccucaucagauccuugauggagaaaauugcacacuaauagaugcucuauugggagacccucagugugauggcuuucaaaauaagaaaugggaccuuuuuguugaacgaagcaaagccuacagcaacuguuacccuuaugaugugccggauuaugccucccuuaggucacuaguugccucauccggcacacuggaguuuaacaaugaaagcuucaauugggcuggagucacucaaaacggaacaaguucugcuugcauaaggggaucuaauaguaguuucuuuaguagauuaaauugguugacccacuuaaacuucaaauacccagcauugaacgugacuaugccaaacaaugaacaauuugacaaauuguacauuugggggguucaccacccggguacggacaaggaccaaaucuuccuguaugcucaaucaucaggaagaaucacaguaucuaccaaaagaagccaacaagcuguaaucccgaauaucggaucuagacccagaauaaggaauaucccuagcagaauaagcaucuauuggacaauaguaaaaccgggagacauacuuuugauuaacagcacagggaaucuaauugcuccuagggguuacuucaaaauacgaagugggaaaagcucaauaaugagaucagaugcacccauuggcaaaugcaagucugaaugcaucacuccaaauggaagcauucccaaugacaaaccauuccaaaauguaaacaggaucacauacggggccugucccagauauguuaagcaaagcacucugaaauuggcaacaggaaugcgaaauguaccagagaaacaaacuagaggcauauuuggcgcaauagcggguuucauagaaaaugguugggagggaaugauggaugguugguacgguuucaggcaucaaaauucugagggaagaggacaagcagcagaucucaaaagcacucaagcagcaaucgaucaaaucaaugggaagcugaaucgauugaucgggaaaaccaacgagaaauuccaucagauugaaaaagaauucucagaaguagaagggagaauucaggaccuugagaaauauguugaggacacaaaaauagaucucuggucauacaacgcggagcuucuuguugcccuggagaaccaacauacaauugaucuaacugacucagaaaugaacaaacuguuugaaaaaacaaagaagcaacugagggaaaaugcugaggauaugggcaaugguuguuucaaaauauaccacaaaugugacaaugccugcauaggaucaaucagaaauggaacuuaugaccacgauguauacagggaugaagcauuaaacaaccgguuccagaucaagggaguugagcugaagucaggguacaaagacuggauccuauggauuuccuuugccauaucauguuuuuugcuuuguguugcuuuguugggguucaucaugugggccugccaaaagggcaacauuaggugcaacauuugcauuuga

SEQ ID NO: 43499 - RNA, 1701 nt, Artificial Sequence
  derived and/or modified CDS sequence (wt) from hemagglutinin__InfluenzaA__AHL96796
augaagacuaucauugcuuugagcuacauucuaugucugguuuucgcucaaaaacuuccuggaaaugacaauagcacggcaacgcugugccuugggcaccaugcaguaccaaacggaacgauagugaaaacaaucacgaaugaccgaauugaaguuacuaaugcuacugagcugguucagaauuccucaauaggugaaauaugcgacaguccucaucagauccuugauggagaaaacuguacacuaauagaugcucuauugggagacccucagugugauggcuuucaaaauaagaaaugggaccuuuuuauugaacgaagcaaagccuacagcaacuguuacccuuaugaugugccggauuaugccucccuuaggucacuaguugccucauccggcacacuggaguuuaacaaugaaagcuucaauuggacuggagucacucaaaacggaacaaguucugcuugcauaaggagaucuaauaguaguuucuuuaguagauuaaauugguugacccacuuaaacuucaaauacccagcauugaacgugacuaugccaaacaaugaacaauuugacaaauuguacauuugggggguucaccacccggguacggacaaggaccaaaucuuccuguaugcucaaucaucaggaagaaucacaguaucuaccaaaagaagccaacaagcuguaaucccgaauaucggaucuagacccagaauaaggaauaucccuagcagaauaagcaucuauuggacaauaguaaaaccaggagacauacuuuugauuaacagcacagggaaucuaauugcuccuagggguuacuucaaaauacgaagugggaaaagcucaauaaugagaucagaugcacccauuggcaaaugcaagucugaaugcaucacuccaaauggaagcauucccaaugacaaaccauuccaaaauguaaacaggaucacauacggggccugucccagauauguuaagcaaagcacucugaaauuggcaacaggaaugcgaaauguaccagagaaacaaacuagaggcauauuuggcgcaauagcggguuucauagaaaaugguugggagggaaugguggaugguugguacgguuucaggcaucaaaauucugagggaagaggacaagcagcagaucucaaaagcacucaagcagcaaucgaucaaaucaaugggaagcugaaucgauugaucgggaaaaccaacgagaaauuccaucagauugaaaaagaauucucagaaguagaagggagaauucaggaccuugagaaauauguugaggacacuaaaauagaucucuggucauacaacgcggagcuucuuguugcccuggagaaccaacauacaauugaucuaacugacucagaaaugaacaaacuguuugaaaaaacaaagaagcaacugagggaaaaugcugaggauaugggcaaugguuguuucaaaauauaccacaaaugugacaaugccugcauaggaucaaucagaaauggaacuuaugaccacgauguauacagggaugaagcauuaaacaaccgguuccagaucaagggaguugagcugaagucaggguacaaagauuggauccuauggauuuccuuugccauaucauguuuuuugcuuuguguugcuuuguugggguucaucaugugggccugccaaaagggcaacauuaggugcaacauuugcauuuga

SEQ ID NO: 43500 - RNA, 1701 nt, Artificial Sequence; identical to SEQ ID NO: 41879
  derived and/or modified CDS sequence (wt) from hemagglutinin__InfluenzaA__AHL96808

SEQ ID NO: 43501 - RNA, 1701 nt, Artificial Sequence; identical to SEQ ID NO: 41879
  derived and/or modified CDS sequence (wt) from hemagglutinin__InfluenzaA__AHL96820

SEQ ID NO: 43502 - RNA, 1701 nt, Artificial Sequence; identical to SEQ ID NO: 41880
  derived and/or modified CDS sequence (wt) from hemagglutinin__InfluenzaA__AHL96832

SEQ ID NO: 43503 - RNA, 1701 nt, Artificial Sequence; identical to SEQ ID NO: 42492
  derived and/or modified CDS sequence (wt) from hemagglutinin__InfluenzaA__AHL96844

SEQ ID NO: 43504 - RNA, 1701 nt, Artificial Sequence; identical to SEQ ID NO: 42492
  derived and/or modified CDS sequence (wt) from hemagglutinin__InfluenzaA__AHL96856

SEQ ID NO: 43505 - RNA, 1701 nt, Artificial Sequence
  derived and/or modified CDS sequence (wt) from hemagglutinin__InfluenzaA__AHL96868
augaagacuaucauugcuuugagcuacauucuaugucugguuuucgcucaaaaacuuccuggaaaugacaauagcacggcaacgcugugccuugggcaccaugcaguaccaaacggaacgauagugaaaacaaucacgaaugaccgaauugaaguuacuaaugcuacugagcugguucagaauuccucaauaggugaaauaugcgacaguccucaucagauccuugauggaggaaacugcacacuaauagaugcucuauugggagacccucagugugauggcuuccaaaauaagaaaugggaccuuuuuguugaacgaagcaaagccuacagcaacuguuacccuuaugaugugccggauuaugccucccuuaggucacuaguugccucauccggcacacuggaguuuaacaaugaaagcuucaauuggacuggagucacucaaaacggaacaaguucugcuugcauaaggagaucuaauaguaguuucuuuaguagauuaaauugguugacccacuuaaacuucaaauacccagcauugaacgugacuaugccaaacaaugaacaauuugacaaauuguacauuugggggguucaccacccggguacggacaaggaccaaaucuuccuguaugcucaaucaucaggaagaaucacaguaucuaccaaaagaagccaacaagcuguagucccuaauaucggaucuagacccagaauaaggaauaucccuaguagaauaagcaucuauuggacaauaguaaaaccgggagacauacuuuugauuaacagcacagggaaucuaauugcuccuagggguuacuucaaaauacgaagugggaaaagcucaauaaugagaucagaugcacccauuggcaaaugcaagucugaaugcaucacuccaaauggaagcauucccaaugacaaaccauuccaaaauguaaacaggaucacauacggggccugucccagauauguuaagcaaagcacucugaaauuggcaacagggaugcgaaauguaccagagaaacaaacuagaggcauauuuggcgcaauagcggguuucauagaaaaugguugggagggaaugauggaugguugguacgguuucaggcaucaaaauucugagggaagaggacaagcagcagaucucaaaagcacucaagcagcaaucgaucaaaucaaugggaagcugaaucgauugaucgggaaaaccaacgagaaauuccaucagauugaaaaagaauucucagaaguagaagggagaauucaggaccuugagaaauauguugaggacacuaaaauagaucucuggucauacaacgcggagcuucuuguugcccuggagaaccaacauacaauugaucuaacugacucagaaaugaacaaacuguuugaaaaaacaaagaagcaacugagagaaaaugcugaggauaugggcaaugguuguuucaaaauauaccacaaaugugacaaugccugcauaggaucaaucagaaauggaacuuaugaccacgauguauacagagaugaagcauuaaacaaccgguuccagaucaagggaguugagcugaagucaggauacaaagauuggauccuauggauuuccuuugccaugucauguuuuuugcuuuguguugcuuuguugggguucaucaugugggccugccaaaagggcaacauuaggugcaacauuugcauuuga

SEQ ID NO: 43506 - RNA, 1701 nt, Artificial Sequence; identical to SEQ ID NO: 41879
  derived and/or modified CDS sequence (wt) from hemagglutinin__InfluenzaA__AHL96880

SEQ ID NO: 43507 - RNA, 1701 nt, Artificial Sequence
  derived and/or modified CDS sequence (wt) from hemagglutinin__InfluenzaA__AHL96892
augaagacuaucauugcuuugagcuacauucuaugucugguuuucgcucaaaaacuuccuggaaaugacaauagcacggcaacgcugugccuugggcaccaugcaguaccaaacggaacgauagugaaaacaaucacgaaugaccgaauugaaguuacuaaugcuacugagcugguucagaauuccucaauaggugaaauaugcgacaguccucaucagauccuugauggagaaaacugcacacuaauagaugcucuauugggagacccucagugugauggcuuucaaaauaagaaaugggaccuuuuuguugaacgaagcaaagccuacagcaacuguuacccuuaugaugugccggauuaugccucccuuaggucacuaguugccucauccggcacacuggaguuuaacaaugaaagcuucaauugggcuggagucacucaaaacggaacaaguucugcuugcauaaggggaucuaauaguaguuucuuuaguagauuaaauugguugacccacuuaaacuucaaauacccagcauugaacgugacuaugccaaacaaugagcaauuugacaaauuguacauuugggggguucaccacccggguacggacaaggaccaaaucuuccuguaugcucaaucaucaggaagaaucacaguaucuaccaaaagaagccaacaagcuguaaucccgaauaucggaucuagacccagaauaaggaauaucccuagcagaauaagcaucuauuggacaauaguaaaaccgggagacauacuuuugauuaacagcacagggaaucuaauugcuccuagggguuacuucaaaauacgaagugggaaaagcucaauaaugagaucagaugcacccauuggcaaaugcaaaucugaauguaucacuccaaauggaagcauucccaaugacaaaccauuccaaaauguaaacaggaucacauacggggccugucccagauauguuaagcaaagcacucugaaauuggcaacaggaaugcgaaauguaccagagaaacaaacuagaggcauauuuggcgcaauagcggguuucauagaaaaugguugggagggaaugguggaugguugguacgguuucaggcaucaaaauucugagggaagaggacaagcagcagaucucaaaagcacucaagcagcaaucgaucaaaucaaugggaagcugaaucgauugaucgggaaaaccaacgagaaauuccaucagauugaaaaagaauucucagaaguagaagggagaguucaggaccuugagaaauauguugaggacacaaaaauagaucucuggucauacaacgcggagcuucuuguugcccuggagaaccaacauacaauugaucuaacugacucagaaaugaacaaacuguuugaaaaaacaaagaagcaacugagggaaaaugcugaggauaugggcaaugguuguuucaaaauauaccacaaaugugacaaugccugcauaggaucaaucagaaauggaacuuaugaccacgauguauacagggaugaagcauuaaacaaccgguuccagaucaagggaguugagcugaagucaggguacaaagauuggauccuauggauuuccuuugccauaucauguuuuuugcuuuguguugcuuuguugggguucaucaugugggccugccaaaagggcaacauuaggugcaacauuugcauuuga

SEQ ID NO: 43508 - RNA, 1701 nt, Artificial Sequence
  derived and/or modified CDS sequence (wt) from hemagglutinin__InfluenzaA__AHL96904
augaagacuaucauugcuuugagcuacauucuaugucugguuuucgcucaaaaacuuccuggaaaugacaauagcacggcaacgcugugccuugggcaccaugcaguaccaaacggaaugauagugaaaacaaucacgaaugaccgaauugaaguuacuaaugcuacugagcugguucagaauuccucaauaggugaaauaugcgacaguccucaucagauccuugauggagaaaacugcacacuaauagaugcucuauugggagacccucagugugauggcuuccaaaauaagaaaugggaccuuuuuguugaacgaagcaaagccuacagcaacuguuacccuuaugaugugccggauuaugccucccuuaggucacuaguugccucauccggcacacuggaguuuaacaaugaaagcuucaauuggacuggagucacucaaaacggaacaaguucugcuugcauaaggagaucuaauaguaguuucuuuaguagauuaaauugguugacccacuuaaacuucaaauacccagcauugaacgugacuaugccaaacaaugaacaauuugacaaauuguacauuugggggguucaccacccggguacggacaaggaccaaaucuuccuguaugcucaaucaucaggaagaaucacaguaucuaccaaaagaagccaacaagcuguagucccuaauaucggaucuagacccagaauaaggaauaucccuaguagaauaagcaucuauuggacaauaguaaaaccgggagacauacuuuugauuaacagcacagggaaucuaauugcuccuagggguuacuucaaaauacgaagugggaaaagcucaauaaugagaucagaugcacccauuggcaaaugcaagucugaaugcaucacuccaaauggaagcauucccaaugacaaaccauuccaaaauguaaacaggaucacauacggggccugucccagauauguuaagcaaagcacucugaaauuggcaacagggaugcgaaauguaccagagaaacaaacuagaggcauauuuggcgcaauagcggguuucauagaaaaugguugggagggaaugguggaugguugguacgguuucaggcaucaaaauucugagggaagaggacaagcagcagaucucaaaagcacucaagcagcaaucgaucaaaucaaugggaagcugaaucgauugaucgggaaaaccaacgagaaauuccaucagauugaaaaagaauucucagaaguagaagggagaauucaggaccuugagaaauauguugaggacacuaaaauagaucucuggucauacaacgcggagcuucuuguugcccuggagaaccaacauacaauugaucuaacugacucagaaaugaacaaacuguuugaaaaaacaaagaagcaacugagagaaaaugcugaggauaugggcaaugguuguuucaaaauauaccacaaaugugacaaugccugcauaggaucaaucagaaauggaacuuaugaccacgauguauacagagaugaagcauuaaacaaccgguuccagaucaagggaguugagcugaagucaggguacaaagauuggauccuauggauuuccuuugccaugucauguuuuuugcuuuguguugcuuuguugggguccaucaugugggccugccaaaagggcaacauuaggugcaacauuugcauuuga

SEQ ID NO: 43509 - RNA, 1701 nt, Artificial Sequence
  derived and/or modified CDS sequence (wt) from hemagglutinin__InfluenzaA__AHL96916
augaagacuaucauugcuuugagcuacauucuaugucugguuuucgcucaaaaacuuccuggaaaugacaauagcacggcaacgcugugccuugggcaccaugcaguaccaaacggaacgauagugaaaacaaucacgaaugaccgaauugaaguuacuaaugcuacugagcugguucagaauuccucaauaggugaaauaugcgacaguccucaucagauccuugauggagaaaauugcacacuaauagaugcucuauugggagacccucagugugauggcuuucaaaauaagaaaugggaccuuuuuguugaacgaagcaaagccuacagcaacuguuacccuuaugaugugccggauuaugccucccuuaggucacuaguugccucauccggcacacuggaguuuaacaaugaaagcuucaauuggacuggagucacucaaaacggaacaaguucugcuugcauaaggagaucuaauaguaguuucuuuaguagauuaaauugguugacccacuuaaacuucaaauacccagcauugaacgugacuaugccaaacaaugaacaauuugacaaauuguacauuuggggaguucaccacccggguacggacaaggaccaaaucuuccuguaugcucaaucaucaggaagaaucacaguaucuaccaaaagaagccaacaagcuguaaucccaaauaucggaucuagacccagaauaaggaauaucccuagcagaauaagcaucuauuggacaauaguaaaaccgggagacauacuuuugauuaacagcacagggaaucuaauugcuccuagggguuacuucaaaauacgaagugggaaaagcucaauaaugagaucagaugcacccauuggcaaaugcaagucugaaugcaucacuccaaauggaagcauucccaaugacaaaccauuccaaaauguaaacaggaucacauacggggccugucccagauauguuaagcaaagcacucugaaauuggcaacaggaaugcgaaauguaccagagaaacaaacuagaggcauauuuggcgcaauagcggguuucauagaaaaugguugggagggaaugguggaugguugguacgguuucaggcaucaaaauucugagggaagaggacaagcagcagaucucaaaagcacucaagcagcaaucgaucaaaucaaugggaagcugaaucgauugaucgggaaaaccaacgagaaauuccaucagauugaaaaagaauucucagaaguagaagggagaauucaggaccuugagaaauauguugaggacacuaaaauagaucucuggucauacaacgcggagcuucuuguugcccuggagaaucaacauacaauugaucuaacugacucagaaaugaacaaacuguuugaaaaaacaaagaagcaacugagggaaaaugcugaggauaugggcaaugguuguuucaaaauauaccacaaaugugacaaugccugcauaggaucaaucagaaauggaacuuaugaccacaauguguacagggaugaagcauuaaacaaccgguuccagaucaaaggaguugagcuuaagucaggguacaaagauuggauccuauggauuuccuuugccauaucauguuuuuugcuuuguguugcuuuguugggguucaucaugugggccugccaaaagggcaacauuaggugcaacauuugcauuuga

SEQ ID NO: 43510 - RNA, 1701 nt, Artificial Sequence; identical to SEQ ID NO: 41879
  derived and/or modified CDS sequence (wt) from hemagglutinin__InfluenzaA__AHL96928

SEQ ID NO: 43511 - RNA, 1701 nt, Artificial Sequence; identical to SEQ ID NO: 41879
  derived and/or modified CDS sequence (wt) from hemagglutinin__InfluenzaA__AHL96940

SEQ ID NO: 43512 - RNA, 1701 nt, Artificial Sequence; identical to SEQ ID NO: 41880
  derived and/or modified CDS sequence (wt) from hemagglutinin__InfluenzaA__AHL96952

SEQ ID NO: 43513 - RNA, 1701 nt, Artificial Sequence; identical to SEQ ID NO: 42492
  derived and/or modified CDS sequence (wt) from hemagglutinin__InfluenzaA__AHL96964

SEQ ID NO: 43514 - RNA, 1701 nt, Artificial Sequence; identical to SEQ ID NO: 42038
  derived and/or modified CDS sequence (wt) from hemagglutinin__InfluenzaA__AHL96976

SEQ ID NO: 43515 - RNA, 1701 nt, Artificial Sequence
  derived and/or modified CDS sequence (wt) from hemagglutinin__InfluenzaA__AHL96988
augaagacuaucauugcuuugagcuacauucuaugucugguuuucgcucaaaaacuuccuggaaaugacaauagcacggcaacgcugugccuugggcaccaugcaguaccaaacggaacgauagugaaaacaaucacgaaugaccgaauugaaguuacuaaugcuacugagcugguucagaauuccucaauaggugaaauaugcgacaguccucaucagauccuugauggagaaaauugcacacuaauagaugcucuauugggagacccucagugugauggcuuucaaaauaagaaaugggaccuuuuuguugaacgaagcaaagccuacagcaacuguuacccuuaugaugugccggauuaugccucccuuaggucacuaguugccucauccggcacacuggaguuuaacaaugaaagcuucaauuggacuggagucacucaaaacggaacaaguucugcuugcauaaggagaucuaauaguaguuucuuuaguagauuaaauugguugacccacuuaaacuucaaauacccagcauugaacgugacuaugccaaacaaugaacaauuugacaaauuguacauuuggggaguucaccacccggguacggacaaggaccaaaucuuccuguaugcucaaucaucaggaagaaucacaguaucuaccaaaagaagccaacaagcuguaaucccaaauaucggaucuagacccagaauaaggaauaucccuagcagaauaagcaucuauuggacaauaguaagaccgggagacauacuuuugauuaacagcacagggaaucuaauugcuccuagggguuacuucaaaauacgaagugggaaaagcucaauaaugagaucagaugcacccauuggcaaaugcaagucugaaugcaucacuccaaauggaagcauucccaaugacaaaccauuccaaaauguaaacaggaucacauacggugccugucccagauauguuaagcaaagcacucugaaauuggcaacaggaaugcgaaauguaccagagaaacaaacuagaggcauauuuggcgcaauagcggguuucauagaaaaugguugggagggaaugguggaugguugguacgguuucaggcaucaaaauucugagggaagaggacaagcagcagaucucaaaagcacucaagcagcaaucgaucaaaucaaugggaagcugaaucgauugaucgggaaaaccaacgagaaauuccaucagauugaaaaagaauucucagaaguagaagggagaauucaggaccuugagaaauauguugaggacacuaaaauagaucucuggucauacaacgcggagcuucuuguugcccuggagaaucaacauacaauugaucuaacugacucagaaaugaacaaacuguuugaaaaaacaaagaagcaacugagggaaaaugcugaggauaugggcaaugguuguuucaaaauauaccacaaaugugacaaugccugcauaggaucaaucagaaauggaacuuaugaccacaauguguacagggaugaagcauuaaacaaccgguuccagaucaagggaguugagcuuaagucaggguacaaagauuggauccuauggauuuccuuugccauaucauguuuuuugcuuuguguugcuuuguugggguucaucaugugggccugccaaaagggcaacauuaggugcaacauuugcauuuga

SEQ ID NO: 43516 - RNA, 1701 nt, Artificial Sequence; identical to SEQ ID NO: 42492
  derived and/or modified CDS sequence (wt) from hemagglutinin__InfluenzaA__AHL97000

SEQ ID NO: 43517 - RNA, 1701 nt, Artificial Sequence; identical to SEQ ID NO: 42489
  derived and/or modified CDS sequence (wt) from hemagglutinin__InfluenzaA__AHL97012

SEQ ID NO: 43518 - RNA, 1701 nt, Artificial Sequence
  derived and/or modified CDS sequence (wt) from hemagglutinin__InfluenzaA__AHL97024
augaagacuaucauugcuuugagcuacauucuaugucugguuuucgcucaaaaacuuccuggaaaugacaauagcacggcaacgcugugccuugggcaccaugcaguaccaaacggaacgauagugaaaacaaucaugaaugaccgaauugaaguuacuaaugcuacugagcugguucagaauuccucaauaggugaaauaugcgacaguccucaucagauccuugauggagaaaauugcacacuaauagaugcucuauugggagacccucagugugauggcuuucaaaauaagaaaugggaccuuuuuguugaacgaagcaaagccuacagcaacuguuacccuuaugaugugccggauuaugccucccuuaggucacuaguugccucauccggcacacuggaguuuaacaaugaaagcuucaauugggcuggagucacucaaaacggaacaaguucugcuugcauaaggggaucuaauaguaguuucuuuaguagauuaaauugguugacccacuuaaacuucaaauacccagcauugaacgugacuaugccaaacaaugaacaauuugacaaauuguacauuugggggguucaccacccggguacggacaaggaccaaaucuuccuguaugcucaaucaucaggaagaaucacaguaucuaccaaaagaagccaacaagcuguaaucccgaauaucggaucuagacccagaauaaggaauaucccuagcagaauaagcaucuauuggacaauaguaaaaccgggagacauacuuuugauuaacagcacagggaaucuaauugcuccuagggguuacuucaaaauacgaagugggaaaagcucaauaaugagaucagaugcacccauuggcaaaugcaagucugaaugcaucacuccaaauggaagcauucccaaugacaaaccauuccaaaauguaaacaggaucacauacggggccugucccagauauguuaagcaaagcacucugaaauuggcaacaggaaugcgaaauguaccagagaaacaaacuagaggcauauuuggcgcaauagcggguuucauagaaaaugguugggagggaaugauggaugguugguacgguuucaggcaucaaaauucugagggaagaggacaagcagcagaucucaaaagcacucaagcagcaaucgaucaaaucaaugggaagcugaaucgauugaucgggaaaaccaacgagaaauuccaucagauugaaaaagaauucucagaaguagaagggagaauucaggaccuugagaaauauguugaggacacaaaaauagaucucuggucauacaacgcggagcuucuuguugcccuggagaaccaacauacaauugaucuaacugacucagaaaugaacaaacuguuugaaaaaacaaagaagcaacugagggaaaaugcugaggauaugggcaaugguuguuucaaaauauaccacaaaugugacaaugccugcauaggaucaaucagaaauggaacuuaugaccacgauguauacagggaugaagcauuaaacaaccgguuccagaucaagggaguugagcugaagucaggguacaaagauuggauccuauggauuuccuuugccauaucauguuuuuugcuuuguguugcuuuguugggguucaucaugugggccugccaaaagggcaacauuaggugcaacauuugcauuuga

SEQ ID NO: 43519 - RNA, 1701 nt, Artificial Sequence
  derived and/or modified CDS sequence (wt) from hemagglutinin__InfluenzaA__AHL97036
augaagacuaucauugcuuugagcuacauucuaugucugguuuucgcucaaaaacuuccuggaaaugacaauagcacggcaacgcugugccuugggcaccaugcaguaccaaacggaacgauagugaaaacaaucacgaaugaccgaauugaaguuacuaaugcuacugagcugguucagaauuccucaauaggugaaauaugcgacaguccucaucagauccuugauggagaaaacuguacacuaauagaugcucuauugggagacccucagugugauggcuuucaaaauaagaaaugggaccuuuuuguugaacgaagcaaagccuacagcaacuguuacccuuaugaugugccggauuaugccucccuuaggucacuaguugccucauccggcacacuggaguuuaacaaugaaagcuucaauuggacuggagucacucaaaacggaacaaguucugcuugcauaaggagaucuaauaguaguuucuuuaguagauuaaauugguugacccacuuaaacuucaaauacccagcauugaacguaacuaugccaaacaaugaacaauuugacaaauuguacauuugggggguucaccacccggguacggacaaggaccaaaucuuccuguaugcucaaucaucaggaagaaucacaguaucuaccaaaagaagccaacaagcuguaaucccgaauaucggaucuagacccagaauaaggaauaucccuagcagaauaagcaucuauuggacaauaguaaaaccaggagacauacuuuugauuaacagcacagggaaucuaauugcuccuagggguuacuucaaaauacgaagugggaaaagcucaauaaugagaucagaugcacccauuggcaaaugcaagucugaaugcaucacuccaaauggaagcauuccaaaugacaaaccauuccaaaauguaaacaggaucacauacggggccugucccagauauguuaagcaaagcacucugaaauuggcaacaggaaugcgaaacguaccagagaaacaaacuagaggcauauuuggcgcaauagcggguuucauagaaaaugguugggagggaaugguggaugguugguacgguuucaggcaucaaaauucugagggaagaggacaagcagcagaucucaaaagcacucaagcagcaaucgaucaaaucaaugggaagcugaaucgauugaucgggaaaaccaacgagaaauuccaucagauugaaaaagaauucucagaaguagaagggagaauucaggaccuugagaaauauguugaggacacuaaaauagaucucuggucauacaacgcggagcuucuuguugcccuggagaaccaacauacaauugaucuaacugacucagaaaugaacaaacuguuugaaaaaacaaagaagcaacugagggaaaaugcugaggauaugggcaaugguuguuucaaaauauaccacaaaugugacaauaccugcauaggaucaaucagaaauggaacuuaugaccacgauguauacagggaugaagcauuaaacaaccgguuccagaucaagggaguugagcugaagucaggguacaaagauuggauccuauggauuuccuuugccauaucauguuuuuugcuuuguguugcuuuguugggguucaucaugugggccugccaaaagggcaacauuaggugcaacauuugcauuuga

SEQ ID NO: 43520 - RNA, 1701 nt, Artificial Sequence; identical to SEQ ID NO: 41901
  derived and/or modified CDS sequence (wt) from hemagglutinin__InfluenzaA__AHL97048

SEQ ID NO: 43521 - RNA, 1701 nt, Artificial Sequence
  derived and/or modified CDS sequence (wt) from hemagglutinin__InfluenzaA__AHL97060
augaagacuaucauugcuuugagcuacauucuaugucugguuuucgcucaaaaaauuccuggaaaugacaauagcacggcaacgcugugccuugggcaccaugcaguaccaaacggaacgauagugaaaacaaucacgaaugaccgaauugaaguuacuaaugcuacugagcugguucagaauuccucaauaggugaaauaugcgacaguccucaucagauccuugauggagaaaacuguacacuaauagaugcucuauugggagacccucagugugauggcuuucagaauaagaaaugggaccuuuuuguugaacggagcaaagccuacagcaacuguuacccuuaugaugugccggauuaugccucccuuaggucacuaguugccucauccggcacacuggaguuuaacaaugaaagcuucaauuggacuggagucacucaaaacggaacaaguucugcuugcauaaggagaucuaauaguaguuucuuuaguagauuaaauugguugacccacuuaaacuucaaauacccagcauugaacgugacuaugccaaacaaugaacaauuugacaaauuguacauuugggggguccaccacccggguacggacaaggaccaaaucuuccuguaugcucaaucaucaggaagaaucacaguaucuaccaaaagaagccaacaagcuguaaucccgaauaucggaucuagacccagaauaaggaauaucccuagcagaauaagcaucuauuggacaauaguaaaaccaggagacauacuuuugauuaacagcacagggaaucuaauugcuccuagggguuacuucaaaauaagaagugggaaaagcucaauaaugagaucagaugcacccauuggcaaaugcaagucugaaugcaucacuccaaauggaagcauuccaaaugacaaaccauuccaaaauguaaacaggaucacauacggggccugucccagauauguuaagcaaagcacucugaaauuggcaacaggaaugcgaaauguaccagagaaacaaacuagaggcauauuuggcgcaauagcggguuucauagaaaaugguugggagggaaugguggaugguugguacgguuucaggcaucaaaauucugagggaagaggacaagcagcagaucucaaaagcacucaagcagcaaucgaucaaaucaaugggaagcugaaucgauugaucgggaaaaccaacgagaaauuccaucagauugaaaaagaauucucagaaguagaagggagaauucaggaccuugagaaauauguugaggacacuaaaauagaucucuggucauacaacgcggagcuucuuguugcccuggagaaccaacauacaauugaucuaacugacucagaaaugaacaaacuguuugaaaaaacaaagaagcaacugagggaaaaugcugaggauaugggcaaugguuguuucaaaauauaccacaaaugugacaaugccugcauaggaucaaucagaaauggaacuuaugaacacgauguauacagggaugaagcauuaaacaaccgguuccagaucaagggaguugagcugaagucaggguacaaagauuggauccuauggauuuccuuugccauaucauguuuuuugcuuuguguugcuuuguugggguucaucaugugggccugccaaaagggcaacauuaggugcaacauuugcauuuga

SEQ ID NO: 43522 - RNA, 1701 nt, Artificial Sequence; identical to SEQ ID NO: 42489
  derived and/or modified CDS sequence (wt) from hemagglutinin__InfluenzaA__AHL97072

SEQ ID NO: 43523 - RNA, 1701 nt, Artificial Sequence
  derived and/or modified CDS sequence (wt) from hemagglutinin__InfluenzaA__AHL97084
augaagacuaucauugcuuugagcuacauucuaugucugguuuucgcucaaaaacuuccuggaaaugacaauagcacggcaacgcugugccuugggcaccaugcaguaccaaacggaacgauagugaaaacaaucacgaaugaccgaauugaaguuacuaaugcuacugagcugguucagaauuccucaauaggugaaauaugcgacaguccucaucagauccuugauggagaaaacugcacacuaauagaugcucuauugggagacccucagugugauggcuuucaaaauaagaaaugggaccuuuuuguugaacgaagcaaagccuacagcaacuguuacccuuaugaugugccggauuaugccucccuuaggucacuaguugccucauccggcacacuggaguuuaacaaugaaagcuucaauugggcuggagucacucaaaacggaacaaguucugcuugcauaaggggaucuaauaguaguuucuuuaguagauuaaauugguugacccacuuaaacuucaaauacccagcacugaacgugacuaugccaaacaaugagcaauuugacaaauuguacauuugggggguucaccacccggguacggacaaggaccaaaucuuccuguaugcucaaucaucaggaagaaucacaguaucuaccaaaagaagccaacaagcuguaaucccgaauaucggaucuagacccagaauaaggaauaucccuagcagaauaagcaucuauuggacaauaguaaaaccgggagacauacuuuugauuaacagcacagggaaucuaauugcuccuagggguuacuucaaaauacgaagugggaaaagcucaauaaugagaucagaugcacccauuggcaaaugcaaaucugaauguaucacuccaaauggaagcauucccaaugacaaaccauuccaaaauguaaacaggaucacauacggggccugucccagauauguuaagcaaagcacucugaaauuggcaacaggaaugcgaaauguaccagagaaacaaacuagaggcauauuuggcgcaauagcggguuucauagaaaaugguugggagggaaugguggaugguugguacgguuucaggcaucaaaauucugagggaagaggacaagcagcagaucucaaaagcacucaagcagcaaucgaucaaaucaaugggaagcugaaucgauugaucgggaaaaccaacgagaaauuccaucagauugaaaaagaauucucagaaguagaagggagaauucaggaccuugagaaauauguugaggacacaaaaauagaucucuggucauacaacgcggagcuucuuguugcccuggagaaccaacauacaauugaucuaacugacucagaaaugaacaaacuguuugaaaaaacaaagaagcaacugagggaaaaugcugaggauaugggcaaugguuguuucaaaauauaccacaaaugugacaaugccugcauaggaucaaucagaaauggaacuuaugaccacgauguauacagggaugaagcauuaaacaaccgguuccagaucaagggaguugagcugaagucaggguacaaagauuggauccuauggauuuccuuugccauaucauguuuuuugcuuuguguugcuuuguugggguucaucaugugggccugccaaaaaggcaacauuaggugcaacauuugcauuuga

SEQ ID NO: 43524 - RNA, 1701 nt, Artificial Sequence
  derived and/or modified CDS sequence (wt) from hemagglutinin__InfluenzaA__AHL97096
augaagaccaucauugcuuugagcuacauucuaugucuaguuuuugcucaagaacuuccuggaaaugacgacagcacggcaacgcugugccuugggcaccaugcagugccaaacggaacgauagugaaaacaaucacgaaugaccaaauugaaguuacuaaugcuacugaacugguucagaguuccucaacaggugaaauaugcaacaguccucaucagauccuugauggagaaaacugcacacuaauagaugcucuauugggagacccucagugugauggcuuccaaaacaagaaaugggaccuuuuuguugaacgaagcaaagcccacagcaacuguuacccuuaugaugugccggauuaugccucccuuaggucacuaguugccucauccggcacacuggaguuuaacaaugaaagcuucaauuggacuggagucacucaaaacggaacaagcucugcuugcauaaggagaucuaauaauaguuucuuuaguagauugaauugguugacccacuuaaacuucaaauacccagcauugaacgugacuaugccaaacaaugaacaauuugacaaauuguacauuugggggguucaccacccggguacggacaaggaccaaaucuuccuguaugcucaagcaucaggaagaaucacaguaucuaccaaaagaagccaacaagcuguaauuccgaauaucggaucuagacccagaguaaggaauaucccuagcagaguaagcaucuauuggacaauaguaaaaccgggagacauacuuuugauuaacagcacagggaaucuaauugcuccuagggguuacuucaaaauacgaagugggaaaagcucaauaaugagaucagaugcacccauuggcaaaugcaauucugcaugcaucacuccaaauggaagcauucccaaugacaaaccauuccaaaauguaaacaggaucacauacggggccugucccagauaugucaagcaaaacacucugaaauuggcaacaggaaugagaaauguaccagagaaacaaacuagaggcauauuuggcgcaauagcggguuucauagaaaaugguugggagggaaugguggaugguugguacgguuucaggcaucaaaauucugagggaaggggacaagcagcagaucucaaaagcacucaagcagcaaucgaucaaaucaaugggaagcugaauagauugaucgggaaaaccaacgagaaauuccaucagauugaaaaagaauucucagaagucgaagggagaauucaggaccuugagaaauauguugaggacacuaaaauagaucucuggucauacaacgcggagcuucuuguugcccuggagaaccaacacacaauugaucuaacugacucagaaaugaacaaacuguuugaaaaaacaaagaagcaacugagggaaaaugcugaggauaugggcaaugguuguuucaaaauauaccacaaaugugacaaugccugcauaggaucaaucagaaauggaacuuaugaucacgauguguacagagaugaagcauuaaacaaccgauuucagaucaagggaguugagcugaagucaggguacaaagauuggauccuauggauuuccuuugccauaucauguuuuuugcuuuguguugcuuuguugggguucaucaugugggccugccaaaaaggcaacauuaggugcaacauuugcauuuga

SEQ ID NO: 43525 - RNA, 1701 nt, Artificial Sequence
  derived and/or modified CDS sequence (wt) from hemagglutinin__InfluenzaA__AHL97108
augaagacuaucauugcuuugagcuacauucuaugucugguuuucgcucaaaaacuuccuggaaaugacaauagcacggcaacgcugugccuugggcaccaugcaguaccaaacggaacgauagugaaaacaaucacgaaugaccaaauugaaguuacuaaugcuacugagcugguucagaauuccucaauaggugaaauaugcgacaguccucaucagauccuugauggagaaaacugcacacuaauagaugcucuauugggagacccucagugugauggcuuucaaaauaagaaaugggaccuuuuuguugaacgaagcaaagccuacagcaacuguuacccuuaugaugugccggauuaugccucccuuaggucacuaguugccucauccggcacacuggaguuuaacaaugaaagcuucaauugggcuggagucacucaaaacggaacaaguucugcuugcauaaggggaucuaauaguaguuucuuuaguagauuaaauugguugacccacuuaaacuucaaguacccagcauugaacgugacuaugccaaacaaugaacaauuugacaaauuguacauuugggggguucaccacccggguacggacaaggaccaaaucuuccuguaugcucaaucaucaggaagaaucacagugucuaccaaaagaagccaacaagcuguaaucccgaauaucggaucuagacccagaauaaggaauaucccuagcagaauaagcaucuauuggacaauaguaaaaccgggagacauacuuuugauuaacagcacagggaaucuaauugcuccuagggguuacuucaaaauacgaagugggaaaagcucaauaaugagaucagaugcacccauuggcaaaugcaagucugaaugcaucacuccaaauggaagcauucccaaugacaaaccauuccaaaauguaaacaggaucacauacggggccugucccagauauguuaagcaaagcacucugaaauuggcaacaggaaugcgaaauguaccagagaaacaaacuagaggcauauuuggcgcaauagcggguuucauagaaaaugguugggagggaaugguggaugguugguacgguuucaggcaucaaaauucugagggaagaggacaagcagcagaucucaaaagcacucaagcagcaaucgaucaaaucaaugggaagcugaaucgauugaucgggaaaaccaacgagaaauuucaccagauugagaaagaauucucagaaguagaagggagaauucaggaccuugagaaauauguugaggacacaaaaauagaucucuggucauacaacgcagagcuucuuguugcccuggagaaccaacauacaauugaucuaacugacucagaaaugaacaaacuguuugaaaaaacaaagaagcaacugagggaaaaugcugaggauaugggcaaugguuguuucaaaauauaccacaaaugugacaaugccugcauaggaucaaucagaaauggaacuuaugaccacgauguauacagggaugaagcauuaaacaaccgguuccagaucaagggaguugagcugaagucaggguacaaagauuggauccuauggauuuccuuugccauaucauguuuuuugcuuuguguugcuuuguugggguucaucaugugggccugccaaaagggcaacauuaggugcaacauuugcauuuga

SEQ ID NO: 43526 - RNA, 1701 nt, Artificial Sequence
  derived and/or modified CDS sequence (wt) from hemagglutinin__InfluenzaA__AHL97120
augaagacuaucauugcuuugagcuacauucuaugucugguuuucgcucaaaaacuuccuggaaaugacaauagcacggcaacgcugugccuugggcaccaugcaguaccaaacggaacgauagugaaaacaaucacgaaugaccgaauugaaguuacuaaugcuacugagcugguucagaauuccucaauaggugaaauaugcgacaguccucaucagauccuugauggagaaaacugcacacuaauagaugcucuauugggagacccucagugugauggcuuucaaaauaagaaaugggaccuuuuuguugaacgaagcaaagccuacagcaacuguuacccuuaugaugugccggauuaugccucccuuaggucacuaguugccucauccggcacacuggaguuuaacaaugaaagcuucaauugggcuggagucacucaaaacggaacaaguucugcuugcauaaggggaucuaauaguaguuucuuuaguagauuaaauugguugacccacuuaaacuucaaauacccagcauugaacgugacuaugccaaacaaugagcaauuugacaaauuguacauuugggggguucaccacccggguacggacaaggaccaaaucuuccuguaugcucaaucaucaggaagaaucacaguaucuaccaaaagaagccaacaagcuguaaucccgaauaucggaucuagacccagaauaaggaauaucccuagcagaauaagcaucuauuggacaauaguaaaaccgggagacauacuuuugauuaacagcacagggaaucuaauugcuccuagggguuacuucaaaauacgaagugggaaaagcucaauaaugagaucagaugcacccauuggcaaaugcaaaucugaauguaucacuccaaauggaagcauucccaaugacaaaccauuccaaaauguaaacagggucacauacggggccugucccagauauguuaagcaaagcacucugaaauuggcaacaggaaugcgaaauguaccagagaaacaaacuagaggcauauuuggcgcaauagcggguuucauagaaaaugguugggagggaaugguggaugguugguacgguuucaggcaucaaaauucugagggaagaggacaagcagcagaucucaaaagcacucaagcagcaaucgaucaaaucaaugggaagcugaaucgauugaucgggaaaaccaacgagaaauuccaucagauugaaaaagaauucucagaaguagaagggagaauucaggaccuugagaaauauguugaggacacaaaaauagaucucuggucauacaacgcggagcuucuuguugcccuggagaaccaacauacaauugaucuaacugacucagaaaugaacaaacuguuugaaaaaacaaagaagcaacugagggaaaaugcugaggauaugggcaaugguuguuucaaaauauaccacaaaugugacaaugccugcauaggaucaaucauaaauggaacuuaugaccacgauguauacagggaugaagcauuaaacaaccgguuccagaucaagggaguugagcugaagucaggguacaaagauuggauccuauggauuuccuuugccauaucauguuuuuugcuuuguguugcuuuguugggguucaucaugugggccugccaaaagggcaacauuaggugcaacauuugcauuuga

SEQ ID NO: 43527 - RNA, 1701 nt, Artificial Sequence
  derived and/or modified CDS sequence (wt) from hemagglutinin__InfluenzaA__AHL97132
augaagacuaucauugcuuugagcuacauucuaugucugguuuucgcucaaaaacuuccuggaaaugacaauagcacggcaacgcugugccuugggcaccaugcaguaccaaacggaacgauagugaaaacaaucacgaaugaccaaauugaaguuacuaaugcuacugagcugguucagaauuccucaauaggugaaauaugcgacaguccucaucagauccuugauggagaaaacugcacacuaauagaugcucuauugggagacccucagugugauggcuuucaaaauaagaaaugggaccuuuuuguugaacgaagcaaagccuacagcaacuguuacccuuaugaugugccggauuaugccucccuuaggucacuaguugccucauccggcacacuggaguuuaacaaugaaagcuucaauugggcuggagucacucaaaacggaacaaguucugcuugcauaaggggaucuaauaguagcuucuuuaguagauuaaauugguugacccacuuaaacuucaaguacccagcauugaacgugacuaugccaaacaaugaacaauuugacaaauuguacauuugggggguucaccacccggguacggacaaggaccaaaucuuccuguaugcucaaucaucaggaagaaucacaguaucuaccaaaagaagccaacaagcuguaaucccgaauaucggaucuagacccagaauaaggaauaucccuagcagaauaagcaucuauuggacaauaguaaaaccgggagacauacuuuugauuaacagcacagggaaucuaauugcuccuagggguuacuucaaaauacgaagugggaaaagcucaauaaugagaucagaugcacccauuggcaaaugcaagucugaaugcaucacuccaaauggaagcauucccaaugacaaaccauuccaaaauguaaacaggaucacauacggggccugucccagauauguuaagcaaagcacucugaaauuggcaacaggaaugcgaaauguaccagggaaacaaacuagaggcauauuuggcgcaauagcggguuucauagaaaaugguugggagggaaugguggaugguugguacgguuucaggcaucaaaauucugagggaagaggacaagcagcagaucucaaaagcacucaagcagcaaucgaucaaaucaaugggaagcugaaucgauugaucgggaaaaccaacgagaaauuccaucagauugagaaagaauucucagaaguagaagggagaauucaggaccuugagaaauauguugaggacacaaaaauagaucucuggucauacaacgcagagcuucuuguugcccuggagaaccaacauacaauugaucuaacugacucagaaaugaacaaacuguuugaaaaaacaaagaagcaacugagggaaaaugcugaggauaugggcaaugguuguuucaaaauauaccacaaaugugacaaugccugcauaggaucaaucagaaauggaacuuaugaccacgauguauacagggaugaagcauuaaacaaccgguuccagaucaagggaguugagcugaagucaggguacaaagauuggauccuauggauuuccuuugccauaucauguuuuuugcuuuguguugcuuuguugggguucaucaugugggccugccaaaagggcaacauuaggugcaacauuugcauuuga

SEQ ID NO: 43528 - RNA, 1701 nt, Artificial Sequence; identical to SEQ ID NO: 42489
  derived and/or modified CDS sequence (wt) from hemagglutinin__InfluenzaA__AHL97144

SEQ ID NO: 43529 - RNA, 1701 nt, Artificial Sequence
  derived and/or modified CDS sequence (wt) from hemagglutinin__InfluenzaA__AHL97156
augaagacuaucauugcuuugagcuacauucuaugucugguuuucgcucaaaaacuuccuggaaaugacaauagcacggcaacgcugugccuuggacaccaugcaguaccaaacggaacgauagugaaaacaaucacgaaugaccgaauugaaguuacuaaugcuacugagcugguucagaauuccucaauaggugaaauaugcgacaguccucaucagauccuugauggagaaaauugcacacuaauagaugcucuauugggagacccucagugugauggcuuucaaaauaagaaaugggaccuuuuuguugaacgaagcaaagccuacagcaacuguuacccuuaugaugugccggauuaugccucccuuaggucacuaguugccucauccggcacacuggaguuuaacaaugaaagcuucaauugggcuggagucacucaaaacggaacaaguucugcuugcauaaggggaucuaauaguaguuucuuuaguagauuaaauugguugacccacuuaaacuucaaauacccagcauugaacgugacuaugccaaacaaugaacaauuugacaaauuguacauuugggggguucaccacccggguacggacaaggaccaaaucuuccuguaugcucaaucaucaggaagaaucacaguaucuaccaaaagaagccaacaagcuguaaucccgaauaucggaucuagacccagaauaaggaauaucccuagcagaauaagcaucuauuggacaauaguaaaaccgggagacauacuuuugauuaacagcacagggaaucuaauugcuccuagggguuacuucaaaauacgaagugggaaaagcucaauaaugagaucagaugcacccauuggcaaaugcaagucugaaugcaucacuccaaauggaagcauucccaaugacaaaccauuccaaaauguaaacaggaucacauacggggccugucccagauauguuaagcaaagcacucugaaauuggcaacaggaaugcgaaauguaccagagaaacaaacuagaggcauauuuggcgcaauagcggguuucauagaaaaugguugggagggaaugguggaugguugguacgguuucaggcaucaaaauucugagggaagaggacaagcagcagaucucaaaagcacucaagcagcaaucgaucaaaucaaugggaagcugaaucgauugaucgggaaaaccaacgagaaauuccaucagauugaaaaagaauucucagaaguagaagggagaauucaggaccuugagaaauauguugaggacacaaaaauagaucucuggucauacaacgcggagcuucuuguugcccuggagaaccaacauacaauugaucuaacugacucagaaaugaacaaacuguuugaaaaaacaaagaagcaacugagggaaaaugcugaggauaugggcaaugguuguuucaaaauauaccacaaaugugacaaugccugcauaggaucaaucagaaauggaacuuaugaccacgauguauacagggaugaagcauuaaacaaccgguuccagaucaagggaguugagcugaagucaggguacaaagauuggauccuauggauuuccuuugccauaucauguuuuuugcuuuguguugcuuuguugggguucaucaugugggccugccaaaagggcaacauuaggugcaacauuugcauuuga

SEQ ID NO: 43530 - RNA, 1701 nt, Artificial Sequence; identical to SEQ ID NO: 42489
  derived and/or modified CDS sequence (wt) from hemagglutinin__InfluenzaA__AHL97168

SEQ ID NO: 43531 - RNA, 1701 nt, Artificial Sequence
  derived and/or modified CDS sequence (wt) from hemagglutinin__InfluenzaA__AHL97180
augaagacuaucauugcuuugagcuacauucuaugucugguuuucgcucaaaaacuuccuggaaaugacaauagcacggcaacgcugugccuugggcaccaugcaguaccaaacggaacgauagugaaaacaaucacgaaugaccgaauugaaguuacuaaugcuacugagcugguucagaauuccucaauaggugaaauaugcgacaguccucaucagauccuugauggagaaaauugcacacuaauagaugcucuauugggagacccucagugugauggcuuucaaaauaagaaaugggaccuuuuuguugaacgaagcaaagccuacagcaacuguuacccuuaugaugugccggauuaugccucccuuaggucacuaguugccucauccggcacacuggaguuuaacaaugaaagcuucaauugggcuggagucacucaaaacggaacaaguucugcuugcauaaggggaucuaauaguaguuucuuuaguagauuaaauugguugacccacuuaaacuucaaauacccagcauugaacgugacuaugccaaacaaugaacaauuugacaaauuguacauuugggggguucaccacccggguacggacaaggaccaaaucuuccuguaugcucaaucaucaggaagaaucacaguaucuaccaaaagaagccaacaagcuguaaucccgaauaucggaucuagacccagaauaaggaauaucccuagcagaauaagcaucuauuggacaauaguaaaaccgggagacauacuuuugauuaacagcacagggaaucuaauugcuccuagggguuacuucaaaauacgaagugggaaaagcucaauaaugagaucagaugcacccauuggcaaaugcaagucugaaugcaucacuccaaauggaagcauucccaaugacaaaccauuccaaaauguaaacaggaucacauacggggccugucccagauauguuaagcaaagcacucugaaauuggcaacaggaaugcgaaauguaccagagaaacaaaccagaggcauauuuggcgcaauagcggguuucauagaaaaugguugggagggaaugauggaugguugguacgguuucaggcaucaaaauucugagggaagaggacaagcagcagaucucaaaagcacucaagcagcaaucgaucaaaucaaugggaagcugaaucgauugaucgggaaaaccaacgagaaauuccaucagauugaaaaagaauucucagaaguagaagggagaauucaggaccuugagaaauauguugaggacacaaaaauagaucucuggucauacaacgcggagcuucuuguugcccuggagaaccaacauacaauugaucuaacugacucagaaaugaacaaacuguuugaaaaaacaaagaagcaacugagggaaaaugcugaggauaugggcaaugguuguuucaaaauauaccacaaaugugacaaugccugcauaggaucaaucagaaauggaacuuaugaccacgauguauacagggaugaagcauuaaacaaccgguuccagaucaagggaguugagcugaagucaggguacaaagauuggauccuauggauuuccuuugccauaucauguuuuuugcuuuguguugcuuuguugggguucaucaugugggccugccaaaagggcaacauuaggugcaacauuugcauuuga

SEQ ID NO: 43532 - RNA, 1701 nt, Artificial Sequence; identical to SEQ ID NO: 42489
  derived and/or modified CDS sequence (wt) from hemagglutinin__InfluenzaA__AHL97192

SEQ ID NO: 43533 - RNA, 1701 nt, Artificial Sequence; identical to SEQ ID NO: 42489
  derived and/or modified CDS sequence (wt) from hemagglutinin__InfluenzaA__AHL97204

SEQ ID NO: 43534 - RNA, 1701 nt, Artificial Sequence
  derived and/or modified CDS sequence (wt) from hemagglutinin__InfluenzaA__AHL97216
augaagacuaucauugcuuugagcuacauucuaugucugguuuucgcucaaaaacuuccuggaaaugacaauagcacggcaacgcugugccuugggcaccaugcaguaccaaacggaacgauagugaaaacaaucacgaaugaccgaauugaaguuacuaaugcuacugagcugguucagaauuccucaauaggugaaauaugcgacaguccucaucagauccuugauggagaaaauugcacacuaauagaugcucuauugggagacccucagugugauggcuuucaaaauaagaaaugggaccuuuuuguugaacgaagcaaagccuacagcaacuguuacccuuaugaugugccggauuaugccucccuuaggucacuaguugccucauccggcacacuggaguuuaacaaugaaagcuucaauugggcuggagucacucaaaacggaacaaguucugcuugcauaaggggaucuaauaguaguuucuuuaguagauuaaauugguugacccacuuaaacuucaaauacccagcauugaacgugacuaugccaaacaaugaacaauuugacaaauuguacauuugggggguucaccacccggguacggacaaggaccaaaucuuccuguaugcucaaucaucaggaagaaucacaguaucuaccaaaagaagccaacaagcuguaaucccgaauaucggaucuagacccagaauaaggaauaucccuagcagaauaagcaucuauuggacaauaguaaaaccgggagacauacuuuugauuaacagcacagggaaucuaauugcuccuagggguuacuucaaaauacgaagugggaaaagcucaauaaugagaucagaugcacccauuggcaaaugcaagucugaaugcaucacuccaaauggaagcauucccaaugacaaaccauuccaaaauguaaacaggaucacauacggggccugucccagauauguuaagcaaagcacucugaaauuggcaacaggaaugcgaaauguaccagagaaacaaacuagaggcauauuuggcgcaauagcggguuucauagaaaaugguugggagggaaugguggaugguugguacgguuucaggcaucaaaauucugagggaagaggacaagcagcagaucucaaaagcacucaagcagcaaucgaucaaaucaaugggaagcugaaucgauugaucgggaaaaccaacgagaaauuccaucagauugaaaaagaauucucagaaguagaagggagaauucaggaccuugagaaauauguugaggacacaaaaauagaucucuggucauacaacgcggagcuucuuguugcccuggagaaccaacauacaauugaucuaacugacucagaaaugaacaaacuguuugaaaaaacaaagaagcaacugagggaaaaugcugaggauaugggcaaugguuguuucaaaauauaccacaaaugugacaaugccugcauaggaucaaucagaaauggaacuuaugaccacgauguauacagggaugaagcauuaaacaaccgguuccagaucaagggaguugagcugaagucaggguacaaagauuggauccuauggauuuccuuugccauaucauguuuuuugcuuuguguugcuuuguugggguucaucaugugggccugccaaaagggcaacauuaggugcaacauuugcauuuga

SEQ ID NO: 43535 - RNA, 1701 nt, Artificial Sequence
  derived and/or modified CDS sequence (wt) from hemagglutinin__InfluenzaA__AHL97228
augaagacuaucauugcuuugagcuacauucuaugucugguuuucgcucaaaaacuuccuggaaaugacaauagcacggcaacgcugugccuugggcaccaugcaguaccaaacggaacgguagugaaaacaaucacgaaugaccgaauugaaguuacuaaugcuacugagcugguucagaauuccucaauaggugaaauaugcgacaguccucaucagauccuugauggagaaaacugcacacuaauagaugcucuauugggagauccccagugugauggcuuccaaaauaagaaaugggaccuuuuuguugaacgaagcaaagccuacagcaacuguuacccuuaugaugugccggauuaugccucccuuaggucacuaguugccucauccggcacacuggaguuuaacaaugaaagcuucaauuggacuggagucacucaaaacggaacaaguucugcuugcauaaggagaucuaauaauaguuucuuuaguagauuaaauuggcugacccacuuaaacuucaaauacccagcauugaacgugacuaugccaaacaaugaacaauuugacaaauuguacauuugggggguucaccacccggguacggacaaggaccaaaucuuccuguaugcucaaucaucaggaagaaucacaguaucuaccaaaagaagccaacaagcuguaaucccgaauaucggaucuagacccagaauaaggaauaucccuagcaggauaagcaucuauuggacaauaguaaaaccgggagacauacuuuugauuaacagcacagggaaucuaauugcuccuagggguuacuucaaaauacgaagugggaaaagcucaauaaugagaucagaugcacccauuggcaaaugcaagucugaaugcaucacuccaaauggaagcauucccaaugacaaaccauuccaaaauguaaacaggaucacauacggggccugucccagauauguuaagcaaagcacucugaaauuggcaacaggaaugcgaaauguaccagagaaacaaacuagaggcauauuuggcgcaauagcggguuucauagaaaaugguugggagggaaugguggaugguugguacgguuucaggcaucaaaauucugagggaagaggacaagcagcagaucucaaaagcacucaagcagcaaucgaucaaaucaaugggaagcugaaucgauugaucgggaaaaccaacgagaaauuccaucagauugaaaaagaauucucagaaguagaagggagaauucaggaccuugagaaauauguugaggacacuaaaauagaucucuggucauacaaugcggagcuucuuguugcccuggagaaccaacauacaauugaucuaacugacucagaaaugaacaaacuguuugaaaaaacaaagaagcaacugagggaaaaugcugaggauaugggcaaugguuguuucaaaauauaccacaaaugugacaaugccugcauaggaucaaucagaaauggaacuuaugaccacgauguauacagagaugaagcauuaaacaaccgguuccagauuaagggaguugagcugaagucaggguacaaagauuggauccuauggauuuccuuugccauaucauguuuuuugcuuuguguuguuuuguugggguucaucaugugggccugccaaaagggcaacauuaggugcaacauuugcauuuga

SEQ ID NO: 43536 - RNA, 1701 nt, Artificial Sequence; identical to SEQ ID NO: 42489
  derived and/or modified CDS sequence (wt) from hemagglutinin__InfluenzaA__AHL97240

SEQ ID NO: 43537 - RNA, 1701 nt, Artificial Sequence
  derived and/or modified CDS sequence (wt) from hemagglutinin__InfluenzaA__AHL97252
augaagaccaucauugcuuugagcuacauucuaugucuaguuuuugcucaagaacuuccuggaaaugacgacagcacggcaacgcugugccuugggcaccaugcagugccaaacggaacgauagugaaaacaaucacgaaugaccaaauugaaguuacuaaugcuacugaacugguucagaguuccucaacaggugaaauaugcaacaguccucaucagauccuugauggagaaaauugcacacuaauagaugcucuauugggagacccucagugugauggcuuccaaaacaagaaaugggaccuuuuuguugaacgaagcaaagcccacagcaacuguuacccuuaugaugugccggauuaugccucccuuaggucacuaguugccucauccggcacacuggaguuuaacaaugaaaacuucaauuggacuggagucacucaaaacggaacaagcucugcuugcauaaggagaucuaauaauaguuucuuuaguagauugaauugguugacccacuuaaacuucaaauacccagcauugaacgugacuaugccaaacaaugaacaauuugacaaauuguacauuugggggguucaccacccggguacggacaaggaccaaaucuuccuguaugcucaagcaucaggaagaaucacaguaucuaccaaaagaagccaacaagcuguaauuccgaauaucggaucuagacccagaguaaggaauaucccuagcagaguaagcaucuauuggacaauaguaaaaccgggagacauacuuuugauuaacagcacagggaaucuaauugcuccuagggguuacuucaaaauacgaagugggaaaagcucaauaaugagaucagaugcacccauuggcaaaugcaauucugcaugcaucacuccaaauggaagcauucccaaugacaaaccauuccaaaauguaaacaggaucacauacggggccugucccagauaugucaagcaaaacacucugaaauuggcaacaggaaugagaaauguaccagagaaacaaacuagaggcauauuuggcgcaauagcggguuucauagaaaaugguugggagggaaugguggaugguugguacgguuucaggcaucaaaauucugagggaaggggacaagcagcagaucucaaaagcacucaagcagcaaucgaucaaaucaaugggaagcugaauagauugaucgggaaaaccaacgagaaauuccaucagauugaaaaagaauucucagaagucgaagggagaauucaggaccuugagaaauauguugaggacacuaaaauagaucucuggucauacaacgcggagcuucuuguugcccuggagaaccaacacacaauugaucuaacugacucagaaaugaacaaacuguuugaaaaaacaaagaagcaacugagggaaaaugcugaggauaugggcaaugguuguuucaaaauauaccacaaaugugacaaugccugcauaggaucaaucagaaauggaacuuaugaucacgauguguacagagaugaagcauuaaacaaccgauuccagaucaagggaguugagcugaagucaggguacaaagauuggauccuauggauuuccuuugccauaucauguuuuuugcuuuguguugcuuuguugggguucaucaugugggccugccaaaaaggcaacauuaggugcaacauuugcauuuga

SEQ ID NO: 43538 - RNA, 1701 nt, Artificial Sequence; identical to SEQ ID NO: 42048
  derived and/or modified CDS sequence (wt) from hemagglutinin__InfluenzaA__AHL97264

SEQ ID NO: 43539 - RNA, 1701 nt, Artificial Sequence; identical to SEQ ID NO: 42489
  derived and/or modified CDS sequence (wt) from hemagglutinin__InfluenzaA__AHL97276

SEQ ID NO: 43540 - RNA, 1701 nt, Artificial Sequence
  derived and/or modified CDS sequence (wt) from hemagglutinin__InfluenzaA__AHL97288
augaagacuaucauugcuuugagcuacauucuaugucugguuuucgcucaaaaacuuccuggaaaugacaauagcacggcaacgcugugccuugggcaccaugcaguaccaaacggaacgauagugaaaacaaucacgaaugaccgaauugaaguuacuaaugcuacugagcugguucagaauuccucaauaggugaaauaugcaacaguccucaucagauucuugauggagaaaacugcacacuaauagaugcucuauugggagacccucagugugauggcuuucaaaauaagaaaugggaccuuuuuguugaacgaagcaaagccuacagcaacuguuacccuuaugaugugccggauuaugccucccuuaggucacuaguugccucauccggcacacuggaguuuaacaaugaaagcuucaauuggacuggagucacucaaaacggaacaaguucugcuugcauaaggagaucuaauaguaguuucuuuaguagauuaaauugguugacccacuuaaacuucaaauacccagcauugaacgugacuaugccaaacaaugaacaauuugacaaauuguacauuugggggguucaccacccggguacggacaaggaccaaaucuuccuguaugcucaaucaucaggaagaaucacaguaucuaccaaaagaagccaacaagcuguaaucccaaauaucggaucuagacccagaauaaggaauauuccuagcagaauaagcaucuauuggacaauaguaaaaccgggagacauacuuuugauuaacagcacagggaaucuaauugcuccuagggguuacuucaaaauacgaagugggaaaagcucaauaaugagaucagaugcacccauuggcaaaugcaagucugaaugcaucacuccaaauggaagcauucccaaugacaaaccauuccaaaauguaaacaggaucacauacggggccugucccagauauguuaagcaaagcacucugaaauuggcaacaggaaugcgaaauguaccagagaaacaaacuagaggcauauuuggcgcaauagcagguuucauagaaaaugguugggaggggaugguggaugguugguacgguuucaggcaucaaaauucugagggaagaggacaagcagcagaucucaaaagcacccaagcagcaaucgaucaaaucaaugggaagcugaaucgauugaucgggaaaaccaacgagaaauuccaucagauugaaaaagaauucucagaaguagaagggagaauucaggaccuugagaaauauguugaggacacuaaaauagaucucuggucauacaacgcggagcuucuuguugcccuggagaaccaacauacaauugaucuaacugacucagaaaugaacaaacuguuugaaaaaauaaagaaacaacugagggaaaaugcugaggauaugggcaaugguuguuucaaaauauaccacaaaugugacaaugccugcauaggaucaauaagaaauggaacuuaugaccacaauguguacagggaugaagcauuaaacaaccgguuccagaucaagggaguugagcugaagucaggguacaaagauuggauccuauggauuuccuuugccauaucauguuuuuugcuuuguguugcuuuguugggguucaucaugugggccugccaaaagggcaacauuaggugcaacauuugcauuuga

SEQ ID NO: 43541 - RNA, 1701 nt, Artificial Sequence; identical to SEQ ID NO: 42492
  derived and/or modified CDS sequence (wt) from hemagglutinin__InfluenzaA__AHL97300

SEQ ID NO: 43542 - RNA, 1701 nt, Artificial Sequence; identical to SEQ ID NO: 42489
  derived and/or modified CDS sequence (wt) from hemagglutinin__InfluenzaA__AHL97312

SEQ ID NO: 43543 - RNA, 1701 nt, Artificial Sequence; identical to SEQ ID NO: 42059
  derived and/or modified CDS sequence (wt) from hemagglutinin__InfluenzaA__AHL97336

SEQ ID NO: 43544 - RNA, 1701 nt, Artificial Sequence; identical to SEQ ID NO: 42055
  derived and/or modified CDS sequence (wt) from hemagglutinin__InfluenzaA__AHL97348

SEQ ID NO: 43545 - RNA, 1701 nt, Artificial Sequence
  derived and/or modified CDS sequence (wt) from hemagglutinin__InfluenzaA__AHL97372
augaagacuaucauugcuuugagcuacauucuaugucugguuuucgcucaaaaacuuccuggaaaugacaauagcacggcaacgcugugccuugggcaccaugcaguaccaaacggaacgauagugaaaacaaucacgaaugaccgaauugaagucacuaaugcuacugagcugguucagaauuccucaauaggugaaauaugcgacaguccucaucagauccuugauggagaaaacugcacacuaauagaugcucuauugggagacccucagugugauggcuuucaaaauaagaaaugggaccuuuuuguugaacgaagcaaugccuacagcaacuguuacccuuaugaugugccggauuaugccucccuuaggucacuaguugccucauccggcacacuggaguuuaacaaugaaagcuucaauugggcuggggucacucaaaacggaacaaguucugcuugcauaaggggaucuaauaguaguuucuuuaguagauuaaauugguugacccacuuaaacuucaaauacccagcauugaacgugacuaugccaaacaaugaacaauuugacaaauuguacauuugggggguucaccacccggguacggacaaggaccaaaucuuccuguaugcucaaucaucaggaagaaucacaguaucuaccaaaagaagccaacaagcuguaaucccgaauaucggaucuagacccagaauaaggaauaucccuagcagaauaagcaucuauuggacaauaguaaaaccgggagacauacuuuugauuaacagcacagggaaucuaauugcuccuagggguuacuucaaaauacgaagugggaaaagcucaauaaugagaucagaugcacccauuggcaaaugcaagucugaaugcaucacuccaaauggaagcauucccaaugacaaaccauuccaaaauguaaacaggaucacauacggggccugucccagauauguuaagcaaagcacucugaaauuggcaacaggaaugcgaaauguaccagagaaacaaaccagaggcauauuuggcgcaauagcggguuucauagaaaaugguugggagggaaugguggaugguugguacgguuucaggcaucaaaauucugagggaagaggacaagcagcagaucucaaaagcacucaagcagcaaucgaucaaaucaaugggaagcugaaucgauugaucgggaaaaccaacgagaaauuccaucagauugaaaaagaauucucagaaguagaagggagaauucaggaccuugagaaauauguugaggacacaaaaauagaucucuggucauacaacgcggagcuucuuguugcccuggagaaccaacauacaauugaucuaacugacucagaaaugaacaaacuguuugaaaaaacaaagaagcaacugagggaaaaugcugaggauaugggcaaugguuguuucaaaauauaccacaaaugugacaaugccugcauaggaucaaucagaaauggaacuuaugaccacgauguauacagggaugaagcauuaaacaaccgguuccagaucaagggaguugagcugaagucaggguacaaagauuggauccuauggauuuccuuugccauaucauguuuuuugcuuuguguugcuuuguugggguucaucaugugggccugccaaaagggcaacauuaggugcaacauuugcauuuga

SEQ ID NO: 43546 - RNA, 1701 nt, Artificial Sequence; identical to SEQ ID NO: 42489
  derived and/or modified CDS sequence (wt) from hemagglutinin__InfluenzaA__AHL97384

SEQ ID NO: 43547 - RNA, 1701 nt, Artificial Sequence
  derived and/or modified CDS sequence (wt) from hemagglutinin__InfluenzaA__AHL97396
augaagacuaucauugcuuugagcuacauucuaugucugguuuucgcucaaaaacuuccuggaaaugacaauagcacggcaacgcugugccuugggcaccaugcaguaccaaacggaacgauagugaaaacaaucacgaaugaccgaauugaaguuacuaaugcuacugagcugguucagaauuccucaauaggugaaauaugcgacaguccucaucagauccuugauggagaaaauugcacacuaauagaugcucuauugggagacccucagugugauggcuuucaaaauaagaaaugggaccuuuuuguugaacgaagcaaagccuacagcaacuguuacccuuaugaugugccggauuaugccucccuuaggucacuaguugcaucauccggcacacuggaguuuaacaaugaaagcuucaauuggacuggagucacucaaaacggaacaaguucugcuugcauaaggagaucuaauaguaguuucuuuaguagauuaaauugguugacccacuuaaacuucaaauacccagcauugaacgugacuaugccaaacaaugaacaauuugacaaauuguacauuuggggaguucaccacccggguacggacaaggaccaaaucuuccuguaugcucaaucaucaggaagaaucacaguaucuaccaaaagaagccaacaagcuguaaucccaaauaucggaucuagacccagaauaaggaauaucccuagcagaauaagcaucuauuggacaauaguaaaaccgggagacauacuuuugauuaacagcacagggaaucuaauugcuccuagggguuacuucaaaauacgaagugggaaaagcucaauaaugagaucagaugcacccauuggcaaaugcaagucugaaugcaucacuccaaauggaagcauucccaaugacaaaccauuccaaaauguaaacaggaucacauacggggccugucccagauauguuaagcaaagcacucugaaauuggcaacaggaaugcgaaauguaccagagaaacaaacuagaggcauauuuggcgcaauagcggguuucauagaaaaugguugggagggaaugguggaugguugguacgguuucaggcaucaaaauucugagggaagaggacaagcagcagaucucaaaagcacucaagcagcaaucgaucaaaucaaugggaagcugaaucgauugaucgggaaaaccaacgagaaauuccaucagauugaaaaagaauucucagaaguagaagggagaauucaggaccuugagaaauauguugaggacacuaaaauagaucucuggucauacaacgcggagcuucuuguugcccuggagaaucaacauacaauugaucuaacugacucagaaaugaacaaacuguuugaaaaaacaaagaagcaacugagggaaaaugcugaggauaugggcaaugguuguuucaaaauauaccacaaaugugacaaugccugcauaggaucaaucagaaauggaacuuaugaccacaauguguacagggaugaagcauuaaacaaccgguuccagaucaagggaguugagcuuaagucaggguacaaagauuggauccuauggauuuccuuugccauaucauguuuuuugcuuuguguugcuuuguugggguucaucaugugggccugccaaaagggcaacauuaggugcaacauuugcauuuga

SEQ ID NO: 43548 - RNA, 1701 nt, Artificial Sequence; identical to SEQ ID NO: 42100
  derived and/or modified CDS sequence (wt) from hemagglutinin__InfluenzaA__AHL97408

SEQ ID NO: 43549 - RNA, 1701 nt, Artificial Sequence; identical to SEQ ID NO: 43518
  derived and/or modified CDS sequence (wt) from hemagglutinin__InfluenzaA__AHL97420

SEQ ID NO: 43550 - RNA, 1701 nt, Artificial Sequence
  derived and/or modified CDS sequence (wt) from hemagglutinin__InfluenzaA__AHL97444
augaagacuaucauugcuuugagcuacauucuaugucugguuuucgcucaaaaacuuccuggaaaugacaauagcacggcaacgcugugccuugggcaccaugcaguaccaaacggaacgauagugaaaacaaucacgaaugaccgaauugaagucacuaaugcuacugagcugguucagaauuccucaauaggugaaauaugcgacaguccucaucagauccuugauggagaaaacugcacacuaauagaugcucuauugggagacccucagugugauggcuuucaaaauaagaaaugggaccuuuuuguugaacgaagcaaagccuacagcaacuguuacccuuaugaugugccggauuaugccucccuuaggucacuaguugccucauccggcacacuggaguuuaacaaugaaagcuucaauugggcuggggucacucaaaacggaacaaguucugcuugcauaaggggaucuaauaguaguuucuuuaguagauuaaauugguugacccacuuaaacuucaaauacccagcauugaacgugacuaugccaaacaaugaacaauuugacaaauuguacauuugggggguucaccacccggguacggacaaggaccaaaucuuccuguaugcucaaucaucaggaagaaucacaguaucuaccaaaagaagccaacaagcuguaaucccgaauaucggaucuagacccagaauaaggaauaucccuagcagaauaagcaucuauuggacaauaguaaaaccgggagacauacuuuugauuaacagcacagggaaucuaauugcuccuagggguuacuucaaaauacgaagugggaaaagcucaauaaugagaucagaugcacccauuggcaaaugcaagucugaaugcaucacuccaaauggaagcauucccaaugacaaaccauuccaaaauguaaacaggaucacauacgggaccugucccagauauguuaagcaaagcacucugaaauuggcaacaggaaugcgaaauguaccagagaaacaaaccagaggcauauuuggcgcaauagcggguuucauagaaaaugguugggagggaaugguggaugguugguacgguuucaggcaucaaaauuccgagggaagaggacaagcagcagaucucaaaagcacucaagcagcaaucgaucaaaucaaugggaagcugaaucgauugaucgggaaaaccaacgagaaauuccaucagauugaaaaagaauucucagaaguagaagggagaauucaggaccuugagaaauauguugaggacacaaaaauagaucucuggucauacaacgcggagcuucuuguugcccuggagaaccaacauacaauugaucuaacugacucagaaaugaacaaacuguuugaaaaaacaaagaagcaacugagggaaaaugcugaggauaugggcaaugguuguuucaaaauauaccacaaaugugacaaugccugcauaggaucaaucagaaauggaacuuaugaccacgauguauacagggaugaagcauuaaacaaccgguuccagaucaagggaguugagcugaagucaggguacaaagauuggauccuauggauuuccuuugccauaucauguuuuuugcuuuguguugcuuuguugggguucaucaugugggccugccaaaagggcaacauuaggugcaacauuugcauuuga

SEQ ID NO: 43551 - RNA, 1701 nt, Artificial Sequence; identical to SEQ ID NO: 42492
  derived and/or modified CDS sequence (wt) from hemagglutinin__InfluenzaA__AHL97456

SEQ ID NO: 43552 - RNA, 1701 nt, Artificial Sequence
  derived and/or modified CDS sequence (wt) from hemagglutinin__InfluenzaA__AHL97468
augaagacuaucauugcuuugagcuacauucuaugucugguuuucgcucaaaaacuuccuggaaaugacaauagcacggcaacgcugugccuugggcaccaugcaguaccaaacggaacgauagugaaaacaaucacgaaugaccgaauugaaguuacuaaugcuacugagcugguucagaauuccucaauaggugaaauaugcgacaguccucaucagauucuugauggagaaaacugcacacuaauagaugcucuauugggagacccucagugugauggcuuucaaaauaagaaaugggaccuuuuuguugaacgaagcaaagccuacagcaacuguuacccuuaugaugugccggauuaugccucccuuagaucacuaguugccucauccggcacacuggaguuuaacaaugaaagcuucaauuggacuggagucacucaaaacggaacaaguucugcuugcauaaggagaucuaauaguaguuucuuuaguagauuaaauugguugacccacuuaaacuucaaauacccagcauugaacgugacuaugccaaacaaugaacaauuugacaaauuguacauuugggggguucaccacccggguacggacaaggaccaaaucuuccuguaugcucaaucaucaggaagaaucacaguaucuaccaaaagaagccaacaagcuguaaucccaaauaucggaucuagacccagaauaaggaauauuccuagcagaauaagcaucuauuggacaauaguaaaaccgggagacauacuuuugauuaacagcacagggaaucuaauugcuccuagggguuacuucaaaauacgaagugggaaaagcucaauaaugagaucagaugcacccauuggcaaaugcaagucugaaugcaucacuccaaauggaagcauucccaaugacaaaccauuccaaaauguaaacaggaucacauacggggccugucccagauauguuaagcaaagcacucugaaauuggcaacaggaaugcgaaauguaccagagaaacaaacuagaggcauauuuggcgcaauagcagguuucauagaaaaugguugggaggggaugauggaugguugguacgguuucaggcaucaaaauucugagggaagaggacaagcagcagaucucaaaagcacccaagcagcaaucgaucaaaucaaugggaagcugaaucgauugaucgggaaaaccaacgagaaauuccaucagauugaaaaagaauucucagaaguagaagggagaauucaggaccuugagaaauauguugaggacacuaaaauagaucucuggucauacaacgcggagcuucuuguugcccuggagaaccaacauacaauugaucuaacugacucagaaaugaacaaacuguuugaaaaaacaaagaagcaacugagggaaaaugcugaggauaugggcaaugguuguuucaaaauauaccacaaaugugacaaugccugcauaggaucaauaagaaauggaacuuaugaccacaauguguacagggaugaagcauuaaacaaccgguuccagaucaagggaguugagcugaagucaggguacaaagauuggauccuauggauuuccuuugccauaucauguuuuuugcuuuguguugcuuuguugggguucaucaugugggccugccaaaagggcaacauuagaugcaacauuugcauuuga

SEQ ID NO: 43553 - RNA, 1701 nt, Artificial Sequence; identical to SEQ ID NO: 42059
  derived and/or modified CDS sequence (wt) from hemagglutinin__InfluenzaA__AHL97480

SEQ ID NO: 43554 - RNA, 1701 nt, Artificial Sequence; identical to SEQ ID NO: 42489
  derived and/or modified CDS sequence (wt) from hemagglutinin__InfluenzaA__AHL97493

SEQ ID NO: 43555 - RNA, 1701 nt, Artificial Sequence
  derived and/or modified CDS sequence (wt) from hemagglutinin__InfluenzaA__AHL97505
augaagacuaucauugcuuugagcuacauucuaugucugguuuucgcucaaaaacuuccuggaaaugacaauagcacggcaacgcugugccuugggcaccaugcaguaccaaacggaacgauagugaaaacaaucaugaaugaccgaauugaaguuacuaaugcuacugagcugguucagaauuccucaauaggugaaauaugcgacaguccucaucagauccuugauggagaaaauugcacacuaauagaugcucuauugggagacccucagugugauggcuuucaaaauaagaaaugggaccuuuuuguugaacgaagcaaagccuacagcaacuguuacccuuaugaugugccggauuaugccucccuuaggucacuaguugccucauccggcacacuggaguuuaacaaugaaagcuucaauugggcuggagucacucaaaacggaacaaguucugcuugcauaaggggaucuaauaguaguuucuuuaguagauuaaauugguugacccacuuaaacuucaaauacccagcauugaacgugacuaugccaaacaaugaacaauuugacaaauuguacauuugggggguucaccacccggguacggacaaggaccaaaucuuccuguaugcucaaucaucaggaagaaucacaguaucuaccaaaagaagccaacaagcuguaaucccgaauaucggaucuagacccagaauaaggaauaucccuagcagaauaagcaucuauuggacaauaguaaaaccgggagacauacuuuugauuaacagcacagggaaucuaauugcuccuagggguuacuucaaaauacgaagugggaaaagcucaauaaugagaucagaugcacccauuggcaaaugcaagucugaaugcaucacuccaaauggaagcauucccaaugacaaaccauuccaaaauguaaacaggaucacauacggggccugucccagauauguuaagcaaagcacucugaaauuggcaacaggaaugcgaaauguaccagagaaacaaacuagaggcauauuuggcgcaauagcggguuucauagaaaaugguugggagggaaugauggaugguugguacgguuucaggcaucaaaauucugagggaagaggacaagcagcagaucucaaaagcacucaagcagcaaucgaucaaaucaaugggaagcugaaucgauugaucgggaaaaccaacgagaaauuccaucagauugaaaaagaauucucagaaguagaagggagaauucaggaccuugagaaauauguugaggacacaaaaauagaucucuggucauacaacgcggagcuucuuguugcccuggagaaccaacauacaauugaucuaacugacucagaaaugaacaaacuguuugaaaaaacaaagaagcaacugagggaaaaugcugaggauaugggcaaugguuguuucaaaauauaccacaaaugugacaaugccugcauaggaucaaucagaaauggaacuuaugaccaugauguauacagggaugaagcauuaaacaaccgguuccagaucaagggaguugagcugaagucaggguacaaagauuggauccuauggauuuccuuugccauaucauguuuuuugcuuuguguugcuuuguugggguucaucaugugggccugccaaaagggcaacauuaggugcaacauuugcauuuga

SEQ ID NO: 43556 - RNA, 1701 nt, Artificial Sequence
  derived and/or modified CDS sequence (wt) from hemagglutinin__InfluenzaA__AHL97517
augaagacuaucauugcuuugagcuacauucuaugucugguuuucgcucaaaaacuuccuggaaaugacaauagcacggcaacgcugugccuugggcaccaugcaguaccaaacggaacgauagugaaaacaaucacgaaugaccgaauugaaguuacuaaugcuacugagcugguucagaauuccucaauaggugaaauaugcgacaguccucaucagauccuugauggagaaaauugcacacuaauagaugcucuauugggagacccucagugugauggcuuucaaaauaagaaaugggaccuuuuuguugaacgaagcaaagccuacagcaacuguuacccuuaugaugugccggauuaugccucccuuaggucacuaguugccucauccggcacacuggaguuuaacaaugaaagcuucaauuggacuggagucacucaaaacggaacaaguucugcuugcauaaggagaucuaauaguaguuucuuuaguagauuaaauugguugacccacuuaaacuucaaauacccagcauugaacgugacuaugccaaacaaugaacaauuugacaaauuguacauuuggggaguucaccacccggguacggacaaggaccaaaucuuccuguaugcucaaucaucaggaagaaucacaguaucuacccaaagaagccaacaagcuguaaucccaaauaucggaucuagacccagaauaaggaauaucccuagcagaauaagcaucuauuggacaauaguaaaaccgggagacauacuuuugauuaacagcacagggaaucuaauugcuccuagggguuacuucaaaauacgaagugggaaaagcucaauaaugagaucagaugcacccauuggcaaaugcaagucugaaugcaucacuccaaauggaagcauucccaaugacaaaccauuccaaaauguaaacaggaucacauacggggccugucccagauauguuaagcaaagcacucugaaauuggcaacaggaaugcgaaauguaccagagaaacaaacuagaggcauauuuggcgcaauagcggguuucauagaaaaugguugggagggaaugguggaugguugguacgguuucaggcaucaaaauucugagggaagaggacaagcagcagaucucaaaagcacucaagcagcaaucgaucaaaucaaugggaagcugaaucgauugaucgggaaaaccaacgagaaauuccaucagauugaaaaagaauucucagaaguagaagggagaauucaggaccuugagaaauauguugaggacacuaaaauagaucucuggucauacaacgcggagcuucuuguugcccuggagaaucaacauacaauugaucuaacugacucagaaaugaacaaacuguuugaaaaaacaaagaagcaacugagggaaaaugcugaggauaugggcaaugguuguuucaaaauauaccacaaaugugacaaugccugcauaggaucaaucagaaauggaacuuaugaccacaauguguacagggaugaagcauuaaacaaccgguuccagaucaagggaguugagcuuaagucaggguacaaagauuggauccuauggauuuccuuugccauaucauguuuuuugcuuuguguugcuuuguugggguucaucaugugggccugccaaaagggcaacauuaggugcaacauuugcauuuga

SEQ ID NO: 43557 - RNA, 1701 nt, Artificial Sequence
  derived and/or modified CDS sequence (wt) from hemagglutinin__InfluenzaA__AHL97529
augaagacuaucauugcuuugagcuacauucuaugucugguuuucgcucaaaaacuuccuggaaaugacaauagcacggcaacgcugugccuugggcaccaugcaguaccaaacggaacgauagugaaaacaaucacgaaugaccgaauugaaguuacuaaugcuacugagcugguucagaauuccucaauaggugaaauaugcgacaguccucaucagauccuugauggagaaaacugcacacuaauagaugcucuauugggagacccucagugugauggcuuucaaaauaagaaaugggaccuuuuuguugaaagaagcaaagccuacagcaacuguuacccuuaugaugugccggauuaugccucccuuaggucacuaguugccucauccggcacacuggaguuuaacaaugaaagcuucaauuggacuggagucacucaaaacggaacaaguucugcuugcauaaggagaucuaauaguaguuucuuuaguagauuaaauugguugacccacuuaaacuucaaauacccagcauugaacgugacuaugccaaacaaugaacaauuugacaaauuguacauuugggggguucaccacccggguacggacaaggaccaaaucuuccuguaugcucaaucaucaggaagaaucacaguaucuaccaaaagaagccaacaagcuguaaucccgaauaucggaucuagacccagaauaaggaauaucccuagcagaauaagcaucuauuggacaauaguaaaaccgggagacauacuuuugauuaacagcacagggaaucuaauugcuccuagggguuacuucaaaauacgaagugggaaaagcucaauaaugagaucagacgcacccauuggcaaaugcaagucugaaugcaucacuccaaauggaagcauucccaaugacaaaccauuccaaaauguaaacaggaucacauacggggccugucccagauauguuaagcaaagcacucugaaauuggcaacaggaaugcgaaauguaccagagaaacaaacuagaggcauauuuggcgcaauagcggguuucauagaaaaugguugggagggaaugguggaugguugguacgguuucaggcaucaaaauucugagggaagaggacaagcagcagaucucaaaagcacucaagcagcaaucgaucaaaucaaugggaagcugaaucgauugaucgggaaaaccaacgagaaauuccaucagauugaaaaagaauucucagaaguagaagggagaauucaggaccuugagaaauauguugaggacacuaaaauagaucucuggucauacaacgcggagcuucuuguugcccuggagaaccaacauacaauugaucuaacugacucagaaaugaacaaacuguuugaaaaaacaaagaagcaacugagagaaaaugcugaggauaugggcaaugguuguuucaaaauauaccacaaaugugacaaugccugcauaggaucaaucagaaauggaacuuaugaccacgauguguacagggaugaagcauuaaacaaccgguuccagaucaagggaguugagcugaagucaggguacaaagauuggauccuauggauuuccuuugccauaucauguuuuuugcuuuguguugcuuuguugggguucaucaugugggccugccaaaagggcaacauuaggugcaacauuugcauuuga

SEQ ID NO: 43558 - RNA, 1701 nt, Artificial Sequence
  derived and/or modified CDS sequence (wt) from hemagglutinin__InfluenzaA__AHL97541
augaagacuaucauugcuuugagcuacauucuaugucugguuuucgcucaaaaacuuccuggaaaugacaauagcacggcaacgcugugccuugggcaccaugcaguaccaaacggaacgauagugaaaacaaucacgaaugaccgaauugaaguuacuaaugcuacugagcugguucagaauuccucaauaggugaaauaugcgacaguccucaucagauccuugauggagaaaacugcacacuaauagaugcucuauugggagacccucagugugauggcuuucaaaauaagaaaugggaccuuuuuguugaacgaagcaaagccuacagcaacuguuacccuuaugaugugccggauuaugccucccuuaggucacuaguugccucauccggcacacuggaguuuaacaaugaaagcuucaauugggcuggagucacucaaaacggaacaaguucugcuugcauaaggggaucuaauaguaguuucuuuaguagauuaaauugguugacccacuuaaacuucaaauacccagcauugaacgugacuaugccaaacaaugaacaauuugacaaauuguacauuugggggguucaccacccggguacggacaaggaccaaaucuuccuguaugcucaaucaucaggaagaaucacaguaucuaccaaaagaagccaacaagcuguaaucccgaauaucggaucuagacccagaauaaggaauaucccuagcagaauaagcaucuauuggacaauaguaaaaccgggagacauacuuuugauuaacagcacagggaaucuaauugcuccuagggguuacuucaaaauacgaagugggaaaagcucaauaaugagaucagaugcacccauuggcaaaugcaagucugaaugcaucacuccaaauggaagcauucccaaugacaaaccauuccaaaauguaaacaggaucacauacggggccugucccagauauguuaagcaaagcacucugaaauuggcaacaggaaugcgaaauguaccagagaaacaaacuagaggcauauuuggcgcaauagcggguuucauagaaaaugguugggagggaaugauggaugguugguacgguuucaggcaucaaaauucugagggaagaggacaagcagcagaucucaaaagcacucaagcagcaaucgaucaaaucaaugggaagcugaaucgauugaucgggaaaaccaacgagaaauuccaucagauugaaaaagaauucucagaaguagaagggagaauucaggaccuugagaaauauguugaggacacaaaaauagaucucuggucauacaacgcggagcuucuuguugcccuggagaaccaacauacaauugaucuaacugacucagaaaugaacaaacuguuugaaaaaacaaagaagcaacugagggaaaaugcugaggauaugggcaaugguuguuucaaaauauaccacaaaugugacaaugccugcauaggaucaaucagaaauggaacuuaugaccacgauguauacagggaugaagcauuaaacaaccgguuucagaucaagggaguugagcuaaagucaggguacaaagauuggauccuauggauuuccuuugccauaucauguuuuuugcuuuguguugcuuuguugggguucaucaugugggccugccaaaagggcaacauuaggugcaacauuugcauuuga

SEQ ID NO: 43559 - RNA, 1701 nt, Artificial Sequence
  derived and/or modified CDS sequence (wt) from hemagglutinin__InfluenzaA__AHL97553
augaagacuaucauugcuuugagcuacauucuaugucugguuuucgcucaaaaacuuccuggaaaugacaauagcacggcaacgcugugccuugggcaccaugcaguaccaaacggaacgauagugaaaacaaucacgaaugaccgaauugaaguuacuaaugcuacugagcugguucagaauuccucaauaggugaaauaugcgacaguccucaucagauccuugauggagaaaacugcacacuaauagaugcucuauugggagacccucagugugauggcuuucaaaauaagaaaugggaccuuuuuguugaacggagcaaagccuacagcaacuguuacccuuaugaugugccggauuaugccucccuuaggucacuaguugccucauccggcacacuggaguuuaacaaugaaagcuucaauugggcuggagucacucaaaacggaacaaguucugcuugcauaaggggaucuaauaguaguuucuuuaguagauuaaauugguugacccacuuaaacuucaaauacccagcauugaacgugacuaugccaaacaaugagcaauuugacaaauuguacauuugggggguucaccacccggguacggacaaggaccaaaucuuccuguaugcucaaucaucaggaagaaucacaguaucuaccaaaagaagccaacaagcuguaaucccgaauaucggaucuagacccagaauaaggaauaucccuagcagaauaagcaucuauuggacaauaguaaaaccgggagacauacuuuugauuaacagcacagggaaucuaauugcuccuagggguuacuucaaaauacgaagugggaaaagcucaauaaugagaucagaugcacccauuggcaaaugcaaaucugaauguaucacuccaaauggaagcauucccaaugacaaaccauuccaaaauguaaacaggaucacauacggggccugucccagauauguuaagcaaagcacucugaaauuggcaacaggaaugcgaaauguaccagagaaacaaacuagaggcauauuuggcgcaauagcggguuucauagaaaaugguugggagggaaugguggaugguugguacgguuucaggcaucaaaauucugagggaagaggacaagcagcagaucucaaaagcacucaagcagcaaucgaucaaaucaaugggaagcugaaucgauugaucgggaaaaccaacgagaaauuccaucagauugaaaaagaauucucagaaguagaagggagaauucaggaccuugagaaauauguugaggacacaaaaauagaucucuggucauacaacgcggagcuucuuguugcccuggagaaccaacauacaauugaucuaacugacucagaaaugaacaaacuguuugaaaaaacaaagaagcaacugagggaaaaugcugaggauaugggcaaugguuguuucaaaauauaccacaaaugugacaaugccugcauaggaucaaucagaaauggaacuuaugaccacgauguauacagggaugaagcauuaaacaaccgguuccagaucaagggaguugagcugaagucaggguacaaagauuggauccuauggauuuccuuugccauaucauguuuuuugcuuuguguugcuuuguugggguucaucaugugggccugccaaaagggcaacauuaggugcaacauuugcauuuga

SEQ ID NO: 43560 - RNA, 1701 nt, Artificial Sequence
  derived and/or modified CDS sequence (wt) from hemagglutinin__InfluenzaA__AHL97565
augaagaccaucauugcuuugagcuacauucuaugucuaguuuucgcucaagaacuuccuggaaaugacgacagcacggcaacacugugccuugggcaccaugcagugccaaacggaacgauagugaaaacaaucacgaaugaccaaauugaaguuacuaaugcuacugagcugguucagaguuccucaacaggugaaauaugcaacaguccucaucagauccuugauggagaaaacugcacacuaauagaugcucuauugggagacccucagugugauggcuuccaaaacaagaaaugggaccuuuuuguugaacgaagcaaagcccacagcaacuguuacccuuaugaugugccagauuaugccucccuuaggucacuaguugccucauccggcacacuggaguuuaacaaugaaagcuucaauuggacuggagucacucaaaacggaacaagcucugcuugcauaaggagaucuaauaauaguuucuuuaguagauugaauugguugacccacuuaaacuucaaauacccagcauugaacgugacuaugccaaacaaugaacaauuugacaaauuguacauuugggggguucaccacccggguacggacaaggaccaaaucuuccuguaugcucaagcaucaggaagaaucacaguaucuaccaaaagaagccaacaagcuguaauuccgaauaucggaucuagacccagaguaaggaauaucccuagcagaguaagcaucuauuggacaauaguaaaaccgggagacauacuuuugauuaacagcacagggaaucuaauugcuccuagggguuacuucaaaauacgaagugggaaaagcucaauaaugagaucagaugcacccauuggcaaaugcaauucugcaugcaucacuccaaauggaagcauucccaaugacaaaccauuccaaaauguaaacaggaucacauacggggccugucccagauaugucaagcaaaacacucugaaauuggcaacaggaaugagaaauguaccagagaaacaaacuagaggcauauuuggcgcaauagcagguuucauagaaaaugguugggagggaaugguggaugguugguacgguuucaggcaucaaaauucugagggaaggggacaagcagcagaucucaaaagcacucaagcagcaaucgaucaaaucaaugggaagcugaauagauugaucgggaaaaccaacgagaaauuccaucagauugaaaaagaauucucagaagucgaagggagaauucaggaccuugagaaauauguugaggacacuaaaauagaucucuggucauacaacgcggagcuucuuguugcccuggagaaccaacacacaauugaucuaacugacucagaaaugaacaagcuguuugaaaaaacaaagaagcaacugagggaaaaugcugaggauaugggcaaugguuguuucaaaauauaccacaaaugugacaaugccugcauaggaucaaucagaaauggaacuuaugaucacgauguguacagagaugaagcauuaaacaaccgauuucagaucaagggaguugagcugaagucaggguacaaagauuggauccuauggauuuccuuugccauaucauguuuuuugcuuuguguugcuuuguugggguucaucaugugggccugccaaaaaggcaacauuaggugcaacauuugcauuuga

SEQ ID NO: 43561 - RNA, 1701 nt, Artificial Sequence
  derived and/or modified CDS sequence (wt) from hemagglutinin__InfluenzaA__AHL97577
augaagacuaucauugcuuugagcuacauucuaugucugguuuucgcucaaaaaauuccuggaaaugacaauagcacggcaacgcugugccuugggcaccaugcaguaccaaacggaacgauagugaaaacaaucacgaaugaccgaauugaaguuacuaaugcuacugagcugguucagaauuccucaauaggugaaauaugcgacaguccucaucagauccuugauggagaaaacuguacacuaauagaugcucuauugggagacccucagugugauggcuuucaaaauaagaaaugggaccuuuuuguugaacgaagcaaagccuacagcaacuguuacccuuaugaugugccggauuaugccucccuuaggucacuaguugccucauccggcacacuggaguuuaacaaugaaagcuucaauuggacuggagucacucaaaacggaacaaguucugcuugcauaaggggaucuaauaguaguuucuuuaguagauuaaauugguugacccacuuaaacuucaaauacccagcauugaacgugacuaugccaaacaaugaacaauuugacaaauuguacauuugggggguucaccacccggguacggacaaggaccaaaucuuccuguaugcucaaucaucaggaagaaucacaguaucuaccaaaagaagccaacaagcuguaaucccgaauaucggaucuagacccagaauaaggaauaucccuagcagaauaagcaucuauuggacaauaguaaaaccaggagacauacuuuugauuaacagcacagggaaucuaauugcuccuagggguuacuucaaaauaagaagugggaaaagcucaauaaugagaucagaugcacccauuggcaaaugcaagucugaaugcaucacuccaaauggaagcauuccaaaugacaaaccauuccaaaauguaaacaggaucacauacggggccugucccagauauguuaagcaaagcacucugaaauuggcaacaggaaugcgaaauguaccagagaaacaaacuagaggcauauuuggcgcaauagcggguuucauagaaaaugguugggagggaaugguggaugguugguacgguuucaggcaucaaaauucugagggaagaggacaagcagcagaucucaaaagcacucaagcagcaaucgaucaaaucaaugggaagcugaaucgauugaucgggaaaaccaacgagaaauuccaucagauugaaaaagaauucucagaaguagaagggagaauucaggaccuugagaaauauguugaggacacuaaaauagaucucuggucauacaacgcggagcuucuuguugcccuggagaaccaacauacaauugaucuaacugacucagaaaugaacaaacuguuugaaagaacaaagaagcaacugagggaaaaugcugaggauaugggcaaugguuguuucaaaauauaccacaaaugugacaaugccugcauaggaucaaucagaaauggaacuuaugaccacgauguauacagggaugaagcauuaaacaaccgguuccagaucaagggaguugagcugaagccaggguacaaagauuggauccuauggauuuccuuugccauaucauguuuuuugcuuuguguugcuuuguugggguucaucaugugggccugccaaaagggcaacauuaggugcaacauuugcauuuga

SEQ ID NO: 43562 - RNA, 1701 nt, Artificial Sequence
  derived and/or modified CDS sequence (wt) from hemagglutinin__InfluenzaA__AHL97589
augaagacuaucauugcuuugagcuacauucuaugucugguuuucgcucaaaaaauuccuggaaaugacaauagcacggcaacgcugugccuugggcaccaugcaguaccaaacggaacgauagugaaaacaaucacgaaugaccgaauugaaguuacuaaugcuacugagcugguucagaauuccucaauaggugaaauaugcgacagcccucaucagauccuugauggagaaaacuguacacuaauagaugcucuauugggagacccucagugugauggcuuucaaaauaagaaaugggaccuuuuuguugaacgaagcaaagccuacagcaacuguuacccuuaugaugugccggauuaugccucccuuaggucacuaguugccucauccggcacacuggaguuuaacaaugaaagcuucaauuggacuggagucacucaaaacggaacaaguucugcuugcauaaggggaucuaauaguaguuucuuuaguagauuaaauugguugacccacuuaaacuucaaauacccagcauugaacgugacuaugccaaacaaugaacaauuugacaaauuguacauuugggggguucaccacccggguacggacaaggaccaaaucuuccuguaugcucaaucaucaggaagaaucacaguaucuaccaaaagaagccaacaagcuguaaucccgaauaucggaucuagacccagaauaaggaauaucccuagcagaauaagcaucuauuggacaauaguaaaaccaggagacauacuuuugauuaacagcacagggaaucuaauugcuccuagggguuacuucaaaauaagaagugggaaaagcucaauaaugagaucagaugcacccauuggcaaaugcaagucugaaugcaucacuccaaauggaagcauuccaaaugacaaaccauuccaaaauguaaacaggaucacauacggggccugucccagauauguuaagcaaagcacucugaaauuggcaacaggaaugcgaaauguaccagagaaacaaacuagaggcauauuuggcgcaauagcggguuucauagaaaaugguugggagggaaugguggaugguugguacgguuucaggcaucaaaauucugagggaagaggacaagcagcagaucucaaaagcacucaagcagcaaucgaucaaaucaaugggaagcugaaucgauugaucgggaaaaccaacgagaaauuccaucagauugaaaaagaauucucagaaguagaagggagaauucaggaccuugagaaauauguugaggacacuaaaauagaucucuggucauacaacgcggagcuucuuguugcccuggagaaccaacauacaauugaucuaacugacucagaaaugaacaaacuguuugaaaaaacaaagaagcaacugagggaaaaugcugaggauaugggcaaugguuguuucaaaauauaccacaaaugugacaaugccugcauaggaucaaucagaaauggaacuuaugaccacgauguauacagggacgaagcauuaaacaaccgguuccagaucaagggaguugagcugaagucaggguacaaagauuggauccuauggauuuccuuugccauaucauguuuuuugcuuuguguugcuuuguugggguucaucaugugggccugccaaaagggcaacauuaggugcaacauuugcauuuga

SEQ ID NO: 43563 - RNA, 1701 nt, Artificial Sequence; identical to SEQ ID NO: 42489
  derived and/or modified CDS sequence (wt) from hemagglutinin__InfluenzaA__AHL97601

SEQ ID NO: 43564 - RNA, 1701 nt, Artificial Sequence
  derived and/or modified CDS sequence (wt) from hemagglutinin__InfluenzaA__AHL97613
augaagacuaucauugcuuugagcuacauucuaugucugguuuucgcucaaaaacuuccuggaaaugacaauagcacggcaacgcugugccuugggcaccaugcaguaccaaacggaacgauagugaaaacaaucacgaaugaccgaauugaaguuacuaaugcuacugagcugguucagaauuccucaauaggugaaauaugcgacaguccucaucagauccuugauggagaaaauugcacacuaauagaugcucuauugggagacccucagugugauggcuuucaaaauaagaaaugggaccuuuuuguugaacgaagcaaagccuacagcaacuguuacccuuaugaugugccggauuaugccucccuuaggucacuaguugccucauccggcacacuggaguuuaacaaugaaagcuucaauuggacuggagucacccaaaacggaacaaguucugcuugcauaaggagaucuaauaguaguuucuuuaguagauuaaauugguugacccacuuaaacuucaaauacccagcauugaacgugacuaugccaaacaaugaacaauuugacaaauuguacauuuggggaguucaccacccggguacggacaaggaccaaaucuuccuguaugcucaaucaucaggaagaaucacaguaucuaccaaaagaagccaacaagcuguaaucccaaauaucggaucuagacccagaauaaggaauaucccuagcagaauaagcaucuauuggacaauaguaaaaccgggagacauacuuuugauuaacagcacagggaaucuaauugcuccuagggguuacuucaaaauacgaagugggaaaagcucaauaaugagaucagaugcacccauuggcaaaugcaagucugaaugcaucacuccaaauggaagcauucccaaugacaaaccauuccaaaauguaaacaggaucacauacggggccugucccagauauguuaagcaaagcacucugaaauuggcaacaggaaugcgaaauguaccagagaaacaaacuagaggcauauuuggcgcaauagcggguuucauagaaaaugguugggagggaaugguggaugguugguacgguuucaggcaucaaaauucugagggaagaggacaagcagcagaucucaaaagcacucaagcagcaaucgaucaaaucaaugggaagcugaaucgauugaucgggaaaaccaacgagaaauuccaucagauugaaaaagaauucucagaaguagaagggagaauucaggaccuugagaaauauguugaggacacuaaaauagaucucuggucauacaacgcggagcuucuuguugcccuggagaaucaacauacaauugaucuaacugacucagaaaugaacaaacuguuugaaaaaacaaagaagcaacugagggaaaaugcugaggauaugggcaaugguuguuucaaaauauaccacaaaugugacaaugccugcauaggaucaaucagaaauggaacuuaugaccacaauguguacagggaugaagcauuaaacaaccgguuccagaucaagggaguugagcuuaagucaggguacaaagauuggauccuauggauuuccuuugccauaucauguuuuuugcuuuguguugcuuuguugggguucaucaugugggccugccaaaagggcaacauuaggugcaacauuugcauuuga

SEQ ID NO: 43565 - RNA, 1701 nt, Artificial Sequence; identical to SEQ ID NO: 43552
  derived and/or modified CDS sequence (wt) from hemagglutinin__InfluenzaA__AHL97625

SEQ ID NO: 43566 - RNA, 1701 nt, Artificial Sequence; identical to SEQ ID NO: 42492
  derived and/or modified CDS sequence (wt) from hemagglutinin__InfluenzaA__AHL97637

SEQ ID NO: 43567 - RNA, 1701 nt, Artificial Sequence
  derived and/or modified CDS sequence (wt) from hemagglutinin__InfluenzaA__AHL97661
augaagacuaucauugcuuugggcuacauucuaugucugguuuucgcucaaaaacuuccuggaaaugacaauagcacggcaacgcugugccuugggcaccaugcaguaccaaacggaacgauagugaaaacaaucacgaaugaccgaauugaaguuacuaaugcuacugagcugguucagaauuccucaauaggugaaauaugcgacaguccucaucagauccuugauggagaaaauugcacacuaauagaugcucuauugggagacccucagugugauggcuuucaaaauaagaaaugggaccuuuuuguugaacgaagcaaagccuacagcaacuguuacccuuaugaugugccggauuaugccucccuuaggucacuaguugccucauccggcacacuggaguuuaacaaugaaagcuucaauuggacuggagucacucaaaacggaacaaguucugcuugcauaaggagaucuaauaguaguuucuuuaguagauuaaauugguugacccacuuaaacuucaaauacccagcauugaacgugacuaugccaaacaaugaacaauuugacaaauuguacauuuggggaguucaccacccggguacggacaaggaccaaaucuuccuguaugcucaaucaucaggaagaaucacaguaucuaccaaaagaagccaacaagcuguaaucccaaauaucggaucuagacccagaauaaggaauaucccuagcagaauaagcaucuauuggacaauaguaaaaccgggagacauacuuuugauuaacagcacagggaaucuaauugcuccuagggguuacuucaaaauacgaagugggaaaagcucaauaaugagaucagaugcacccauuggcaaaugcaagucugaaugcaucacuccaaauggaagcauucccaaugacaaaccauuccaaaauguaaacaggaucacauacggggccugucccagauauguuaagcaaagcacucugaaauuggcaacaggaaugcgaaauguaccagagaaacaaacuagaggcauauuuggcgcaauagcggguuucauagaaaaugguugggagggaaugguggaugguugguacgguuucaggcaucaaaauucugagggaagaggacaagcagcagaucucaaaagcacucaagcagcaaucgaucaaaucaaugggaagcugaaucgauugaucgggaaaaccaacgagaaauuccaucagauugaaaaagaauucucagaaguagaagggagaauucaggaccuugagaaauauguugaggacacuaaaauagaucucuggucauacaacgcggagcuucuuguugcccuggagaaucaacauacaauugaucuaacugacucagaaaugaacaaacuguuugaaaaaacaaagaagcaacugagggaaaaugcugaggauaugggcaaugguuguuucaaaauauaccacaaaugugacaaugccugcauaggaucaaucagaaauggaacuuaugaccacaauguguacagggaugaagcauuaaacaaccgguuccagaucaagggaguugagcuuaagucaggguacaaagauuggauccuauggauuuccuuugccauaucauguuuuuugcuuuguguugcuuuguugggguucaucaugugggccugccaaaagggcaacauuaggugcaacauuugcauuuga

SEQ ID NO: 43568 - RNA, 1701 nt, Artificial Sequence
  derived and/or modified CDS sequence (wt) from hemagglutinin__InfluenzaA__AHL97673
augaagaccaccauugcuuugagcuacauucuaugucuaguuuuugcucaagaacuuccuggaaaugacgacagcacggcaacgcugugccuugggcaccaugcagugccaaacggaacgauagugaaaacaaucacgaaugaccaaauugaaguuacuaaugcuacugaacugguucagaguuccucaacaggugaaauaugcaacaguccucaucagauccuugauggagaaaacugcacacuaauagaugcucuauugggagacccucagugugauggcuuccaaaacaagaaaugggaccuuuuuguugaacgaagcaaagcccacagcaacuguuacccuuaugaugugccggauuaugccucccuuaggucacuaguugccucauccggcacacuggaguuuaacaaugaaagcuucaauuggacuggagucacucaaaacggaacaagcucugcuugcauaaggagaucuaauaauaguuucuuuaguagauugaauugguugacccacuuaaacuucaaauacccagcauugaacgugacuaugccaaacaaugaacaauuugacaaauuguacauuugggggguucaccacccggguacggacaaggaccaaaucuuccuguaugcucaagcaucaggaagaaucacaguaucuaccaaaagaagccaacaagcuguaauuccgaauaucggaucuagacccagaguaaggaauaucccuagcagaguaagcaucuauuggacaauaguaaaaccgggagacauacuuuugauuaacagcacagggaaucuaauugcuccuagggguuacuucaaaauacgaagugggaaaagcucaauaaugagaucagaugcacccauuggcaaaugcaauucugcaugcaucacuccaaauggaagcauucccaaugacaaaccauuccaaaauguaaacaggaucacauacggggccugucccagauaugucaagcaaaacacucugaaauuggcaacaggaaugagaaauguaccagagaaacaaacuagaggcauauuuggcgcaauagcggguuucauagaaaaugguugggagggaaugguggaugguugguacgguuucaggcaucaaaauucugagggaaggggacaagcagcagaucucaaaagcacucaagcagcaaucgaucaaaucaaugggaagcugaauagauugaucgggaaaaccaacgagaaauuccaucagauugaaaaagaauucucagaagucgaagggagaauucaggaccuugagaaauauguugaggacacuaaaauagaucucuggucauacaacgcggagcuucuuguugcccuggagaaccaacacacaauugaucuaacugacucagaaaugaacaaacuguuugaaaaaacaaagaagcaacugagggaaaaugcugaggauaugggcaaugguuguuucaaaauauaccacaaaugugacaaugccugcauaggaucaaucagaaauggaacuuaugaucacgauguguacagagaugaagcauuaaacaaccgauuccagaucaagggaguugagcugaagucaggguacaaagauuggauccuauggauuuccuuugccauaucauguuuuuugcuuuguguugcuuuguugggguucaucaugugggccugccaaaaaggcaacauuaggugcaacauuugcauuuga

SEQ ID NO: 43569 - RNA, 1701 nt, Artificial Sequence; identical to SEQ ID NO: 42489
  derived and/or modified CDS sequence (wt) from hemagglutinin__InfluenzaA__AHL97685

SEQ ID NO: 43570 - RNA, 1701 nt, Artificial Sequence
  derived and/or modified CDS sequence (wt) from hemagglutinin__InfluenzaA__AHL97697
augaagacuaucauugcuuugagcuacauucuaugucugguuuucgcucaaaaacuuccuggaaaugacaauagcacggcaacgcugugccuugggcaccaugcaguaccaaacggaacgauagugaaaacaaucacgaaugaccgaauugaaguuacuaaugcuacugagcugguucagaauuccucaauaggugaaauaugcgacaguccucaucagauccuugauggagaaaacugcacacuaauagaugcucuauugggagacccucagugugauggcuuucaaaauaagaaaugggaccuuuuuguugaacgaggcaaagccuacagcaacuguuacccuuaugaugugccggauuaugccucccuuaggucacuaguugccucauccggcacacuggaguuuaacaaugaaagcuucaauugggcuggagucacucaaaacggaacaaguucugcuugcauaaggggaucuaauaguaguuucuuuaguagauuaaauugguugacccacuuaaacuucaaauacccagcauugaacgugacuaugccaaacaaugagcaauuugacaaauuguacauuugggggguucaccacccggguacggacaaggaccaaaucuuccuguaugcucaaucaucaggaagaaucacaguaucuaccaaaagaagccaacaagcuguaaucccgaauaucggaucuagacccagaauaaggaauaucccuagcagaauaagcaucuauuggacaauaguaaaaccgggagacauacuuuugauuaacagcacagggaaucuaauugcuccuagggguuacuucaaaauacgaagugggaaaagcucaauaaugagaucagaugcacccauuggcaaaugcaaaucugaauguaucacuccaaauggaagcauucccaaugacaaaccauuccaaaauguaaacaggaucacauacggggccugucccagauauguuaagcaaagcacucugaaauuggcaacaggaaugcgaaauguaccagagaaacaaacuagaggcauauuuggcgcaauagcggguuucauagaaaaugguugggagggaaugguggaugguugguacgguuucaggcaucaaaauucugagggaagaggacaagcagcagaucucaaaagcacucaagcagcaaucgaucaaaucaaugggaagcugaaucgauugauagggaaaaccaacgagaaauuccaucagauugaaaaagaauucucagaaguagaagggagaauucaggaccuugagaaauauguugaggacacaaaaauagaucucuggucauacaacgcggagcuucuuguugcccuggagaaccaacauacaauugaucuaacugacucagaaaugaacaaacuguuugaaaaaacaaagaagcaacugagggaaaaugcugaggauaugggcaaugguuguuucaaaauauaccacaaaugugacaaugccugcauaggaucaaucagaaauggaacuuaugaccacgauguauacagggaugaagcauuaaacaaccgguuccagaucaagggaguugagcugaagucaggguacaaagauuggauccuauggauuuccuuugccauaucauguuuuuugcuuuguguugcuuuguugggguucaucaugugggccugccaaaagggcaacauuaggugcaacauuugcauuuga

SEQ ID NO: 43571 - RNA, 1701 nt, Artificial Sequence; identical to SEQ ID NO: 42492
  derived and/or modified CDS sequence (wt) from hemagglutinin__InfluenzaA__AHL97709

SEQ ID NO: 43572 - RNA, 1701 nt, Artificial Sequence
  derived and/or modified CDS sequence (wt) from hemagglutinin__InfluenzaA__AHL97721
augaagacuaucauugcuuugagcuacauucuaugucugguuuucgcucaaaaacuuccuggaaaugacaauagcacggcaacgcugugccuugggcaccaugcaguaccaaacggaacgauagugaaaacaaucacgaaugaccgaauugaaguuacuaaugcuacugagcugguucagaauuccucaauaggugaaauaugcgacaguccucaucagauccuugauggagaaaacugcacacuaauagaugcucuauugggagacccucagugugauggcuuucaaaauaagaaaugggaccuuuuuguugaacgaagcaaagccuacagcaacuguuacccuuaugaugugccggauuaugccucccuuaggucacuaguugccucauccggcacacuggaguuuaacaaugaaagcuucaauugggcuggagucacucaaaacggaacaaguucugcuugcauaaggggaucuaauaguaguuucuuuaguagauuaaauugguugacccacuuaaacuucaaauacccagcauugaacgugacuaugccaaacaaugagcaauuugacaaauuguacauuugggggguucaccacccggguacggacaaggaccaaaucuuccuguaugcucaaucaucaggaagaaucacaguaucuaccaaaagaagccaacaagcuguaaucccgaauaucggaucuagacccagaauaaggaauaucccuagcagaauaagcaucuauuggacaauaguaaaaccgggagacauacuuuugauuaacagcacagggaaucuaauugcuccuagggguuacuucaaaauaagaagugggaaaagcucaauaaugagaucagaugcacccauuggcaaaugcaaaucugaauguaucacuccaaauggaagcauucccaaugacaaaccauuccaaaauguaaacaggaucacauacggggccugucccagauauguuaagcaaagcacucugaaauuggcaacaggaaugcgaaauguaccagagaaacaaacuagaggcauauuuggcgcaauagcggguuucauagaaaaugguugggagggaaugguggaugguugguacgguuucaggcaucaaaauucugagggaagaggacaagcagcagaucucaaaagcacucaagcagcaaucgaucaaaucaaugggaagcugaaucgauugaucgggaaaaccaacgagaaauuccaucagauugaaaaagaauucucagaaguagaagggagaauucaggaccuugagaaauauguugaggacacaaaaauagaucucuggucauacaacgcggagcuucuuguugcccuggagaaccaacauacaauugaucuaacugacucagaaaugaacaaacuguuugaaaaaacaaagaagcaacugagggaaaaugcugaggauaugggcaaugguuguuucaaaauauaccacaaaugugacaaugccugcauaggaucaaucagaaauggaacuuaugaccacgauguauacagggaugaagcauuaaacaaccgguuccagaucaagggaguugagcugaagucaggguacaaagauuggauccuauggauuuccuuugccauaucauguuuuuugcuuuguguugcuuuguugggguucaucaugugggccugccaaaagggcaacauuaggugcaacauuugcauuuga

SEQ ID NO: 43573 - RNA, 1701 nt, Artificial Sequence
  derived and/or modified CDS sequence (wt) from hemagglutinin__InfluenzaA__AHL97733
augaagacuaucauugcuuugagcuacauucuaugucugguuuucgcucaaaaacuuccuggaaaugacaauagcacggcaacgcugugccuugggcaccaugcaguaccaaacgggacgauagugaaaacaaucacgaaugaccgaauugaaguuacuaaugcuacugagcugguucagaauuccucaauaggugaaauaugcgacaguccucaucagauccuugauggagaaaauugcacacuaauagaugcucuauugggagacccucagugugauggcuuucaaaauaagaaaugggaccuuuuuguugaacgaagcaaagccuacagcaacuguuacccuuaugaugugccggauuaugccucccuuaggucacuaguugccucauccggcacacuggaguuuaacaaugaaagcuucaauugggcuggagucacucaaaacggaacaaguucugcuugcauaaggggaucuaauaguaguuucuuuaguagauuaaauugguugacccacuuaaacuucaaauacccagcauugaacgugacuaugccaaacaaugaacaauuugacaaauuguacauuugggggguucaccacccggguacggacaaggaccaaaucuuccuguaugcucaaucaucaggaagaaucacaguaucuaccaaaagaagccaacaagcuguaaucccgaauaucggaucuagacccagaauaaggaauaucccuagcagaauaagcaucuauuggacaauaguaaaaccgggagacauacuuuugauuaacagcacagggaaucuaauugcuccuagggguuacuucaaaauacgaagugggaaaagcucaauaaugagaucagaugcacccauuggcaaaugcaagucugaaugcaucacuccaaauggaagcauucccaaugacaaaccauuccaaaauguaaacaggaucacauacggggccugucccagauauguuaagcaaagcacucugaaauuggcaacaggaaugcgaaauguaccagagaaacaaacuagaggcauauuuggcgcaauagcggguuucauagaaaaugguugggagggaaugauggaugguugguacgguuucaggcaucaaaauucugagggaagaggacaagcagcagaucucaaaagcacucaagcagcaaucgaucaaaucaaugggaagcugaaucgauugaucgggaaaaccaacgagaaauuccaucagauugaaaaagaauucucagaaguagaagggagaauucaggaccuugagaaauauguugaggacacaaaaauagaucucuggucauacaacgcggagcuucuuguugcccuggagaaccaacauacaauugaucuaacugacucagaaaugaacaaacuguuugaaaaaacaaagaagcaacugagggaaaaugcugaggauaugggcaaugguuguuucaaaauauaccacaaaugugacaaugccugcauaggaucaaucagaaauggaacuuaugaccacgauguauacagggaugaagcauuaaacaaccgguuccagaucaagggaguugagcugaagucaggguacaaagauuggauccuauggauuuccuuugccauaucauguuuuuugcuuuguguugcuuuguugggguucaucaugugggccugccaaaagggcaacauuaggugcaacauuugcauuuga

SEQ ID NO: 43574 - RNA, 1701 nt, Artificial Sequence; identical to SEQ ID NO: 41879
  derived and/or modified CDS sequence (wt) from hemagglutinin__InfluenzaA__AHL97745

SEQ ID NO: 43575 - RNA, 1701 nt, Artificial Sequence; identical to SEQ ID NO: 42489
  derived and/or modified CDS sequence (wt) from hemagglutinin__InfluenzaA__AHL97757

SEQ ID NO: 43576 - RNA, 1701 nt, Artificial Sequence; identical to SEQ ID NO: 42489
  derived and/or modified CDS sequence (wt) from hemagglutinin__InfluenzaA__AHL97769

SEQ ID NO: 43577 - RNA, 1701 nt, Artificial Sequence
  derived and/or modified CDS sequence (wt) from hemagglutinin__InfluenzaA__AHL97781
augaagaccaucauugcuuugagcuacauucuaugucuaguuuucgcucaagaacuuccuggaaaugacgacagcacggcaacacugugccuugggcaccaugcagugccaaacggaacgauagugaaaacaaucacgaaugaccaaauugaaguuacuaaugcuacugagcugguucagaguuccucaacaggugaaauaugcaacaguccucaucagauccuugauggagaaaacugcacacuaauagaugcucuauugggagacccucagugugauggcuuccaaaacaagaaaugggaccuuuuuguugaacgaagcaaagcccacagcaacuguuacccuuaugaugugccagauuaugccucccuuaggucacuaguugccucauccggcacacuggaguuuaacaaugaaagcuucaauuggacuggagucacucaaaacggaacaagcucugcuugcauaaggagaucuaauaauaguuucuuuaguagauugaauugguugacccacuuaaacuucaaauacccagcauugaacgugacuaugccaaacaaugaacaauuugacaaauuguacauuugggggguucaccacccggguacggacaaggaccaaaucuuccuguaugcucaagcaucaggaagaaucacgguaucuaccaaaagaagccaacaagcuguaauuccgaauaucggaucuagacccagaguaaggaauaucccuagcagaguaagcaucuauuggacaauaguaaaaccgggagacauacuuuugauuaacagcacagggaaucuaauugcuccuagggguuacuucaaaauacgaagugggaacagcucaauaaugagaucagaugcacccauuggcaaaugcaauucuacaugcaucacuccaaauggaagcauucccaaugacaaaccauuccaaaauguaaacaggaucacauacggggccugucccagauaugucaagcaaaacacucuuaaauuggcaacaggaaugagaaauguaccagagaaacaaacuagaggcauauuuggcgcaauagcagguuucauagaaaaugguugggagggaaugguggaugguugguacgguuucaggcaucaaaauucugagggaaggggacaagcagcagaucucaaaagcacucaagcagcaaucgaucaaaucaaugggaagcugaauagauugaucgggaaaaccaacgagaaauuccaucagauugaaaaagaauucucagaagucgaagggagaauucaggaccuugagaaauauguugaggacacuaaaauagaucucuggucauacaacgcggagcuucuuguugcccuggagaaccaacacacaauugaucuaacugacucagaaaugaacaaacuguuugaaaaaacaaagaagcaacugagggaaaaugcugaggauaugggcaaugguuguuucaaaauauaccacaaaugugacaaugccugcauaggaucaaucagaaauggaacuuaugaucacgauguguacagagaugaagcauuaaacaaccgauuucagaucaagggaguugagcugaagucaggguacaaagauuggauccuauggauuuccuuugccauaucauguuuuuugcuuuguguugcuuuguugggguucaucaugugggccugccaaaaaggcaacauuaggugcaacauuugcauuuga

SEQ ID NO: 43578 - RNA, 1701 nt, Artificial Sequence
  derived and/or modified CDS sequence (wt) from hemagglutinin__InfluenzaA__AHL97793
augaagacuaucauugcuuugagcuacauucuaugucuaguuuucgcucaaaaacuuccuggaaaugacaauagcacggcaacgcugugccuugggcaccaugcaguaccaaacggaacgauagugaaaacaaucacgaaugaccgaauugaagucacuaaugcuacugagcugguucagaauuccucaauaggugaaauaugcgacaguccucaucagauccuugauggagaaaacugcacacuaauagaugcucuauugggagacccucagugugauggcuuucaaaauaagaaaugggaccuuuuuguugaacgaagcaaagccuacagcaacuguuacccuuaugaugugccggauuaugccucccuuaggucacuaguugccucauccggcacacuggaguuuaacaaugaaagcuucaauugggcuggggucacucaaaacggaacaaguucugcuugcauaaggggaucuaauaguaguuucuuuaguagauuaaauugguugacccacuuaaacuucaaauacccagcauugaacgugacuaugccaaacaaugaacaauuugacaaauuguacauuugggggguucaccacccggguacggacaaggaccaaaucuuccuguaugcucaaucaucaggaagaaucacaguaucuaccaaaagaagccaacaagcuguaaucccgaauaucggaucuagacccagaauaaggaauaucccuagcagaauaagcaucuauuggacaauaguaaaaccgggagacauacuuuugauuaacagcacagggaaucuaauugcuccuagggguuacuucaaaauacgaagugggaaaagcucaauaaugagaucagaugcacccauuggcaaaugcaagucugaaugcaucacuccaaauggaagcauucccaaugacaaaccauuccaaaauguaaacaggaucacauacggggccugucccagauauguuaagcaaagcacucugaaauuggcaacaggaaugcgaaauguaccagagaaacaaaccagaggcauauuuggcgcaauagcggguuucauagaaaaugguugggagggaaugguggaugguugguacgguuucaggcaucaaaauucugagggaagaggacaagcagcagaucucaaaagcacucaagcagcaaucgaucaaaucaaugggaagcugaaucgauugaucgggaaaaccaacgagaaauuccaucagauugaaaaagaauucucagaaguagaagggagaauucaggaccuugagaaauauguugaggacacaaaaauagaucucuggucauacaacgcggagcuucuuguugcccuggagaaccaacauacaauugaucuaacugacucagaaaugaacaaacuguuugaaaaaacaaagaagcaacugagggaaaaugcugaggauaugggcaaugguuguuucaaaauauaccacaaaugugacaaugccugcauaggaucaaucagaaauggaacuuaugaccacgauguauacagggaugaagcauuaaacaaccgguuccagaucaagggaguugagcugaagucaggguacaaagauuggauccuauggauuuccuuugccauaucauguuuuuugcuuuguguugcuuuguugggguucaucaugugggccugccaaaagggcaacauuaggugcaacauuugcauuuga

SEQ ID NO: 43579 - RNA, 1701 nt, Artificial Sequence
  derived and/or modified CDS sequence (wt) from hemagglutinin__InfluenzaA__AHL97805
augaagacuaucauugcuuugagcuacauucuaugucugguuuucgcucaaaaacuuccuggaaaugacaauagcacggcaacgcugugccuugggcaccaugcaguaccaaacggaacgauagugaaaacaaucacgaaugaccgaauugaagucacuaaugcuacugagcugguucagaauuccucaauaggugaaauaugcgacaguccucaucagauccuugauggagaaaacugcacacuaauagaugcucuauugggagacccucagugugauggcuuucaaaauaagaaaugggaccuuuuuguugaacgaagcaaagccuacagcaacuguuacccuuaugaugugccggauuaugccucccuuaggucacuaguugccucauccggcacacuggaguuuaacaaugaaagcuucaauugggcuggggucacucaaaacggaacaaguucugcuugcauaaggggaucuaauaguaguuucuuuaguagauuaaauugguugacccacuuaaacuucaaauacccagcauugaacgugacuaugccaaacaaugaacaauuugacaaauuguacauuugggggguucaccacccggguacggacaaggaccaaaucuuccuguaugcucaaucaucaggaagaaucacaguaucuaccaaaagaagccaacaagcuguaaucccgaauaucggaucuagacccagaauaaggaauaucccuagcagaauaagcaucuauuggacaauaguaaaaccgggagacauacuuuugauuaacagcacagggaaucuaauugcuccuagggguuacuucaaaauacgaagugggaaaagcucaauaaugagaucagaugcacccauuggcaaaugcaagucugaaugcaucacuccaaauggaagcauucccaaugacaaaccauuccaaaauguaaacaggaucacauacggggccugucccagauauguuaagcaaagcacucugaaauuggcaacaggaaugcgaaauguaccagagaaacaaaccagaggcauauuuggcgcaauagcggguuucauagaaaaugguugggagggaaugguggaugguugguacgguuucaggcaucaaaauuaugagggaagaggacaagcagcagaucucaaaagcacucaagcagcaaucgaucaaaucaaugggaagcugaaucgauugaucgggaaaaccaacgagaaauuccaucagauugaaaaagaauucucagaaguagaagggagaauucaggaccuugagaaauauguugaggacacaaaaauagaucucuggucauacaacgcggagcuucuuguugcccuggagaaccaacauacaauugaucuaacugacucagaaaugaacaaacuguuugaaaaaacaaagaagcaacugagggaaaaugcugaggauaugggcaaugguuguuucaaaauauaccacaaaugugacaaugccugcauaggaucaaucagaaauggaacuuaugaccacgauguauacagggaugaagcauuaaacaaccgguuccagaucaagggaguugagcugaagucaggguacaaagauuggauccuauggauuuccuuugccauaucauguuuuuugcuuuguguugcuuuguugggguucaucaugugggccugccaaaagggcaacauuaggugcaacauuugcauuuga

SEQ ID NO: 43580 - RNA, 1701 nt, Artificial Sequence
  derived and/or modified CDS sequence (wt) from hemagglutinin__InfluenzaA__AHL97817
augaagacuaucauugcuuugagcuacauucuaugucugguuuucgcucaaaaacuuccuggaaaugacaauagcacggcaacgcugugccuugggcaccaugcaguaccaaacggaacgauagugaaaacaaucacgaaugaccgaauugaaguuacuaaugcuacugagcugguucagaauuccucaauaggugaaauaugcgacaguccucaucagauccuugauggagaaaauugcacacuaauagaugcucuauugggagacccucagugugauggcuuucaaaauaagaaaugggaccuuuuuguugaacgaagcaaagccuacagcaacuguuacccuuaugaugugccggauuaugccucccuuaggucacuaguugccucauccggcacacuggaguuuaacaaugaaagcuucaauugggcuggagucacucaaaacggaacaaguucugcuugcauaaggggaucuaauaguaguuucuuuaguagauuaaauugguugacccacuuaaacuucaaauacccagcauugaacgugacuaugccaaacaaugaacaauuugacaaauuguacauuugggggguucaccacccgggcacggacaaggaccaaaucuuccuguaugcucaaucaucaggaagaaucacaguaucuaccaaaagaagccaacaagcuguaaucccgaauaucggaucuagacccagaauaaggaauaucccuagcagaauaagcaucuauuggacaauaguaaaaccgggagacauacuuuugauuaacagcacagggaaucuaauugcuccuagggguuacuucaaaauacgaagugggaaaagcucaauaaugagaucagaugcacccauuggcaaaugcaagucugaaugcaucacuccaaauggaagcauucccaaugacaaaccauuccaaaauguaaacaggaucacauacggggccugucccagauauguuaagcaaagcacucugaaauuggcaacaggaaugcgaaauguaccagagaaacaaacuagaggcauauuuggcgcaauagcggguuucauagaaaaugguugggagggaaugauggaugguugguacgguuucaggcaucaaaauucugagggaagaggacaagcagcagaucucaaaagcacucaagcagcaaucgaucaaaucaaugggaagcugaaucgauugaucgggaaaaccaacgagaaauuccaucagauugaaaaagaauucucagaaguagaagggagaauucaggaccuugagaaauauguugaggacacaaaaauagaucucuggucauacaacgcggagcuucuuguugcccuggagaaccaacauacaauugaucuaacugacucagaaaugaacaaacuguuugaaaaaacaaagaagcaacugagggaaaaugcugaggauaugggcaaugguuguuucaaaauauaccacaaaugugacaaugccugcauaggaucaaucagaaauggaacuuaugaccacgauguauacagggaugaagcauuaaacaaccgguuccagaucaagggaguugagcugaagucaggguacaaagauuggauccuauggauuuccuuugccauaucauguuuuuugcuuuguguugcuuuguugggguucaucaugugggccugccaaaagggcaacauuaggugcaacauuugcauuuga

SEQ ID NO: 43581 - RNA, 1701 nt, Artificial Sequence; identical to SEQ ID NO: 43570
  derived and/or modified CDS sequence (wt) from hemagglutinin__InfluenzaA__AHL97829

SEQ ID NO: 43582 - RNA, 1701 nt, Artificial Sequence; identical to SEQ ID NO: 42489
  derived and/or modified CDS sequence (wt) from hemagglutinin__InfluenzaA__AHL97841

SEQ ID NO: 43583 - RNA, 1701 nt, Artificial Sequence; identical to SEQ ID NO: 42489
  derived and/or modified CDS sequence (wt) from hemagglutinin__InfluenzaA__AHL97853

SEQ ID NO: 43584 - RNA, 1701 nt, Artificial Sequence
  derived and/or modified CDS sequence (wt) from hemagglutinin__InfluenzaA__AHL97865
augaagacuaucauugcuuugagcuacauucuaugucugguuuucgcucaaaaacuuccuggaaaugacaauagcacggcaacgcugugccuugggcaccaugcaguaccaaacggaacgauagugaaaacaaucacgaaugaccgaauugaagucacuaaugcuacugagcugguucagaauuccucaauaggugaaauaugcgacaguccucaucagauccuugauggagaaaacugcacacuaauagaugcucuauugggagacccccagugugauggcuuucaaaauaagaaaugggaccuuuuuguugaacgaagcaaagccuacagcaacuguuacccuuaugaugugccggauuaugccucccuuaggucacuaguugccucauccggcacacuggaguuuaacaaugaaagcuucaauugggcuggggucacucaaaacggaacaaguucugcuugcauaaggggaucuaauaguaguuucuuuaguagauuaaauugguugacccacuuaaacuucaaauacccagcauugaacgugacuaugccaaacaaugaacaauuugacaaauuguacauuugggggguucaccacccggguacggacaaggaccaaaucuuccuguaugcucaaucaucaggaagaaucacaguaucuaccaaaagaagccaacaagcuguaaucccgaauaucggaucuagacccagaauaaggaauaucccuagcagaauaagcaucuauuggacaauaguaaaaccgggagacauacuuuugauuaacagcacagggaaucuaauugcuccuagggguuacuucaaaauacgaagugggaaaagcucaauaaugagaucagaugcacccauuggcaaaugcaagucugaaugcaucacuccaaauggaagcauucccaaugacaaaccauuccaaaauguaaacaggaucacauacggggccugucccagauauguuaagcaaagcacucugaaauuggcaacaggaaugcgaaauguaccagagaaacaaaccagaggcauauuuggcgcaauagcggguuucauagaaaaugguugggagggaaugguggaugguugguacgguuucaggcaucaaaauucugagggaagaggacaagcagcagaucucaaaagcacucaagcagcaaucgaucaaaucaaugggaagcugaaucgauugaucgggaaaaccaacgagaaauuccaucagauugaaaaagaauucucagaaguagaagggagaauucaggaccuugagaaauauguugaggacacaaaaauagaucucuggucauacaacgcggagcuucuuguugcccuggagaaccaacauacaauugaucuaacugacucagaaaugaacaaacuguuugaaaaaacaaagaagcaacugagggaaaaugcugaggauaugggcaaugguuguuucaaaauauaccacaaaugugacaaugccugcauaggaucaaucagaaauggaacuuaugaccacgauguauacagggaugaagcauuaaacaaccgguuccagaucaagggaguugagcugaagucaggguacaaagauuggauccuauggauuuccuuugccauaucauguuuuuugcuuuguguugcuuuguugggguucaucaugugggccugccaaaagggcaacauuaggugcaacauuugcauuuga

SEQ ID NO: 43585 - RNA, 1701 nt, Artificial Sequence
  derived and/or modified CDS sequence (wt) from hemagglutinin__InfluenzaA__AHL97877
augaagacuaucauugcuuugagcuacauucuaugucugguuuucgcucaaaaacuuccuggaaaugacaauagcacggcaacgcugugccuugggcaccaugcaguaccaaacggaacgauagugaaaacaaucacgaaugaccgaauugaaguuacuaaugcuacugagcugguucagaauuccucaauaggugaaauaugcgacaguccucaucagauccuugauggagaaaacugcacacuaauagaugcucuauugggagacccucagugugauggcuuucaaaauaagaaaugggaccuuuuuguugaacgaagcaaagccuacagcaacuguuacccuuaugaugugccggauuaugccucccuuaggucacuaguugccucauccggcacacuggaguuuaacaaugaaagcuucaauugggcuggagucacucaaaacggaacaaguucugcuugcauaaggggaucuaauaguaguuucuuuaguagauuaaauugguugacccacuuaaacuucaaauacccagcauugaacgugacuaugccaaacaaugagcaauuugacaaauuguacauuugggggguucaccacccggguacggacaaggaccaaaucuuccuguaugcucaaucaucaggaagaaucacaguaucuaccaaaagaagccaacaagcuguaaucccgaauaucggaucuagacccagaauaaggaauaucccuagcagaauaagcaucuauuggacaauaguaaaaccgggagacauacuuuugauuaacagcacagggaaucuaauugcuccuagggguuacuucaaaauaagaagugggaaaagcucaauaaugagaucagaugcacccauuggcaaaugcaaaucugaauguaucacuccaaauggaagcauucccaaugacaaaccauuccaaaauguaaacaggaucacauacggggccugucccagauauguuaagcaaagcacucugaaauuggcaacaggaaugcgaaauguaccagagaaacaaacuagaggcauauuuggcgcaauagcggguuucauagaaaaugguugggagggaaugguggaugguugguacgguuucaggcaucaaaauucugagggaagaggacaagcagcagaucucaaaagcacucaagcagcaaucgaucaaaucaaugggaagcugaaucgauugaucgggaaaaccaacgagaaauuccaucagauugaaaaagaauucucagaaguagaagggagaauucaggaccuugagaaauauguugaggacacaaaaauagaucucuggucauacaacgcggagcuucuuguugcccuggagaaccaacauacaauugaccuaacugacucagaaaugaacaaacuguuugaaaaaacaaagaagcaacugagggaaaaugcugaggauaugggcaaugguuguuucaaaauauaccacaaaugugacaaugccugcauaggaucaaucagaaauggaacuuaugaccacgauguauacagggaugaagcauuaaacaaccgguuccagaucaagggaguugagcugaagucaggguacaaagauuggauccuauggauuuccuuugccauaucauguuuuuugcuuuguguugcuuuguugggguucaucaugugggccugccaaaagggcaacauuaggugcaacauuugcauuuga

SEQ ID NO: 43586 - RNA, 1701 nt, Artificial Sequence; identical to SEQ ID NO: 43417
  derived and/or modified CDS sequence (wt) from hemagglutinin__InfluenzaA__AHL97889

SEQ ID NO: 43587 - RNA, 1701 nt, Artificial Sequence; identical to SEQ ID NO: 42492
  derived and/or modified CDS sequence (wt) from hemagglutinin__InfluenzaA__AHL97901

SEQ ID NO: 43588 - RNA, 1701 nt, Artificial Sequence
  derived and/or modified CDS sequence (wt) from hemagglutinin__InfluenzaA__AHL97913
augaagacuaucauugcuuugagcuacauucuaugucugguuuucgcucaaaaacuuccuggaaaugacaauagcacggcaacgcugugccuugggcaccaugcaguaccaaacggaacgauagugaaaacaaucacgaaugaccgaauugaaguuacuaaugcuacugagcugguucagaauuccucaauaggugaaauaugcgacaguccucaucagauccuugauggagaaaauugcacacuaauagaugcucuauugggagacccucagugugauggcuuucaaaauaagaaaugggaccuuuuuguugaacgaagcaaagccuacagcaacuguuacccuuaugaugugccggauuaugccucccuuaggucacuaguugccucauccggcacacuggaguuuaacaaugaaagcuucaauuggacuggagucacucaaaacggaacaaguucugcuugcauaaggagaucuaauaguaguuucuuuaguagauuaaauugguugacccacuuaaacuucaaauacccagcauugaacgugacuaugccaaacaaugaacaauuugacaaauuguacauuuggggaguucaccacccggguacggacaaggaccaaaucuuccuguaugcucaaucaucaggaagaaucacaguaucuaccaaaagaagccaacaagcuguaaucccaaauaucggaucuagacccagaauaaggaauaucccuagcagaauaagcaucuauuggacaauaguaaaaccgggagacauacuuuugauuaacagcacaggaaaucuaauugcuccuagggguuacuucaaaauacgaagugggaaaagcucaauaaugagaucagaugcacccauuggcaaaugcaagucugaaugcaucacuccaaauggaagcauucccaaugacaaaccauuccaaaauguaaacaggaucacauacggggccugucccagauauguuaagcaaagcacucugaaauuggcaacaggaaugcgaaauguaccagagaaacaaacuagaggcauauuuggcgcaauagcggguuucauagaaaaugguugggagggaaugguggaugguugguacgguuucaggcaucaaaauucugagggaagaggacaagcagcagaucucaaaagcacucaagcagcaaucgaucaaaucaaugggaagcugaaucgauugaucgggaaaaccaacgagaaauuccaucagauugaaaaagaauucucagaaguagaagggagaauucaggaccuugagaaauauguugaggacacuaaaauagaucucuggucauacaacgcggagcuucuuguugcccuggagaaucaacauacaauugaucuaacugacucagaaaugaacaaacuguuugaaaaaacaaagaagcaacugagggaaaaugcugaggauaugggcaaugguuguuucaaaauauaccacaaaugugacaaugccugcauaggaucaaucagaaauggaacuuaugaccacaauguguacagggaugaagcauuaaacaaccgguuccagaucaagggaguugagcuuaagucaggguacaaagauuggauccuauggauuuccuuugccauaucauguuuuuugcuuuguguugcuuuguugggguucaucaugugggccugccaaaagggcaacauuaggugcaacauuugcauuuga

SEQ ID NO: 43589 - RNA, 1701 nt, Artificial Sequence
  derived and/or modified CDS sequence (wt) from hemagglutinin__InfluenzaA__AHL97925
augaagacuaucauugcuuugagcuacauucuaugucuaguuuucgcucaaaaacuuccuggaaaugacaauagcacggcaacgcugugccuugggcaccaugcaguaccaaacggaacgauagugaaaacaaucacgaaugaccgaauugaaguuacuaaugcuacugagcugguucagaauuccucaauaggugaaauaugcgacaguccucaucagauccuugauggagaaaacugcacacuaauagaugcucuauugggagacccucagugugauggcuuccaaaauaagaaaugggaccuuuuuguugaacgaagcaaagccuacagcaacuguuacccuuaugaugugccggauuaugccucccuuaggucacuaguugccucauccggcacacuggaguuuaacaaugaaagcuucaauuggacuggagucacucaaaacggaacaaguucugcuugcauaaggagaucuaauaauaguuucuuuaguagauuaaauugguugacccacucaaacuucaaauacccagcauugaacgugacuaugccaaacaaugaacaauuugacaaauuguacauuugggggguucaccacccggguacggacaaggaccaaaucuuccuguaugcucaaucaucaggaagaaucacaguaucuaccaaaagaagccaacaagcuguaaucccgaauaucggaucuagacccagaauaaggaauaucccuagcagaauaagcaucuauuggacaauaguaaaaccgggagacauacuuuugauuaacagcacagggaaucuaauugcuccuagggguuacuucaaaauacgaagugggaaaagcucaauaaugagaucagaugcacccauuggcaaaugcaagucugaaugcaucacuccaaacggaagcauucccaaugacaaaccauuccaaaauguaaacaggaucacauacggggccugucccagauauguuaagcaaagcacucugaaauuggcaacaggaaugcgaaauguaccagagaaacaaacuagaggcauauuuggugcaauagcggguuucauagaaaaugguugggagggaaugauggaugguugguacgguuucaggcaccaaaauucugagggaagaggacaagcagcagaucucaaaagcacucaagcagcaaucgaucaaaucaaugggaagcugaaucgauugaucgggaaaaccaacgagaaauuccaucagauugaaaaagaauuuucagaaguagaagggagaauucaggaccuugagaaauauguugaggacacuaaaauagaucucuggucauacaacgcggagcuucuuguugcccuggagaaccaacauacaauugaucuaacugacucagaaaugaacaaacuguuugaaaaaacaaagaagcuacugagggaaaaugcugaggauaugggcaaugguuguuucaaaauauaccacaaaugugacaaugccugcauaggaucaaucagaaauggaacuuaugaccacgauguauacagagaugaagcauuaaacaaccgguuccagaucaagggaguugagcugaagucaggguacaaagauuggauccuauggauuuccuuugccauaucauguuuuuugcuuuguguugcuuuguugggguucaucaugugggccugccaaaagggcaacauuaggugcaacauuugcauuuga

SEQ ID NO: 43590 - RNA, 1701 nt, Artificial Sequence
  derived and/or modified CDS sequence (wt) from hemagglutinin__InfluenzaA__AHL97937
augaagacuaucauugcuuugagcuacauucuaugucugguuuucgcucaaaaacuuccuggaaaugacaauagcacggcaacgcugugccuugggcaccaugcaguaccaaacggaacgauagugaaaacaaucacgaaugaccgaauugaaguuacuaaugcuacugagcugguucagaauuccucaauaggugaaauaugcgacaguccucaucagauccuugauggagaaaauugcacacuaauagaugcucuauugggagacccucagugugauggcuuucaaaauaagaaaugggaccuuuuuguugaacgaagcaaagccuacagcaacuguuacccuuaugaugugccggauuaugccucccuuaggucacuaguugccucauccggcacacuggaguuuaacaaugaaagcuucaauuggacuggagucacucaaaacggaacaaguucugcuugcauaaggagaucuaauaguaguuucuuuaguagguuaaauugguugacccacuuaaacuucaaauacccagcauugaacgugacuaugccaaacaaugaacaauuugacaaauuguacauuuggggaguucaccacccggguacggacaaggaccaaaucuuccuguaugcucaaucaucaggaagaaucacaguaucuaccaaaagaagccaacaagcuguaaucccaaauaucggaucuagacccagaauaaggaauaucccuagcagaauaagcaucuauuggacaauaguaaaaccaggagacauacuuuugauuaacagcacagggaaucuaauugcuccuagggguuacuucaaaauacgaagugggaaaagcucaauaaugagaucagaugcacccauuggcaaaugcaagucugaaugcaucacuccaaauggaagcauucccaaugacaaaccauuccaaaauguaaacaggaucacauacggggccugucccagauauguuaagcaaagcacucugaaauuggcaacaggaaugcgaaauguaccagagaaacaaacuagaggcauauuuggcgcaauagcggguuucauagaaaaugguugggagggaaugguggaugguugguacgguuucaggcaucaaaauucugagggaagaggacaagcagcagaucucaaaagcacucaagcagcaaucgaucaaaucaaugggaagcugaaucgauugaucgggaaaaccaacgagaaauuccaucagauugaaaaagaauucucagaaguagaagggagaauucaggaccuugagaaauauguugaggacacuaaaauagaucucuggucauacaacgcggagcuucuuguugcccuggagaaucaacauacaauugaucuaacugacucagaaaugaacaaacuguuugaaaaaacaaagaagcaacugagggaaaaugcugaggauaugggcaaugguuguuucaaaauauaccacaaaugugacaaugccugcauaggaucaaucagaaauggaacuuaugaccacaauguguacagggaugaagcauuaaacaaccgguuccagaucaagggaguugagcuuaagucaggguacaaagauuggauccuauggauuuccuuugccauaucauguuuuuugcuuuguguugcuuuguugggguucaucaugugggccugccaaaagggcaacauuaggugcaacauuugcauuuga

SEQ ID NO: 43591 - RNA, 1701 nt, Artificial Sequence
  derived and/or modified CDS sequence (wt) from hemagglutinin__InfluenzaA__AHL97949
augaagacuaucauugcuuugagcuacauucuaugucugguuuucgcucaaaaacuuccuggaaaugacaauagcacggcaacgcugugccuugggcaccaugcaguaccaaacggaacgauagugaaaacaaucacgaaugaccgaauugaagucacuaaugcuacugagcugguucagaauuccucaauaggugaaauaugcgacaguccucaucagauccuugauggagaaaacugcacacuaauagaugcucuauugggagacccucagugugauggcuuucaaaauaagaaaugggaccuuuuuguugaacgaagcaaagccuacagcaacuguuacccuuaugaugugccggauuaugccucccuuaggucacuaguugccucauccggcacacuggaguuuaacaaugaaagcuucaauugggcuggggucacucaaaacggaacaaguucugcuugcauaaggggaucuaauaguaguuucuuuaguagauuaaauugguugacccacuuaaacuucaaauacccagcauugaacgugacuaugccaaacaaugaacaauuugacaaauuguacauuugggggguucaccacccggguacggacaaggaccaaaucuuccuguaugcucaaucaucaggaagaaucacaguaucuaccaaaagaagccaacaagcuguaaucccgaauaucggaucuagacccagaauaaggaauaucccuagcagaauaagcaucuauuggacaauaguaaaaccgggagacauacuuuugauuaacagcacagggaaucuaauugcuccuagggguuacuucaaaauacgaagugggaaaagcucaauaaugagaucagaugcacccauuggcaaaugcaagucugaaugcaucacuccaaauggaagcauucccaaugacaaaccauuccaaaauguaaacaggaucacauacgggaccugucccagauauguuaagcaaagcacucugaaauuggcaacaggaaugcgaaauguaccagagaaacaaaccagaggcauauuuggcgcaauagcggguuucauagaaaaugguugggagggaaugguggaugguugguacgguuucaggcaucaaaauuccgagggaagaggacaagcagcagaucucaaaagcacucaagcagcaaucgaucaaaucaaugggaagcugaaucgauugaucgggaaaaccaacgagaaauuccaucagauugaaaaagaauucucagaaguagaagggagaauucaggaccuugagaaauauguugaggacacaaaaauagaucucuggucauacaacgcggagcuucuuguugcccuggaaaaccaacauacaauugaucuaacugacucagaaaugaacaaacuguuugaaaaaacaaagaagcaacugagggaaaaugcugaggauaugggcaaugguuguuucaaaauauaccacaaaugugacaaugccugcauaggaucaaucagaaauggaacuuaugaccacgauguauacagggaugaagcauuaaacaaccgguuccagaucaagggaguugagcugaagucaggguacaaagauuggauccuauggauuuccuuugccauaucauguuuuuugcuuuguguugcuuuguugggguucaucaugugggccugccaaaagggcaacauuaggugcaacauuugcauuuga

SEQ ID NO: 43592 - RNA, 1701 nt, Artificial Sequence
  derived and/or modified CDS sequence (wt) from hemagglutinin__InfluenzaA__AHL97961
augaagacuaucauugcuuugagcuacauucuaugucugguuuucgcucaaaaacuuccuggaaaugacaauagcacggcaacgcugugccuugggcaccaugcaguaccaaacggaacgauagugaaaacaaucacgaaugaccgaauugaaguuacuaaugcuacugagcugguucagaauuccucaauaggugaaauaugcgacaguccucaucagauccuugauggagaaaacugcacacuaauagaugcucuauugggagacccucagugugauggcuuucaaaauaagaaaugggaccuuuuuguugaacgaagcaaagccuacagcaacuguuacccuuaugaugugccggauuaugccucccuuaggucacuaguugccucauccggcacacuggaguuuaacaaugaaagcuucaauugggcuggagucacucaaaacggaacaaguucugcuugcauaaggggaucuaauaguaguuucuuuaguagauuaaauugguugacccacuuaaacuucaaauacccagcauugaacgugacuaugccaaacaaugaacaauuugacaaauuguacauuugggggguucaccacccggguacggacaaggaccaaaucuuccuguaugcucaaucaucaggaagaaucacaguaucuaccaaaagaagccaacaagcuguaaucccgaauaucggaucuagacccagaauaaggaauaucccuagcagaauaagcaucuauuggacaauaguaaaaccgggagacauacuuuugauuaacagcacagggaaucuaauugcuccuagggguuacuucaaaauacgaagugggaaaagcucaauaaugagaucagaugcacccauuggcaaaugcaagucugaaugcaucacuccaaauggaagcauucccaaugacaaaccauuccaaaauguaaacaggaucacauacggggccugucccagauauguuaagcaaagcacucugaaauuggcaacaggaaugcgaaauguaccagagaaacaaacuagaggcauauuuggugcaauagcggguuucauagaaaaugguugggagggaaugauggaugguugguacgguuucaggcaucaaaauucugagggaagaggacaagcagcagaucucaaaagcacucaagcagcaaucgaucaaaucaaugggaagcugaaucgauugaucggaaaaaccaacgagaaauuccaucagauugaaaaagaauucucagaaguagaagggagaauucaggaccuugagaaauauguugaggacacaaaaauagaucucuggucauacaacgcggagcuucuuguugcccuggagaaccaacauacaauugaucuaacugacucagaaaugaacaaacuguuugaaaaaacaaagaagcaacugagggaaaaugcugaggauaugggcaaugguuguuucaaaauauaccacaaaugugacaaugccugcauaggaucaaucagaaauggaacuuaugaccacgauguauacagggaugaagcauuaaacaaccgguuccagaucaagggaguugagcugaagucaggguacaaagauuggauccuauggauuuccuuugccauaucauguuuuuugcuuuguguugcuuuguugggguucaucaugugggccugccaaaagggcaacauuagaugcaacauuugcauuuga

SEQ ID NO: 43593 - RNA, 1701 nt, Artificial Sequence; identical to SEQ ID NO: 41880
  derived and/or modified CDS sequence (wt) from hemagglutinin__InfluenzaA__AHL97973

SEQ ID NO: 43594 - RNA, 1701 nt, Artificial Sequence; identical to SEQ ID NO: 43438
  derived and/or modified CDS sequence (wt) from hemagglutinin__InfluenzaA__AHL97985

SEQ ID NO: 43595 - RNA, 1701 nt, Artificial Sequence
  derived and/or modified CDS sequence (wt) from hemagglutinin__InfluenzaA__AHL97997
augaagacuaucauugcuuugagcuacauucuaugucugguuuucgcucaaaaacuuccuggaaaugacaauagcacggcaacgcugugccuugggcaccaugcaguaccaaacggaacgauagugaaaacaaucacgaaugaccgaauugaaguuacuaaugcuacugagcugguucagaauuccucaauaggugaaauaugcgacaguccucaucagauccuugauggagaaaacuguacacuaauagaugcucuauugggagacccucagugugauggcuuucaaaauaagaaaugggaccuuuuuguugaacgaagcaaagccuacagcaacuguuacccuuaugaugugccggauuaugccucccuuaggucacuaguugccucauccggcacacuggaguuuaacaaugaaagcuucaauuggacuggagucacucaaaacggaacaaguucugcuugcauaaggagaucuaauaguaguuucuuuaguagauuaaauugguugacccacuuaaacuucaaauacccagcauugaacgugacuaugccaaacaaugaacaauuugacaaauuguacauuugggggguucaccacccggguacggacaaggaccaaaucuuccuguaugcucaaucaucaggaagaaucacaguaucuaccaaaagaagccaacaagcuguaaucccgaauaucggaucuagacccagaauaaggaauaucccuagcagaauaagcaucuauuggacaauaguaaaaccaggagacauacuuuugauuaacagcacagggaaucuaauugcuccuagggguuacuucaaaauacgaagugggaaaagcucaauaaugagaucagaugcacccauuggcaaaugcaagucugaaugcaucacuccaaauggaagcauuccaaaugacaaaccauuccaaaauguaaacaggaucacauacggggccugucccagauauguuaagcaaagcacucugaaauuggcaacaggaaugcgaaacguaccagagaaacaaacuagaggcauauuuggcgcaauagcggguuucauagaaaaugguugggagggaaugguggaugguugguacgguuucaggcaucaaaauucugagggaagaggacaagcagcagaucucaaaagcacucaagcagcaaucgaucaaaucaaugggaagcugaaucgauugaucgggaaaaccaacgagaaauuccaucagauugaaaaagaauucucagaaguagaagggagaauucaggaccuugagaaauauguugaggacacuaaaauagaucucuggucauacaacgcggagcuucuuguugcccuggagaaccaacauacaauugaucuaacugacucagaaaugaacaaacuguuugaaaaaacaaagaagcaacugagggaaaaugcugaggauaugggcaaugguuguuucaaaauauaccacaaaugugacaaugccugcauaggaucaaucagaaauggaacuuaugaccacgauguauacagggaugaagcauuaaacaaccgguuccagaucaggggaguugagcugaagucaggguacaaagauuggauccuauggauuuccuuugccauaucauguuuuuugcuuuguguugcuuuguugggguucaucaugugggcuugccaaaagggcaacauuaggugcaacauuugcauuuga

SEQ ID NO: 43596 - RNA, 1701 nt, Artificial Sequence; identical to SEQ ID NO: 42505
  derived and/or modified CDS sequence (wt) from hemagglutinin__InfluenzaA__AHL98009

SEQ ID NO: 43597 - RNA, 1701 nt, Artificial Sequence
  derived and/or modified CDS sequence (wt) from hemagglutinin__InfluenzaA__AHL98021
augaagacuaucauugcuuugagcuacauucuaugucugguuuucgcucaaaaacuuccuggaaaugacaauagcacggcaacgcugugccuugggcaccaugcaguaccaaacggaacgauaguaaaaacaaucacgaaugaccgaauugaaguuacuaaugcuacugagcugguucagaauuccucaauagguaaaauaugcgacaguccucaucagauccuugauggagaaaauugcacacuaauggaugcucuauugggagacccucagugugauggcuuucaaaauaagaaaugggaccuuuuuguugaacgaagcaaagccuacagcaacuguuacccuuaugaugugccggauuaugccucccuuaggucacuaguugccucauccggcacacuggaguuuaacaaugaaagcuucaauugggcuggagucacucaaaacggaacaaguucugcuugcauaaggagaucuaauaguaguuucuuuaguagauuaaauugguugacccacuuaaacuucaaauacccagcauugaacgugacuaugccaaacaaugaacaauuugacaaauuguacauuugggggguucaccacccggguacggacaaggaccaaaucuuccuguaugcucaaucaucaggaagaaucacaguaucuaccaaaagaagccaacaagcuguaaucccaaauaucggaucuagacccagaauaaggaauaucccuagcagaauaagcaucuauuggacaauaguaaaaccgggagacauacuuuugauuaacagcacagggaaucuaauugcuccuagggguuacuucaaaauacgaagugggaaaagcucaauaaugagaucagaugcacccauuggcaaaugcaagucugaaugcaucacuccaaauggaagcauucccaaugacaaaccauuccaaaauguaaacaggaucacauacggggccugucccagauauguuaagcaaagcacucugaaauuggcaacaggaaugcgaaauguaccagagaaacaaacuagaggcauauuuggcgcaauagcggguuucauagaaaaugguugggagggaaugauggaugguugguacgguuucaggcaucaaaauucugagggaagaggacaagcagcagaucucaaaagcacucaagcagcaaucgaucaaaucaaugggaagcugaaucgauugaucgggaaaaccaacgagaaauuccaucagauugaaaaagaauucucagaaguagaagggagaauucaggaccuugagaaauauguugaggacacuaaaauagaucucuggucauacaacgcggagcuucuuguugcccuggagaaccaacauacaauugaucuaacugacucagaaaugaacaaacuguuugaaaaaacaaagaagcaacugagggaaaaugcugaggauaugggcaaugguuguuucaaaauauaccacaaaugugacaaugccugcauaggaucaaucagaaauggaacuuaugaccacaauguguacagggaugaagcauuaaacaaccgguuccagaucaagggaguugagcuuaagucaggguacaaagauuggauccuauggauuuccuuugccauaucauguuuuuugcuuuguguugcuuuguugggguucaucaugugggccugccaaaagggcaacauuaggugcaacauuugcauuuga

SEQ ID NO: 43598 - RNA, 1701 nt, Artificial Sequence; identical to SEQ ID NO: 42492
  derived and/or modified CDS sequence (wt) from hemagglutinin__InfluenzaA__AHL98033

SEQ ID NO: 43599 - RNA, 1701 nt, Artificial Sequence
  derived and/or modified CDS sequence (wt) from hemagglutinin__InfluenzaA__AHL98045
augaagacuaucauugcuuugagcuacauucuaugucugguuuucgcucaaaaacuuccuggaaaugacaauagcacggcaacgcugugccuugggcaccaugcaguaccaaacggaacgauagugaaaacaaucacgaaugaccgaauugaaguuacuaaugcuacugagcugguucagaauuccucaauaggugaaauaugcgacaguccucaucagauccuugauggagaaaauugcacacuaauagaugcucuauugggagacccucagugugauggcuuucaaaauaagaaaugggaccuuuuuguugaacgaagcaaagccuacagcaacuguuacccuuaugaugugccggauuaugccucccuuaggucacuaguugccucauccggcacacuggaguuuaacaaugaaagcuucaauuggacuggagucacucaaaacggaacaaguucugcuugcauaaggagaucuaauaguaguuucuuuaguagauuaaauugguugacccacuuaaacuucaaauacccagcauugaacgugacuaugccaaacaaugaacaauuugacaaauuguacauuuggggaguucaccacccggguacggacaaggaccaaaucuuccuguaugcucaaucaucaggaagaaucacaguaucuaccaaaagaagccaacaagcuguaaucccaaauaucggaucuagacccagaauaaggaauaucccuagcagaauaagcaucuauuggacaauaguaaaaccgggagacauacuuuugauuaacagcacagggaaucuaauugcuccuagggguuacuucaaaauacgaagugggaaaagcucaauaaugaaaucagaugcacccauuggcaaaugcaagucugaaugcaucacuccaaauggaagcauucccaaugacaaaccauuccaaaauguaaacaggaucacauacggggccugucccagauauguuaagcaaagcacucugaaauuggcaacaggaaugcgaaauguaccagagaaacaaacuagaggcauauuuggcgcaauagcggguuucauagaaaaugguugggagggaaugguggaugguugguacgguuucaggcaucaaaauucugagggaagaggacaagcagcagaucucaaaagcacucaagcagcaaucgaucaaaucaaugggaagcugaaucgauugaucgggaaaaccaacgagaaauuccaucagauugaaaaagaauucucagaaguagaagggagaauucaggaccuugagaaauacguugaggacacuaaaauagaucucuggucauacaacgcggagcuucuuguugcccuggagaaccaacauacaauugaucuaacugacucagaaaugaacaaacuguuugaaaaaacaaagaagcaacugagggaaaaugcugaggauaugggcaaugguuguuucaaaauauaccacaaaugugacaaugccugcauaggaucaaucagaaauggaacuuaugaccacaauguguacagggaugaagcauuaaacaaccgguuccagaucaagggaguugagcuuaagucaggguacaaagauuggauccuauggauuuccuuugccauaucauguuuuuugcuuuguguugcuuuguugggguucaucaugugggccugccaaaagggcaacauuaggugcaacauuugcauuuga

SEQ ID NO: 43600 - RNA, 1701 nt, Artificial Sequence; identical to SEQ ID NO: 43599
  derived and/or modified CDS sequence (wt) from hemagglutinin__InfluenzaA__AHL98057

SEQ ID NO: 43601 - RNA, 1701 nt, Artificial Sequence; identical to SEQ ID NO: 43599
  derived and/or modified CDS sequence (wt) from hemagglutinin__InfluenzaA__AHL98069

SEQ ID NO: 43602 - RNA, 1701 nt, Artificial Sequence
  derived and/or modified CDS sequence (wt) from hemagglutinin__InfluenzaA__AHL98081
augaagacuaucauugcuuugagcuacauucuaugucugguuuucgcucaaaaacuuccuggaaaugacaauagcacggcaacgcugugccuugggcaccaugcaguaccaaacggaacgauagugaaaacaaucacgaaugaccgaauugaaguuacuaaugcuacugagcugguucagaauuccucaauaggugaaauaugcgacaguccucaucagauccuugauggagaaaacugcacacuaauagaugcucuauugggagacccucagugugauggcuuucaaaauaagaaaugggaccuuuuuguugaacgaagcaaagccuacagcaacuguuacccuuaugaugugccggauuaugccucccuuaggucacuaguugccucauccggcacacuggaguuuaacaaugaaagcuucaauuggacuggagucacucaaaacggaacaaguucugcuugcauaaggaaaucuaauaguaguuucuuuaguagauuaaauugguugacccacuuaaacuucaaauacccagcauugaacgugacuaugccaaacaaugaacaauuugacaaauuguacauuugggggguucaccacccggguacggacaaggaccaaaucuuccuguaugcucaaucaucaggaagaaucacaguaucuacccaaagaagccaacaagcuguaaucccgaauaucggaucuagacccagaauaaggaauaucccuagcagaauaagcaucuauuggacaauaguaaaaccgggagacauacuuuugauuaacagcacagggaaucuaauugcuccuagggguuacuucaaaauacgaagugggaaaagcucaauaaugagaucagaugcacccauuggcaaauguaagucugaaugcaucacuccaaauggaagcauucccaaugacaaaccauuccaaaauguaaacaggaucacauacggggccugucccagauauguuaagcaaagcacucugaaauuggcaacaggaaugcgaaauguaccagagaaacaaacuagaggcauauuuggcgcaauagcggguuucauagaaaaugguugggagggaaugguggaugguugguacgguuucaggcaucaaaauucugagggaagaggacaagcagcagaucucaaaagcacucaagcagcaaucgaucaaaucaaugggaagcugaaucgauuggucgggaaaaccaacgagaaauuccaucagauugaaaaggaauucucagaaguagaagggagaauucaggaccuugagaaauauguugaggacacuaaaauagaucucuggucauacaacgcggagcuucuuguugcccuggagaaccaacauacaauugaucuaacugacucagaaaugaacaaacuguuugaaaaaacaaagaagcaacugagggaaaaugcugaggauaugggcaaugguuguuucaaaauauaccacaaaugugacaaugccugcauaggaucaaucagaaauggaacuuaugaccacgauguauacagggaugaagcauuaaacaaccgguuccagaucaagggaguugagcugaagucaggguacaaagauuggauccuauggauuuccuuugccauaucauguuuuuugcuuuguguugcuuuguugggguucaucaugugggccugccaaaagggcaacauuaggugcaacauuugcauuuga

SEQ ID NO: 43603 - RNA, 1701 nt, Artificial Sequence; identical to SEQ ID NO: 43588
  derived and/or modified CDS sequence (wt) from hemagglutinin__InfluenzaA__AHL98093

SEQ ID NO: 43604 - RNA, 1701 nt, Artificial Sequence
  derived and/or modified CDS sequence (wt) from hemagglutinin__InfluenzaA__AHL98105
augaaggcaauacuaguaguuaugcuauauacauuugcaaccgcaaaugcagacacauuauguauagguuaucaugcgaacaauucaacagacacuguagacacaguacuagaaaagaauguaacaguaacacacucuguuaaucuucuagaagacaagcauaacgggaaacuaugcaaacuaagagggguagccccauugcauuuggguaaauguaacauugcuggcuggauccugggaaauccagagugugaaucacucuccacagcaagcucaugguccuacauuguggaaacaucugguucagacaauggaacguguuacccaggagauuucaucgauuaugaggagcuaagagagcaauugagcucagugucaucauuugaaagguuugaaauauuccccaaaacaaguucauggccaaaucaugacucgaacaaagguguaacggcagcauguccucaugcuggagcaaaaggcuucuacaaaaauuuaauauggcuaguuaaaaaaggaaauucauacccaaagcucagcauauccuacauuaaugacaaagggaaagaaguccucgugcuauggggcauucaccauccaucuacuacugcugaccaacaaagucucuaucagaaugcagauacauauguuuuugugggggcaucaagauacagcaagaaguucaagccggaaauagcaauaagacccaaagugagggaucaagaagggagaaugaacuauuacuggacacuaguagagccgggagacaaaauaacauucgaagcaacuggaaaucuagugguaccgagauaugcauuugcaauggaaagaaaugcuggaucugguauuaucauuucagauacaccaguucacgauugcaauacaacuugucagacacccaagggugcuauaaacaccagccucccauuucagaauauacauccgaucacaauuggaaaauguccaaaauauguaaaaagcacaaaauugagacuggccacaggauugaggaaugucccgucuauucaaucuagaggccuauuuggggccauugcuggcuucauugaagggggguggacagggaugguagauggaugguacgguuaucaccaucaaaaugagcaggggucaggauaugcagccgaccugaagagcacacagaaugccauugacaagauuacuaacaaaguaaauucuguuauugaaaagaugaauacacaguucacagcaguagguaaagaguucaaccaccuggaaaaaagaauagagaauuuaaauaaaaaaguugaugaugguuuccuggacauuuggacuuacaaugccgaacuguugguucuauuggaaaaugaaagaacuuuggacuaccacgauucaaaugugaagaacuuauaugaaaagguaagaaaccaguuaaaaaacaaugccaaggaaauuggaaauggcugcuuugaauuuuaccacaaaugcgauaacacgugcauggaaagugucaaaaaugggacuuaugauuacccaaaauacucagaggaagcaaaauuaaacagagaagaaauagaugggguaaagcuggaaucaacaaggauuuaccagauuuuggcgaucuauucaacugccgcuaguucauugguacugguagucucccugggggcaaucaguuuuuggaugugcucuaaugggucucuacaguguagaauauguauuuaa

SEQ ID NO: 43605 - RNA, 1701 nt, Artificial Sequence
  derived and/or modified CDS sequence (wt) from hemagglutinin__InfluenzaA__AHL98116
augaagacuaucauugcuuugagcuacauucuaugucugguuuucgcucaaaaacuuccuggaaaugacaauagcacggcaacgcugugccuugggcaccaugcaguaccaaacggaacgauagugaaaacaaucacgaaugaccgaauugaaguuacuaaugcuacugagcugguucagaauuccucaauaggugaaauaugcgacaguccucaucagauucuugauggagaaaacugcacacuaauagaugcucuauugggagacccucagugugauggcuuucaaaauaagaaaugggaccuuuuuguugaacgaagcaaagccuacagcaacuguuacccuuaugaugugccggauuaugccucccuuaggucacuaguugccucauccggcacacuggaguuuaacaaugaaagcuucaauuggacuggagucacucaaaacggaacaaguucugcuugcauaaggagaucuaauaguaguuucuuuaguagauuaaauugguugacccacuuaaacuucaaauacccagcauugaacgugacuaugccaaacaaugaacaauuugacaaauuguacauuugggggguucaccacccagguacggacaaggaccaaaucuuccuguaugcucaaucaucaggaagaaucacaguaucuaccaaaagaagccaacaagcuguaaucccaaauaucggaucuagacccagaauaaggaauaucccuagcagaauaagcaucuauuggacaauaguaaaaccgggagacauacuuuugauuaacagcacagggaaucuaauugcuccuagggguuacuucaaaauacgaagugggaaaagcucaauaaugagaucagaugcacccauuggcaaaugcaagucagaaugcaucacuccaaauggaagcauucccaaugacaaaccauuccaaaauguaaacaggaucacauacggggccugucccagauauguuaagcaaagcacucugaaauuggcaacaggaaugcgaaauguaccagagaaacaaacuagaggcauauuuggcgcaauagcagguuucauagaaaaugguugggagggaaugguggaugguugguacgguuucaggcaucaaaauucugagggaagaggacaagcagcagaucucaaaagcacccaagcagcaaucgaucaaaucaaugggaagcugaaucgauugaucgggaaaaccaacgagaaauuccaucagauugaaaaagaauucucagaaguagaagggagaauucaggaccuugagaaauauguugaggacacuaaaauagaucucuggucauacaacgcggagcuucuuguugcccuggagaaccaacauacaauugaucuaacugacucagaaaugaacaaacuguuugaaaaaacaaagaagcaacugagggaaaaugcugaggauaugggcaaugguuguuucaaaauauaccacaaaugugacaaugccugcauaggaucaauaagaaauggaacuuaugaccacaauguguacagggaugaagcauuaaacaaccgguuccagaucaagggaguugagcugaagucaggguacaaagauuggauccuauggauuuccuuugccauaucauguuuuuugcuuuguguugcuuuguugggguucaucaugugggccugccaaaagggcaacauuaggugcaacauuugcauuuga

SEQ ID NO: 43606 - RNA, 1701 nt, Artificial Sequence; identical to SEQ ID NO: 43474
  derived and/or modified CDS sequence (wt) from hemagglutinin__InfluenzaA__AHL98128

SEQ ID NO: 43607 - RNA, 1701 nt, Artificial Sequence; identical to SEQ ID NO: 41870
  derived and/or modified CDS sequence (wt) from hemagglutinin__InfluenzaA__AHL98140

SEQ ID NO: 43608 - RNA, 1701 nt, Artificial Sequence
  derived and/or modified CDS sequence (wt) from hemagglutinin__InfluenzaA__AHL98152
augaagacuaucauugcuuugagcuacauucuaugucugguuuucgcucaaaaacuuccuggaaaugacaauagcacggcaacgcugugccuugggcaccaugcaguaccaaacggaacgauagugaaaacaaucacgaaugaccgaauugaaguuacuaaugcuacugagcugguucagaauuccucaauaggugaaauaugcgacaguccucaucagauucuugauggagaaaacugcacacuaauagaugcucuauugggagacccucagugugauggcuuucaaaauaagaaaugggaccuuuuuguugaacgaagcaaagccuacagcaacuguuacccuuaugaugugccggauuaugccucccuuaggucacuaguugccucauccggcacacuggaguuuaacaaugaaagcuucaauuggacuggagucacucaaaacggaacaaguucugcuugcauaaggagaucuaauaguaguuucuuuaguagauuaaauugguugacccacuuaaacuucaaauacccagcauugaacgugacuaugccaaacaaugaacaauuugacaaauuguacauuugggggguucaccacccaggcacggacaaggaccaaaucuuccuguaugcucaaucaucaggaagaaucacaguaucuaccaaaagaagccaacaagcuguaaucccaaauaucggaucuagacccagaauaaggaauaucccuagcagaauaagcaucuauuggacaauaguaaaaccgggagacauacuuuugauuaacagcacagggaaucuaauugcuccuagggguuacuucaaaauacgaagugggaaaagcucaauaaugagaucagaugcacccauuggcaaaugcaagucugaaugcaucacuccaaauggaagcauucccaaugacaaaccauuccaaaauguaaacaggaucacauacggggccugucccagauauguuaagcaaagcacucugaaauuggcaacaggaaugcgaaauguaccagagaaacaaacuagaggcauauuuggcgcaauagcagguuucauagaaaaugguugggagggaaugguggaugguugguacgguuucaggcaucaaaauucugagggaagaggacaagcagcagaucucaaaagcacccaagcagcaaucgaucaaaucaaugggaagcugaaucgauugaucgggaaaaccaacgagaaauuccaucagauugaaaaagaauucucagaaguagaagggagaauucaggaccuugagaaauauguugaggacacuaaaauagaucucuggucauacaacgcggagcuucuuguugcccuggagaaccaacauacaauugaucuaacugacucagaaaugaacaaacuguuugaaaaaacaaagaagcaacugagggaaaaugcugaggauaugggcaaugguuguuucaaaauauaccacaaaugugacaaugccugcauaggaucaauaagaaauggaacuuaugaccacaauguguacagggaugaagcauuaaacaaccgguuccagaucaagggaguugagcugaagucaggguacaaagauuggauccuauggauuuccuuugccauaucauguuuuuugcuuuguguugcuuuguugggguucaucaugugggccugccaaaagggcaacauuaggugcaacauuugcauuuga

SEQ ID NO: 43609 - RNA, 1701 nt, Artificial Sequence; identical to SEQ ID NO: 43474
  derived and/or modified CDS sequence (wt) from hemagglutinin__InfluenzaA__AHL98164

SEQ ID NO: 43610 - RNA, 1701 nt, Artificial Sequence; identical to SEQ ID NO: 43474
  derived and/or modified CDS sequence (wt) from hemagglutinin__InfluenzaA__AHL98176

SEQ ID NO: 43611 - RNA, 1701 nt, Artificial Sequence; identical to SEQ ID NO: 41870
  derived and/or modified CDS sequence (wt) from hemagglutinin__InfluenzaA__AHL98188

SEQ ID NO: 43612 - RNA, 1701 nt, Artificial Sequence; identical to SEQ ID NO: 42035
  derived and/or modified CDS sequence (wt) from hemagglutinin__InfluenzaA__AHL98200

SEQ ID NO: 43613 - RNA, 1701 nt, Artificial Sequence; identical to SEQ ID NO: 41879
  derived and/or modified CDS sequence (wt) from hemagglutinin__InfluenzaA__AHL98212

SEQ ID NO: 43614 - RNA, 1701 nt, Artificial Sequence
  derived and/or modified CDS sequence (wt) from hemagglutinin__InfluenzaA__AHL98224
augaagacuaucauugcuuugagcuacauucuaugucugguuuucgcucaaaaacuuccuggaaaugacaauagcacggcaacgcugugccuugggcaccaugcaguaccaaacggaacgauagugaaaacaaucacgaaugaccgaauugaaguuacuaaugcuacugagcugguucagaauuccucaauaggugaaauaugcgacaguccucaucagauccuugauggagaaaauugcacacuaauagaugcucuauugggagacccucagugugauggcuuucaaaauaagaaaugggaccuuuuuguugaacgaagcaaagccuacagcaacuguuacccuuaugaugugccggauuaugccucccuuaggucacuaguugccucauccggcacacuggaguuuaacaaugaaagcuucaauuggacuggagucacucaaaacggaacaaguucugcuugcauaaggagaucuaauaguaguuucuuuaguagauuaaauugguugacccacuuaaacuucaaauacccagcauugaacgugacuaugccaaacaaugaacaauuugacaaauuguacauuuggggaguucaccacccggguacggacaaggaccaaaucuuccuguaugcucaaucaucaggaagaaucacaguaucuaccaaaagaagccaacaagcuguaaucccaaauaucggaucuagacccagaauaaggaauaucccuagcagaauaagcaucuauuggacaauaguaaaaccgggagacauacuuuugauuaacagcacagggaaucuaauugcuccuagggguuacuucaaaauacgaagugggaaaagcucaauaaugagaucagaugcacccauuggcaaaugcaagucugaaugcaucacuccaaauggaagcauucccaaugacaaaccauuccaaaauguaaacaggaucacauacggggccugucccagauauguuaagcaaagcacucugaaauuggcaacaggaaugcgaaauguaccagagaaacaaacuagaggcauauuuggcgcaauagcggguuucauagaaaauggaugggagggaaugguggaugguugguacgguuucaggcaucaaaauucugagggaagaggacaagcagcagaucucaaaagcacucaagcagcaaucgaucaaaucaaugggaagcugaaucgauugaucgggaaaaccaacgagaaauuccaucagauugaaaaagaauucucagaaguagaagggagaauucaggaccuugagaaauauguugaggacacuaaaauagaucucuggucauacaacgcggagcuucuuguugcccuggagaaucaacauacaauugaucuaacugacucagaaaugaacaaacuguuugaaaaaacaaagaagcaacugagggaaaaugcugaggauaugggcaaugguuguuucaaaauauaccacaaaugugacaaugccugcauaggaucaaucagaaauggaacuuaugaccacaauguguacagggaugaagcauuaaacaaccgguuccagaucaagggaguugagcuuaagucaggguacaaagauuggauccuauggauuuccuuugccauaucauguuuuuugcuuuguguugcuuuguugggguucaucaugugggccugccaaaagggcaacauuaggugcaacauuugcauuuga

SEQ ID NO: 43615 - RNA, 1701 nt, Artificial Sequence
  derived and/or modified CDS sequence (wt) from hemagglutinin__InfluenzaA__AHL98236
augaagacuaucauugcuuugagcuacauucuaugucugguuuucgcucaaaaacuuccuggaaaugacaauagcacggcaacgcugugccuugggcaccaugcaguaccaaacggaacgauagugaaaacaaucacgaaugaccgaauugaagucacuaaugcuacugagcugguucagaauuccucaauaggugaaauaugcgacaguccucaucagauccuugauggagaaaacugcacacuaauagaugcucuauugggagacccucagugugauggcuuucaaaauaagaaaugggaccuuuuuguugaacgaagcaaagccuacagcaacuguuacccuuaugaugugccggauuaugccucccuuaggucacuaguugccucauccggcacacuggaguuuaacaaugaaagcuucaauugggcuggggucacucaaaacggaacaaguucugcuugcauaaggggaucuaauaguaguuucuuuaguagauuaaauugguugacccacuuaaacuucaaauacccagcauugaacgugacuaugccaaacaaugaacaauuugacaaauuguacauuugggggguucaccacccggguacggacaaggaccaaaucuuccuguaugcucaaucaucaggaagaaucacaguaucuaccaaaagaagccaacaagcuguaaucccgaauaucggaucuagacccagaauaaggaauaucccuagcagaauaagcaucuauuggacaauaguaaaaccgggagacauacuuuugauuaacagcacagggaaucuaauugcuccuagggguuacuucaaaauacgaagugggaaaagcucaauaaugagaucagaugcacccauuggcaaaugcaagucugaaugcaucacuccaaauggaagcauucccaaugacaaaccauuccaaaauguaaacaggaucacauacggggccugucccagauauguuaaacaaagcacucugaaauuggcaacaggaaugcgaaauguaccagagaaacaaaccagaggcauauuuggcgcaauagcggguuucauagaaaaugguugggagggaaugguggaugguugguacgguuucaggcaucaaaauucugagggaagaggacaagcagcagaucucaaaagcacucaagcagcaaucgaucaaaucaaugggaagcugaaucgauugaucgggaaaaccaacgagaaauuccaucagauugaaaaagaauucucagaaguagaagggagaauucaggaccuugagaaauauguugaggacacaaaaauagaucucuggucauacaacgcggagcuucuuguugcccuggagaaccaacauacaauugaucuaacugacucagaaaugaacaaacuguuugaaaaaacaaagaagcaacugagggaaaaugcugaggauaugggcaaugguuguuucaaaauauaccacaaaugugacaaugccugcauaggaucaaucagaaauggaacuuaugaccacgauguauacagggaugaagcauuaaacaaccgguuccagaucaagggaguugagcugaagucaggguacaaagauuggauccuauggauuuccuuugccauaucauguuuuuugcuuuguguugcuuuguugggguucaucaugugggccugccaaaagggcaacauuaggugcaacauuugcauuuga

SEQ ID NO: 43616 - RNA, 1701 nt, Artificial Sequence; identical to SEQ ID NO: 43474
  derived and/or modified CDS sequence (wt) from hemagglutinin__InfluenzaA__AHL98248

SEQ ID NO: 43617 - RNA, 1701 nt, Artificial Sequence
  derived and/or modified CDS sequence (wt) from hemagglutinin__InfluenzaA__AHL98260
augaagacuaucauugcuuugagcuacauucuaugucugguuuucgcucaaaaacuuccuggaaaugacaauagcacggcaacgcugugccuugggcaccaugcaguaccaaacggaacgauagugaaaacaaucacgaaugaccgaauugaaguuacuaaugcuacugagcugguucagaauuccucaauaggugaaauaugcgacaguccucaucagauccuugauggagaaaauugcacacuaauagaugcucuauugggagacccucagugugauggcuuucaaaauaagaaaugggaccuuuuuguugaacgaagcaaagccuacagcaacuguuacccuuaugaugugccggauuaugccucccuuaggucacuaguugccucauccggcacacuggaguuuaacaaugaaagcuucaauuggacuggagucacucaaaacggaacaaguucugcuugcauaaggagaucuaauaguaguuucuuuaguagauuaaauugguugacccacuuaaacuucaaauacccagcauugaacgugacuaugccaaacaaugaacaauuugacaaauuguacauuuggggaguucaccacccggguacggacaaggaccaaaucuuccuguaugcucaaucaucaggaagaaucacaguaucuaccaaaagaagccaacaagcuguaaucccaaauaucggaucuagacccagaauaaggaauaucccuagcagaauaagcaucuauuggacaauaguaaaaccgggagacauacuuuugauuaacagcacagggaaucuaauugcuccuagggguuacuucaaaauacgaagugggaaaagcucaauaaugagaucagaugcacccauuggcaaaugcaagucugaaugcaucacuccaaauggaagcauucccaaugacaaaccauuccaaaauguaaacaggaucacauacggggccugucccagauauguuaagcaaagcacucugaaauuggcaacaggaaugcgaaauguaccagagaaacaaacuagaggcauauuuggcgcaauagcggguuucauagaaaaugguugggaggggaugguggaugguugguacgguuucaggcaucaaaauucugagggaagaggacaagcagcagaucucaaaagcacucaagcagcaaucgaucaaaucaaugggaagcugaaucgauugaucgggaaaaccaacgagaaauuccaucagauugaaaaagaauucucagaaguagaagggagaauucaggaccuugagaaauauguugaggacacuaaaauagaucucuggucauacaacgcggagcuucuaguugcccuggagaaucaacauacaauugaucuaacugacucagaaaugaacaaacuguuugaaaaaacaaagaagcaacugagggaaaaugcugaggauaugggcaaugguuguuucaaaauauaccacaaaugugacaaugccugcauaggaucaaucagaaauggaacuuaugaccacaauguguacagggaugaagcauuaaacaaccgguuccagaucaagggaguugagcuuaagucaggguacaaagauuggauccuauggauuuccuuugccauaucauguuuuuugcuuuguguugcuuuguugggguucaucaugugggccugccaaaagggcaacauuaggugcaacauuugcauuuga

SEQ ID NO: 43618 - RNA, 1701 nt, Artificial Sequence
  derived and/or modified CDS sequence (wt) from hemagglutinin__InfluenzaA__AHL98272
augaagacuaucauugcuuugagcuacauucuaugucugguuuucgcucaaaaacuuccuggaaaugacaauagcacggcaacgcugugccuugggcaccaugcaguaccaaacggaacgauagugaaaacaaucacgaaugaccgaauugaaguuacuaaugcuacugagcugguucagaauuccucaauaggugaaauaugcgacaguccucaucagauccuugauggagaaaacugcacauuaauagaugcucuauugggagacccucagugugauggcuuucaaaauaagaaaugggaccuuuuuguugaacgaagcaaagccuacagcaacuguuacccuuaugaugugccggauuaugccucccuuaggucacuaguugccucauccggcacacuggaguuuaacaaugaaagcuucaauugggcuggagucacucaaaacggaacaaguucugcuugcauaaggggaucuaauagcaguuucuuuaguagauuaaauugguugacccacuuaaacuucaaauacccagcauugaacgugacuaugccaaacaaugaacaauuugacaaauuguacauuugggggguucaccacccggguacggacaaggaccaaaucuuccuguaugcucaaucaucaggaagaaucacaguaucuaccaaaagaagccaacaagcuguaaucccgaauaucggaucuagacccagaauaaggaauaucccuagcagaauaagcaucuauuggacaauaguaaaaccgggagacauacuuuugauuaacagcacagggaaucuaauugcuccuagggguuacuucaaaauacgaagugggaaaagcucaauaaugagaucagaugcacccauuggcaaaugcaagucugaaugcaucacuccaaauggaagcauucccaaugacaaaccauuccaaaauguaaacaggaucacauacggggccugucccagauauguuaagcaaagcacucugaaauuggcaacaggaaugcgaaauguaccagagaaacaaacuagaggcauauuuggcgcaauagcggguuucauagaaaaugguugggagggaaugauggaugguugguacgguuucaggcaucaaaauucugagggaagaggacaagcagcagaucucaaaagcacucaagcagcaaucgaucaaaucaaugggaagcugaaucgauugaucgggaaaaccaacgagaaauuccaucagauugaaaaagaauucucagaaguagaagggagaauucaggaccuugagaaauauguugaggacacaaaaauagaucucuggucauacaacgcggagcuucuuguugcccuggagaaccaacauacaauugaucuaacugacucagaaaugaacaaacuguuugaaaaaacaaagaagcaacugagggaaaaugcugaggauaugggcaaugguuguuucaaaauauaccacaaaugugacaaugccugcauaggaucaaucagaaauggaacuuaugaccacgauguauacagggaugaagcauuaaacaaccgguuccagaucaagggaguugagcugaagucaggguacaaagauuggauccuauggauuuccuuugccauaucauguuuuuugcuuuguguugcuuuguugggguucaucaugugggccugccaaaagggcaacauuaggugcaacauuugcauuuga

SEQ ID NO: 43619 - RNA, 1701 nt, Artificial Sequence
  derived and/or modified CDS sequence (wt) from hemagglutinin__InfluenzaA__AHL98284
augaaggcaauacuaguaguuaugcuauauacauuugcaaccgcaaaugcagacacauuauguauagguuaucaugcgaacaauucaacagacacuguagacacaguacuagaaaagaauguaacaguaacacacucuguuaaucuucuagaagacaagcauaacgggaaacuaugcaaacuaagagggguauccccauugcauuuggguaaauguaacauugcuggcuggauccugggaaauccagagugugaaucacucuccacagcaagcucaugguccuacauuguggaaacaucugguucagacaauggaacguguuacccaggagauuucaucgauuaugaggagcuaagagagcaauugagcucagugucaucauuugaaagguuugagauauuccccaaaacaaguucauggcccaaucaugacucgaacaaagguguaacggcagcauguccucaugcuggagcaaaaggcuucuacaaaaauuuaauauggcuaguuaaaaaaggaaauucauacccaaagcucagcauauccuacauuaaugauaaagggaaagaaguccucgugcuauggggcauucaccauccaucuacuacugcugaccaacaaagucucuaucagaaugcagauacauauguuuuuguggggacaucaagauacagcaagaaguucaagccggaaauagcaauaagacccaaagugagggaucaagaagggagaaugaacuauuacuggacacuaguagagccgggagacaaaauaacauucgaagcaacuggaaaucuagugguaccgagauaugcauuugcaauggaaagaaaugcuggaucugguauuaucauuucagauacaccaguucacgauugcaauacaacuugucagacacccaagggugcuauaaacaccagccucccauuucagaauauacauccgaucacaauuggaaaauguccaaaauauguaaaaagcacaaaauugagacuggccacaggauugaggaaugucccuucuauucaaucuagaggccuauuuggggccauugcuggcuucauugaagggggguggacagggaugguagauggaugguacgguuaucaccaucaaaaugagcaggggucaggauaugcagccgaccugaagagcacacagaaugccauugacaagauuacuaacaaaguaaauucuguuauugaaaagaugaauacacaguucacagcaguagguaaagaguucaaccaccuggaaaaaagaauagagaauuuaaauaaaaaaguugaugaugguuuccuggacauuuggacuuacaaugccgaacuguugguucuauuggaaaaugaaagaacuuuggacuaccacgauucaaaugugaagaacuuauaugaaaagguaagaaaccaguuaaaaaacaaugccaaggaaauuggaaauggcugcuuugaauuuuaccacaaaugcgauaacacgugcauggaaagugucaaaaaugggacuuaugauuacccaaaauacucagaggaagcaaaauuaaacagagaagaaauagaugggguaaagcuggaaucaacaaggauuuaccagauuuuggcgaucuauucaacugccgcuaguucauugguacugguagucucccugggggcaaucaguuuuuggaugugcucuaaugggucucuacaguguagaauauguauuuaa

SEQ ID NO: 43620 - RNA, 1701 nt, Artificial Sequence
  derived and/or modified CDS sequence (wt) from hemagglutinin__InfluenzaA__AHL98295
augaagacuaucauugcuuugagcuacauucuaugucugguuuucgcucaaaaaauuccuggaaaugacaauagcacggcaacgcugugccuugggcaccaugcaguaccaaacggaacgauagugaaaacaaucacgaaugaccgaauugaaguuacuaaugcuacugagcugguucagaauuccucaauaggugaaauaugcgacaguccucaucagauccuugauggagaaaacugcacacuaauagaugcucuauugggagacccucagugugauggcuuucaaaauaagaaaugggaccuuuuuguugaacgaagcaaagccuacagcaacuguuacccuuaugaugugccggauuaugccucccuuaggucacuaguugccucauccggcacacuggaguuuaacaaugaaagcuucaauugggcuggagucacucaaaacggaacaaguucugcuugcauaaggggaucuaauaguaguuucuuuaguagauuaaauugguugacccacuuaaacuucaaauacccagcauugaacgugacuaugccaaacaaugaacaauuugacaaauuguacauuugggggguucaccacccggguacggacaaggaccaaaucuuccuguaugcucaaucaucaggaagaaucacaguaucuaccaaaagaagccaacaagcuguaaucccgaauaucggaucuagacccagaauaaggaauaucccuagcagaauaagcaucuauuggacaauaguaaaaccgggagacauacuuuugauuaacagcacagggaaucuaauugcuccuagggguuacuucaaaauacgaagugggaaaagcucaauaaugagaucagaugcacccauuggcaaaugcaagucugaaugcaucacuccaaauggaagcauucccaaugacaaaccauuccaaaauguaaacaggaucacauacggggccugucccagauauguuaagcaaagcacucugaaauuggcaacaggaaugcgaaauguaccagagaaacaaacuagaggcauauuuggcgcaauagcggguuucauagaaaaugguugggagggaaugauggaugguugguacgguuucaggcaucaaaauucugagggaagaggacaagcagcagaucucaaaagcacucaagcagcaaucgaucaaaucaaugggaagcugaaucgauugaucgggaaaaccaacgagaaauuccaucagauugaaaaagaauucucagaaguagaagggagaauucaggaccuugagaaauauguugaggacacaaaaauagaucucuggucauacaacgcggagcuucuuguugcccuggagaaccaacauacaauugaucuaacugacucagaaaugaacaaacuguuugaaaaaacaaagaagcaacugagggaaaaugcugaggauaugggcaaugguuguuucaaaauauaccacaaaugugacaaugccugcauaggaucaaucagaaauggaacuuaugaccacgauguauacagggaugaagcauuaaacaaccgguuccagaucaagggaguugagcugaagucaggguacaaagauuggauccuauggauuuccuuugccauaucauguuuuuugcuuuguguugcuuuguugggguucaucaugugggccugccaaaagggcaacauuaggugcaacauuugcauuuga

SEQ ID NO: 43621 - RNA, 1701 nt, Artificial Sequence; identical to SEQ ID NO: 43555
  derived and/or modified CDS sequence (wt) from hemagglutinin__InfluenzaA__AHL98307

SEQ ID NO: 43622 - RNA, 1701 nt, Artificial Sequence; identical to SEQ ID NO: 42492
  derived and/or modified CDS sequence (wt) from hemagglutinin__InfluenzaA__AHL98319

SEQ ID NO: 43623 - RNA, 1701 nt, Artificial Sequence
  derived and/or modified CDS sequence (wt) from hemagglutinin__InfluenzaA__AHL98331
augaagacuaucauugcuuugagcuacauucuaugucugguuuucgcucaaaaacuuccuggaaaugacaauagcacggcaacgcugugccuugggcaccaugcaguaccaaacggaacgauagugaaaacaaucacgaaugaccgaauugaaguuacuaaugcuacugagcugguucagaauuccucaauaggugaaauaugcgacaguccucaucagauccuugauggagaaaacugcacacuaauagaugcucuauugggagacccucagugugauggcuuucaaaauaagaaaugggaccuuuuuguugaacgaagcaaagccuacagcaacuguuacccuuaugaugugccggauuaugccucccuuaggucacuaguugccucauccggcacacuggaguuuaacaaugaaagcuucaauugggcuggagucacucaaaacggaacaaguucugcuugcauaaggggaucuaauaguaguuucuuuaguagauuaaauugguugacccacuuaaacuucaaauacccagcauugaacgugacuaugccaaacaaugaacaauuugacaaauuguacauuugggggguucaccacccggguacggacaaggaccaaaucuuccuguaugcucaaucaucaggaagaaucacaguaucuaccaaaagaagccaacaagcuguaaucccgaauaucggaucuagacccagaauaaggaauaucccuagcagaauaagcaucuauuggacaauaguaaaaccgggagacauacuuuugauuaacagcacagggaaucuaauugcuccuagggguuacuucaaaauacgaagugggaaaagcucaauaaugagaucagaugcacccauuggcaaaugcaagucugaaugcaucacuccaaauggaagcauucccaaugacaaaccauuccaaaauguaaacaggaucacuuacggggccugucccagauauguuaagcaaagcacucugaaauuggcaacaggaaugcgaaauguaccagagaaacaaacuagaggcauauuuggcgcaauagcggguuucauagaaaaugguugggagggaaugauggaugguugguacgguuucaggcaucaaaauucugagggaagaggacaagcagcagaucucaaaagcacucaagcagcaaucgaucaaaucaaugggaagcugaaucgauugaucgggaaaaccaacgagaaauuccaucagauugaaaaagaauucucagaaguagaagggagaauucaggaccuugagaaauauguugaggacacaaaaauagaucucuggucauacaacgcggagcuucuuguugcccuggagaaccaacauacaauugaucuaacugacucagaaaugaacaaacuguuugaaaaaacaaagaagcaacugagggaaaaugcugaggauaugggcaaugguuguuucaaaauauaccacaaaugugacaaugccugcauaggaucaaucagaaauggaacuuaugaccacgauguauacagggaugaagcauuaaacaaccgguuccagaucaagggaguugagcugaagucaggguacaaagauuggauccuauggauuuccuuugccauaucauguuuuuugcuuuguguugcuuuguugggguucaucaugugggccugccaaaagggcaacauuaggugcaacauuugcauuuga

SEQ ID NO: 43624 - RNA, 1701 nt, Artificial Sequence; identical to SEQ ID NO: 42059
  derived and/or modified CDS sequence (wt) from hemagglutinin__InfluenzaA__AHL98343

SEQ ID NO: 43625 - RNA, 1701 nt, Artificial Sequence; identical to SEQ ID NO: 43555
  derived and/or modified CDS sequence (wt) from hemagglutinin__InfluenzaA__AHL98354

SEQ ID NO: 43626 - RNA, 1701 nt, Artificial Sequence; identical to SEQ ID NO: 41879
  derived and/or modified CDS sequence (wt) from hemagglutinin__InfluenzaA__AHL98366

SEQ ID NO: 43627 - RNA, 1701 nt, Artificial Sequence; identical to SEQ ID NO: 41879
  derived and/or modified CDS sequence (wt) from hemagglutinin__InfluenzaA__AHL98378

SEQ ID NO: 43628 - RNA, 1701 nt, Artificial Sequence
  derived and/or modified CDS sequence (wt) from hemagglutinin__InfluenzaA__AHL98390
augaagacuaucauugcuuugagcuacauucuaugucugguuuucgcucaaaaacuuccuggaaaugacaauagcacggcaacgcugugccuugggcaccaugcaguaccaaacggaacgauagugaaaacaaucacgaaugaccgaauugaaguuacuaaugcuacugagcugguucagaauuccucaauaggugaaauaugcgacaguccucaucagauccuugauggagaaaauugcacacuaauagaugcucuauugggagacccucagugugauggcuuucaaaauaagaaaugggaccuuuuuguugaacgaagcaaagccuacagcaacuguuacccuuaugaugugccggauuaugccucccuuaggucacuaguugccucauccggcacacuggaguuuaacaaugaaagcuucaauuggacuggagucacucaaaacggaacaaguucugcuugcauaaggagaucuaauaguaguuucuuuaguagauuaaauugguuaacccacuuaaacuucaaauacccagcauugaacgugacuaugccaaacaaugaacaauuugacaaauuguacauuuggggaguucaccacccggguacggacaaggaccaaaucuuccuguaugcucaaucaucaggaagaaucacaguaucuaccaaaaggagccaacaagcuguaaucccaaauaucggaucuagacccagaauaaggaauaucccuagcagaauaagcaucuauuggacaauaguaaaaccgggagacauacuuuugauuaacagcacaggaaaucuaauugcuccuagggguuacuucaaaauacgaagugggaaaagcucaauaaugagaucagaugcacccauuggcaaaugcaagucugaaugcaucacuccaaauggaagcauucccaaugacaaaccauuccaaaauguaaacaggaucacauacggggccugucccagauauguuaagcaaagcacucugaaauuggcaacaggaaugcgaaauguaccagagaaacaaacuagaggcauauuuggcgcaauagcggguuucauagaaaaugguugggagggaaugguggaugguugguacgguuucaggcaucaaaauucugagggaagaggacaagcagcagaucucaaaagcacucaagcagcaaucgaucaaaucaaugggaagcugaaucgauugaucgggaaaaccaacgagaaauuccaucagauugaaaaagaauucucagaaguagaagggagaauucaggaccuugagaaauauguugaggacacuaaaauagaucucuggucauacaacgcggagcuucuuguugcccuggagaaucaacauacaauugaucuaacugacucagaaaugaacaaacuguuugaaaaaacaaagaagcaacugagggaaaaugcugaggauaugggcaaugguuguuucaaaauauaccacaaaugugacaaugccugcauaggaucaaucagaaauggaacuuaugaccacaauguguacagggaugaagcauuaaacaaccgguuccagaucaagggaguugagcuuaagucaggguacaaagauuggauccuauggauuuccuuugccauaucauguuuuuugcuuuguguugcuuuguugggguucaucaugugggccugccaaaagggcaacauuaggugcaacauuugcauuuga

SEQ ID NO: 43629 - RNA, 1701 nt, Artificial Sequence
  derived and/or modified CDS sequence (wt) from hemagglutinin__InfluenzaA__AHL98402
augaagacuauuauugcuuugagcuacauucuaugucugguuuucgcucaaaaacuuccuggaaaugacaauagcacggcaacgcugugccuugggcaccaugcaguaccaaacggaacgauagugaaaacaaucacgaaugaccgaauugaaguuacuaaugcuacugagcugguucagaauuccucaauaggugaaauaugcgacaguccucaucagauucuugauggagaaaacugcacacuaauagaugcucuauugggagacccucagugugauggcuuucaaaacaagaaaugggaccuuuuuguugaacgaagcaaagccuacagcaacuguuacccuuaugaugugccggauuaugccucccuuaggucacuaguugccucauccggcacacuggaguuuaacaaugaaagcuucaauuggacuggagucacucaaaacggaacaaguucugcuugcauaaggagaucuaauaguaguuucuuuaguagauuaaauugguugacccacuuaaacuucaaauacccagcauugaacgugacuaugccaaacaaugaacaauuugacaaauuguacauuugggggguucaccacccagguacggacaaggaccaaaucuuccuguaugcucaaucaucaggaagaaucacaguaucuaccaaaagaagccaacaagcuguaaucccaaauaucggaucuagacccagaauaaggaauaucccuagcagaauaagcaucuauuggacaauaguaaaaccgggagacauacuuuugauuaacagcacagggaaucuaauugcuccuagggguuacuucaaaauacgaagugggaaaagcucaauaaugagaucagaugcacccauuggcaaaugcaagucugaaugcaucacuccaaauggaagcauucccaaugacaaaccauuccaaaauguaaacaggaucacauacggggccugucccagauauguuaagcaaagcacucugaaauuggcaacaggaaugcgaaauguaccagagaaacaaacuagaggcauauuuggcgcaauagcagguuucauagaaaaugguugggagggaaugguggaugguugguacgguuucaggcaucaaaauucugagggaagaggacaagcagcagaucucaaaagcacccaagcagcaaucgaucaaaucaaugggaagcugaaucgauugaucgggaaaaccaacgagaaauuccaucagauugaaaaagaauucucagaaguagaagggagaauucaggaccuugagaaauauguugaggacacuaaaauagaucucuggucauacaacgcggagcuucuuguugcccuggagaaucaacauacaauugaucuaacugacucagaaaugaacaaacuguuugaaaaaacaaagaagcaacugagggaaaaugcugaggauaugggcaaugguuguuucaaaauauaccacaaaugugacaaugccugcauagggucaauaagaaauggaacuuaugaccacaauguguacagggaugaagcauuaaacaaccgguuccagaucaaaggaguugagcugaagucaggguacaaagauuggauccuauggauuuccuuugccauaucauguuuuuugcuuuguguugcuuuguugggguucaucaugugggccugccaaaagggcaacauuaggugcaacauuugcauuuga

SEQ ID NO: 43630 - RNA, 1701 nt, Artificial Sequence
  derived and/or modified CDS sequence (wt) from hemagglutinin__InfluenzaA__AHL98414
augaagacuaucauugcuuugagcuacauucuaugucugguuuucgcucaaaaacuuccuggaaaugacaauagcacggcaacgcugugccuugggcaccaugcaguaccaaacggaacgauagugaaaacaaucacgaaugaccgaauugaaguuacuaaugcuacugagcugguucagaauuccucaauaggugaaauaugcgacaguccucaucagauccuugauggagaaaacugcacacuaauagaugcucuauugggagacccucagugugauggcuuucaaaauaagaaaugggaccuuuuuguugaacgaagcaaagccuacagcaacuguuacccuuaugaugugccggauuaugccucccuuaggucacuaguugccucauccggcacacuggaguuuaacaaugaaagcuucaauugggcuggagucacucaaaacggaacaaguucugcuugcauaaggggaucuaauaguaguuucuuuaguagauuaaacugguugacccacuuaaacuucaaauacccagcauugaacgugacuaugccaaacaaugaacaauuugacaaauuguacauuugggggguucaccacccggguacggacaaggaccaaaucuuccuguaugcucaaucaucaggaagaaucacaguaucuaccaaaagaagccaacaagcuguaaucccgaauaucggaucuagacccagaauaaggaauaucccuagcagaauaagcaucuauuggacaauaguaaaaccgggagacauacuuuugauuaacagcacagggaaucuaauugcuccuagggguuacuucaaaauacgaagugggaaaagcucaauaaugagaucagaugcacccauuggcaaaugcaagucugaaugcaucacuccaaauggaagcauucccaaugacaaaccauuccaaaauguaaacaggaucacauacggggccugucccagauauguuaagcaaagcacucugaaauuggcaacaggaaugcgaaauguaccagagaaacaaacuagaggcauauuuggcgcaauagcggguuucauagaaaaugguugggagggaaugauggaugguugguacgguuucaggcaucaaaauucugagggaagaggacaagcagcagaucucaaaagcacucaagcagcaaucgaucaaaucaaugggaagcugaaucgauugaucgggaaaaccaacgagaaauuccaucagauugaaaaagaauucucagaaguagaagggagaauucaggaccuugagaaauauguugaggacacaaaaauagaucucuggucauacaacgcggagcuucuuguugcccuggagaaccaacauacaauugaucuaacugacucagaaaugaacaaacuguuugaaaaaacaaagaagcaacugagggaaaaugcugaggauaugggcaaugguuguuucaaaauauaccacaaaugugacaaugccugcauaggaucaaucagaaauggaacuuaugaccacgauguauacagggaugaagcauuaaacaaccgguuccagaucaagggaguugagcugaagucaggguacaaagauuggauccuauggauuuccuuugccauaucauguuuuuugcuuuguguugcuuuguugggguucaucaugugggccugccaaaagggcaacauuaggugcaacauuugcauuuga

SEQ ID NO: 43631 - RNA, 1701 nt, Artificial Sequence
  derived and/or modified CDS sequence (wt) from hemagglutinin__InfluenzaA__AHL98426
augaagacuaucauugcuuugagcuacauucuaugucuaguuuucgcucaaaaacuuccuggaaaugacaauagcacggcaacgcugugccuugggcaccaugcaguaccaaacggaacgauagugaaaacaaucacgaaugaccgaauugaaguuacuaaugcuacugagcugguucagaauuccucaauaggugaaauaugcgacaguccucaucagauccuugauggagaaaacugcacacuaauagaugcucuauugggagacccucagugugauggcuuccaaaauaagaaaugggaccuuuuuguugaacgaagcaaagccuacagcaacuguuacccuuaugaugugccggauuaugccucccuuaggucacuaguugccucauccggcacacuggaguuuaacaaugaaagcuucaauuggacuggagucacucaaaacggaacaaguucugcuugcauaaggagaucuaauaauaguuucuuuaguagauuaaauugguugacccacucaaacuucaaauacccagcauugaacgugacuaugccaaacaaugaacaauuugacaaauuguacauuugggggguucaccacccggguacggacaaggaccaaaucuuccuguaugcucaaucaucaggaagaaucacaguaucuaccaaaagaagccaacaagcuguaaucccgaauaucggaucuagacccagaauaaggaauaucccuagcagaauaagcaucuauuggacaauaguaaaaccgggagacauacuuuugaucaacagcacagggaaucuaauugcuccuagggguuacuucaaaauacgaagugggaaaagcucaauaaugagaucagaugcacccauuggcaaaugcaagucugaaugcaucacuccaaauggaagcauucccaaugacaaaccauuccaaaauguaaaccggaucacauauggggccugucccagauauguuaagcaaagcacucugaaauuggcaacaggaaugcgaaauguaccagagaaacaaacuagaggcauauuuggugcaauagcggguuucauagaaaaugguugggagggaaugauggaugguugguacgguuucaggcaccaaaauucugagggaagaggacaagcagcagaucucaaaagcacucaagcagcaaucgaucaaaucaaugggaagcugaaucgauugaucgggaaaaccaacgagaaauuccaucagauugaaaaagaauuuucagaaguagaagggagaauucaggaccuugagaaauauguugaggacacuaaaauagaucucuggucauacaacgcggagcuucuuguugcccuggagaaccaacauacaauugaucuaacugacucagaaaugaacaaacuguuugaaaaaacaaagaagcaacugagggaaaaugcugaggauaugggcaaugguuguuucaaaauauaccacaaaugugacaaugccugcauaggaucaaucagaaauggaacuuaugaccacgauguauacagagaugaagcauuaaacaaccgguuccaggucaagggaguugagcugaagucaggguacaaagauuggauccuauggauuuccuuugccauaucauguuuuuugcuuuguguugcuuuguugggguucaucaugugggccugccaaaagggcaacauuaggugcaacauuugcauuuga

SEQ ID NO: 43632 - RNA, 1701 nt, Artificial Sequence
  derived and/or modified CDS sequence (wt) from hemagglutinin__InfluenzaA__AHL98438
augaaggcaauacuaguaguucugcuauauacauuugcaaccgcaaaugcagacacauuauguauagguuaucaugcgaacaauucaacagacacuguagacacaguacuagaaaagaauguaacaguaacacacucuguuaaccuucuagaagacaagcauaacgggaaacuaugcaaacuaagagggguagccccauugcauuuggguaaauguaacauugcuggcuggauccugggaaauccagagugugaaucacucuccacagcaaguucaugguccuacauuguggaaacaucuaguucagacaauggaacguguuacccaggagauuucaucaauuaugaggagcuaagagagcaauugagcucagugucaucauuugaaagguuugagauauuccccaagacaaguucauggcccaaucaugacucgaacaaagguguaacggcagcauguccucacgcuggagcaaaaagcuucuacaaaaauuuaauauggcuaguuaaaaaaggaaauucauacccaaagcucagccaauccuacauuaaugauaaagggaaagaaguccucgugcuguggggcauccaccauccaucuacuacugcugaccaacaaagucucuaucagaaugcagaugcauauguuuuuguggggacaucaagauacagcaaaaaguucaagccggaaauagcaauaagacccaaagugagagaucaagaagggagaaugaacuauuacuggacacuaguagagccgggagacaaaauaacauucgaagcaacuggaaaucuagugguaccgagauaugcauucacaauggaaagaaaugcuggaucugguauuaucauuucagauacaccaguccacgauugcaauacaacuugucagacacccgagggugcuauaaacaccagccucccauuucagaauauacauccgaucacaauuggaaaauguccgaaguauguaaaaagcacaaaauugagacuggccacaggauugaggaaugucccgucuauucaaucuagaggccuauucggggccauugccggcuucauugaagggggguggacagggaugguagauggaugguacgguuaucaccaucaaaaugagcaggggucaggauaugcagccgaccugaagagcacacaaaaugccauugacaagauuacuaacaaaguaaauucuguuauugaaaagaugaauacacaguucacagcaguggguaaagaguucaaccaucuggaaaaaagaauagagaauuuaaauaaaaaaguugaugaugguuuccuggacauuuggacuuacaaugccgaacucuugguucuauuggaaaaugaaagaacuuuggacuaccacgauucaaaugugaagaacuuguaugaaaagguaagaaaccaguuaaaaaacaaugccaaggaaauuggaaacggcugcuuugaauuuuaccacaaaugcgauaacacgugcauggaaagugucaaaaaugggacuuaugacuacccaaaauacucagaggaagcaaaauuaaacagagaaaaaauagaugggguaaagcuggaaucaacaaggauuuaccagauuuuggcgaucuauucaacugucgccaguucauugguacugguagucucccugggggcaaucagcuucuggaugugcucuaaugggucucuacaauguagaauauguauuuaa

SEQ ID NO: 43633 - RNA, 1701 nt, Artificial Sequence; identical to SEQ ID NO: 43632
  derived and/or modified CDS sequence (wt) from hemagglutinin__InfluenzaA__AHL98449

SEQ ID NO: 43634 - RNA, 1701 nt, Artificial Sequence
  derived and/or modified CDS sequence (wt) from hemagglutinin__InfluenzaA__AHL98471
augaaggcaauacuaguaguucugcuauacacauuugcaaccgcaaaugcagacacauuauguauagguuaucaugcgaacaauucaacagacacuguagacacaguacuagaaaagaauguaacaguaacacacucuguuaaccuucuagaagacaaacauaacgggaaacuaugcaaacuaagagggguagccccauugcauuuggguaaauguaacauugcuggcuggauccugggaaauccagagugugaaucacucuccacagcaaguucaugguccuacauuguggaaacaucuaguucagacaauggaacguguuacccaggagauuucaucaauuaugaggagcuaagagagcaauugagcucaguaucaucauuugaaaaguuugagauauuccccaagacaaguucauggcccaaucaugacucgaacaaagguguaacggcagcauguccucaugcuggagcaaaaagcuucuacaaaaauuuaauauggcuaguuaaaaaaggaaauucauacccaaagcucagagaauccuacauuaaugauaaagggaaagaaguccucgugcuguggggcauucaccauccaucuacuacugcugaccaacaaagucucuaucagaaugcagaugcauauguuuuuguggggacaucaagauacagcaagaaguucaagccggaaauagcaauaagacccaaagugagggaucaagaagggagaaugaacuauuacuggacacuaauagagccgggagacaaaauaacauucgaagcaacuggaaaucuagugguaccgagauaugcauucgcaauggaaagaaaugcuggaucugguauuaucauuucagauacaccaguccacgauugcaauacaacuugucagacacccgagggugcuauaaacaccagccucccauuucagaauauacauccgaucacaauuggaaaauguccaaaguauguaaaaagcacaaaauugagacuggccacaggauugaggaaugucccgucuauucaaucuagaggccuauucggggccauugccggcuucauugaagggggguggacagggaugguagauggaugguacgguuaucaccaucaaaaugagcaggggucaggauaugcagccgaccugaagagcacacaaaaugccauugacaagauuacuaacaaaguaaauucuguuauugaaaagaugaauacacaguucacagcaguggguaaagaguucaaccaccuggaaaaaagaauagagaauuuaaauaaaaaaguugaugaugguuuccuggacauuuggacuuacaaugccgaacuguugguucuauuggaaaaugaaagaacuuuggacuaccacgauucaaaugugaagaacuuguaugaaaagguaagaaaccaguuaaaaaacaaugccaaggaaauuggaaacggcugcuuugaauuuuaccacaaaugcgauaacacgugcauggaaagugucaaaaaugggacuuaugacuacccaaaauacucagaggaagcaaaauuaaacagagaaaaaauagaugggguaaagcuggaaucaacaaggauuuaccagauuuuggcgaucuauucaacugucgccaguucauugguacugguagucucccugggggcaaucaguuucuggaugugcucuaaugggucucuacaguguagaauauguauuuaa

SEQ ID NO: 43635 - RNA, 1701 nt, Artificial Sequence
  derived and/or modified CDS sequence (wt) from hemagglutinin__InfluenzaA__AHL98482
augaagacuaucauugcuuugagcuacauucuaugucugguuuucgcucaaaaacuuccuggaaaugacaauagcacggcaacgcugugccuugggcaccaugcaguaccaaacggaacgauagugaaaacaaucacgaaugaccgaauugaaguuacuaaugcuacugagcugguucagaauuccucaauaggugaaauaugcgacaguccucaucagauccuugauggagaaaacugcacacuaauagaugcucuauugggagacccucagugugauggcuuucaaaauaagaaaugggaccuuuuuguugaacgaagcaaagccuacagcaacuguuacccuuaugaugugccggauuaugccucccuuaggucacuaguugccucauccggcacacuggaguuuaacaaugaaagcuucaauugggcuggagucacucaaaacggaacaaguucugcuugcauaaggggaucuaauaguaguuucuuuaguagauuaaauugguugacccacuuaaacuucaaauacccagcauugaacgugacuaugccaaacaaugaacaauuugacaaauuguacauuugggggguucaccacccagguacagacaaggaccaaaucuuccuguaugcucaaucaucaggaagaaucacaguaucuaccaaaagaagccaacaagcuguaaucccgaauaucggaucuagacccagaauaaggaauaucccuagcagaauaagcaucuauuggacaauaguaaaaccgggagacauacuuuugauuaacagcacagggaaucuaauugcuccuagggguuacuucaaaauacgaagugggaaaagcucaauaaugagaucagaugcacccauuggcaaaugcaagucugaaugcaucacuccaaauggaagcauucccaaugacaaaccauuccaaaauguaaacaggaucacauacggggccugucccagauauguuaagcaaagcacucugaaauuggcaacaggaaugcgaaauguaccagagaaacaaacuagaggcauauuuggcgcaauagcggguuucauagaaaaugguugggagggaaugguggaugguugguacgguuucaggcaucaaaauucugagggaagaggacaagcagcagaucucaaaagcacucaagcagcaaucgaucaaaucaaugggaagcugaaucgauugaucgggaaaaccaacgagaaauuccaucagauugaaaaagaauucucagaaguagaagggagaauucaggaccuugagaaauauguugaggacacaaaaauagaucucuggucauacaacgcggagcuucuuguugcccuggagaaccaacauacaauugaucuaacugacucagaaaugaacaagcuguuugaaaaaacaaagaagcaacugagggaaaaugcugaggauaugggcaaugguuguuucaaaauauaccacaaaugugacaaugccugcauaggaucaaucagaaauggaacuuaugaccacgauguauacagggaugaagcauuaaacaaccgguuccagaucaagggaguugagcugaagucaggguacaaagauuggauccuauggauuuccuuugccauaucauguuuuuugcuuuguguugcuuuguugggguucaucaugugggccugccaaaagggcaacauuaggugcaacauuugcauuuga

SEQ ID NO: 43636 - RNA, 1701 nt, Artificial Sequence; identical to SEQ ID NO: 42100
  derived and/or modified CDS sequence (wt) from hemagglutinin__InfluenzaA__AHL98494

SEQ ID NO: 43637 - RNA, 1701 nt, Artificial Sequence
  derived and/or modified CDS sequence (wt) from hemagglutinin__InfluenzaA__AHL98506
augaagacuaucauugcuuugagcuacauucuaugucugguuuucgcucaaaaacuuccuggaaaugacaauagcacggcaacgcugugccuuggacaccaugcaguaccaaacggaacgauagugaaaacaaucacgaaugaccgaauugaaguuacuaaugcuacugagcugguucagaauuccucaauaggugaaauaugcgacaguccucaucagauccuugauggagaaaauugcacacuaauagaugcucuauugggagacccucagugugauggcuuucaaaauaagaaaugggaccuuuuuguugaacgaagcaaagccuacagcaacuguuacccuuaugaugugccggauuaugccucccuuaggucacuaguugccucauccggcacacuggaguuuaacaaugaaagcuucaauugggcuggagucacucaaaacggaacaaguucugcuugcauaaggggaucuaauaguaguuucuuuaguagauuaaauugguugacccacuuaaacuucaaauacccagcauugaacgugacuaugccaaacaaugaacaauuugacaaauuguacauuugggggguucaccacccggguacggacaaggaccaaaucuuccuguaugcucaaucaucaggaagaaucacaguaucuaccaaaagaagccaacaagcuguaaucccgaauaucggaucuagacccagaauaaggaauaucccuagcagaauaagcaucuauuggacaauaguaaaaccgggagacauacuuuugauuaacagcacagggaaucuaauugcuccuagggguuacuucaaaauacgaagugggaaaagcucaauaaugagaucagaugcacccauuggcaaaugcaagucugaaugcaucacuccaaauggaagcauucccaaugacaaaccauuccaaaauguaaacaggaucacauacggggccugucccagauauguuaagcaaagcacucugaaauuggcaacaggaaugcgaaauguaccagagaaacaaacuagaggcauauuuggcgcaauagcggguuucauagaaaaugguugggagggaaugguggaugguugguacgguuucaggcaucaaaauucugagggaagaggacaagcagcagaucucaaaagcacucaagcagcaaucgaucaaaucaaugggaagcugaaucgauugaucgggaaaaccaacgagaaauuccaucagauugaaaaagaauucucagaaguagaagggagaauucaggaccuugagaaauauguugaggacacaaaaauagaucucuggucauacaacgcggagcuucuuguugcccuggagaaccaacauacaauugaucuaacugacucagaaaugaacaaacuguuugaaaaaacaaagaagcaacugagggaaaaugcugaggauaugggcaaugguuguuucaaaauauaucacaaaugugacaaugccugcauaggaucaaucagaaauggaacuuaugaccacgauguauacagggaugaagcauuaaacaaccgguuccagaucaagggaguugagcugaagucaggguacaaagauuggauccuauggauuuccuuugccauaucauguuuuuugcuuuguguugcuuuguugggguucaucaugugggccugccaaaagggcaacauuaggugcaacauuugcauuuga

SEQ ID NO: 43638 - RNA, 1701 nt, Artificial Sequence; identical to SEQ ID NO: 42489
  derived and/or modified CDS sequence (wt) from hemagglutinin__InfluenzaA__AHL98518

SEQ ID NO: 43639 - RNA, 1701 nt, Artificial Sequence; identical to SEQ ID NO: 42100
  derived and/or modified CDS sequence (wt) from hemagglutinin__InfluenzaA__AHL98530

SEQ ID NO: 43640 - RNA, 1701 nt, Artificial Sequence; identical to SEQ ID NO: 43637
  derived and/or modified CDS sequence (wt) from hemagglutinin__InfluenzaA__AHL98542

SEQ ID NO: 43641 - RNA, 1701 nt, Artificial Sequence; identical to SEQ ID NO: 43637
  derived and/or modified CDS sequence (wt) from hemagglutinin__InfluenzaA__AHL98554

SEQ ID NO: 43642 - RNA, 1701 nt, Artificial Sequence; identical to SEQ ID NO: 42492
  derived and/or modified CDS sequence (wt) from hemagglutinin__InfluenzaA__AHL98566

SEQ ID NO: 43643 - RNA, 1701 nt, Artificial Sequence; identical to SEQ ID NO: 41880
  derived and/or modified CDS sequence (wt) from hemagglutinin__InfluenzaA__AHL98578

SEQ ID NO: 43644 - RNA, 1701 nt, Artificial Sequence; identical to SEQ ID NO: 42505
  derived and/or modified CDS sequence (wt) from hemagglutinin__InfluenzaA__AHL98590

SEQ ID NO: 43645 - RNA, 1701 nt, Artificial Sequence; identical to SEQ ID NO: 42496
  derived and/or modified CDS sequence (wt) from hemagglutinin__InfluenzaA__AHL98602

SEQ ID NO: 43646 - RNA, 1701 nt, Artificial Sequence; identical to SEQ ID NO: 42100
  derived and/or modified CDS sequence (wt) from hemagglutinin__InfluenzaA__AHL98614

SEQ ID NO: 43647 - RNA, 1701 nt, Artificial Sequence
  derived and/or modified CDS sequence (wt) from hemagglutinin__InfluenzaA__AHL98626
augaagaccaucauugcuuugagcuacauucuaugucuaguuuuugcucaagaacuuccuggaaaugacgacagcacggcaacgcugugccuugggcaccaugcagugccaaacggaacgauagugaaaacaaucacgaaugaccaaauugaaguuacuaaugcuacugaacugguucagaguuccucaacaggugaaauaugcaacaguccucaucagauccuugauggagaaaacugcacacuaauagaugcucuauugggagacccucagugugauggcuuccaaaacaagagaugggaccuuuuuguugaacgaagcaaagcccacagcaacuguuacccuuaugaugugccggauuaugccucccuuaggucacuaguugccucauccggcacacuggaguuuaacaaugaaagcuucaauuggacuggagucacucaaaacggaacaagcucugcuugcauaaggagaucuaauaauaguuucuuuaguagauugaauugguugacccacuuaaacuucaaauacccagcauugaacgugacuaugccaaacaaugaacaauuugacaaauuguacauuugggggguucaccacccggguacggacaaggaccaaaucuuccuguaugcucaagcaucaggaagaaucacaguaucuaccaaaagaagccaacaagcuguaauuccgaauaucggaucuagacccagaguaaggaauaucccuagcagaguaagcaucuauuggacaauaguaaaaccgggagacauacuuuugauuaacagcacagggaaucuaauugcuccuagggguuacuucaaaauacgaagugggaaaagcucaauaaugagaucagaugcacccauuggcaaaugcaauucugcaugcaucacuccaaauggaagcauucccaaugacaaaccauuccaaaauguaaacaggaucacauacggggccugucccagauaugucaagcaaaacacucugaaauuggcaacaggaaugagaaauguaccagagaaacaaacuagaggcauauuuggcgcaauagcggguuucauagaaaaugguugggagggaaugguggaugguugguacgguuucaggcaucaaaauucugagggaaggggacaagcagcagaucucaaaagcacucaagcagcaaucgaucaaaucaaugggaagcugaauagauugaucgggaaaaccaacgagaaauuccaucagauugaaaaagaauucucagaagucgaagggagaauucaggaccuugagaaauauguugaggacacuaaaauagaucucuggucauacaacgcggagcuucuuguugcccuggagaaccaacacacaauugaucuaacugacucagaaaugaacaaacuguuugaaaaaacaaagaagcaacugagggaaaaugcugaggauaugggcaaugguuguuucaaaauauaccacaaaugugacaaugccugcauaggaucaaucagaaauggaacuuaugaucacgauguguacagagaugaagcauuaaacaaccgauuccagaucaagggaguugagcugaagucaggguacaaagauuggauccuauggauuuccuuugccauaucauguuuuuugcuuuguguugcuuuguugggguucaucaugugggccugccaaaaaggcaacauuaggugcaacauuugcauuuga

SEQ ID NO: 43648 - RNA, 1701 nt, Artificial Sequence
  derived and/or modified CDS sequence (wt) from hemagglutinin__InfluenzaA__AHL98638
augaagacuaucauugcuuugagcuacauucuaugucugguuuucgcucaaaaacuuccuggaaaugacaauagcacggcaacgcugugccuugggcaccaugcaguaccaaacggaacgauagugaaaacaaucacgaaugaccgaauugaaguuacuaaugccacugagcugguucagaauuccucaauaggugaaauaugcgacaguccucaucagauccuugauggagaaaacugcacacuaauagaugcucuauugggagacccucagugugauggcuuucaaaauaagaaaugggaccuuuuuguugaacgaagcaaagccuacagcaacuguuacccuuaugaugugccggauuaugccucccuuaggucacuaguugccucauccggcacacuggaguuuaacaaugaaagcuucaauuggacuggagucacucaaaacggaacaaguucugcuugcauaaggagaucuaauaguaguuucuuuaguagauuaaauugguugacccacuuaaacuucaaauacccagcauugaacgugacuaugccaaacaaugaacaauuugacaaauuguacauuugggggguucaccacccggguacggacaaggaccaaaucuuccuguaugcucaaucaucaggaagaaucacaguaucuaccaaaagaagccaacaagcuguaaucccaaauaucggaucuagacccagaauaaggaauaucccuagcagaauaagcaucuauuggacaauaguaaaaccgggagacauacuuuugauuaacagcacagggaaucuaauugcuccuagggguuacuucaaaauacgaagugggaaaagcucaauaaugagaucagaugcacccauuggcaaaugcaagucugaaugcaucacuccaaauggaagcauucccaaugacaaaccauuccaaaauguaaacaggauuacauacggggccugucccagauauguuaagcaaagcacccugaaauuggcaacaggaaugcgaaauguaccagagaaacaaacuagaggcauauuuggugcaauagcggguuucauagaaaaugguugggagggaaugguggaugguugguacgguuucaggcaucaaaauucugagggaagaggacaagcagcagaucucaaaagcacucaagcagcaaucgaucaaaucaaugggaagcugaaucgauugaucgggaaaaccaacgagaaauuccaucagauugaaaaagaauucucagaaguagaagggagaauucaggaccuugagaaauauguugaggacacuaaaauagaucucuggucauacaacgcggagcuucuuguugcccuggagaaccaacauacaauugaucuaacugacucagaaaugaacaaacuguuugaaaaaacaaagaagcaacugagggaaaaugcugaggauaugggcaaugguuguuucaaaauauaccacaaaugugacaaugccugcauaggaucaaucagaaauggaacuuaugaccacaauguguacagggaugaagcauuaaacaaccgguuccagaucaagggaguugagcugaagucaggguacaaagauuggauccuauggauuuccuuugccauaucauguuuuuugcuuuguguugcuuuguugggguucaucaugugggcaugccaaaagggcaacauuaggugcaacauuugcauuuga

SEQ ID NO: 43649 - RNA, 1701 nt, Artificial Sequence; identical to SEQ ID NO: 42492
  derived and/or modified CDS sequence (wt) from hemagglutinin__InfluenzaA__AHL98650

SEQ ID NO: 43650 - RNA, 1701 nt, Artificial Sequence
  derived and/or modified CDS sequence (wt) from hemagglutinin__InfluenzaA__AHL98662
augaagacuaucauugcuuugagcuacauucuaugucuaguuuucgcucaaaaacuuccuggaaaugacaauagcacggcaacgcugugccuugggcaccaugcaguaccaaacggaacgauggugaaaacaaucacgaaugaccgaauugaaguuacuaaugcuacugagcugguucagaauuccucaauaggugaaauaugcgacaguccucaucagauccuugauggagaaaacugcacacuaauagaugcucuauugggagacccucagugugauggcuuccaaaauaagaaaugggaccuuuuuguugaacgaagcaaagccuacagcaacuguuacccuuaugaugugccggauuaugccucccuuaggucacuaguugccucauccggcacacuggaguuuaacaaugaaagcuucaauuggacuggagucacucaaaacggaacaaguucugcuugcauaaggagaucuaauaauaguuucuuuaguagauuaaauugguugacccacucaaacuucaaauacccagcauugaacgugacuaugccaaacaaugaacaauuugacaaauuguacauuugggggguucaccacccggguacggacaaggaccaaaucuuccuguaugcucaaucaucaggaagaaucacaguaucuaccaaaagaagccaacaagcuguaaucccgaauaucggaucuagacccagaauaaggaauaucccuagcagaauaagcaucuauuggacaauaguaaaaccgggagacauacuuuugauuaacagcacagggaaucuaauugcuccuagggguuacuucaaaauacgaagugggaaaagcucaauaaugagaucagaugcacccauuggcaaaugcaagucugaaugcaucacuccaaauggaagcauucccaaugacaaaccauuccaaaauguaaacaggaucacauacggggccugucccagauauguuaagcaaagcacucugaaauuggcaacaggaaugcgaaauguaccagagaaacaaacuagaggcauauuuggugcaauagcggguuucauagaaaaugguugggagggaaugauggaugguugguacgguuucaggcaccaaaauucugagggaagaggacaagcagcagaucucaaaagcacucaagcagcaaucgaucaaaucaaugggaagcugaaucgauugaucgggaaaaccaacgagaaauuccaucagauugaaaaagaauuuucagaaguagaagggagaauucaggaccuugagaaauauguugaggacacuaaaauagaucucuggucauacaacgcggagcuucuuguugcccuggagaaccaacauacaauugaucuaacugacucagaaaugaacaaacuguuugaaaaaacaaagaagcaacugagggaaaaugcugaggauaugggcaaugguuguuucaaaauauaccacaaaugugacaaugccugcauaggaucaaucagaaauggaacuuaugaccacgauguauacagagaugaagcauuaaacaaccgguuccagaucaagggaguugagcugaagucaggguacaaagauuggauccuauggauuuccuuugccauaucauguuuuuugcuuuguguugcuuuguugggguucaucaugugggccugccaaaagggcaacauuaggugcaacauuugcauuuga

SEQ ID NO: 43651 - RNA, 1701 nt, Artificial Sequence; identical to SEQ ID NO: 43518
  derived and/or modified CDS sequence (wt) from hemagglutinin__InfluenzaA__AHL98674

SEQ ID NO: 43652 - RNA, 1701 nt, Artificial Sequence; identical to SEQ ID NO: 41879
  derived and/or modified CDS sequence (wt) from hemagglutinin__InfluenzaA__AHL98686

SEQ ID NO: 43653 - RNA, 1701 nt, Artificial Sequence; identical to SEQ ID NO: 42533
  derived and/or modified CDS sequence (wt) from hemagglutinin__InfluenzaA__AHL98699

SEQ ID NO: 43654 - RNA, 1701 nt, Artificial Sequence
  derived and/or modified CDS sequence (wt) from hemagglutinin__InfluenzaA__AHL98711
augaaggcaauacuaguaguucugcuauacacauuugcaaccgcaaaugcagacacauuauguauagguuaucaugcgaacaauucaacagacacuguagacacaguacuagaaaagaauguaacaguaacacacucuguuaaccuucuagaagacaagcauaacgggaaacuaugcaaacuaagagggguagccccauugcauuuggguaaauguaacauugcuggcuggauccugggaaauccagagugugaaucacucuccacagcaaguucaugguccuacauuguggaaacaucuaguucagacaauggaacguguuacccaggagauuucaucaauuaugaggagcuaagagagcaauugagcucagugucaucauuugaaagguuugagauauuccccaagacaaguucauggcccaaucaugacucgaacaaaggugugacggcagcauguccucaugcuggagcaaaaagcuucuacaaaaauuuaauauggcuaguuaaaaaaggaaauucauacccaaagcucagcaaauccuacauuaaugauaaagggaaagaaguccucgugcuguggggcauucaccauccaucuacuacugcugaccaacaaagucucuaucagaaugcagaugcauauguuuuuguggggacaucaagauacagcaagaaguucaagccggaaauagcaauaagacccaaagugagggaucaagaagggagaaugaacuauuacuggacacuaauagagccgggagacaaaauaacauucgaagcaacuggaaaucuagugguaccgagauaugcauucgcaauggaaagaaaugcuggaucugguauuaucauuucagauacaccaguccacgauugcaauacaacuugucagacacccgagggugcuauaaacaccagccucccauuucagaauauacauccgaucacaauuggaaaauguccaaaguauguaaaaagcacaaaauugagacuggccacaggauugaggaaugucccgucuauucaaucuagaggccuauucggggccauugccggcuucauugaagggggguggacagggaugguagauggaugguacgguuaucaccaucaaaaugagcaggggucaggauaugcagccgaccugaagagcacacaaaaugccauugacaagauuacuaacaaaguaaauucuguuauugaaaagaugaauacacaguucacagcaguggguaaagaguucaaccaccuggagaaaagaauagagaauuuaaauaaaaaaguugaugaugguuuccuggacauuuggacuuacaaugccgaacuguugguucuauuggaaaaugaaagaacuuuggacuaccacgauucaaaugugaagaacuuguaugaaaagguaagaaaccaguuaaaaaacaaugccaaggaaauuggaaauggcugcuuugaauuuuaccacaaaugcgauaacacgugcauggaaagugucaaaaaugggacuuaugacuacccaaaauacucagaggaagcaaaauuaaacagagaaaaaauagaugggguaaagcuggaaucaacaaggauuuaccagauuuuggcgaucuauucaacugucgccaguucauugguacugguagucucccugggggcaaucaguuucuggaugugcucuaaugggucucuacaguguagaauauguauuuaa

SEQ ID NO: 43655 - RNA, 1701 nt, Artificial Sequence; identical to SEQ ID NO: 42479
  derived and/or modified CDS sequence (wt) from hemagglutinin__InfluenzaA__AHL98722

SEQ ID NO: 43656 - RNA, 1701 nt, Artificial Sequence
  derived and/or modified CDS sequence (wt) from hemagglutinin__InfluenzaA__AHL98734
augaagacuaucauugcuuugagcuacauucuaugucugguuuucgcucaaaaacuuccuggaaaugacaauagcacggcaacgcugugccuugggcaccaugcaguaccaaacggaacgauagugaaaacaaucacgaaugaccgaauugaaguuacuaaugcuacugagcugguucagaauuccucaauaggugaaauaugcgacaguccucaucagauccuugauggagaaaacugcacacuaauagaugcucuauugggagacccucagugugauggcuuucaaaauaagaaaugggaccuuuuuguugaacgaagcaaagccuacagcaacuguuacccuuaugaugugccggauuaugccucccuuaggucacuaguugccucauccggcacacuggaguuuaacaaugaaagcuucaauugggcuggagucacucaaaacggaacaaguucugcuugcauaaggggaucuaauaguaguuucuuuaguagauuaaauugguugacccacuuaaacuucaaauacccagcauugaacgugacuaugccaaacaaugaacaauuugacaaauuguacauuuggggaguucaccacccggguacggacaaggaccaaaucuuccuguaugcucaaucaucaggaagaaucacaguaucuaccaaaagaagccaacaagcuguaaucccgaauaucggaucuagacccagaauaaggaauaucccuagcagaauaagcaucuauuggacaauaguaaaaccgggagacauacuuuugauuaacagcacagggaaucuaauugcuccuagggguuacuucaaaauacgaagugggaaaagcucaauaaugagaucagaugcacccauuggcaaaugcaagucugaaugcaucacuccaaauggaagcauucccaaugacaaaccauuccaaaauguaaacaggaucacauacggggccugucccagauauguuaagcaaagcacucugaaauuggcaacaggaaugcgaaauguaccagagaaacaaacuagaggcauauuuggcgcaauagcggguuucauagaaaaugguugggagggaaugauggaugguugguacgguuucaggcaucaaaauucugagggaagaggacaagcagcagaucucaaaagcacucaagcagcaaucgaucaaaucaaugggaagcugaaucgauugaucgggaaaaccaacgagaaauuccaucagauugaaaaagaauucucagaaguagaagggagaauucaggaccuugagaaauauguugaggacacaaaaauagaucucuggucauacaacgcggagcuucuuguugcccuggagaaccaacauacaauugaucuaacugacucagaaaugaacaaacuguuugaaaaaacaaagaagcaacugagggaaaaugcugaggauaugggcaaugguuguuucaaaauauaccacaaaugugacaaugccugcauaggaucaaucagaaauggaacuuaugaccacgauguauacagggaugaagcauuaaacaaccgguuccagaucaagggaguugagcugaagucaggguacaaagauuggauccuauggauuuccuuugccauaucauguuuuuugcuuuguguugcuuuguugggguucaucaugugggccugccaaaagggcaacauuaggugcaacauuugcauuuga

SEQ ID NO: 43657 - RNA, 1701 nt, Artificial Sequence; identical to SEQ ID NO: 42055
  derived and/or modified CDS sequence (wt) from hemagglutinin__InfluenzaA__AHL98746

SEQ ID NO: 43658 - RNA, 1701 nt, Artificial Sequence; identical to SEQ ID NO: 43656
  derived and/or modified CDS sequence (wt) from hemagglutinin__InfluenzaA__AHL98758

SEQ ID NO: 43659 - RNA, 1701 nt, Artificial Sequence; identical to SEQ ID NO: 42048
  derived and/or modified CDS sequence (wt) from hemagglutinin__InfluenzaA__AHL98770

SEQ ID NO: 43660 - RNA, 1701 nt, Artificial Sequence; identical to SEQ ID NO: 42510
  derived and/or modified CDS sequence (wt) from hemagglutinin__InfluenzaA__AHL98782

SEQ ID NO: 43661 - RNA, 1701 nt, Artificial Sequence
  derived and/or modified CDS sequence (wt) from hemagglutinin__InfluenzaA__AHL98794
augaagacuaucauugcuuugagcuacauucuaugucugguuuucgcucaaaaacuuccuggaaaugacaauagcacggcaacgcugugccuugggcaccaugcaguaccaaacggaacgauagugaaaacaaucacaaaugaccgaauugaaguuacuaaugcuacugagcugguucagaauuccucaauaggugaaauaugcgacaguccucaucagauccuugauggagaaaacugcacacuaauagaugcucuauugggagacccucagugugauggcuuucaaaauaagaaaugggaccuuuuuguugaacgaagcaaagccuacagcaacuguuacccuuaugaugugccggauuaugccucccuuaggucacuaguugccucuuccggcacacuggaguuuaacaaugaaagcuucaauugggcuggagucacucaaaacggaacaaguucugcuugcauaaggggaucuaauaguaguuucuuuaguagauuaaauugguugacccacuuaaacuucaaauacccagcauugaacgugacuaugccaaacaaugaacaauuugacaaauuguacauuugggggguucaccacccggguacggacaaggaccaaaucuuccuguaugcucaaucaucaggaagaaucacaguaucuaccaaaagaagccaacaagcuguaaucccgaauaucggaucuagacccagaauaaggaauaucccuagcagaauaagcaucuauuggacaauaguaaaaccgggagacauacuuuugauuaacagcacagggaaucuaauugcuccuagggguuacuucaaaauacgaagugggaaaagcucaauaaugagaucagaugcacccauuggcaaaugcaggucugaaugcaucacuccaaauggaagcauucccaaugacaaaccauuccaaaauguaaacaggaucacauacggggccugucccagauauguuaagcaaagcacucugaaauuggcaacaggaaugcgaaauguaccagagaaacaaacuagaggcauauuuggcgcaauagcggguuucauagaaaaugguugggagggaaugguggaugguugguacgguuucaggcaucaaaauucugagggaagaggacaagcagcagaucucaaaagcacucaagcagcaaucgaucaaaucaaugggaagcugaaucgauugaucgggaaaaccaacgagaaauuccaucagauugaaaaagaauucucagaaguagaagggagaauucaggaccucgagaaauauguugaggacacaaaaauagaucucuggucauacaacgcggagcuucuuguugcccuggagaaccaacauacaauugaucuaacugacucagaaaugaacaaacuguuugaaaaaacaaagaagcaacugagggaaaaugcugaggauaugggcaaugguuguuucaaaauauaccacaaaugugacaaugccugcauaggaucaaucagaaauggaacuuaugaccacgauguauacagggaugaagcauuaaacaaccgguuccagaucaagggaguugagcugaagucaggguacaaagauuggauccuauggauuuccuuugccauaucauguuuuuugcuuuguguugcuuuguugggguucaucaugugggccugccaaaagggcaacauuaggugcaacauuugcauuuga

SEQ ID NO: 43662 - RNA, 1701 nt, Artificial Sequence
  derived and/or modified CDS sequence (wt) from hemagglutinin__InfluenzaA__AHL98806
augaagacuaucauugcuuugagcuacauucuaugucugguuuucgcucaaaaacuuccuggaaaugacaauagcacggcaacgcugugccuugggcaccaugcaguaccaaacggaacgauagugaaaacaaucacgaaugaccgaauugaagucacuaaugcuacugagcugguucagaauuccucaauaggugaaauaugcgacaguccucaucagauccuugauggagaaaacugcacacuaauagaugcucuauugggagacccucagugugauggcuuucaaaauaagaaaugggaccuuuuuguugaacgaagcaaagccuacagcaacuguuacccuuaugaugugccggauuaugccucccuuaggucacuaguugccucauccggcacacuggaguuuaacaaugaaagcuucaauugggcuggggucacucaaaacggaacaaguucugcuugcauaaggggaucuaauaguaguuucuuuaguagauuaaauugguugacccacuuaaacuucaaauacccagcauugaacgugacuaugccaaacaaugaacaauuugacaaauuguacauuugggggguucaccacccggguacggacaaggaccaaaucuuccuguaugcucaaucaucaggaagaaucacaguaucuaccaaaagaagccaacaagcuguaaucccgaauaucggaucuagacccagaauaaggaauaucccuagcagaauaagcaucuauuggacaauaguaaaaccgggagacauacuuuugauuaacagcacagggaaucuaauugcuccuagggguuacuucaaaauacgaagugggaaaagcucaauaaugagaucagaugcacccauuggcaaaugcaagucugaaugcaucacuccaaauggaagcauucccaaugacaaaccauuccaaaauguaaacaggaucacauacggggccugucccagauauguuaagcaaagcacucugaaauuggcaacaggaaugcgaaauguaccagagaaacaaaccagaggcauauuuggcgcaauagcggguuucauagaaaaugguugggagggaaugguggaugguugguacgguuucaggcaucaaaauucugagggaagaggacaagcagcagaucucaaaagcacucaaacagcaaucgaucaaaucaaugggaagcugaaucgauugaucgggaaaaccaacgagaaauuccaucagauugaaaaagaauucucagaaguagaagggagaauucaggaccuugagaaauauguugaggacacaaaaauagaucucuggucauacaacgcggagcuucuuguugcccuggagaaccaacauacaauugaucuaacugacucagaaaugaacaaacuguuugaaaaaacaaagaagcaacugagggaaaaugcugaggauaugggcaaugguuguuucaaaauauaccacaaaugugacaaugccugcauaggaucaaucagaaauggaacuuaugaccacgauguauacagggaugaagcauuaaacaaccgguuccagaucaagggaguugagcugaagucaggguacaaagauuggauccuauggauuuccuuugccauaucauguuuuuugcuuuguguugcuuuguugggguucaucaugugggccugccaaaagggcaacauuaggugcaacauuugcauuuga

SEQ ID NO: 43663 - RNA, 1701 nt, Artificial Sequence; identical to SEQ ID NO: 41879
  derived and/or modified CDS sequence (wt) from hemagglutinin__InfluenzaA__AHL98818

SEQ ID NO: 43664 - RNA, 1701 nt, Artificial Sequence; identical to SEQ ID NO: 42492
  derived and/or modified CDS sequence (wt) from hemagglutinin__InfluenzaA__AHL98830

SEQ ID NO: 43665 - RNA, 1701 nt, Artificial Sequence; identical to SEQ ID NO: 41879
  derived and/or modified CDS sequence (wt) from hemagglutinin__InfluenzaA__AHL98842

SEQ ID NO: 43666 - RNA, 1701 nt, Artificial Sequence
  derived and/or modified CDS sequence (wt) from hemagglutinin__InfluenzaA__AHL98854
augaagacuaucauugcuuugagcuacauucuaugucugguuuucgcucaaaaacuuccuggaaaugacaauagcacggcaacgcugugccuugggcaccaugcaguaccaaacggaacgauagugaaaacaaucacgaaugaccgaauugaaguuacuaaugcuacugagcugguucagaauuccucaauaggugaaauaugcgacaguccucaucagauccuugauggagaaaauugcacacuaauagaugcucuauugggagacccucagugugauggcuuucaaaauaagaaaugggaccuuuuuguugaacgaagcaaagccuacagcaacuguuacccuuaugaugugccggauuaugccucccuuaggucacuaguugccucauccggcacacuggaguuuaacaaugaaagcuucaauuggacuggagucacucaaaacggaacaaguucugcuugcauaaggagaucuaauaguaguuucuuuaguagauuaaauugguugacccacuuaaacuucaaauacccagcauugaacgugacuaugccaaacaaugaacaauuugacaaauuguacauuuggggaguucaccacccggguacggacaaggaccaaaucuuccuguaugcucaaucaucaggaagaaucacaguaucuaccaaaagaagccaacaagcuguaaucccaaauaucggaucuagacccagaauaaggaauaucccuagcagaauaagcaucuauuggacaauaguaaaaccgggagacauacuuuugauuaacagcacagggaaucuaauugcuccuagggguuacuucaaaauacgaagugggaaaagcucaauaaugagaucagaugcacccauuggcaaaugcaagucugaaugcaucacuccaaauggaagcauucccaaugacaaaccauuccaaaauguaaacaggaucacauacggggccugucccagauauguuaagcaaagcacucugaaauuggcaacaggaaugcgaaauguaccagagaaacaaacuagaggcauauuuggcgcaauagcggguuucauagaaaaugguugggagggaaugguggaugguugguacgguuucaggcaucaaaauucugagggaagaggacaagcagcagaucucaaaagcacucaagcagcaaucgaucaaaucaaugggaagcugaaucgauugaucgggaaaaccaacgagaaauuccaucagauugaaaaagaauucucagaaguagaaggaagaauucaggaccuugagaaauauguugaggacacuaaaauagaucucuggucauacaacgcggagcuucuuguugcccuggagaaucaacauacaauugaucuaacugacucagaaaugaacaaacuguuugaaaaaacaaagaagcaacugagggaaaaugcugaggauaugggcaaugguuguuucaaaauauaccacaaaugugacaaugccugcauaggaucaaucagaaauggaacuuaugaccacaauguguacagggaugaagcauuaaacaaccgguuccagaucaagggaguugagcuuaagucaggguacaaagauuggauccuauggauuuccuuugccauaucauguuuuuugcuuuguguugcuuuguugggguucaucaugugggccugccaaaagggcaacauuaggugcaacauuugcauuuga

SEQ ID NO: 43667 - RNA, 1701 nt, Artificial Sequence
  derived and/or modified CDS sequence (wt) from hemagglutinin__InfluenzaA__AHL98878
augaagacuaucauugcuuugagcuacauucuaugucugguuuucacucaaaaacuuccuggaaaugacaauagcacggcaacgcugugccuugggcaccaugcaguaccaaacggaacgauagugaaaacaaucacgaaugaccgaauugaaguuacuaaugcuacugagcugguucagaauuccucaauaggugaaauaugcgacaguccucaucagauucuugauggagaaaacugcacacuaauagaugcucuauugggagacccucagugugauggcuuucaaaauaagaaaugggaccuuuuuguugaacgaagcaaagccuacagcaacuguuacccuuaugaugugccggauuaugccucccuuaggucacuaguugccucauccggcacacuggaguuuaacaaugaaagcuucaauuggacuggagucacucaaaacggaacaaguucugcuugcauaaggagaucuaauaguaguuucuuuaguagauuaaauugguugacccacuuaaacuucaaauacccagcauugaacgugacuaugccaaacaaugaacaauuugacaaauuguacauuugggggguucaccacccagguacggacaaggaccaaaucuuccuguaugcucaaucaucaggaagaaucacaguaucuaccaaaagaagccaacaagcuguaaucccaaauaucggaucuagacccagaauaaggaauaucccuagcagaauaagcaucuauuggacaauaguaaaaccgggagacauacuuuugauuaacagcacagggaaucuaauugcuccuagggguuacuucaaaauacgaagugggaaaagcucaauaaugagaucagaugcacccauuggcaaaugcaagucugaaugcaucacuccaaauggaagcauucccaaugacaaaccauuccaaaauguaaacaggaucacauacggggccugucccagauauguuaagcaaagcacucugaaauuggcaacaggaaugcgaaauguaccagagaaacaaacuagaggcauauuuggcgcaauagcagguuucauagaaaaugguugggagggaaugguggaugguugguacgguuucaggcaucaaaauucugagggaagaggacaagcagcagaucucaaaagcacccaagcagcaaucgaucaaaucaaugggaagcugaaucgauugaucgggaaaaccaacgagaaauuccaucagauugaaaaagaauucucagaaguagaagggagaauucaggaccuugagaaauauguugaggacacuaaaauagaucucuggucauacaacgcggagcuucuuguugcccuggagaaccaacauacaauugaucuaacugacucagaaaugaacaaacuguuugaaaaaacaaagaagcaacugagggaaaaugcugaggauaugggcaaugguuguuucaaaauauaucacaaaugugacaaugccugcauaggaucaauaagaaauggaacuuaugaccacaauguguacagggaugaagcauuaaacaaccgguuccagaucaagggaguugagcugaagucaggguacaaagauuggauccuauggauuuccuuugccauaucauguuuuuugcuuuguguugcuuuguugggguucaucaugugggccugccaaaagggcaacauuaggugcaacauuugcauuuga

SEQ ID NO: 43668 - RNA, 1701 nt, Artificial Sequence
  derived and/or modified CDS sequence (wt) from hemagglutinin__InfluenzaA__AHL98890
augaagacuaucauugcuuugagcuacauucuaugucugguuuucgcucaaaaacuuccuggaaaugacaauagcacggcaacgcugugccuugggcaccaugcaguaccaaacggaacgauagugaaaacaaucacgaaugaccgaauugaaguuacuaaugcuacugagcugguucagaauuccucaauaggugaaauaugcgacaguccucaucagauccuugauggagaaaacugcacacuaauagaugcucuauugggagacccucagugugauggcuuucaaaauaagaaaugggaccuuuuuguugaacgaagcaaagccuacagcaacuguuacccuuaugaugugccggauuaugccucccuuaggucacuaguugccucauccggcacacuggaguuuaacaaugaaagcuucaauugggcuggagucacucaaaacggaacaaguucugcuugcauaaggggaucuaauaguaguuucuuuaguagauuaaauugguugacccacuuaaacuucaaauacccagcauugaacgugacuaugccaaacaaugagcaauuugacaaauuguacauuugggggguucaccacccggguacggacaaggaccaaaucuuccuguaugcucaaucaucaggaagaaucacaguaucuaccaaaagaagccaacaagcuguaaucccgaauaucggaucuagacccagaauaaggaauaucccuagcagaauaagcaucuauuggacaauaguaaaaccgggagacauacuuuugauuaacagcacagggaaucuaauugcuccuagggguuacuucaaaauacgaagugggaaaagcucaauaaugagaucagaugcacccauuggcaaaugcaaaucugaauguaucacuccaaauggaagcauucccaaugacaaaccauuccaaaauguaaacaggaucacauacggggccugucccagauauguuaagcaaagcacucugaaauuggcaacaggaaugcgaaauguaccagagaaacaaacuagaggcauauuuggcgcaauagcggguuucauagaaaaugguugggagggaaugguggaugguugguacgguuucaggcaucaaaauucugagggaagaggacaagcagcagaucucaaaagcacucaagcagcaaucgaucaaaucaaugggaagcugaaucgauugaucgggaaaaccaacgagaaauuccaucagauugaaaaagaauucucagaaguagaagggagaauucaggaccuugagaaauauguugaggacacaaaaauagaucucuggucauacaacgcggagcuucuuguugcccuggagaaccaacauacaauugaucuaacugacucagaaaugaacaaacuguuugaaaaaacaaagaagcaacugagggaaaaugcugaggauaugggcaaugguuguuucaaaauauaccacaaaugugacaaugccugcauaggaucaaucagaaauggaacuuaugaccacgauguauacagggaugaagcauuaaacaaccgguuccagaucaagggaguugagcugaagucaggguacaaagauuggauccuauggauuuccuuugccauaucaugucuuuugcuuuguguugcuuuguugggguucaucaugugggccugccaaaagggcaacauuaggugcaacauuugcauuuga

SEQ ID NO: 43669 - RNA, 1701 nt, Artificial Sequence
  derived and/or modified CDS sequence (wt) from hemagglutinin__InfluenzaA__AHL98902
augaagacuaucauugcuuugagcuacauucuaugucugguuuucgcucaaaaacuuccuggaaaugacaauagcacggcaacgcugugccuugggcaccaugcaguaccaaacggaacgguagugaaaacaaucacgaaugaccgaauugaaguuacuaaugcuacugagcugguucagaauuccucaauaggugaaauaugcgacaguccucaucagauccuugauggagaaaacugcacacuaauagaugcucuauugggagacccucagugugauggcuuucaaaauaagaaaugggaccuuuuuguugaacgaagcaaagccuacagcaacuguuacccuuaugaugugccggauuaugccucccuuaggucacuaguugccucauccggcacacuggaguuuaacaaugaaagcuucaauugggcuggagucacucaaaacggaacaaguucugcuugcauaaggggaucuaauaguaguuucuuuaguagauuaaauugguugacccacuuaaacuucaaauacccagcauugaacgugacuaugccaaacaaugagcaauuugacaaauuguacauuugggggguucaccacccggguacggacaaggaccaaaucuuccuguaugcucaaucaucaggaagaaucacaguaucuaccaaaagaagccaacaagcuguaaucccgaauaucggaucuagacccagaauaaggaauaucccuagcagaauaagcaucuauuggacaauaguaaaaccgggagacauacuuuugauuaacagcacagggaaucuaauugcuccuagggguuacuucaaaauacgaagugggaaaagcucaauaaugagaucagaugcacccauuggcaaaugcaaaucugaauguaucacuccaaauggaagcauucccaaugacaaaccauuccaaaauguaaacaggaucacauacggggccugucccagauauguuaagcaaagcacucugaaauuggcaacaggaaugcgaaauguaccagagaaacaaacuagaggcauauuuggcgcaauagcggguuucauagaaaaugguugggagggaaugguggaugguugguacgguuucaggcaucaaaauucugagggaagaggacaagcagcagaucucaaaagcacucaagcagcaaucgaucaaaucaaugggaagcugaaucgauugaucgggaaaaccaacgagaaauuccaucagauugaaaaagaauucucagaaguagaagggagaauucaggaccuugagaaauauguugaggacacaaaaauagaucucuggucauacaacgcggagcuucuuguugcccuggagaaccaacauacaauugaucuaacugacucagaaaugaacaaacuguuugaaaaaacaaagaagcaacugagggaaaaugcugaggauaugggcaaugguuguuucaaaauauaccacaaaugugacaaugccugcauaggaucaaucagaaauggaacuuaugaccacgauguauacagggaugaagcauuaaacaaccgguuccagaucaagggaguugagcugaagucaggguacaaagauuggauccuauggauuuccuuugccauaucauguuuuuugcuuuguguugcuuuguugggguucaucaugugggccugccaaaagggcaacauuaggugcaacauuugcauuuga

SEQ ID NO: 43670 - RNA, 1701 nt, Artificial Sequence; identical to SEQ ID NO: 42492
  derived and/or modified CDS sequence (wt) from hemagglutinin__InfluenzaA__AHL98913

SEQ ID NO: 43671 - RNA, 1701 nt, Artificial Sequence; identical to SEQ ID NO: 41879
  derived and/or modified CDS sequence (wt) from hemagglutinin__InfluenzaA__AHL98925

SEQ ID NO: 43672 - RNA, 1701 nt, Artificial Sequence; identical to SEQ ID NO: 43371
  derived and/or modified CDS sequence (wt) from hemagglutinin__InfluenzaA__AHL98937

SEQ ID NO: 43673 - RNA, 1701 nt, Artificial Sequence; identical to SEQ ID NO: 42059
  derived and/or modified CDS sequence (wt) from hemagglutinin__InfluenzaA__AHL98961

SEQ ID NO: 43674 - RNA, 1701 nt, Artificial Sequence
  derived and/or modified CDS sequence (wt) from hemagglutinin__InfluenzaA__AHL98973
augaagacuaucauugcuuugagcuacauucuaugucugguuuucgcucaaaaacuuccuggaaaugacaauagcacggcaacgcugugccuugggcaccaugcaguaccaaacggaacgauagugaaaacaaucacgaaugaccgaauugaaguuacuaaugcuacugaacugguucagaauuccucaauaggugaaauaugcgacaguccucaucagauccuugauggagaaaacugcacacuaauagaugcucuauugggagacccucagugugauggcuuccaaaauaagaaaugggaccuuuuuguugaacgaagcaaagccuacagcaacuguuacccuuaugaugugccggauuaugccucccuuaggucacuaguugccucauccggcacacuggaguuuaacaaugaaagcuucaauuggacuggagucacucaaaacggaacaaguucugcuugcauaaggagaucuaauaguaguuucuuuaguagauuaaauugguugacccacuuaaacuucaaauacccagcauugaacgugacuaugccaaacaaugaacaauuugacaaauuguacauuugggggguucaccacccggguacggacaaggaccaaaucuuccuguaugcucaaucaucaggaagaaucacaguaucuaccaaaagaagccaacaagcuguagucccuaauaucggaucuagacccagaauaaggaauaucccuaguagaauaagcaucuauuggacaauaguaaaaccgggagacauacuuuugauuaacagcacagggaaucuaauugcuccuagggguuacuucaaaauacgaagugggaaaagcucaauaaugagaucagaugcacccauuggcaaaugcaagucugaaugcaucacuccaaauggaagcauucccaaugacaaaccauuccaaaauguaaacaggaucacauacggggccugucccagauauguuaagcaaagcacucugaaauuggcaacagggaugcgaaauguaccagagaaacaaacuagaggcauauuuggcgcaauagcggguuucauagaaaaugguugggagggaaugguggaugguugguacgguuucaggcaucaaaauucugagggaagaggacaagcagcagaucucaaaagcacucaagcagcaaucgaucaaaucaaugggaagcugaaucgauugaucgggaaaaccaacgagaaauuccaucagauugaaaaagaauucucagaaguagaagggagaauucaggaccuugagaaauauguugaggacacuaaaauagaucucuggucauacaacgcggagcuucuuguugcccuggagaaccaacauacaauugaucuaacugacucagaaaugaacaaacuguuugaaaaaacaaagaagcaacugagagaaaaugcugaggauaugggcaaugguuguuucaaaauauaccacaaaugugacaaugccugcauaggaucaaucagaaauggaacuuaugaccacgauguauacagagaugaagcauuaaacaaccgguuccagaucaagggaguugagcugaagucaggguacaaagauuggauccuauggauuuccuuugccaugucauguuuuuugcuuuguguugcuuuguugggguucaucaugugggccugccaaaagggcaacauuaggugcaacauuugcauuuga

SEQ ID NO: 43675 - RNA, 1701 nt, Artificial Sequence
  derived and/or modified CDS sequence (wt) from hemagglutinin__InfluenzaA__AHL98985
augaagacuaucauugcuuugagcuacauucuaugucugguuuucgcucaaaaacuuccuggaaaugacaauagcacggcaacgcugugccuugggcaccaugcaguaccaaacggaacgauagugaaaacaaucacgaaugaccgaauugaaguuacuaaugcuacugaacugguucagaauuccucaauaggugaaauaugcgacaguccucaucagauccuugauggagaaaacugcacaauaauagaugcucuauugggagacccucagugugauggcuuucaaaauaagaaaugggaccuuuuuguugaacgaagcaaagccuacagcaacuguuacccuuaugaugugccggauuaugccucccuuaggucacuaguugccucauccggcacacuggaguuuaacaaugaaagcuucaauugggcuggagucacucaaaacggaacaaguucugcuugcauaaggggaucuaauaguaguuucuuuaguagauuaaauugguugacccacuuaaacuucaaauacccagcauugaacgugacuaugccaaacaaugagcaauuugacaaauuguacauuugggggguucaccacccggguacggacaaggaccaaaucuuccuguaugcucaaucaucaggaagaaucacaguaucuaccaaaagaagccaacaagcuguaaucccgaauaucggaucuagacccagaauaaggaauaucccuagcagaauaagcaucuauuggacaauaguaaaaccgggagacauacuuuugauuaacagcacagggaaucuaauugcuccuagggguuacuucaaaauacgaagugggaaaagcucaauaaugagaucagaugcacccauuggcaaaugcaaaucugaauguaucacuccaaauggaagcauucccaaugacaaaccauuccaaaauguaaacaggaucacauacggggccugucccagauauguuaagcaaagcacucugaaauuggcaacaggaaugcgaaauguaccagagaaacaaacuagaggcauauuuggcgcaauagcggguuucauagaaaaugguugggagggaaugguggaugguugguacgguuucaggcaucaaaauucugagggaagaggacaagcagcagaucucaaaagcacucaagcagcaaucgaucaaaucaaugggaagcugaaucgauugaucgggaaaaccaacgagaaauuccaucagauugaaaaagaauucucagaaguagaagggagaauucaggaccuugagaaauauguugaggacacaaaaauagaucucuggucauacaacgcggagcuucuuguugcccuggagaaccaacauacaauugaucuaacugacucagaaaugaacaaacuguuugaaaaaacaaagaagcaacugagggaaaaugcugaggauaugggcaaugguugcuucaaaauauaccacaaaugugacaaugccugcauaggaucaaucagaaauggaacuuaugaccacgauguauacagggaugaagcauuaaacaaccgguuccagaucaagggaguugagcugaagucaggguacaaagauuggauccuauggauuuccuuugccauaucauguuuuuugcuuuguguugcuuuguugggguucaucaugugggccugccaaaagggcaacauuaggugcaacauuugcauuuga

SEQ ID NO: 43676 - RNA, 1701 nt, Artificial Sequence
  derived and/or modified CDS sequence (wt) from hemagglutinin__InfluenzaA__AHL98997
augaagacuaucauugcuuugagcuacauucuaugucugguuuucgcucaaaaacuuccuggaaaugacaauagcacggcaacacugugccuugggcaccaugcaguaccaaacggaacaauagugaaaacaaucacgaaugaccgaauugaaguuacuaaugcuacugagcugguucagaauuccucaauaggugaaauaugcgacaguccucaucagauccuugauggagaaaacugcacacuaauagaugcucuauugggagacccucagugugauggcuuucaaaauaagaaaugggaccuuuuuguugaacgaagcaaagccuacagcaacuguuacccuuaugaugugccggauuaugccucccuuaggucacuaguugccucauccggcacacuggaguuuaacaaugaaagcuucaauugggcuggagucacucaaaacggaacaaguucugcuugcauaaggggaucuaauaguaguuucuuuaguagauuaaauugguugacccacuuaaacuucaaauacccagcauugaacgugacuaugccaaacaaugaacaauuugacaaauuguacauuugggggguucaccacccggguacggacaaggaccaaaucuuccuguaugcucaaucaucaggaagaaucacaguaucuaccaaaagaagccaacaagcuguaaucccgaauaucggaucuagacccagaauaaggaauaucccuagcagaauaagcaucuauuggacaauagugaaaccgggagacauacuuuugauuaacagcacagggaaucuaauugcuccuagggguuacuucaaaauacgaagugggaaaagcucaauaaugagaucagaugcacccauuggcaaaugcaagucugaaugcaucacuccaaauggaagcauucccaaugacaaaccauuccaaaauguaaacaggaucacauacggggccugucccagauauguuaagcaaagcacacugaaauuggcaacaggaaugcgaaauguaccagagaaacaaacuagaggaauauuuggcgcaauagcggguuucauagaaaaugguugggagggaaugguggaugguugguacgguuucaggcaucaaaauucugagggaagaggacaagcagcagaucucaaaagcacucaagcagcaaucgaucaaaucaaugggaagcugaaucgauugaucgggaaaaccaacgagaaauuccaucagauugaaaaagaauucucagaaguagaagggagaauucaggaccuugagaaauauguugaggacacaaaaauagaucucuggucauacaacgcggagcuucuuguugcccuggagaaccaacauacaauugaucuaacugacucagaaaugaacaaacuguuugaaaaaacaaagaagcaacugagggaaaaugcugaggauaugggcaaugguuguuucaaaauauaccacaaaugugacaaugccugcauaggaucaaucagaaauggaacuuaugaccacgauguauacagggaugaagcauuaaacaaccgguuccagaucaagggaguugagcugaagucaggguacaaagauuggauccuauggauuuccuuugccauaucauguuuuuugcuuuguguugcuuuguugggguucaucaugugggccugccaaaagggcaacauuaggugcaacauuugcauuuga

SEQ ID NO: 43677 - RNA, 1701 nt, Artificial Sequence
  derived and/or modified CDS sequence (wt) from hemagglutinin__InfluenzaA__AHL99009
augaagacuaucauugcuuugagcuacauucuaugucugguuuucgcucaaaaacuuccuggaaaugacaauagcacggcaacgcugugccuugggcaccaugcaguaccaaacggaacgauagugaaaacaaucacgaaugaccgaauugaaguuacuaaugcuacugagcugguucagaauuccucaauaggugaaauaugcgacaguccucaucagauucuugauggagaaaacugcacacuaauagaugcucuauugggagacccucagugugauggcuuucaaaauaagaaaugggaccuuuuuguugaacgaagcaaagccuacagcaacuguuacccuuaugaugugccggauuaugccucccuuaggucacuaguugccucauccggcacacuggaguuuaacaaugaaagcuucaauuggacuggagucacucaaaacggaacaaguucugcuugcauaaggagaucuaauaguaguuucuuuaguagauuaaauugguugacccacuuaaacuucaaauauccagcauugaacgugacuaugccaaacaaugaacaauuugacaaauuguacauuugggggguucaccacccagguacggacaaggaccaaaucuuccuguaugcucaaucaucaggaagaaucacaguaucuaccaaaagaagccaacaagcuguaaucccaaauaucggaucuagacccagaauaaggaauaucccuagcagaauaagcaucuauuggacaauaguaaaaccgggagacauacuuuugauuaacagcacagggaaucuaauugcuccuagggguuacuucaaaauacgaagugggaaaagcucaauaaugagaucagaugcacccauuggcaaaugcaagucugaaugcaucacuccaaauggaagcauucccaaugacaaaccauuccaaaauguaaacaggaucacauacggggccugucccagauauguuaagcaaagcacucugaaauuggcaacaggaaugcgaaauguaccagagaaacaaacuagaggcauauuuggcgcaauagcagguuucauagaaaaugguugggagggaaugguggaugguugguacgguuucaggcaucaaaauucugagggaagaggacaagcagcagaucucaaaagcacccaagcagcaaucgaucaaaucaaugggaagcugaaucgauugaucgggaaaaccaacgagaaauuccaucagauugaaaaagaauucucagaaguagaagggagaauucaggaccuugagaaauauguugaggacacuaaaauagaucucuggucauacaacgcggagcuucuuguugcccuggagaaccaacauacaauugaucuaacugacucagaaaugaacaaacuguuugaaaaaacaaagaagcaacugagggaaaaugcugaggauaugggcaaugguuguuucaaaauauaccacaaaugugacaaugccugcauaggaucaauaagaaauggaacuuaugaucacaauguguacagggaugaagcauuaaacaaccgguuccagaucaagggaguugagcugaagucaggguacaaagauuggauccuauggauuuccuuugccauaucauguuuuuugcuuuguguugcuuuguugggguucaucaugugggccugccaaaagggcaacauuaggugcaacauuugcauuuga

SEQ ID NO: 43678 - RNA, 1701 nt, Artificial Sequence; identical to SEQ ID NO: 41880
  derived and/or modified CDS sequence (wt) from hemagglutinin__InfluenzaA__AHL99021

SEQ ID NO: 43679 - RNA, 1701 nt, Artificial Sequence
  derived and/or modified CDS sequence (wt) from hemagglutinin__InfluenzaA__AHL99045
augaagacuaucauugcuuugagcuacauucuaugccugguuuucgcucaaaaaauuccuggaaaugacaauagcacggcaacgcugugccuugggcaccaugcaguaccaaacggaacgauagugaaaacaaucacgaaugaccgaauugaaguuacuaaugcuacugagcugguucagaauuccucaauaggugaaauaugcgacaguccucaucagauccuugauggagaaaacuguacacuaauagaugcucuauugggagacccucagugugauggcuuucaaaauaagaaaugggaccuuuuuguugaacgaagcaaagccuacagcaacuguuacccuuaugaugugccggauuaugccucccuuaggucacuaguugccucauccggcacacuggaguuuaacaaugaaagcuucaauuggacuggagucacucaaaacggaacaaguucugcuugcauaaggagaucuaauaguaguuucuuuaguagauuaaauugguugacccacuuaaacuucaaauacccagcauugaacgugacuaugccaaacaaugaacaauuugacaaauuguacauuugggggguucaccacccggguacggacaaggaccaaaucuuccuguaugcucaaucaucaggaagaaucacaguaucuaccaaaagaagccaacaagcuguaaucccgaauaucggaucuagacccagaauaaggaauaucccuagcagaauaagcaucuauuggacaauaguaaaaccaggagacauacuuuugauuaacagcacagggaaucuaauugcuccuagggguuacuucaaaauaagaagugggaaaagcucaauaaugagaucagaugcacccauuggcaaaugcaagucugaaugcaucacuccaaauggaagcauuccaaaugacaaaccauuccaaaauguaaacaggaucacauacgggcccugucccagauauguuaagcaaagcacucugaaauuggcaacaggaaugcgaaauguaccagagaaacaaacuagaggcauauuuggcgcaauagcggguuucauagaaaaugguugggagggaaugguggaugguugguacgguuucaggcaucaaaauucugagggaagaggacaagcagcagaucucaaaagcacucaagcagcaaucgaucaaaucaaugggaagcugaaucgauugaucgggaaaaccaacgagaaauuccaucagauugaaaaagaauucucagaaguagaagggagaauucaggaccuugagaaauauguugaggacacuaaaauagaucucuggucauacaacgcggagcuucuuguugcccuggagaaccaacauacaauugaucuaacugacucagaaaugaacaaacuguuugaaaaaacaaagaagcaacuaagggaaaaugcugaggauaugggcaaugguuguuucaaaauauaccacaaaugugacaaugccugcauaggaucaaucagaaauggaacuuaugaccacgauguauacagggaugaagcauuaaacaaccgguuccagaucaagggaguugagcugaagucaggguacaaagauuggauccuauggauuuccuuugccauaucauguuuuuugcuuuguguugcuuuguugggguucaucaugugggccugccaaaagggcaacauuaggugcaacauuugcauuuga

SEQ ID NO: 43680 - RNA, 1701 nt, Artificial Sequence
  derived and/or modified CDS sequence (wt) from hemagglutinin__InfluenzaA__AHL99057
augaagacuaucauugcuuugagcuacauucuaugucugguuuucgcucaaaaacuuccuggaaaugacaauagcacggcaacgcugugccuugggcaccaugcaguaccaaacggaacgauagugaaaacaaucacgaaugaccgaauugaaguuacuaaugcuacugagcugguucagaauuccucaauaggugaaauaugcgacaguccucaucagaucauugauggagaaaacugcacacuaauagaugcucuauugggagacccucagugugauggcuuucaaaauaagaaaugggaccuuuuuguugaacgaagcaaagccuacagcaacuguuacccuuaugaugugccggauuaugccucccuuaggucacuaguugccucauccggcacacuggaguuuaacaaugaaagcuucaauugggcuggagucacucaaaacggaacaaguucugcuugcauaaggggaucuaauaguaguuucuuuaguagauuaaauugguugacccacuuaaacuucaaauacccagcauugaacgugacuaugccaaacaaugaacaauuugacaaauuguacauuugggggguucaccacccggguacggacaaggaccaaaucuuccuguaugcucaaucaucaggaagaaucacaguaucuaccaaaagaagccaacaagcuguaaucccgaauaucggaucuagacccagaauaaggaauaucccuagcagaauaagcaucuauuggacaauaguaaaaccgggagacauacuuuugauuaacagcacagggaaucuaauugcuccuagggguuacuucaaaauacgaagugggaaaagcucaauaaugagaucagaugcacccauuggcaaaugcaagucugaaugcaucacuccaaauggaagcauucccaaugacaaaccauuccaaaauguaaacaggaucacauacggggccugucccagauauguuaagcaaagcacucugaaauuggcaacaggaaugcgaaauguaccagagaaacaaaccagaggcauauuuggcgcaauagcggguuucauagaaaaugguugggagggaaugguggaugguugguacgguuucaggcaucaaaauucugagggaagaggacaagcagcagaucucaaaagcacucaagcagcaaucgaucaaaucaaugggaagcugaaucgauugaucgggaaaaccaacgagaaauuccaucagauugaaaaagaauucucagaaguagaagggagaauucaggaccuugagaaauauguugaggacacaaaaauagaucucuggucauacaacgcggagcuucuuguugcccuggagaaccaacauacaauugaucuaacugacucagaaaugaacaaacuguuugaaaaaacaaagaagcaacugagggaaaaugcugaggauaugggcaaugguuguuucaaaauauaccacaaaugugacaaugccugcauaggaucaaucagaaauggaacuuaugaccacgauguauacagggaugaagcauuaaacaaccgguuccagaucaagggaguugagcugaagucaggguacaaagauuggauccuauggauuuccuuugccauaucauguuuuuugcuuuguguugcuuuguugggguucaucaugugggccugccaaaagggcaacauuaggugcaacauuugcauuuga

SEQ ID NO: 43681 - RNA, 1701 nt, Artificial Sequence
  derived and/or modified CDS sequence (wt) from hemagglutinin__InfluenzaA__AHL99069
augaagaccaucauugcuuugagcuacauucuaugucugguuuucgcucaaaaacuuccuggaaaugacaauagcacggcaacgcugugccuugggcaccaugcaguaccaaacggaacgauagugaaaacaaucacgaaugaccgaauugaaguuacuaaugcuacugagcugguucagaauuccucaauaggugaaauaugcgacaguccucaucagauccuugauggagaaaacugcacacuaauagaugcucuauugggagacccucagugugauggcuuucaaaauaagaaaugggaccuuuuuguugaacgaagcaaagccuacagcaacuguuacccuuaugaugugccggauuaugccucccuuaggucacuaguugccucauccggcacacuggaguuuaacaaugaaagcuucaauugggcuggagucacucaaaacggaacaaguucugcuugcauaaggggaucuaauaguaguuucuuuaguagauuaaauugguugacccacuuaaacuucaaauacccagcauugaacgugacuaugccaaacaaugaacaauuugacaaauuguacauuugggggguucaccacccggguacggacaaggaccaaaucuuccuguaugcucaaucaucaggaagaaucacaguaucuaccaaaagaagccaacaagcuguaaucccgaauaucggaucuagacccagaauaaggaauaucccuagcagaauaagcaucuauuggacaauaguaaaaccgggggacacacuuuugauuaacagcacagggaaucuaauugcuccuagggguuacuucaaaauacgaagugggaaaagcucaauaaugagaucagaugcacccauuggcaaaugcaagucugaaugcaucacuccaaauggaagcauucccaaugacaaaccauuccaaaauguaaacaggaucacauacggggccugucccagauauguuaagcaaagcacucugaaauuggcaacaggaaugcgaaauguaccagagaaacaaacuagaggcauauuuggcgcaauagcggguuucauagaaaaugguugggagggaaugguggaugguugguacgguuucaggcaucaaaauucugagggaagaggacaagcagcagaucucaaaagcacucaagcagcaaucgaucaaaucaaugggaagcugaaucgauuaaucgggaaaaccaacgagaaauuccaucagauugaaaaagaauucucagaaguagaagggagaauucaggaccuugagaaauauguugaggacacaaaaauagaucucuggucauacaacgcggagcuucuuguugcccuggagaaccaacauacaauugaucuaacugacucagaaaugaacaaacuguuugaaaaaacaaagaagcaacugagggaaaaugcugaggauaugggcaaugguuguuucaaaauauaccacaaaugugacaaugccugcauaggaucaaucagaaauggaacuuaugaccacaauguauacagggaugaagcauuaaacaaccgguuccagaucaagggaguugagcugaagucaggguacaaagauuggauccuauggauuuccuuugccauaucauguuuuuugcuuuguguugcuuuguugggguucaucaugugggccugccaaaagggcaacauuaggugcaacauuugcauuuga

SEQ ID NO: 43682 - RNA, 1701 nt, Artificial Sequence
  derived and/or modified CDS sequence (wt) from hemagglutinin__InfluenzaA__AHL99081
augaagacuaucauugcuuugagcuacauucuaugucugguuuucgcucaaaaacuuccuggaaaugacaauagcacggcaacgcugugccuugggcaccaugcaguaccaaacggaacgauagugaaaacaaucacgaaugaccgaauugaaguuacuaaugcuacugagcugguucagaauuccucaauaggugaaauaugcgacaguccucaucagauccuugauggagaaaauugcacacuaauagaugcucuauugggagacccucagugugauggcuuucaaaauaagaaaugggaccuuuuuguugaacgaagcaaagccuacagcaacuguuacccuuaugaugugccggauuaugccucccuuaggucacuaguugccucauccggcacacuggaguuuaacaaugaaagcuucaauuggacuggagucacucaaaacggaacaaguucugcuugcauaaggagaucuaauaguaguuucuuuaguagauuaaauugguugacccacuuaaacuucaaauacccagcauugaacgugacuaugccaaacaaugaacaauuugacaaauuguacauuuggggaguucaccacccggguacggacaaggaccaaaucuuccuguaugcucaaucaucaggaagaaucacaguaucuaccaaaagaagccaacaagcuguaaucccaaauaucggaucuagacccagaauaaggaauaucccuagcagaauaagcaucuauuggacaauaguaaaaccgggagacauacuuuugauuaacagcacagggaaucuaauugcuccuagggguuacuucaaaauacgaagugggaaaagcucaauaaugagaucagaugcacccauuggcaaaugcaagucugaaugcaucacuccaaauggaagcauucccaaugacaaaccauuccaaaauguaaacaggaucacauacggggccugucccagauauguuaagcaaggcacucugaaauuggcaacaggaaugcgaaauguaccagagaaacaaacuagaggcauauuuggcgcaauagcggguuucauagaaaaugguugggagggaaugguggaugguugguacgguuucaggcaucaaaauucugagggaagaggacaagcagcagaucucaaaagcacucaagcagcaaucgaucaaaucaaugggaagcugaaucgauugaucgggaaaaccaacgagaaauuccaucagauugaaaaagaauucucagaaguagaagggagaauucaggaccuugagaaauauguugaggacacuaaaauagaucucuggucauacaacgcggagcuucuuguugcccuggagaaucaacauacaauugaucuaacugacucagaaaugaacaaacuguuugaaaaaacaaagaagcaacugagggaaaaugcugaggauaugggcaaugguuguuucaaaauauaccacaaaugugacaaugccugcauaggaucaaucagaaauggaacuuaugaccacaauguguacagggaugaagcauuaaacaaccgguuccagaucaagggaguugagcuuaagucaggguacaaagauuggauccuauggauuuccuuugccauaucauguuuuuugcuuuguguugcuuuguugggguucaucaugugggccugccaaaagggcaacauuaggugcaacauuugcauuuga

SEQ ID NO: 43683 - RNA, 1701 nt, Artificial Sequence
  derived and/or modified CDS sequence (wt) from hemagglutinin__InfluenzaA__AHL99093
augaagacuaucauugcuuugagcuacauucuaugucugauuuucgcucaaaaacuuccuggaaaugacaauagcacggcaacgcugugccuugggcaccaugcaguaccaaacggaacgauagugaaaacaaucacgaaugaccgaauugaaguuacuaaugcuacugagcugguucagaauuccucaauaggugaaauaugcgacaguccucaucagauucuugauggagaaaacugcacacuaauagaugcucuauugggagacccucagugugauggcuuucaaaauaagaaaugggaccuuuuuguugaacgaagcaaagccuacagcaacuguuacccuuaugaugugccggauuaugccucccuuaggucacuaguugccucauccggcacacuggaguuuaacaaugaaagcuucaauuggacuggagucacucaaaacggaacaaguucugcuugcauaaggagaucuaauaguaguuucuuuaguagauuaaauugguugacccacuuaaacuucaaauacccagcauugaacgugacuaugccaaacaaugaacaauuugacaaauuguacauuugggggguucaccacccagguacggacaaggaccaaaucuuccuguaugcucaaucaucaggaagaaucacaguaucuaccaaaagaagccaacaagcuguaaucccaaauaucggaucuagacccagaauaaggaauaucccuagcagaauaagcaucuauuggacaauaguaaaaccgggagacauacuuuugauuaacagcacagggaaucuaauugcuccuagggguuacuucaaaauacgaagugggaaaagcucaauaaugagaucagaugcacccauuggcaaaugcaagucugaaugcaucacuccaaauggaagcauucccaaugacaaaccauuccaaaauguaaacaggaucacauacggggccugucccagauauguuaagcaaagcacucugaaauuggcaacaggaaugcgaaauguaccagagaaacaaacuagaggcauauuuggcgcaauagcagguuucauagaaaaugguugggagggaaugguggaugguugguacgguuucaggcaucaaaauucugagggaagaggacaagcagcagaucucaaaagcacccaagcagcaaucgaucaaaucaaugggaagcugaaucgauugaucgggaaaaccaacgagaaauuccaucagauugaaaaagaauucucagaaguagaagggagaauucaggaccuugagaaauauguugaggacacuaaaauagaucucuggucauacaacgcggagcuucuuguugcccuggagaaccaacauacaauugaucuaacugacucagaaaugaacaaacuguuugaaaaaacaaagaagcaacugagggaaaaugcugaggauaugggcaaugguuguuucaaaauauaccacaaaugugacaaugccugcauaggaucaauaagaaauggaacuuaugaccacaauguguacagggaugaagcauuaaacaaccgguuccagaucaagggaguugagcugaagucaggguacaaagauuggauccuauggauuuccuuugccauaucauguuuuuugcuuuguguugcuuuguugggguucaucaugugggccugccaaaagggcaacauuaagugcaacauuugcauuuga

SEQ ID NO: 43684 - RNA, 1701 nt, Artificial Sequence
  derived and/or modified CDS sequence (wt) from hemagglutinin__InfluenzaA__AHL99117
augaagacuaucauugcuuugagcuacauucuaugucugguuuucgcucaaaaacuuccuggaaacgacaauagcacggcaacgcugugccuugggcaccaugcaguaccaaacggaacgauagugaaaacaaucacgaaugaccgaauugaaguuacuaaugcuacugagcugguucagaauuccucaauaggugaaauaugcgacaguccucaucagauucuugauggagaaaacugcacacuaauagaugcucuauugggagacccucagugugauggcuuucaaaauaagaaaugggaccuuuuuguugaacgaagcaaagccuacagcaacuguuacccuuaugaugugccggauuaugccucccuuaggucacuaguugccucauccggcacacuggaguuuaacaaugaaagcuucaauuggacuggagucacucaaaacggaacaaguucugcuugcauaaggagaucuaauaguaguuucuuuaguagauuaaauugguugacccacuuaaacuucaaauacccagcauugaacgugacuaugccaaacaaugaacaauuugacaaauuguacauuugggggguucaccacccagguacggacaaggaccaaaucuuccuguaugcucaaucaucaggaagaaucacaguaucuaccaaaagaagccaacaagcuguaaucccaaauaucggaucuagacccagaauaaggaauaucccuagcagaauaagcaucuauuggacaauaguaaaaccgggagacauacuuuugauuaacagcacagggaaucuaauugcuccuagggguuacuucaaaauacgaagugggaaaagcucaauaaugagaucagaugcacccauuggcaaaugcaagucugaaugcaucacuccaaauggaagcauucccaaugacaaaccauuccaaaauguaaacaggaucacauacggggccugucccagauauguuaagcaaagcacucugaaauuggcaacaggaaugcgaaauguaccagagaaacaaacuagaggcauauuuggcgcaauagcagguuucauagaaaaugguugggagggaaugguggaugguugguacgguuucaggcaucaaaauucugagggaagaggacaagcagcagaucucaaaagcacccaagcagcaaucgaucaaaucaaugggaagcugaaucgauugaucgggaaaaccaacgagaaauuccaucagauugaaaaagaauucucagaaguagaagggagaauucaggaccuugagaaauauguugaggacacuaaaauagaucucuggucauacaacgcggagcuucuuguugcccuggagaaccaacauacaauugaucuaacugacucagaaaugaacaaacuguuugaaaaaacaaagaagcaacugagggaaaaugcugaggauaugggcaaugguuguuucaaaauauaccacaaaugugacaaugccugcauaggaucaauaagaaauggaacuuaugaccacaauguguacagggaugaagcauuaaacaaccgguuccagaucaagggaguugagcugaagucaggguacaaagauuggauccuauggauuuccuuugccauaucauguuuuuugcuuuguguugcuuuguugggguucaucaugugggccugccaaaagggcaacauuaggugcaacauuugcauuuga

SEQ ID NO: 43685 - RNA, 1701 nt, Artificial Sequence
  derived and/or modified CDS sequence (wt) from hemagglutinin__InfluenzaA__AHL99129
augaagacuaucauugcuuugagcuacauucuaugucugguuuucgcucaaaaacuuccuggaaaugacaauagcacggcaacgcugugccuugggcaccaugcaguaccaaacggaacgauagugaaaacaaucacgaaugaccgaauugaaguuacuaaugcuacugagcugguucagaauuccucaauaggugaaauaugcgacaguccucaucagauucuugauggagaaaacugcacacuaauagaugcucuauugggagacccucagugugauggcuuucaaaauaagaaaugggaccuuuuuguugaacgaagcaaagccuacagcaacuguuacccuuaugaugugccggauuaugccucccuuaggucacuaguugccucauccggcacacuggaguuuaacaaugaaagcuucaauuggacuggagucacucaaaacggaacaaguucugcuugcauaaggagaucuaauaguaguuucuuuaguagauuaaauugguugacccacuuaaacuucaaauacccagcauugaacgugacuaugccaaacaaugaacaauuugacaaauuguacauuugggggguucaccacccagguacggacaaggaccaaaucuuccuguaugcucaaucaucaggaagaaucacaguaucuaccaaaagaagccaacaagcuguaaucccaaauaucggaucuagacccagaauaaggaauaucccuagcagaauaagcaucuauuggacaauaguaaaaccgggagacauacuuuugauuaacagcacagggaaucuaauugcuccuagggguuacuucaaaauacgaagugggaaaagcucaauaaugagaucagaugcacccauuggcaaaugcaagucugaaugcaucacuccaaauggaagcauucccaaugacaaaccauuccaaaauguaaacaggaucacauacggggccugucccagauauguuaagcaaagcacucugaaauuggcaacaggaaugcgaaauguaccagagaaacaaacuagaggcauauuuggcgcaauagcagguuucauagaaaaugguugggagggaaugguggaugguugguacgguuucaggcaucaaaauucugagggaagaggacaagcagcagaucucaaaagcacccaagcagcaaucgaucaaaucaaugggaagcugaaucgauugaucgggaaaaccaacgagaaauuccaucagauugaaaaagaauucucagaaguagaagggagaauucaggacauugagaaauauguugaggacacuaaaauagaucucuggucauacaacgcggagcuucuuguugcccuggagaaccaacauacaauugaucuaacugacucagaaaugaacaaacuguuugaaaaaacaaagaagcaacugagggaaaaugcugaggauaugggcaaugguuguuucaaaauauaccacaaaugugacaaugccugcauagggucaauaagaaauggaacuuaugaccacaauguguacagggaugaagcauuaaacaaccgguuccagaucaaaggaguugagcugaagucaggguacaaagauuggauccuauggauuuccuuugccauaucauguuuuuugcuuuguguugcuuuguugggguucaucauaugggccugccaaaagggcaacauuaggugcaacauuugcauuuga

SEQ ID NO: 43686 - RNA, 1701 nt, Artificial Sequence
  derived and/or modified CDS sequence (wt) from hemagglutinin__InfluenzaA__AHL99141
augaagacuaucauugcuuugagcuacauucuaugucugguuuucgcucaaaaacuuccuggaaaugacaauagcacggcaacgcugugccuugggcaccaugcaguaccaaacggaacgauagugaaaacaaucacgaaugaccaaauugaaguuacuaaugcuacugagcugguucagaauuccucaauaggugaaauaugcgacaguccucaucagauccuugauggagaaaacuguacacuaauagaugcucuauugggagacccucagugugauggcuuucaaaauaagaaaugggaccuuuuuguugaacgaagcaaagccuacagcaacuguuacccuuaugaugugccggauuaugccucccuuaggucacuaguugccucauccggcacacuggaguuuaacaaugaaagcuucaauuggacuggagucacucaaaacggaacaaguucugcuugcauaaggagaucuaauaguaguuucuuuaguagauuaaauugguugacccacuuagacuucaaauacccagcauugaacgugacuaugccaaacaaugaacaauuugacaaauuguacauuugggggguucaccacccggguacggacaaggaccaaaucuuccuguaugcucaaucaucaggaagaaucacaguaucuaccaaaagaagccaacaagcuguaaucccgaauaucggaucuagacccagaauaaggaauaucccuagcagaauaagcaucuauuggacaauaguaaaaccaggagacauacuuuugauuaacagcacagggaaucuaauugcuccuagggguuacuucaaaauacgaagugggaaaagcucaauaaugagaucagaugcacccauuggcaaaugcaagucugaaugcaucacuccaaauggaagcauuccaaaugacaaaccauuccaaaauguaaacaggaucacauacggggccugucccagauauguuaagcaaagcacucugaaauuggcaacaggaaugcgaaacguaccagagaaacaaacuagaggcauauuuggcgcaauagcggguuucauagaaaaugguugggagggaaugguggaugguugguacgguuucaggcaucaaaauucugagggaagaggacaagcagcagaucucaaaagcacucaagcagcaaucgaucaaaucaaugggaagcugaaucgauugaucgggaaaaccaacgagaaauuccaucagauugaaaaagaauucucagaaguagaagggagaauucaggaccuugagaaauauguugaggauacuaaaauagaucucuggucauacaacgcggagcuucuuguugcccuggagaaccaacauacaauugaucuaacugacucagaaaugaacaaacuguuugaaaaaacaaagaagcaacugagggaaaaugcugaggauaugggcaaugguuguuucaaaauauaccacaaaugugacaaugccugcauaggaucaaucagaaauggaacuuaugaccacgauguauacagggaugaagcauuaaacaaccgguuccagaucaagggaguugagcugaagucaggguacaaagauuggauccuauggauuuccuuugccauaucauguuuuuugcuuuguguugcuuuguugggguucaucaugugggccugccaaaagggcaacauuaggugcaacauuugcauuuga

SEQ ID NO: 43687 - RNA, 1701 nt, Artificial Sequence
  derived and/or modified CDS sequence (wt) from hemagglutinin__InfluenzaA__AHL99153
augaagacuaucauugcuuugagcuacauucuaugucugguuuucgcucaaaaacuuccuggaaaugacaauagcacggcaacgcugugccuugggcaccaugcaguaccaaacggaacgauagugaaaacaaucacgaaugaccgaauugaaguuacuaaugcuacugagcugguucagaauuccucaauaggugaaauaugcgacaguccucaucagauccuugauggagaaaacugcacacuaauagaugcucuauugggagacccucagugugauggcuuucaaaauaagaaaugggaccuuuuuguugaacgaagcaaagccuacagcaacuguuacccuuaugauguaccagauuaugccucccuuaggucacuaguugccucauccggcacacuggaguuuaacaaugaaagcuucaauugggcuggagucacucaaaacggaacaaguucugcuugcauaaggggaucuaauaguaguuucuuuaguagauuaaauugguugacccacuuaaacuucaaauacccagcauugaacgugacuaugccaaacaaugaacaauuugacaaauuguacauuugggggguucaccacccggguacggacaaggaccaaaucuuccuguaugcucaaucaucaggaagaaucacaguaucuaccaaaagaagccaacaagcuguaaccccgaauaucggaucuagacccagaauaagggauaucccuagcagaauaagcaucuauuggacaauaguaaaaccgggagacauacuuuugauuaacagcacagggaaucuaauugcuccuagggguuacuucaaaauacgaagugggaaaagcucaauaaugagaucagaugcacccauuggcaaaugcaagucugaaugcaucacuccaaauggaagcauucccaaugacaaaccauuccaaaauguaaacaggaucacauacggggccugucccagauauguuaagcaaagcacucugaaauuggcaacaggaaugcgaaauguaccagagaaacaaacuagaggcauauuuggcgcaauagcggguuucauagaaaaugguugggagggaaugauggaugguugguacgguuucaggcaucaaaauucugagggaagaggacaagcagcagaucucaaaagcacucaagcagcaaucgaucaaaucaaugggaagcugaaucgauugaucgggaaaaccaacgagaaauuccaucagauugaaaaagaauucucagaaguagaagggagaauucaggaccuugagaaauauguugaggacacaaaaauagaucucuggucauacaacgcggagcuucuuguugcccuggagaaccaacauacaauugaucuaacugacucagaaaugaacaaacuguuugaaaaaacaaagaagcaacugagggaaaaugcugaggauaugggcaaugguuguuucaaaauauaccacaaaugugacaaugccugcauaggaucaaucagaaauggaacuuaugaccacgauguauacagggaugaagcauuaaacaaccgguuccagaucaagggaguugagcugaagucaggguacaaagauuggauccuauggauuuccuuugccauaucauguuuuuugcuuuguguugcuuuguugggguucaucaugugggccugccaaaagggcaacauuaggugcaacauuugcauuuga

SEQ ID NO: 43688 - RNA, 1701 nt, Artificial Sequence; identical to SEQ ID NO: 42068
  derived and/or modified CDS sequence (wt) from hemagglutinin__InfluenzaA__AHL99165

SEQ ID NO: 43689 - RNA, 1701 nt, Artificial Sequence; identical to SEQ ID NO: 42494
  derived and/or modified CDS sequence (wt) from hemagglutinin__InfluenzaA__AHL99177

SEQ ID NO: 43690 - RNA, 1701 nt, Artificial Sequence
  derived and/or modified CDS sequence (wt) from hemagglutinin__InfluenzaA__AHL99189
augaagacuaucauugcuuugagcuacauucuaugucugguuuucgcucaaaaacuuccuggaaaugacaauagcacggcaacgcugugccuugggcaccaugcaguaccaaacggaacgauagugaaaacaaucacgaaugaccgaauugaaguuacuaaugcuacugagcugguucagaauuccucaauaggugaaauaugcgacaguccucaucagauucuugauggagaaaacugcacacuaauagaugcucuauugggagacccucagugugauggcuuucaaaauaagaaaugggaccuuuuuguugaacgaagcaaagccuacagcaacuguuacccuuaugaugugccggauuaugccucccuuaggucacuaguugccucauccggcacacuggaguuuaacaaugaaagcuucaauuggacuggagucacucaaaacggaacaaguucugcuugcauaaggagaucuaauaguaguuucuuuaguagauuaaauugguugacccacuuaaacuucaaauacccagcauuaaacgugacuaugccaaacaaugaacaauuugacaaauuguacauuugggggguucaccacccagguacggacaaggaccaaaucuuccuguaugcucaaucaucaggaagaaucacaguaucuaccaaaagaagccaacaagcuguaaucccaaauaucggaucuagacccagaauaaggaauaucccuagcagaauaagcaucuauuggacaauaguaaaaccgggagacauacuuuugauuaacagcacagggaaucuaauugcuccuagggguuacuucaaaauacgaagugggaaaagcucaauaaugagaucagaugcacccauuggcaaaugcaagucugaaugcaucacuccaaauggaagcauucccaaugacaaaccauuccaaaauguaaacaggaucacauacggggccugucccagauauguuaagcaaagcacucugaaauuggcaacaggaaugcgaaauguaccagagaaacaaacuagaggcauauuuggcgcaauagcagguuucauagaaaaugguugggagggaaugguggaugguugguacgguuucaggcaucaaaauucugagggaagaggacaagcagcagaucucaaaagcacccaagcagcaaucgaucaaaucaaugggaagcugaaucgauugaucgggaaaaccaacgagaaauuccaucagauugaaaaagaauucucagaaguagaagggagaauucaggaccuugagaaauauguugaggacacuaaaauagaucucuggucauacaacgcagagcuucuuguugcccuggagaaccaacauacaauugaucuaacugacucagaaaugaacaaacuguuugaaaaaacaaagaagcaacugagggaaaaugcugaggauaugggcaaugguuguuucaaaauauaccacaaaugugacaaugccugcauaggaucaauaagaaauggaacuuaugaccacaauguguacagggaugaagcauuaaacaaccgguuccagaucaagggaguugagcugaagucaggguacaaagauuggauccuauggauuuccuuugccauaucauguuuuuugcuuuguguugcuuuguugggguucaucaugugggccugccaaaagggcaacauuaggugcaacauuugcauuuga

SEQ ID NO: 43691 - RNA, 1701 nt, Artificial Sequence
  derived and/or modified CDS sequence (wt) from hemagglutinin__InfluenzaA__AHL99225
augaagacuaucauugcuuugagcuacauucuaugucugguuuucgcucaaaaacuuccuggaaaugacaauagcacggcaacgcugugccuugggcaccaugcaguaccaaacggaacgauagugaaaacaaucacgaaugaccgaauugaaguuacuaaugcuacugagcugguucagaauuccucaauaggugaaauaugcgacaguccucaucagauccuugauggagaaaacugcacacuaauagaugcucuauugggagacccucagugugauggcuuucaaaauaagaaaugggaccuuuuuguugaacgaagcaaagccuacagcaacuguuacccuuaugaugugccggauuaugccucccuuaggucacuaguugccucauccggcacacuggaguuuaacaaugaaagcuucaauugggcuggagucacucaaaacggaacaaguucugcuugcauaaggggaucuaauaguaguuucuuuaguagauuaaauugguugacccacuuaaacuucaaauacccagcauugaacgugacuaugccaaacaaugaacaauuugacaaauuguacauuugggggguucaccacccggguacggacaaggaccaaaucuuccuguaugcucaaucaucaggaagaaucacaguaucuaccaaaagaagccaacaagcuguaaucccgaauaucggaucuagacccagaauacggaauaucccuagcagaauaagcaucuauuggacaauaguaaaaccgggagacauacuuuugauuaacagcacagggaaucuaauugcuccuagggguuacuucaaaauacgaagugggaaaagcucaauaaugagaucagaugcacccauuggcaaaugcaagucugaaugcaucacuccaaauggaagcauucccaaugacaaaccauuccaaaauguaaacaggaucacauacggggccugucccagauauguuaagcaaagcacucugaaauuggcaacaggaaugcgaaauguaccagagaaacaaacuagaggcauauuuggcgcaauagcggguuucauagaaaaugguugggagggaaugguggaugguugguacgguuucaggcaucaaaauucugagggaagaggacaagcagcagaucucaaaagcacucaagcagcaaucgaucaaaucaaugggaagcugaaucgauugaucgggaaaaccaacgagaaauuccaucagauugaaaaagaauucucagaaguagaagggagaauucaggaccuugagaaauauguugaggacacaaaaauagaucucuggucauacaacgcggagcuucuuguugcccuggagaaccaacauacaauugaucuaacugacucagaaaugaacaaacuguuugaaaaaacaaagaagcaacugagggaaaaugcugaggauaugggcaaugguuguuucaaaauauaccacaaaugugacaaugccugcauaggaucaaucagaaauggaacuuaugaccacgauguauacagggaugaagcauuaaacaaccgguuccagaucaagggaguugaguugaagucaggguacaaagauuggauccuauggauuuccuuugccauaucauguuuuuugcuuuguguugcuuuguugggguucaucaugugggccugccaaaagggcaacauuaggugcaacauuugcauuuga

SEQ ID NO: 43692 - RNA, 1701 nt, Artificial Sequence
  derived and/or modified CDS sequence (wt) from hemagglutinin__InfluenzaA__AHL99237
augaagacuaucauugcuuugagcuacauucuaugucuaguuuucgcucaaaaacuuccuggaaaugacaauagcacggcaacgcugugccuugggcaccaugcaguaccaaacggaacgauagugaaaacaaucacgaaugaccgaauugaaguuacuaaugcuacugagcugguucagaauuccucaauaggugaaauaugcgacaguccucaucaaauccuugauggagaaaacugcacacuaauagaugcucuauugggagacccucagugugauggcuuccaaaauaagaaaugggaccuuuuuguugaacgaagcaaagccuacagcaacuguuacccuuaugaugugccggauuaugccucccuuaggucacuaguugccucauccggcacacuggaguuuaacaaugaaagcuucaauuggacuggagucacucaaaacggaacaaguucugcuugcauaaggagaucuaauaauaguuucuuuaguagauuaaauugguugacccacucaaacuucaaauacccagcauugaacgugacuaugccaaacaaugaacaauuugacaaauuguacauuugggggguucaccacccagguacggacaaggaccaaaucuuccuguaugcucaaucaucaggaagaaucacaguaucuaccaaaagaagccaacaagcuguaaucccgaauaucggaucuagacccagaauaaggaauaucccuagcagaauaagcaucuauuggacaauaguaaaaccgggagacauacuuuugauuaacagcacagggaaucuaauugcuccuagggguuacuucaaaauacgaagugggaaaagcucaauaaugagaucagaugcacccauuggcaaaugcaagucugaaugcaucacuccaaauggaagcauucccaaugacaaaccauuccaaaauguaaacaggaucacauacggggccugucccagauauguuaagcaaagcacucugaaauuggcaacaggaaugcgaaauguaccagagaaacaaacuagaggcauauuuggcgcaauagcggguuucauagaaaaugguugggagggaaugauggaugguugguacgguuucaggcaccaaaauucugagggaagaggacaagcagcagaucucaagagcacucaagcagcaaucgaucaaaucaaugggaagcugaaucgauugaucgggaaaaccaacgagaaauuccaucagauugaaaaagaauuuucagaaguagaagggagaauucaggaccuugagaaauauguugaggacacuaaaauagaucucuggucauacaacgcggagcuucuuguugcccuggagaaccaacauacaauugaucuaacugacucagaaaugaacaaacuguuugaaaaaacaaagaagcaacugagggaaaaugcugaggauaugggcaaugguuguuucaaaauauaccacaaaugugacaaugccugcauaggaucaaucagaaauggaacuuaugaccacgauguauacagagaugaagcauuaaacaaccgguuccagaucaagggaguugagcugaagucaggguacaaagauuggauccuauggauuuccuuugccauaucauguuuuuugcuuuguguugcuuuguugggguucaucaugugggccugccaaaagggcaacauuaggugcaacauuugcauuuga

SEQ ID NO: 43693 - RNA, 1701 nt, Artificial Sequence; identical to SEQ ID NO: 41880
  derived and/or modified CDS sequence (wt) from hemagglutinin__InfluenzaA__AHL99249

SEQ ID NO: 43694 - RNA, 1701 nt, Artificial Sequence; identical to SEQ ID NO: 43648
  derived and/or modified CDS sequence (wt) from hemagglutinin__InfluenzaA__AHL99261

SEQ ID NO: 43695 - RNA, 1701 nt, Artificial Sequence
  derived and/or modified CDS sequence (wt) from hemagglutinin__InfluenzaA__AHL99273
augaagacuaucauugcuuugagcuacauucuaugucugguuuucgcucaaaaacuuccuggaaaugacaauagcacggcaacgcugugccuugggcaccaugcaguaccaaacggaacgauagugaaaacaaucacgaaugaccaaauugaaguuacuaaugcuacugagcugguucagaauuccucaauaggugaaauaugcgacaguccucaucagauccuugauggagaaaacugcacacuaauagaugcucuauugggagacccucagugugauggcuuucaaaauaagaaaugggaccuuuuuguugaacgaagcaaagccuacagcaacuguuacccuuaugaugugccggauuaugccucccuuaggucacuaguugccucauccggcacacuggaguuuaacaaugaaagcuucaauugggcuggagucacucaaaacggaacaaguucugcuugcauaaggggaucuaauaguaguuucuuuaguagauuaaauugguugacccacuuaaacuucaaguacccagcauugaacgugacuaugccaaauaaugaacaauuugacaaauuguacauuugggggguucaccacccggguacggacaaggaccaaaucuuccuguaugcucaaucaucaggaagaaucacaguaucuaccaaaagaagccaacaagcuguaaucccgaauaucggaucuagacccagaauaaggaauaucccuagcagaauaagcaucuauuggacaauaguaaaaccgggagacauacuuuugauuaacagcacagggaaucuaauugcuccuagggguuacuucaaaauacgaagugggaaaagcucaauaaugagaucagaugcacccauuggcaaaugcaagucugaaugcaucacuccaaauggaagcauucccaaugacaaaccauuccaaaauguaaacaggaucacauacggggccugucccagauauguuaagcaaagcacucugaaauuggcaacaggaaugcgaaauguaccagagaaacaaacuagaggcauauuuggcgcaauagcggguuucauagaaaaugguugggagggaaugguggaugguugguacgguuucaggcaucaaaauucugagggaagaggacaagcagcagaucucaaaagcacucaagcagcaaucgaucaaaucaaugggaagcugaaucgauugaucgggaaaaccaacgagaaauuccaucagauugagaaagaauucucagaaguagaagggagaauucaggaccuugagaaauauguugaggacacaaaaauagaucucuggucauacaacgcagagcuucuuguugcccuggagaaccaacauacaauugaucuaacugacucagaaaugaacaaacuguuugaaaaaacaaagaagcaacugagggaaaaugcugaggauaugggcaaugguuguuucaaaauauaccacaaaugugacaaugccugcauaggaucaaucagaaauggaacuuaugaccacgauguauacagggaugaagcauuaaacaaccgguuccagaucaagggaguugagcugaagucaggguacaaagauuggauccuauggauuuccuuugccauaucauguuuuuugcuuuguguugcuuuguugggguucaucaugugggccugccaaaagggcaacauuaggugcaacauuugcauuuga

SEQ ID NO: 43696 - RNA, 1701 nt, Artificial Sequence
  derived and/or modified CDS sequence (wt) from hemagglutinin__InfluenzaA__AHL99285
augaagacuaucauugcuuugagcuacauucuaugucugguuuucgcucaaaaacuuccuggaaaugacaauagcacggcaacgcugugccuugggcaccaugcaguaccaaacggaacgauagugaaaacaaucacgaaugaccgaauugaaguuacuaaugcuacugagcugguucagaauuccucaauaggugaaauaugcgacaguccucaucagauccuugauggagaaaauugcacacuaauagaugcucuauugggagacccucagugugauggcuuucaaaauaagaaaugggaccuuuuuguugaacgaagcaaagccuacagcaacuguuacccuuaugaugugccggauuaugccucccuuaggucacuaguugccucauccggcacacuggaguuuaacaaugaaagcuucaauuggacuggagucacucaaaacggaacaaguucugcuugcauaaggagaucuaauaguaguuucuuuaguagauuaaauugguugacccacuuaaacuucaaauacccagcauugaacgugacuaugccaaacaaugaacaauuugacaaauuguacauuuggggaguucaccacccggguacggacaaggaccaaaucuuccuguaugcucaaucaucaggaagaaucacaguaucuaccaaaagaagccaacaagcuguaaucccaaauaucggaucuagacccagaauaaggaauaucccuagcagaauaagcaucuauuggacaauaguaaaaccgggagacauacuuuugauuaacagcacagggaaucuaauugcuccuagggguuacuucaaaauacaaagugggaaaagcucaauaaugagaucagaugcacccauuggcaaaugcaagucugaaugcaucacuccaaauggaagcauucccaaugacaaaccauuccaaaauguaaacaggaucacauacggggccugucccagauauguuaagcaaagcacucugaaauuggcaacaggaaugcgaaauguaccagagaaacaaacuagaggcauauuuggcgcaauagcggguuucauagaaaaugguugggagggaaugguggaugguugguacgguuucaggcaucaaaauucugagggaagaggacaagcagcagaucucaaaagcacucaagcagcaaucgaucaaaucaaugggaagcugaaucgauugaucgggaaaaccaacgagaaauuccaucagauugaaaaagaauucucagaaguagaagggagaauucaggaccuugagaaauauguugaggacacuaaaauagaucucuggucauacaacgcggagcuucuuguugcccuggagaaucaacauacaauugaucuaacugacucagaaaugaacaaacuguuugaaaaaacaaagaagcaacugagggaaaaugcugaggauaugggcaaugguuguuucaaaauauaccacaaaugugacaaugccugcauaggaucaaucagaaauggaacuuaugaccacaauguguacagggaugaagcauuaaacaaccgguuccagaucaagggaguugagcuuaagucaggguacaaagauuggauccuauggauuuccuuugccauaucauguuuuuugcuuuguguugcuuuguugggguucaucaugugggccugccaaaagggcaacauuaggugcaacauuugcauuuga

SEQ ID NO: 43697 - RNA, 1701 nt, Artificial Sequence
  derived and/or modified CDS sequence (wt) from hemagglutinin__InfluenzaA__AHL99297
augaagacuaucauugcuuugagcuacauucuaugucugguuuucgcucaaaaaauuccuggaaaugacaauagcacggcaacgcugugccuuggacaccaugcaguaccaaacggaacgauagugaaaacaaucacgaaugaccgaauugaaguuacuaaugcuacugagcugguucagaauuccucaauaggugaaauaugcgacaguccucaucagauccuugauggagaaaacuguacacuaauagaugcucuauugggagacccucagugugauggcuuucaaaauaagaaaugggaccuuuuuguugaacgaagcaaagccuacagcaacuguuacccuuaugaugugccggauuaugccucccuuaggucacuaguugccucauccggcacacuggaguuuaacaaugaaagcuucaauuggacuggagucacucaaaacggaacaaguucugcuugcauaaggggaucuaauaguaguuucuuuaguagauuaaauugguugacccacuuaaacuucaaauacccagcauugaacgugacuaugccaaacaaugaacaauuugacaaauuguacauuugggggguucaccacccggguacggacaaggaccaaaucuuccuguaugcucaaucaucaggaagaaucacaguaucuaccaaaagaagccaacaagcuguaaucccgaauaucggaucuagacccagaauaaggaauaucccuagcagaauaagcaucuauuggacaauaguaaaaccaggagacauacuuuugauuaacagcacagggaaucuaauugcuccuagggguuacuucaaaauaagaagugggaaaagcucaauaaugagaucagaugcacccauuggcaaaugcaagucugaaugcaucacuccaaauggaagcauuccaaaugacaaaccauuccaaaauguaaacaggaucacauacggggccugucccagauauguuaagcaaagcacucugaaauuggcaacaggaaugcgaaauguaccagagaaacaaacuagaggcauauuuggcgcaauagcggguuucauagaaaaugguugggagggaaugguggaugguugguacgguuucaggcaucaaaauucugagggaagaggacaagcagcagaucucaaaagcacucaagcagcaaucgaucaaaucaaugggaagcugaaucgauugaucgggaaaaccaacgagaaauuccaucagauugaaaaagaauucucagaaguagaagggagaauucaggaccuugagaaauauguugaggacacuaaaauagaucucuggucauacaacgcggagcuucuuguugcccuggagaaccaacauacaauugaucuaacugacucagaaaugaacaaacuguuugaaaaaacaaagaagcaacugagggaaaaugcugaggauaugggcaaugguuguuucaaaauauaccacaaaugugacaaugccugcauaggaucaaucagaaauggaacuuaugaccacgauguauacagggaugaagcauuaaacaaccgguuccagaucaagggaguugagcugaagucaggguacaaagauuggauccuauggauuuccuuugccauaucauguuuuuugcuuuguguugcuuuguugggguucaucaugugggccugccaaaagggcaacauuaggugcaacauuugcauuuga

SEQ ID NO: 43698 - RNA, 1701 nt, Artificial Sequence
  derived and/or modified CDS sequence (wt) from hemagglutinin__InfluenzaA__AHL99309
augaagacuaucauugcuuugagcuacauucuaugucugguuuucgcucaaaaacuuccuggaaaugacaauagcacggcaacgcugugccuugggcaccaugcaguaccaaacggaacgauagugaaaacaaucacgaaugaccgaauugaaguuacuaaugcuacugagcugguucagaauuccucaauaggugaaauaugcgacaguccucaucagauccuugauggagaaaacugcacacuaauagaugcucuauugggagacccucagugugauggcuuucaaaauaagaaaugggaccuuuuuguugaacgaagcaaagccuacagcaacuguuacccuuaugaugugccggauuaugccucccuuaggucacuaguugccucauccggcacacuggaguuuaacaaugaaaguuucaauugggcuggagucacucaaaacggaacaaguucugcuugcauaaggggaucuaauaguaguuucuuuaguagauuaaauugguugacccacuuaaacuucaaauacccagcauugaacgugacuaugccaaacaaugaacaauuugacaaauuguacauuugggggguucaccacccggguacggacaaggaccaaaucuuccuguaugcucaaucaucaggaagaaucacaguaucuaccaaaagaagccaacaagcuguaaucccgaauaucggauccagacccagaauaaggaauaucccuagcagaauaagcaucuauuggacaauaguaaaaccgggagacauacuuuugauuaacagcacagggaaucuaauugcuccuagggguuacuucaaaauacgaagugggaaaagcucaauaaugagaucagaugcacccauuggcaaaugcaagucugaaugcaucacuccaaauggaagcauucccaaugacaaaccauuccaaaauguaaacaggaucacauacggggccugucccagauauguuaagcaaagcacucugaaauuggcaacaggaaugcgaaauguaccagagaaacaaacuagaggcauauuuggcgcaauagcggguuucauagaaaaugguugggagggaaugauggaugguugguacgguuucaggcaucaaaauucugagggaagaggacaagcagcagaucucaaaagcacucaagcagcaaucgaucaaaucaaugggaagcugaaucgauugaucgggaaaaccaacgagaaauuccaucagauugaaaaagaauucucagaaguggaagggagaauucaggaccuugagaaauauguugaggacacaaaaauagaucucuggucauacaacgcggagcuucuuguugcccuggagaaccaacauacaauugaucuaacugacucagaaaugaacaaacuguuugaaaaaacaaagaagcaacugagggaaaaugcugaggauaugggcaaugguuguuucaaaauauaccacaaaugugacaaugccugcauaggaucaaucagaaauggaacuuaugaccacgauguauacagggaugaagcauuaaacaaccgguuccagaucaagggaguugagcugaagucaggguacaaagauuggauccuauggauuuccuuugccauaucauguuuuuugcuuuguguugcuuuguugggguucaucaugugggccugccaaaagggcaacauuaggugcaacauuugcauuuga

SEQ ID NO: 43699 - RNA, 1701 nt, Artificial Sequence
  derived and/or modified CDS sequence (wt) from hemagglutinin__InfluenzaA__AHL99321
augaagacuaucauugcuuugagcuacauucuaugucugguuuuuacucaaaaacuuccuggaaaugacaauagcacggcaacgcugugccuugggcaccaugcaguaccaaacggaacgauagugaaaacaaucacgaaugaccaaauugaaguuacuaaugcuacugagcugguucagaauuccucaauaggugaaauaugcgacaguccucaucagauccuugauggagaaaacugcacacuaauagaugcucuauugggagacccucagugugauggcuuucaaaauaagaaaugggaccuuuuuguugaacgaagcaaagccuacagcaacuguuacccuuaugaugugccggauuaugccucccuuaggucacuaguugccucauccggcacgcuggaguuuaacaaugaaagcuucaauugggcuggagucacucaaaacggaacaaguucugcuugcauaaggggaucuaauaguaguuucuuuaguagauuaaauugguugacccacuuaaacuucaaguacccagcauugaacgugacuaugccaaacaaugaacaauuugacaaauuguacauuugggggguucaccacccggguacggacaaggaccaaaucuuccuguaugcccaaucaucaggaagaaucacaguaucuaccaaaagaagccaacaagcuguaaucccgaauaucggaucuagacccagaauaaggaauaucccuagcagaauaagcaucuauuggacaauaguaaaaccgggagacauacuuuugauuaacagcacagggaaucuaauugcuccuagggguuacuucaaaauacgaagugggaaaagcucaauaaugagaucagaugcacccauuggcaaaugcaagucugaaugcaucacuccaaauggaagcauucccaaugacaaaccauuccaaaauguaaacaggaucacauacggggccugucccagauauguuaagcaaagcacucugaaauuggcaacaggaaugcgaaauguaccagagaaacaaacuagaggcauauuuggcgcaauagcggguuucauagaaaaugguugggagggaaugguggaugguugguacgguuucaggcaucaaaauucugagggaagaggacaagcagcagaucucaaaagcacucaagcagcaaucgaucaaaucaaugggaagcugaaucgauugaucgggaaaaccaacgagaaauuccaucagauugagaaagaauucucagaaguagaagggagaauucaggaccuugagaaauauguugaggacacaaaaauagaucucuggucauacaacgcagagcuucuuguugcccuggagaaccaacauacaauugaucuaacugacucagaaaugaacaaacuguuugaaaaaacaaagaagcaacugagggaaaaugcugaggauaugggcaaugguuguuucaaaauauaccacaaaugugacaaugccugcauaggaucaaucagaaauggaacuuaugaccacgauguauacagggaugaagcauuaaacaaccgguuccagaucaagggaguugagcugaagucaggguacaaagauuggauccuauggauuuccuuugccauaucauguuuuuugcuuuguguugcuuuguugggguucaucaugugggccugccaaaagggcaacauuaggugcaacauuugcauuuga

SEQ ID NO: 43700 - RNA, 1701 nt, Artificial Sequence
  derived and/or modified CDS sequence (wt) from hemagglutinin__InfluenzaA__AHL99333
augaagaccaucauugcuuugagcuacauucuaugccuaguuuucgcucaagaacucccuggaaaugacgacagcacggcaacgcugugccuugggcaccaugcagugccaaacggaacgauagugaaaacaaucacgaaugaccaaauugaaguuacuaaugcuacugagcugguucagaguuccucaacaggugaaauaugcaacaguccucaucagauccuugauggagaaaacugcacacuaauagaugcucuauugggagacccucagugugauggcuuccaaaacaagaaaugggaccuuuuuguugaacgaagcaaagcccacagcaacuguuacccuuaugaugugccggauuaugccucccuuaggucacuaguugccucauccggcacacuggaguuuaacaaugaaagcuucaauuggacuggagucacucaaaacggaacaagcucugcuugcauaaggagaucuaauaauaguuucuuuaguagauugaauugguugacccacuuaaacuucaaauacccagcauugaacgugacuaugccaaacaaugaacaauuugacaaauuguacauuugggggguucaccacccggguacggacaaggaccaaaucuuccuguaugcucaagcaucaggaagaaucacaguaucuaccaaaagaagccaacaagcuguaauuccgaauaucggaucuagacccagaguaaggaauaucccuagcagaguaagcaucuauuggacaauaguaaaaccgggagacauacuuuugauuaacagcacagggaaucuaauugcuccuagggguuacuucaaaauacgaagugggaaaagcucaauaaugagaucagaugcacccauuggcaaaugcaauucugcaugcaucacuccaaauggaagcauucccaaugacaaaccauuccaaaauguaaacaggaucacauacggggccugucccagauaugucaagcaaaacacucugaaauuggcaacaggaaugagaaauguaccagagaaacaaacuagaggcauauuuggcgcaauagcggguuucauagaaaaugguugggagggaaugguggaugguugguacgguuucaggcaucaaaauucugagggaaggggacaagcagcagaucucaaaagcacucaagcagcaaucgaucaaaucaaugggaagcugaauagauugaucgggaaaaccaacgagaaauuccaucagauugaaaaagaauucucagaagucgaagggagaauucaggaccuugagaaauauguugaggacacuaaaauagaucucuggucauacaacgcggagcuucuuguugcccuggagaaccaacacacaauugaucuaacugacucagaaaugaacaaacuguuugaaaaaacaaagaagcaacugagggaaaaugcugaggauaugggcaaugguuguuucaaaauauaccacaaaugugacaaugccugcauaggaucaaucagaaauggaacuuaugaucacaauguguacagagaugaagcauuaaacaaccgauuccagaucaagggaguugagcugaagucaggguacaaagauuggauccuauggauuuccuuugccauaucauguuuuuugcuuuguguugcuuuguugggguucaucaugugggccugccaaaaaggcaacauuaggugcaacauuugcauuuga

SEQ ID NO: 43701 - RNA, 1701 nt, Artificial Sequence
  derived and/or modified CDS sequence (wt) from hemagglutinin__InfluenzaA__AHL99356
augaaggcaauacuaguaguucugcuauacacauuugcaaccgcaaaugcagacacauuauguauagguuaucaugcgaacaauucaacagacacuguagacacaguacuagaaaagaauguaacaguaacacacucuguuaaccuucuagaagacaagcauaacgggaaacuaugcaaacuaagagggguagccccauugcauuuggguaaauguaacauugcuggcuggauccugggaaauccagagugugaaucacuuuccacagcaaguucaugguccuacauuguggaaacaucuaguucagacaauggaacguguuacccaggagauuucaucaauuaugaggagcuaagagagcaauugagcucagugucaucauuugaaagguuugagauauuccccaagacaaguucauggcccaaucaugacucgaacaaagguguaacggcagcauguccucaugcuggagcaaaaagcuucuacaaaaauuuaauauggcuaguuaaaaaaggaaauucauacccaaagcucagcaaauccuacauuaaugauaaagggaaagaaguccucgugcuguggggcauucaccauccaucuacuacugcugaccaacaaagucucuaucagaaugcagaugcauauguuuuuguggggacaucaaaauacagcaagaaguucaagccggaaauagcaauaagacccaaagugagggaucaagaagggagaaugaacuauuacuggacacuaauagagccgggagacaaaauaacauucgaagcaacuggaaaucuagugguaccgagauaugcauucgcaauggaaagaaaugcuggaucugguauuaucauuucagauacaccaguccacgauugcaauacaacuugucagacacccgagggugcuauaaacaccagccucccauuucagaauauacauccgaucacaauuggaaaauguccaaaguaugugaaaagcacaaaauugagacuggccacaggauugaggaaugucccgucuauucaaucuagaggccuauucggggccauugccggcuucauugaagggggguggacagggaugguagauggaugguacgguuaucaccaucaaaaugagcaggggucaggauaugcagccgaccugaagagcacacaaaaugccauugacaagauuacuaacaaaguaaauucuguuauugaaaagaugaauacacaguucacagcaguggguaaagaguucaaccaccuggaaaaaagaauagagaauuuaaauaaaaaaguugaugaugguuuccuggacauuuggacuuacaaugccgaacuguugguucuauuggaaaaugaaagaacuuuggacuaccacgauucaaaugugaagaacuuguaugaaaagguaagaaaccaguuaaaaaacaaugccaaggaaauuggaaacggcugcuuugaauuuuaccacaaaugcgauaacacgugcauggaaagugucaaaaaugggacuuaugacuacccaaaauacucagaggaagcaaaauuaaacagagaaaaaauagaugggguaaagcuggaaucaacaaggauuuaccagauuuuggcgaucuauucaacugucgccaguucauugguacugguagucucccugggggcaaucaguuucuggaugugcucuaaugggucucuacaguguagaauauguauuuaa

SEQ ID NO: 43702 - RNA, 1701 nt, Artificial Sequence; identical to SEQ ID NO: 41901
  derived and/or modified CDS sequence (wt) from hemagglutinin__InfluenzaA__AHL99367

SEQ ID NO: 43703 - RNA, 1701 nt, Artificial Sequence
  derived and/or modified CDS sequence (wt) from hemagglutinin__InfluenzaA__AHL99379
augaaggcaauacuaguaguuaugcuauauacauuugcaaccgcaaaugcagacacauuauguauagguuaucaugcgaacaauucaacagacacuguagacacaguacuagaaaagaauguaacaguaacacacucuguuaaucuucuagaagacaagcauaacgggaaacuaugcaaacuaagagggguagccccauugcauuuggguaaauguaacauugcuggcuggauccugggaaauccagagugugaaucacucuccacagcaagcucaugguccuacauuguggaaacaucugguucagacaauggaacguguuacccaggagauuucaucgauuaugaggagcuaagagagcaauugagcucagugucaucauuugaaagguuugagauauuccccaaaacaaguucauggcccaaucaugacucgaacaaagguguaacggcagcauguccucaugcuggagcaaaaggcuucuacaaaaauuuaauauggcuaguuaaaaaaggaaauucauacccaaagcucagcauauccuacauuaaugauaaagggaaagaaguccucgugcuauggggcauucaccauccaucuacuacugcugaccaacaaagucucuaucagaaugcagauacauauguuuuuguggggacaucaagauacagcaagaaguucaagccggaaauagcaauaagacccaaagugagggaucaagaagggagaaugaacuauuacuggacacuaguagagccgggagacaaaauaacauucgaagcaacuggaaaucuagugguaccgagauaugcauuugcaauggaaagaaaugcuggaucugguauuaucauuucagauacaccaguucacgauugcaauacaacuugucagacacccaagggugcuauaaacaccagccucccauuucagaauauacauccgaucacaauuggaaaauguccaaaauauguaaaaagcacaaaauugagacuggccacaggauugaggaaugucccgucuauucaaucuagaggccuauuuggggccauugcuggcuucauugaagggggauggacagggaugguagauggaugguacgguuaucaccaucaaaaugagcaggggucaggauaugcagccgaccugaagagcacacagaaugccauugacaagauuacuaacaaaguaaauucuguuauugaaaagaugaauacacaguucacagcaguagguaaagaguucaaccaccuggaaaaaagaauagagaauuuaaauaaaaaaguugaugaugguuuccuggacauuuggacuuacaaugccgaacuguugguucuauuggaaaaugaaagaacuuuggacuaccacgauucaaaugugaagaacuuauaugaaaagguaagaaaccaguuaaaaaacaaugccaaagaaauuggaaauggcugcuuugaauuuuaccacaaaugcgauaacacgugcauggaaagugucaaaaaugggacuuaugauuacccaaaauacucagaggaagcaaaauuaaacagagaaaaaauagaugggguaaagcuggaaucaacaaggauuuaccagauuuuggcgaucuauucaacugccgcuaguucauugguacugguagucucccugggggcaaucaguuuuuggaugugcucuaaugggucucuacaguguagaauauguauuuga

SEQ ID NO: 43704 - RNA, 1701 nt, Artificial Sequence
  derived and/or modified CDS sequence (wt) from hemagglutinin__InfluenzaA__AHL99390
augaagacuaucauugcuuugagcuacauucuaugucugguuuucgcucaaaaacuuccuggaaaugacaauagcacggcaacgcugugccuugggcaccaugcaguaccaaacggaacgauagugaaaacaaucacgaaugaccgaauugaaguuacuaaugcuacugagcugguucaaaauuccucaauaggugaaauaugcgacaguccucaucagauucuugauggagaaaacugcacacuaauagaugcucuauugggagacccucagugugauggcuuucaaaauaagaaaugggaccuuuuuguugaacgaagcaaagccuacagcaacuguuacccuuaugaugugccggauuaugccucccuuaggucacuaguugccucauccggcacacuggaguuuaacaaugaaagcuucaauuggacuggagucacucaaaacggaacaaguucugcuugcauaaggagaucuaauaguaguuucuuuaguagauuaaauugguugacccacuuaaacuucaaauacccagcauugaacgugacuaugccaaacaaugaacaauuugacaaauuguacauuugggggguucaccacccagguacggacaaggaccaaaucuuccuguaugcucaaucaucaggaagaaucacaguaucuaccaaaagaagccaacaagcuguaaucccaaauaucggaucuagacccagaauaaggaauaucccuagcagaauaagcaucuauuggacaauaguaaaaccgggagacauacuuuugauuaacagcacagggaaucuaauugcuccuagggguuacuucaaaauacaaagugggaaaagcucaauaaugagaucagaugcacccauuggcaaaugcaagucugaaugcaucacuccaaauggaagcauucccaaugacaaaccauuccaaaauguaaacaggaucacauacggggccugucccagauauguuaagcaaagcacucugaaauuggcaacaggaaugcgaaauguaccagagaaacaaacuagaggcauauuuggcgcaauagcagguuucauagaaaaugguugggagggaaugguggaugguugguacgguuucaggcaucaaaauucugagggaagaggacaagcagcagaucucaaaagcacccaagcagcaaucgaucaaaucaaugggaagcugaaucgauugaucgggaaaaccaacgagaaauuccaucagauugaaaaagaauucucagaaguagaagggagaauucaggaccuugagaaauauguugaggacacuaaaauagaucucuggucauacaacgcggagcuucuuguugcccuggagaaccaacauacaauugaucuaacugacucagaaaugaacaaacuguuugaaaaaacaaagaagcaacugagggaaaaugcugaggauaugggcaaugguuguuucaaaauauaccacaaaugugacaaugccugcauaggaucaauaagaaauggaacuuaugaccacaauguguacagggaugaagcauuaaacaaccgguuccagaucaagggaguugagcugaagucaggguacaaagauuggauccuauggauuuccuuugccauaucauguuuuuugcuuuguguugcuuuguugggguucaucaugugggccugccaaaagggcaacauuaggugcaacauuugcauuuga

SEQ ID NO: 43705 - RNA, 1701 nt, Artificial Sequence; identical to SEQ ID NO: 42048
  derived and/or modified CDS sequence (wt) from hemagglutinin__InfluenzaA__AHL99402

SEQ ID NO: 43706 - RNA, 1701 nt, Artificial Sequence
  derived and/or modified CDS sequence (wt) from hemagglutinin__InfluenzaA__AHL99426
augaagacuaucauugcuuugagcuacauucuaugucugguuuucgcucaaaaacuuccuggaaaugacaauagcacggcaacgcugugccuugggcaccaugcaguaccaaacggaacgauagugaaaacaaucacgaaugaccgaauugaaguuacuaaugcuacugagcugguucagaauuccucaauaggugaaauaugcgacaguccucaucagauccuugauggagaaaacuguacacuaauagaugcucuauugggagacccucagugugauggcuuucaaaauaagaaaugggaccuuuuuguugaacgaagcaaagccuacagcaacuguuacccuuaugaugugccggauuaugccucccuuaggucacuaguugccucauccggcacacuggaguuuaacaaugaaagcuucaauuggacuggagucacucaaaacggaacaaguucugcuugcauaaggagaucuaauaguaguuucuuuaguagauuaaauugguugacccacuuaaacuucaaauacccagcauugaacgugacuaugccaaacaaugaacaauuugacaaauuguacauuugggggguucaccacccggguacggacaaggaccaaaucuuccuguaugcucaaucaucaggaagaaucacaguaucuaccaaaagaagccaacaagcuguaaucccgaauaucggaucuagacccagaauaaggaauaucccuagcagaauaagcaucuauuggacaauaguaaaaccaggagacauacuuuugauuaacagcacagggaaucuaauugcuccuagggguuacuucaaaauacgaagugggaaaagcucaaugaugagaucagaugcacccauuggcaaaugcaagucugaaugcaucacuccaaauggaagcauuccaaaugacaaaccauuccaaaauguaaacaggaucacauacggggccugucccagauauguuaagcaaagcacucugaaauuggcaacaggaaugcgaaacguaccagagaaacaaacuagaggcauauuuggcgcaauagcggguuucauagaaaaugguugggagggaaugguggaugguugguacgguuucaggcaucaaaauucugagggaagaggacaagcagcagaucucaaaagcacucaagcagcaaucgaucaaaucaaugggaagcugaaucgauugaucgggaaaaccaacgagaaauuccaucagauugaaaaagaauucucagaaguagaagggagaauucaggaccuugagaaauauguugaggacacuaaaauagaucucuggucauacaacgcggagcuucuuguugcccuggagaaccaacauacaauugaucuaacugacucagaaaugaacaaacuguuugaaaaaacaaagaagcaacugagggaaaaugcugaggauaugggcaaugguuguuucaaaauauaccacaaaugcgacaaugccugcauaggaucaaucagaaauggaacuuaugaccacgauguauacagggaugaagcauuaaacaaccgguuccagaucaagggaguugagcugaagucaggguacaaagauuggauccuauggauuuccuuugccauaucauguuuuuugcuuuguguugcuuuguugggguucaucaugugggccugccaaaagggcaacauuaggugcaacauuugcauuuga

SEQ ID NO: 43707 - RNA, 1701 nt, Artificial Sequence
  derived and/or modified CDS sequence (wt) from hemagglutinin__InfluenzaA__AHL99438
augaagacuaucauugcuuugagcuacauucuaugucugguuuucgcucaaaaacuuccuggaaaugacaauagcacggcaacgcugugccuugggcaccaugcaguaccaaacggaacgauagugaaaacaaucacgaaugaccgaauugaaguuacuaaugcuacugagcugguucagaauuccucaauaggugaaauaugcgacaguccucaucagauccuugauggagaaaacugcacacuaauagaugcucuauugggagacccucagugugauggcuuucaaaauaagaaaugggaccuuuuuguugaacgaagcaaagccuacagcaacuguuacccuuaugaugugccggauuaugccucccuuaggucacuaguugccucauccggcacacuggaguuuaacaaugaaagcuucaauuggacuggagucacucaaaacggaacaaguucugcuugcauaaggagaucuaauaguaguuucuuuaguagauuaaauugguugacccacuuaaacuucaaauacccagcauugaacgugacuaugccaaacaaugaacaauuugacaaauuguacauuugggggguucaccacccggguacggacaaggaccaaaucuuccuguaugcucaaucaucaggaagaaucacaguaucuaccaaaagaagccaacaagcuguaaucccgaauaucggaucuagacccagaauaaggaauaucccuagcagaauaagcaucuauuggacaauaguaaaaccgggagacauacuuuugauuaacagcacagggaaucuaauugcuccuagggguuacuucaaaauacaaagugggaaaagcucaauaaugagaucagaugcacccauuggcaaaugcaagucugaaugcaucacuccaaauggaagcauucccaaugacaaaccauuccaaaauguaaacaggaucacauacggggccugucccagauauguuaagcaaagcacucugaaauuggcaacaggaaugcgaaauguaccagagaaacaaacuagaggcauauuuggcgcaauagcggguuucauagaaaaugguugggagggaaugguugaugguugguacgguuucaggcaucaaaauucugagggaagaggacaagcagcagaucucaaaagcacucaagcagcaaucgaucaaaucaaugggaagcugaaucgauugaucgggaaaaccaacgagaaauuccaucagauugaaaaagaauucucagaaguagaagggagaauucaggaccuugagaaauauguugaggacacuaaaauagaucucuggucauacaacgcggagcuucuuguugcccuggagaaccaacauacaauugaucuaacugacucagaaaugaacaaacuguuugaaaaaacaaagaagcaacugagggaaaaugcugaggauaugggcaaugguuguuucaaaauauaccacaaaugugacaaugccugcauaggaucaaucagaaauggaacuuaugaccacgauguauacagggaugaagcauuaaacaaccgguuccagaucaagggaguugagcugaagucaggguacaaagauuggauccuauggauuuccuuugccauaucauguuuuuugcuuuguguugcuuuguugggguucaucaugugggccugccaaaagggcaacauuaggugcaacauuugcauuuga

SEQ ID NO: 43708 - RNA, 1701 nt, Artificial Sequence; identical to SEQ ID NO: 42583
  derived and/or modified CDS sequence (wt) from hemagglutinin__InfluenzaA__AHL99450

SEQ ID NO: 43709 - RNA, 1701 nt, Artificial Sequence; identical to SEQ ID NO: 42490
  derived and/or modified CDS sequence (wt) from hemagglutinin__InfluenzaA__AHL99462

SEQ ID NO: 43710 - RNA, 1701 nt, Artificial Sequence; identical to SEQ ID NO: 43695
  derived and/or modified CDS sequence (wt) from hemagglutinin__InfluenzaA__AHL99474

SEQ ID NO: 43711 - RNA, 1701 nt, Artificial Sequence; identical to SEQ ID NO: 42035
  derived and/or modified CDS sequence (wt) from hemagglutinin__InfluenzaA__AHL99486

SEQ ID NO: 43712 - RNA, 1701 nt, Artificial Sequence
  derived and/or modified CDS sequence (wt) from hemagglutinin__InfluenzaA__AHL99498
augaagacuaucauugcuuugagcuacauucuaugucugguuuucgcucaaaaacuuccuggaaaugacaauagcacggcaacgcugugccuugggcaccaugcaguaccaaacggaacgauagugaaaacaaucacgaaugaccgaauugaaguuacuaaugcuacugagcugguucagaauuccucaauaggugaaauaugcgacaguccucaucagauccuugauggagaaaacugcacacuaauagaugcucuauugggagacccucagugugauggcuuucaaaauaagaaaugggaccuuuuuguugaacgaagcaaagccuacagcaacuguuacccuuaugaugugccggauuaugccucccuuaggucacuaguugccucauccggcacacuggaguuuaacaaugaaagcuucaauugggcuggagucacucaaaacggaacaaguucugcuugcauaaggggaucuaauaguaguuucuuuaguagauuaaauugguugacccacuuaaacuucaaauacccagcauugaacgugacuaugccaaacaaugaacaauuugacaaauuguacauuugggggguucaccacccggguacggacaaggaccaaaucuuccuguaugcucaaucaucaggaagaaucacaguaucuaccaaaagaagccaacaagcuguaaucccgaauaucggaucuagacccagaauaaggaauaucccuagcagaauaagcaucuauuggacaauaguaaaaccgggagacauacuuuugauuaacagcacagggaaucuaauugcuccuagggguuacuucaaaauacgaagugggaaaagcucaauaaugagaucagaugcacccauuggcaaaugcaagucugaaugcaucacuccaaauggaagcauucccaaugacaaaccauuccaaaauguaaacaggaucacauacggggccugucccagauauguuaagcaaagcacucugaaauuggcaacaggaaugcgaaauguaccagagaaacaaacuagaggcauauuuggcgcaauagcggguuucauagaaaaugguugggagggaaugguggaugguugguacgguuucaggcaucaaaauucugagggaagaggacaagcagcagaucucaaaagcacucaagcagcgaucgaucaaaucaaugggaagcugaaucgauugaucgggaaaaccaacgagaaauuccaucagauugaaaaagaauucucagaaguagaagggagaauucaggaccuugagaaauauguugaggacacaaaaauagaucucuggucauacaacgcggagcuucuuguugcccuggagaaccaacauacaauugaucuaacugacucagaaaugaacaaacuguuugaaaaaacaaagaagcaacugagggaaaaugcugaggauaugggcaaugguuguuucaaaauauaccacaaaugugacaaugccugcauaggaucaaucagaaauggaacuuaugaccacgauguauacagggaugaagcauuaaacaaccgguuccagaucaagggaguugagcugaagucaggguacaaagauuggauccuauggauuuccuuugccauaucauguuuuuugcuuuguguugcuuuguugggguucaucaugugggccugccaaaagggcaacauuaggugcaacauuugcauuuga

SEQ ID NO: 43713 - RNA, 1701 nt, Artificial Sequence
  derived and/or modified CDS sequence (wt) from hemagglutinin__InfluenzaA__AHL99510
augaagacuaucauugcuuugagcuacauucuaugucugguuuucgcucaaaaacuuccuggaaaugacaauagcacggcaacgcugugccuugggcaccaugcaguaccaaacggaacgauagugaaaacaaucacgaaugaccgaauugaaguuacuaaugcuacugagcugguucagaauuccucaauaggugaaauaugcgacaguccucaucagauucuugauggagaaaacugcacacuaauagaugcucuauugggagacccucagugugauggcuuucaaaauaagaaaugggaccuuuuuguugaacgaagcaaagccuacagcaacuguuacccuuaugaugugccggauuaugccucccuuaggucacuaguugccucauccggcacacuggaguuuaacaaugaaagcuucaauuggacuggagucacucaaaacggaacaaguucugcuugcauaaggagaucuaauaguaguuucuuuaguagauuaaauugguugacccacuuaaacuucaaauacccagcauugaacgugacuaugccaaacaaugaacaauuugacaaauuguacauuugggggguucaccacccagguacggacaaggaccaaaucuuccuguaugcucaaucaucaggaagaaucacaguaucuaccaaaagaagccaacaagcuguaaucccaaauaucggaucuagacccagaauaaggaauaucccuagcagaauaagcaucuauuggacaauaguaaaaccgggagacauacuuuugauuaacagcacagggaaucuaauugcuccuagggguuacuucaaaauacgaagugggaaaagcucaauaaugagaucagaugcacccauuggcaaaugcaagucugaaugcaucacuccaaauggaagcauucccaaugacaaaccauuccaaaauguaaacaggaucacauacggggccugucccagauauguuaagcaaagcacucugaaauuggcaacaggaaugcgaaauguaccagagaaacaaacuagaggcauauuuggcgcaauagcagguuucauagaaaaugguugggagggaaugguggaugguugguacgguuucaggcaucaaaauucugagggaagaggacaagcagcagaucucaaaagcacccaagcagcaaucgaucaaaucaaugggaagcugaaucgauugaucgggaaaaccaacgagaaauuccaucaaauugaaaaagaauucucagaaguagaagggagaauucaggaccuugagaaauauguugaggacacuaaaauagaucucuggucauacaacgcggagcuucuuguugcccuggagaaccaacauacaauugaucuaacugacucagaaaugaacaaacuguuugaaaaaacaaagaagcaacugagggaaaaugcugaggauaugggcaaugguuguuucaaaauauaccacaaaugugacaaugccugcauaggaucaauaagaaauggaacuuaugaccacaauguguacagggaugaagcauuaaacaaccgguuccagaucaagggaguugagcugaagucaggguacaaagauuggauccuauggauuuccuuugccauaucauguuuuuugcuuuguguugcuuuguugggguucaucaugugggccugccaaaagggcaacauuaggugcaacauuugcauuuga

SEQ ID NO: 43714 - RNA, 1701 nt, Artificial Sequence; identical to SEQ ID NO: 41870
  derived and/or modified CDS sequence (wt) from hemagglutinin__InfluenzaA__AHL99522

SEQ ID NO: 43715 - RNA, 1701 nt, Artificial Sequence
  derived and/or modified CDS sequence (wt) from hemagglutinin__InfluenzaA__AHL99534
augaagacuaucauugcuuugagcuacauucuaugucugguuuucgcucaaaaacuuccuggaaaugacaauagcacggcaacgcugugccuugggcaccaugcaguaccaaacggaacgauagugaaaacaaucacgaaugaccgaauugaaguuacuaaugcuacugagcugguucagaauuccucaauaggugaaauaugcgacaguccucaucagauccuugauggagaaaacuguacacuaauagaugcucuauugggagacccucagugugauggcuuucaaaauaagaaaugggaccuuuuuguugaacgaagcaaagccuacagcaacuguuacccuuaugaugugccggauuaugccucccuuaggucacuaguugccucauccggcacacuggaguuuaacaaugaaagcuucaauuggacuggagucacucaaaacggaacaaguucugcuugcauaaggagaucuaauaguaguuucuuuaguagauuaaauugguugacccacuuaaacuucaaauacccagcauugaacgugacuaugccaaacaaugaacaauuugacaaauuguacauuugggggguucaccacccggguacggacaaggaccaaaucuuccuguaugcucaaucaucaggaagaaucacaguaucuaccaaaagaagccaacaagcuguaaucccgaauaucggaucuagacccagaauaaggaauaucccuagcagaauaagcaucuauuggacaauaguaaaaccaggagacauacuuuugauuaacagcacagggaaucuaauugcuccuaggggguacuucaaaauacgaagugggaaaagcucaauaaugagaucagaugcacccauuggcaaaugcaagucugaaugcaucacuccaaauggaagcaucccaaaugacaaaccauuccaaaauguaaacaggaucacauacggggccugucccagauauguuaagcaaagcacucugaaauuggcaacaggaaugcgaaauguaccagagaaacaaacuagaggcauauuuggcgcaauagcggguuucauagaaaaugguugggagggaaugguggaugguugguacgguuucaggcaucaaaauucugagggaagaggacaagcagcagaucucaaaagcacucaagcagcaaucgaucaaaucaaugggaagcugaaucgauugaucgggaaaaccaacgagaaauuccaucagauugaaaaagaauucucagaaguagaagggagaauucaggaccuugagaaauauguugaggacacuaaaauagaucucuggucauacaacgcggagcuucuuguugcccuggagaaccaacauacaauugaucuaacugacucagaaaugaacaaacuguuugaaaaaacaaagaagcaacugagggaaaaugcugaggauaugggcaaugguuguuucaaaauauaccacaaaugugacaaugccugcauaggaucaaucagaaauggaacuuaugaccacgauguauacagggaugaagcauuaaacaaccgguuccagaucaagggaguugagcugaagucaggguacaaagauuggauccuauggauuuccuuugccauaucauguuuuuugcuuuguguugcuuuguugggguucaucaugugggccugccaaaagggcaacauuaggugcaacauuugcauuuga

SEQ ID NO: 43716 - RNA, 1701 nt, Artificial Sequence
  derived and/or modified CDS sequence (wt) from hemagglutinin__InfluenzaA__AHL99546
augaagacuaucauugcuuugagcuacauucuaugucugguuuucgcucaaaaacuuccugggaaugacaauagcacggcaacgcugugccuugggcaccaugcaguaccaaacggaacgauagugaaaacaaucacgaaugaccgaauugaaguuacuaaugcuacugagcugguucagaauuccucaauaggugaaauaugcgacaguccucaucagauccuugauggagaaaauugcacacuaauagaugcucuauugggagacccucagugugauggcuuucaaaauaagaaaugggaccuuuuuguugaacgaagcaaagccuacagcaacuguuacccuuaugaugugccggauuaugccucccuuaggucacuaguugccucauccggcacacuggaguuuaacaaugaaagcuucaauuggacuggagucacucaaaacggaacaaguucugcuugcauaaggagaucuaauaguaguuucuuuaguagauuaaauugguugacccacuuaaacuucaaauacccagcauugaacgugacuaugccaaacaaugaacaauuugacaaauuguacauuuggggaguucaccacccggguacggacaaggaccaaaucuuccuguaugcucaaucaucaggaagaaucacaguaucuaccaaaagaagccaacaagcuguaaucccaaauaucggaucuagacccagaauaaggaauaucccuagcagaauaagcaucuauuggacaauaguaaaaccgggagacauacuuuugauuaacagcacaggaaaucuaauugcuccuagggguuacuucaaaauacgaagugggaaaagcucaauaaugagaucagaugcacccauuggcaaaugcaagucugaaugcaucacuccaaauggaagcauucccaaugacaaaccauuccaaaauguaaacaggaucacauacggggccugucccagauauguuaagcaaagcacucugaaauuggcaacaggaaugcgaaauguaccagagaaacaaacuagaggcauauuuggcgcaauagcggguuucauagaaaaugguugggagggaaugguggaugguugguacgguuucaggcaucaaaauucugagggaagaggacaagcagcagaucucaaaagcacucaagcagcaaucgaucaaaucaaugggaagcugaaucgauugaucgggaaaaccaacgagaaauuccaucagauugaaaaagaauucucagaaguagaagggagaauucaggaccuugagaaauauguugaggacacuaaaauagaucucuggucauacaacgcggagcuucuuguugcccuggagaaucaacauacaauugaucuaacugacucagaaaugaacaaacuguuugaaaaaacaaagaagcaacugagggaaaaugcugaggauaugggcaaugguuguuucaaaauauaccacaaaugugacaaugccugcauaggaucaaucagaaauggaacuuaugaccacaauguguacagggaugaagcauuaaacaaccgguuccagaucaagggaguugagcuuaagucaggguacaaagauuggauccuauggauuuccuuugccauaucauguuuuuugcuuuguguugcuuuguugggguucaucaugugggccugccaaaagggcaacauuaggugcaacauuugcauuuga

SEQ ID NO: 43717 - RNA, 1701 nt, Artificial Sequence
  derived and/or modified CDS sequence (wt) from hemagglutinin__InfluenzaA__AHL99558
augaagacuaucauugcuuugagcuacauucuaugucugguuuucgcucaaaaacuuccuggaaaugacaauagcacggcaacgcugugccuugggcaccaugcaguaccaaacggaacgauagugaaaacaaucacgaaugaccgaauugaaguuacuaaugcuacugagcugguucagaauuccucaauaggugaaauaugcgacaguccucaucagauucuugauggagaaaacugcacacuaauagaugcucuauugggagacccucagugugauggcuuucaaaauaagaaaugggaccuuuuuguugaacgaagcaaagccuacagcaacuguuacccuuaugaugugccggauuaugccucccuuaggucacuaguugccucauccggcacacuggaguuuaacaaugaaagcuucaauuggacuggagucacucaaaacggaacaaguucugcuugcauaaggagaucuaauaguaguuucuuuaguagauuaaauugguugacccacuuaaacuucaaauacccagcauugaacgugacuaugccaaacaaugaacaauuugacaaauuguacauuugggggguucaccacccagguacggacaaggaccaaaucuuccuguaugcucaaucaucaggaagaaucacaguaucuaccaaaagaagccaacaagcuguaaucccaaauaucggaucuagacccagaauaaggaauaucccuagcagaauaagcaucuauuggacaauaguaaaaccgggagacauacuuuugauuaacagcacagggaaucuaauugcuccuagggguuacuucaaaauacgaagugggaaaagcucaauaaugagaucagaugcacccauuggcaaaugcaagucugaaugcaucacuccaaauggaagcauucccaaugacaaaccauuccaaaauguaaacaggaucacauacggggccugucccagauauguuaagcaaagcacucugaaauuggcaacaggaaugcgaaauguaccagagaaacaaacuagaggcauauuuggcgcaauagcagguuucauagaaaaugguugggagggaaugguggaugguugguacgguuucaggcaucaaaauucugagggaagaggacaagcagcagaucucaaaagcacucaagcagcaaucgaucaaaucaaugggaagcugaaucgauugaucgggaaaaccaacgagaaauuccaucagauugaaaaagaauucucagaaguagaagggagaauucaggaccuugagaaauauguugaggacacuaaaauagaucucuggucauacaacgcggagcuucuuguugcccuggagaaccaacauacaauugaucuaacugacucagaaaugaacaaacuguuugaaaaaacaaagaagcaacugagggaaaaugcugaggauaugggcaaugguuguuucaaaauauaccacaaaugugacaaugccugcauaggaucaauaagaaauggaacuuaugaucacaauguguacagggaugaagcauuaaacaaccgguuccagaucaagggaguugagcugaagucaggguacaaagauuggauccuauggauuuccuuugccauaucauguuuuuugcuuuguguugcuuuguugggguucaucaugugggccugccaaaagggcaacauuaggugcaacauuugcauuuga

SEQ ID NO: 43718 - RNA, 1701 nt, Artificial Sequence
  derived and/or modified CDS sequence (wt) from hemagglutinin__InfluenzaA__AHL99570
augaagacuaucauugcuuugagcuacauucuaugucugguuuucgcucaaaaacuuccuggaaaugacaauagcacggcaacgcugugccuugggcaccaugcaguaccaaacggaacgauagugaaaacaaucacgaaugaccgaauugaaguuacuaaugcuacugagcugguucagaauuccucaauaggugaaauaugcgacaguccucaucagauccuugauggagaaaacuguacacuaauagaugcucuauugggagacccucagugugauggcuuucaaaauaagaaaugggaccuuuuuguugaacgaagcaaagccuacagcagcuguuacccuuaugaugugccggauuaugccucccuuaggucacuaguugccucauccggcacacuggaguuuaacaaugaaagcuucaauuggacuggagucacucaaaacggaacaaguucugcuugcauaaggagaucuaauaguaguuucuuuaguagauuaaauugguugacccacuuaaacuucaaauacccagcauugaacgugacuaugccaaacaaugaacaauuugacaaauuguacauuugggggguucaccacccggguacggacaaggaccaaaucuuccuguaugcucaaucaucaggaagaaucacaguaucuaccaaaagaagccaacaagcuguaaucccgaauaucggaucuagacccagaauaaggaauauaccuagcagaauaagcaucuauuggacaauagugaaaccaggagacauacuuuugauuaacagcacagggaaucuaauugcuccuagggguuacuucaaaauacgaagugggaaaagcucaauaaugagaucagaugcacccauuggcaaaugcaagucugaaugcaucacuccaaauggaagcauuccaaaugacaaaccauuccaaaauguaaacaggaucacauacggggccugucccagauauauuaagcaaagcacucugaaauuggcaacaggaaugcgaaacguaccagagaaacaaacuagaggcauauuuggcgcaauagcggguuucauagaaaaugguugggagggaaugguggaugguugguacgguuucaggcaucaaaauucugagggaagaggacaagcagcagaucucaaaagcacucaagcagcaaucgaucaaaucaaugggaagcugaaucgauugaucgggaaaaccaacgagaaauuccaucagauugaaaaagaauucucagaaguagaagggagaauucaggaccuugagaaauauguugaggacacuaaaauagaucucuggucauacaacgcggagcuucuuguugccuuggagaaccaacauacaauugaucuaacugacucagaaaugaacaaacuguuugaaaaaacaaagaagcaacugagggaaaaugcugaggauaugggcaaugguuguuucaaaauauaccacaaaugugacaaugccugcauaggaucaaucagaaauggaacuuaugaccacgauguauacagggaugaagcauuaaacaaccgguuccagaucaagggaguugagcugaagucaggguacaaagauuggauccuauggauuuccuuugccauaucauguuuuuugcuuuguguugcuuuguugggguucaucaugugggccugccaaaagggcaacauuaggugcaacauuugcauuuga

SEQ ID NO: 43719 - RNA, 1701 nt, Artificial Sequence; identical to SEQ ID NO: 42048
  derived and/or modified CDS sequence (wt) from hemagglutinin__InfluenzaA__AHL99582

SEQ ID NO: 43720 - RNA, 1701 nt, Artificial Sequence
  derived and/or modified CDS sequence (wt) from hemagglutinin__InfluenzaA__AHL99594
augaaggcaauacuaguaguuaugcuauauacauuugcaaccgcaaaugcagacacauuauguauagguuaucaugcgaacaauucaacagacacuguagacacaguacuagaaaagaauguaacaguaacacacucuguuaaucuucuagaagacaagcauaacgggaaacuaugcaaacuaagagggguagccccauugcauuuggguaaauguaacauugcuggcuggauccugggaaauccagagugugaaucacucuccacagcaagcucaugguccuacauuguggaaacaucugguucagacaauggaacguguuacccaggagauuucaucgauuaugaggagcuaagagagcaauugagcucagugucaucauuugaaagguuugagauauuccccaaaacaaguucauggccaaaucaugacucgaacaaagguguaacggcagcauguccucgugcuggagcaaaaggcuucuacaaaaauuuaauauggcuaguuaaaaaagggaauucauacccaaagcucagcauauccuacauuaaugacaaagggaaagaaguccucgugcuauggggcauucaccauccaucuacuacugcugaccaacaaagucucuaucagaaugcagauacauauguuuuuguggggacaucaagauacagcaagaaguucaagccggaaauagcaauaagacccaaagugagggaucaagaagggagaaugaacuauuacuggacacuaguagagccgggagacaaaauaacauucgaagcaacuggaaaucuagugguaccgagauaugcauuugcaauggaaagaaaugcuggaucugguauuaucauuucagauacaccaguucacgauugcaauacaacuugucagacacccaagggugcuauaaacaccagccucccauuucagaauauacauccgaucacaauuggaaaauguccaaaauauguaaaaagcacaaaauugagacuggccacaggauugaggaaugucccgucuauucaaucuagaggccuauuuggggccauugcuggcuucauugaagggggguggacagggaugguagauggaugguacgguuaucaccaucaaaaugagcaggggucaggauaugcagccgaccugaagagcacacagaaugccauugacaagauuacuaacaaaguaaauucuguuauugaaaagaugaauacacaguucacagcaguagguaaagaguucaaccaccuggaaaaaagaauagagaauuuaaauaaaaaaguugaugaugguuuccuggacauuuggacuuacaaugccgaacuguugguucuauuggaaaaugaaagaacuuuggacuaccacgauucaaaugugaagaacuuauaugaaaagguaagaaaccaguuaaaaaacaaugccaaggaaauuggaaauggcugcuuugaauuuuaccacaaaugcgauaacacgugcauggaaagugucaaaaaugggacuuaugauuacccaaaauacucagaggaagcaaaauuaaacagagaagaaauagaugggguaaagcuggaaucaacaaggauuuaccagauuuuggcgaucuauucaacugccgcuaguucauugguacugguagucucccugggggcaaucaguuuuuggaugugcucuaaugggucucuacaguguagaauauguauuuaa

SEQ ID NO: 43721 - RNA, 1701 nt, Artificial Sequence; identical to SEQ ID NO: 42490
  derived and/or modified CDS sequence (wt) from hemagglutinin__InfluenzaA__AHL99605

SEQ ID NO: 43722 - RNA, 1701 nt, Artificial Sequence
  derived and/or modified CDS sequence (wt) from hemagglutinin__InfluenzaA__AHL99617
augaaaacuaucauugcuuugagcuacauucuaugucugguuuucgcucaaaaacuuccuggaaaugacaauagcacggcaacgcugugccuugggcaccaugcaguaccaaacggaacgauagugaaaacaaucacgaaugaccaaauugaaguuacuaaugcuacugagcugguucagaauuccucaauaggugaaauaugcgacaguccucaucagauccuugauggagaaaacugcacacuaauagaugcucuauugggagacccucagugugauggcuuucaaaauaagaaaugggaccuuuuuguugaacgaagcaaagccuacagcaacuguuacccuuaugaugugccggauuaugccucccuuaggucacuaguugccucauccggcacacuggaguuuaacaaugaaagcuucaauugggcuggagucacucaaaacggaacaaguucugcuugcauaaggggaucuaauaguaguuucuuuaguagauuaaauugguugacccacuuaaacuucaaguacccagcauugaacgugacuaugccaaacaaugaacaauuugacaaauuguacauuugggggguucaccacccggguacggacaaggaccaaaucuuccuguaugcucaaucaucaggaagaaucacaguaucuaccaaaagaagccaacaagcuguaaucccgaauaucggaucuagacccagaauaaggaauaucccuagcagaauaagcaucuauuggacaauaguaaaaccgggagacauacuuuugauuaacagcacagggaaucuaauugcuccuagggguuacuucaaaauacgaagugggaaaagcucaauaaugagaucagaugcacccauuggcaaaugcaagucugaaugcaucacuccaaauggaagcauucccaaugacaaaccauuccaaaauguaaacaggaucacauacggggccugucccagauauguuaagcaaagcacucugaaauuggcaacaggaaugcgaaauguaccagagaaacaaacuagaggcauauuuggcgcaauagcggguuucauagaaaaugguugggagggaaugguggaugguugguacgguuucaggcaucaaaauucugagggaagaggacaagcagcagaucucaaaagcacucaagcagcaaucgaucaaaucaaugggaagcugaaucgauugaucgggaaaaccaacgagaaauuccaucagauugagaaagaauucucagaaguagaagggagaauucaggaccuugagaaauauguugaggacacaaaaauagaucucuggucauacaacgcagagcuucuuguugcccuggagaaccaacauacaauugaucuaacugacucagaaaugaacaaacuguuugaaaaaacaaagaagcaacugagggaaaaugcugaggauaugggcaaugguuguuucaaaauauaccacaaaugugacaaugccugcauaggaucaaucagaaauggaacuuaugaccacgauguauacagggaugaagcauuaaacaaccgguuccagaucaagggaguugagcugaagucaggguacaaagauuggauccuauggauuuccuuugccauaucauguuuuuugcuuuguguugcuuuguugggguucaucaugugggccugccaaaagggcaacauuaggugcaacauuugcauuuga

SEQ ID NO: 43723 - RNA, 1701 nt, Artificial Sequence
  derived and/or modified CDS sequence (wt) from hemagglutinin__InfluenzaA__AHL99629
augaagacuaucauugcuuugagcuacauucuaugucugguuuucgcucaaaaacuuccuggaaaugacaauagcacggcaacgcugugccuugggcaccaugcaguaccaaacggaacgauagugaaaacaaucacgaaugaccgaauugaaguuacuaaugcuacugagcugguucagaauuccucaauaggugaaauaugcgacaguccucaucagauucuugauggagaaaacugcacacuaauagaugcucuauugggagacccucagugugauggcuuucaaaauaagaaaugggaccuuuuuguugaacgaagcaaagccuacagcaacuguuacccuuaugaugugccggauuaugccucccuuaggucacuaguugccucauccggcacacuggaguuuaacaaugaaagcuucaauuggacuggagucacucaaaacggaacaaguucugcuugcauaaggagaucuaauaguaguuucuuuaguagauuaaauugguugacccacuuaaacuucaaauacccagcauuaaacgugacuaugccaaacaaugaacaauuugacaaauuguacauuugggggguucaccacccagguacggacaaggaccaaaucuuccuguaugcucaaucaucaggaagaaucacaguaucuaccaaaagaagccaacaagcuguaaucccaaauaucggaucuagacccagaauaaggaauaucccuagcagaauaagcaucuauuggacaauaguaaaaccgggagacauacuuuugauuaacagcacagggaaucuaauugcuccuagggguuacuucaaaauacgaagugggaaaagcucaauaaugagaucagaugcacccauuggcaaaugcaagucugaaugcaucacuccaaauggaagcauucccaaugacaaaccauuccaaaauguaaacaggaucacauacggggccugucccagauauguuaagcaaagcacucugaaauuggcaacaggaaugcgaaauguaccagagaaacaaacuagaggcauauuuggcgcaauagcagguuucauagaaaaugguugggagggaaugguggaugguugguacgguuucaggcaucaaaauucugagggaagaggacaagcagcagaucucaaaagcacccaagcagcaaucgaucaaaucaaugggaagcugaaucgauugaucgggaaaaccaacgagaaauuccaucagauugaaaaagaauucucagaaguagaagggagaauucaggaccuugagaaauauguugaggacacuaaaauagaucucuggucauacaacgcggagcuucuuguugcccuggagaaccaacauacaauugaucuaacugacucagaaaugaacaaacuguuugaaaaaacaaagaagcaacugagggaaaaugcugaggauaugggcaaugguuguuucaaaauauaccacaaaugugacaaugccugcauaggaucaauaagaaauggaacuuaugaccacaauguguacagggaugaagcauuaaacaaccgguuccagaucaagggaguugagcugaagucaggguacaaagauuggauccuauggauuuccuuugccauaucauguuuuuugcuuuguguugcuuuguugggguucaucaugugggccugccaaaagggcaacauuaggugcaacauuugcauuuga

SEQ ID NO: 43724 - RNA, 1701 nt, Artificial Sequence
  derived and/or modified CDS sequence (wt) from hemagglutinin__InfluenzaA__AHL99641
augaagacuaucauugcuuugagcuacauucuaugucugguuuucgcucaaaaacuuccuggaaaugacaauagcacggcaacgcugugccuugggcaccaugcaguaccaaacggaacgauagugaaaacaaucacgaaugaccgaauugaaguuacuaaugcuacugaacugguucagaauuccucaauaggugaaauaugcgacaguccucaucagauccuugauggagaaaacugcacacuaauagaugcucuauugggagacccucagugugauggcuuccaaaauaagaaaugggaccuuuuuguugaacgaagcaaagccuacagcaacuguuacccuuaugaugugccggauuaugccucccuuaggucacuaguugccucaucuggcacacuggaguuuaacaaugaaagcuucaauuggacuggagucacucaaaacggaacaaguucugcuugcauaaggagaucuaauaguaguuucuuuaguagauuaaauugguugacccacuuaaacuucaaauacccagcauugaacgugacuaugccaaacaaugaacaauuugacaaauuguacauuugggggguucaccacccggguacggacaaggaccaaaucuuccuguaugcucaaucaucaggaagaaucacaguaucuaccaaaagaagccaacaagcuguagucccuaauaucggaucuagacccagaauaaggaauaucccuaguagaauaagcaucuauuggacaauaguaaaaccgggagacauacuuuugauuaacagcacagggaaucuaauugcuccuagggguuacuucaaaauacgaagugggaaaagcucaauaaugagaucagaugcacccauuggcaaaugcaagucugaaugcaucacuccaaauggaagcauucccaaugacaaaccauuccaaaauguaaacaggaucacauacggggccugucccagauauguuaagcaaagcacucugaaauuggcaacagggaugcgaaauguaccagagaaacaaacuagaggcauauuuggcgcaauagcggguuucauagaaaaugguugggagggaaugguggaugguugguacgguuucaggcaucaaaauucugagggaagaggacaagcagcagaccucaaaagcacucaagcagcaaucgaucaaaucaaugggaagcugaaucgauugaucgggaaaaccaacgagaaauuccaucagauugaaaaagaauucucagaaguagaagggagaauucaggaccuugagaaauauguugaggacacuaaaauagaucucuggucauacaacgcggagcuucuuguugcccuggagaaccaacauacaauugaucuaacugacucagaaaugaacaaacuguuugaaaaaacaaagaagcaacugagagaaaaugcugaggauaugggcaaugguuguuucaaaauauaccacaaaugugacaaugccugcauaggaucaaucagaaauggaacuuauaaccacgauguauacagagaugaagcauuaaacaaccgguuccagaucaagggaguugagcugaagucaggguacaaagauuggauccuauggauuuccuuugccaugucauguuuuuugcuuuguguugcuuuguugggguucaucaugugggccugccaaaagggcaacauuaggugcaacauuugcauuuga

SEQ ID NO: 43725 - RNA, 1701 nt, Artificial Sequence
  derived and/or modified CDS sequence (wt) from hemagglutinin__InfluenzaA__AHL99665
augaagacuaucauugcuuugagcuacauucuaugucugguuuucgcucaaaaacuuccuggaaaugacaauagcacggcaacgcugugccuugggcaccaugcaguaccaaacggaacgauagugaaaacaaucacgaaugaccgaauugaaguuacuaaugcuacugagcugguucagaacuccucaauaggugaaauaugcgacaguccucaucagauccuugauggagaaaacuguacacuaauagaugcucuauugggagacccucagugugauggcuuucaaaauaagaaaugggaccuuuuuguugaacgaagcaaagccuacagcaacuguuacccuuaugaugugccggauuaugccucccuuaggucacuaguugccucauccggcacacuggaguuuaacaaugaaagcuucaauuggacuggagucacucaaaacggaacaaguucugcuugcauaaggagaucuaauaguaguuucuuuaguagauuaaauugguugacccacuuaaacuucaaauacccagcauugaacgugacuaugccaaacaaugaacaauuugacaaauuguacauuugggggguucaccacccggguacggacaaggaccaaaucuuccuguaugcucaaucaucaggaagaaucacaguaucuaccaaaagaagccaacaagcuguaaucccgaauaucggaucuagacccagaauaaggaauauaccuagcagaauaagcaucuauuggacaauagugaaaccaggagacauacuuuugauuaacagcacagggaaucuaauugcuccuagggguuacuucaaaauacgaagugggaaaagcucaauaaugagaucagaugcacccauuggcaaaugcaagucugaaugcaucacuccaaauggaagcauuccaaaugacaaaccauuccaaaauguaaacaggaucacauacggggccugucccagauauauuaagcaaagcacucugaaauuggcaacaggaaugcgaaacguaccagagaaacaaacuagaggcauauuuggcgcaauagcggguuucauagaaaaugguugggagggaaugguggaugguugguacgguuucaggcaucaaaauucugagggaagaggacaagcagcagaucucaaaagcacucaagcagcaaucgaucaaaucaaugggaagcugaaucgauugaucgggaaaaccaacgagaaauuccaucagauugaaaaagaauucucagaaguagaagggagaauucaggaccuugagaaauauguugaggacacuaaaauagaucucuggucauacaacgcggagcuucuuguugcccuggagaaccaacauacaauugaucuaacugacucagaaaugaacaaacuguuugaaaaaacaaagaagcaacugagggaaaaugcugaggauaugggcaaugguuguuucaaaauauaccacaaaugugacaaugccugcauaggaucaaucagaaauggaacuuaugaccacgauguauacagggaugaagcauuaaacaaccgguuccagaucaagggaguugagcugaagucaggguacaaagauuggauccuauggauuuccuuugccauaucauguuuuuugcuuuguguugcuuuguugggguucaucaugugggccugccaaaagggcaacauuaggugcaacauuugcauuuga

SEQ ID NO: 43726 - RNA, 1701 nt, Artificial Sequence
  derived and/or modified CDS sequence (wt) from hemagglutinin__InfluenzaA__AHL99677
augaagacuaucauugcuuugagcuacauucuaugucugguuuucgcucaaaaacuuccuggaaaugacaauagcacggcaacgcugugccuugggcaccaugcaguaccaaacggaacgauagugaaaacaaucacgaaugaccgaauugaaguuacuaaugcuacugagcugguucagaauuccucaauaggugaaauaugcgacaguccucaucagauucuugauggagaaaacugcacacuaauagaugcucuauugggagacccucagugugauggcuuucaaaauaagaaaugggaccuuuuuguugaacgaagcaaagccuacagcaacuguuacccuuaugaugugccagauuaugccucccuuaggucacuaguugccucauccggcacacuggaguuuaacaaugaaagcuucaauuggacuggagucacucaaaacggaacaaguucugcuugcauaaggagaucuaauaguaguuucuuuaguagauuaaauugguugacccacuuaaacuucaaauacccagcauugaacgugacuaugccaaacaaugaacaauuugacaaauuguacauuugggggguucaccacccagguacggacaaggaccaaaucuuccuguaugcucaaucaucaggaagaaucacaguaucuaccaaaagaagccaacaagcuguaaucccaaauaucggaucuagacccagaauaaggaauaucccuagcagaauaagcaucuauuggacaauaguaaaaccgggagacauacuuuugauuaacagcacagggaaucuaauugcuccuagggguuacuucaaaauacgaagugggaaaagcucaauaaugagaucagaugcacccauuggcaaaugcaagucugaaugcaucacuccaaauggaagcauucccaaugacaaaccauuccaaaauguaaacaggaucacauacggggccugucccagauauguuaagcaaagcacucugaaauuggcaacaggaaugcgaaauguaccagagaaacaaacuagaggcauauuuggcgcaauagcagguuucauagaaaaugguugggagggaaugguggaugguugguacgguuucaggcaucaaaauucugagggaagaggacaagcagcagaucucaaaagcacccaagcagcaaucgaucaaaucaaugggaagcugaaucgauugaucgggaaaaccaacgagaaauuccaucaaauugaaaaagaauucucagaaguagaagggagaauucaggaccuugagaaauauguugaggacacuaaaauagaucucuggucauacaacgcggagcuucuuguugcccuggagaaccaacauacaauugaucuaacugacucagaaaugaacaaacuguuugaaaaaacaaagaagcaacugagggaaaaugcugaggauaugggcaaugguuguuucaaaauauaccacaaaugugacaaugccugcauaggaucaauaagaaauggaacuuaugaccacaauguguacagggaugaagcauuaaacaaccgguuccagaucaagggaguugagcugaagucaggguacaaagauuggauccuauggauuuccuuugccauaucauguuuuuugcuuuguguugcuuuguugggguucaucaugugggccugccaaaagggcaacauuaggugcaacauuugcauuuga

SEQ ID NO: 43727 - RNA, 1701 nt, Artificial Sequence; identical to SEQ ID NO: 42019
  derived and/or modified CDS sequence (wt) from hemagglutinin__InfluenzaA__AHL99689

SEQ ID NO: 43728 - RNA, 1701 nt, Artificial Sequence
  derived and/or modified CDS sequence (wt) from hemagglutinin__InfluenzaA__AHL99701
augaagacuaucauugcuuugagcuacauucuaugucugguuuucgcucaaaaacuuccuggaaaugacaauagcacggcaacgcugugccuugggcaccaugcaguaccaaacggaacgauagugaaaacaaucacgaaugaccgaauugaaguuacuaaugcuacugagcugguucagaauuccucaauaggugaaauaugcgacaguccucaucagauccuugauggagaaaacugcacacuaauagaugcucuauugggagacccucagugugauggcuuucaaaauaagaaaugggaccuuuuuguugaacgaagcaaagccuacagcaacuguuacccuuaugauguaccagauuaugccucccuuaggucacuaguugccucauccggcacacuggaguuuaacaaugaaagcuucaauugggcuggagucacucaaaacggaacaaguucugcuugcauaaggggaucuaauaguaguuucuuuaguagauuaaauugguugacccacuuaaacuucaaauacccagcauugaacgugacuaugccaaacaaugaacaauuugacaaauuguacauuugggggguucaccacccggguacggacaaggaccaaaucuuccuguaugcucaaucaucaggaagaaucacaguaucuaccaaaagaagccaacaagcuguaaccccgaauaucggaucuagacccagaauaaggaauaucccuagcagaauaagcaucuauuggacaauaguaaaaccgggagacauacuuuugauuaacagcacagggaaucuaauugcuccuagggguuacuucaaaauacgaagugggaaaagcucaauaaugagaucagaugcacccauuggcaaaugcaagucugaaugcaucacuccaaauggaagcauucccaaugacaaaccauuccaaaauguaaacaggaucacauacggggccugucccagauauguuaagcaaagcacucugaaauuggcaacaggaaugcgaaauguaccagagaaacaaacuagaggcauauuuggcgcaauagcggguuucauagaaaaugguugggagggaaugauggaugguugguacgguuucaggcaucaaaauucugagggaagaggacaagcagcagaucucaaaagcacucaagcagcaaucgaucaaaucaaugggaagcugaaucgauugaucgggaaaaccaacgagaaauuccaucagauugaaaaagaauucucagaaguagaagggagaauucaggaccuugagaaauauguugaggacacaaaaauagaucucuggucauacaacgcggagcuucuuguugcccuggagaaccaacauacaauugaucuaacugacucagaaaugaacaaacuguuugaaaaaacaaagaagcaacugagggaaaaugcugaggauaugggcaaugguuguuucaaaauauaccacaaaugugacaaugccugcauaggaucaaucagaaauggaacuuaugaccacgauguauacagggaugaagcauuaaacaaccgguuccagaucaagggaguugagcugaagucaggguacaaagauuggauccuauggauuuccuuugccauaucauguuuuuugcuuuguguugcuuuguugggguucaucaugugggccugccaaaagggcaacauuaggugcaacauuugcauuuga

SEQ ID NO: 43729 - RNA, 1701 nt, Artificial Sequence
  derived and/or modified CDS sequence (wt) from hemagglutinin__InfluenzaA__AHL99713
augaagacuaucauugcuuugagcuacauucuaugucugguuuucgcucaaaaacuuccuggaaaugacaauagcacggcaacgcugugccuugggcaccaugcaguaccaaacggaacgauagugaaaacaaucacgaaugaccgaauugaaguuacuaaugcuacugagcugguucagaauuccucaauaggugaaauaugcgacaguccucaucagauccuugauggagaaaacuguacacuaauagaugcucuauugggagacccucagugugauggcuuucaaaauaagaaaugggaccuuuuuguugaacgaagcaaagccuacagcaacuguuacccuuaugaugugccggauuauaccucccuuaggucacuaguugccucauccggcacacuggaguuuaacaaugaaagcuucaauuggacuggagucacucaaaacggaacaaguucugcuugcauaaggagaucuaauaguaguuucuuuaguagauuaaauugguugacccacuuaaacuucaaauacccagcauugaacgugacuaugccaaacaaugaacaauuugacaaauuguacauuugggggguucaccacccggguacggacaaggaccaaaucuuccuguaugcucaaucaucaggaagaaucacaguaucuaccaaaagaagccaacaagcuguaaucccgaauaucggaucuagacccagaauaaggaauaucccuagcagaauaagcaucuauuggacaauaguaaaaccaggagacauacuuuugauuaacagcacagggaaucuaauugcuccuagggguuacuucaaaauacgaagugggaaaagcucaauaaugagaucagaugcacccauuggcaaaugcaagucugaaugcaucacuccaaauggaagcauuccaaaugacaaaccauuccaaaauguaaacaggaucacauacggggccugucccagauauguuaagcaaagcacucugaaauuggcaacaggaaugcgaaauguaccagagaaacaaacuagaggcauauuuggcgcaauagcggguuucauagaaaaugguugggagggaaugguggaugguugguacgguuucaggcaucaaaauucugagggaagaggacaagcagcagaucucaaaagcacucaagcagcaaucgaucaaaucaaugggaagcugaaucgauugaucgggaaaaccaacgagaaauuccaucagauugaaaaagaauucucagaaguagaagggagaauucaggaccuugagaaauauguugaggacacuaaaauagaucucuggucauacaacgcggagcuucuuguugcccuggagaaccaacauacaauugaucuaacugacucagaaaugaacaaacuguuugaaaaaacaaagaagcaacugagggaaaaugcugaggauaugggcaaugguuguuucaaaauauaccacaaaugugacaaugccugcauaggaucaaucagaaauggaacuuaugaccacgauguauacagggaugaagcauuaaacaaccgguuccagaucaagggaguugagcugaagucaggguacaaagauuggauccuauggauuuccuuugccauaacauguuuuuugcuuuguguugcuuuguugggguucaucaugugggccugccaaaagggcaacauuaggugcaacauuugcauuuga

SEQ ID NO: 43730 - RNA, 1701 nt, Artificial Sequence
  derived and/or modified CDS sequence (wt) from hemagglutinin__InfluenzaA__AHL99725
augaagaccaucauugcuuugagcuacauucuaugucugguuuucgcucaaaaacuuccuggaaaugacaauagcacggcaacgcugugccuugggcaccaugcaguaccaaacggaacgauagugaaaacaaucacgaaugaccgaauugaaguuacuaaugcuacugagcugguucagaauuccucaauaggugaaauaugcgacaguccucaucagauucuugauggagaaaacugcacacuaauagaugcucuauugggagacccucagugugauggcuuucaaaauaagaaaugggaccuuuuuguugaacgaagcaaagccuacagcaacuguuacccuuaugaugugccggauuaugccucccuuaggucacuaguugccucauccggcacacuggaguuuaacaaugaaagcuucaauuggacuggagucacucaaaacggaacaaguucugcuugcauaaggagaucuaauaguaguuucuuuaguagauuaaauugguugacccacuuaaacuucaaauacccagcauugaacgugacuaugccaaacaaugaacaauuugacaaauuguacauuugggggguucaccacccggguacggacaaggaccaaaucuuccuguaugcucaaucaucaggaagaaucacaguaucuaccaaaagaagccaacaagcuguaaucccaaauaucggaucuagacccagaauaaggaauauuccuagcagaauaagcaucuauuggacaauaguaaaaccgggagacauacuuuugauuaacagcacagggaaucuaauugcuccuagggguuacuucaaaauacgaagugggaaaagcucaauaaugagaucagaugcacccauuggcaaaugcaagucugaaugcaucacuccaaauggaagcauucccaaugacaaaccauuccaaaauguaaacaggaucacauacggggccugucccagauauguuaagcaaagcacucugaaauuggcaacaggaaugcgaaauguaccagagaaacaaacuagaggcauauuuggcgcaauagcagguuucauagaaaaugguugggaggggaugguggaugguugguacgguuucaggcaucaaaauucugagggaagaggacaagcagcagaucucaaaagcacccaagcagcaaucgaucaaaucaaugggaagcugaaucgauugaucgggaaaaccaacgagaaauuccaucagauugaaaaagaauucucagaaguagaagggagaauucaggaccuugagaaauauguugaggacacuaaaauagaucucuggucauacaacgcggagcuucuuguugcccuggagaaccaacauacaauugaucuaacugacucagaaaugaacaaacuguuugaaaaaacaaagaagcaacugagggaaaaugcugaggauaugggcaaugguuguuucaaaauauaccacaaaugugacaaugccugcauaggaucaauaagaaauggaacuuaugaccacaauguguacagggaugaagcauuaaacaaccgguuccagaucaagggaguugagcugaagucaggguacaaagauuggauccuauggauuuccuuugccauaucauguuuuuugcuuuguguugcuuuguugggguucaucaugugggccugccaaaagggcaacauuaggugcaacauuugcauuuga

SEQ ID NO: 43731 - RNA, 1701 nt, Artificial Sequence; identical to SEQ ID NO: 42072
  derived and/or modified CDS sequence (wt) from hemagglutinin__InfluenzaA__AHL99737

SEQ ID NO: 43732 - RNA, 1701 nt, Artificial Sequence; identical to SEQ ID NO: 43730
  derived and/or modified CDS sequence (wt) from hemagglutinin__InfluenzaA__AHL99748

SEQ ID NO: 43733 - RNA, 1701 nt, Artificial Sequence
  derived and/or modified CDS sequence (wt) from hemagglutinin__InfluenzaA__AHL99760
augaagacuaucauugcuuugagcuacauucuaugucugguuuucgcucaaaaacuuccuggaaaugacaauagcacggcaacacugugccuugggcaccaugcaguaccaaacggaacgauagugaaaacaaucacgaaugaccgaauugaaguuacuaaugcuacugagcugguucagaauuccucaauaggugaaauaugcgacaguccucaucagauucuugauggagaaaacugcacacuaauagaugcucuauugggagacccucagugugauggcuuucaaaauaagaaaugggaccuuuuuguugaacgaagcaaagccuacagcaacuguuacccuuaugaugugccggauuaugccucccuuaggucacuaguugccucauccggcacacuggaguuuaacaaugaaagcuucaauuggacuggagucacucaaaacggaacaaguucugcuugcauaaggagaucuaauaguaguuucuuuaguagauuaaauugguugacccacuuaaacuucaaauacccagcauugaacgugacuaugccaaacaaugaacaauuugacaaauuguacauuugggggguucaccacccagguacggacaaggaccaaaucuuccuguaugcucaaucaucaggaagaaucacaguaucuaccaaaagaagccaacaagcuguaaucccaaauaucgggucuagacccagaauaaggaauaucccuagcagaauaagcaucuauuggacaauaguaaaaccgggagacauacuuuugauuaacagcacagggaaucuaauugcuccuagggguuacuucaaaauacgaagugggaaaagcucaauaaugagaucagaugcacccauuggcaaaugcaagucugaaugcaucacuccaaauggaagcauucccaaugacaaaccauuccaaaauguaaacaggaucacauacggggccugucccagauauguuaagcaaagcacucugaaauuggcaacaggaaugcgaaauguaccagagaaacaaacuagaggcauauuuggcgcaauagcagguuucauagaaaaugguugggagggaaugguggaugguugguacgguuucaggcaucaaaauucugagggaagaggacaagcagcagaucucaaaagcacccaagcagcaaucgaucaaaucaaugggaagcugaaucgauugaucgggaaaaccaacgagaaauuccaucagauugaaaaagaauucucagaaguagaagggagaauucaggaccuugagaaauauguugaggacacuaaaauagaucucuggucauacaacgcggagcuucuuguugcccuggagaaccaacauacaauugaucuaacugacucagaaaugaacaaacuguuugaaaaaacaaagaagcaacugagggaaaaugcugaggauaugggcaaugguuguuucaaaauauaccacaaaugugacaaugccugcauagggucaauaagaaauggaacuuaugaccacaauguguacagggaugaagcauuaaacaaccgguuccagaucaaaggaguugagcugaagucaggguacaaagauuggauccuauggauuuccuuugccauaucauguuuuuugcuuuguguugcuuuguugggguucaucaugugggccugccaaaagggcaacauuaggugcaacauuugcauuuga

SEQ ID NO: 43734 - RNA, 1701 nt, Artificial Sequence
  derived and/or modified CDS sequence (wt) from hemagglutinin__InfluenzaA__AHL99772
augaagacuaucauugcuuugagcuacauucuaugucugguuuucgcucaaaaacuuccuggaaaugacaauagcacggcaacgcugugccuugggcaccaugcaguaccaaacggaacgauagugaaaacaaucacgaaugaccgaauugaaguuacuaaugcuacugagcugguucagaauuccucaauaggugaaauaugcgacaguccucaucagauccuugauggagaaaacugcacacuaauagaugcucuauugggagacccucagugugauggcuuucaaaauaagaaaugggaccuuuuuguugaacgaagcaaagccuacagcaacuguuacccuuaugaugugccggauuaugccucccuuaggucacuaguugccucauccggcacacuggaguuuaacaaugaaagcuucaauugggcuggagucacucaaaacggaacaaguucugcuugcauaaggggaucuaauaguaguuucuuuaguagauuaaauugguugacccacuuaaacuucaaauacccagcauugaacgugacuaugccaaacaaugaacaauuugacaaauuguacauuugggggguucaccacccggguacggacaaggaccaaaucuuccuguaugcucaaucaucaggaagaaucacaguaucuaccaaaagaagccaacaagcuguaaucccgaauaucggaucuagacccagaauaaggaauaucccuagcagaauaagcaucuauuggacaauaguaaaaccgggagacauacuuuugauuaacagcacagggaaucuaauugcuccuagggguuacuucaaaauacgaagugggaaaagcucaauaaugagaucagaugcacccauuggcaaaugcaagucugaaugcaucacuccaaauggaagcauucccaaugacaaaccauuccaaaauguaaacaggaucacauacggggccugucccagauauguuaagcaaagcacucugaaauuggcaacaggaaugcgaaauguaccagagaaacaaacuagaggcauauuuggcgcaauagcggguuucauagaaaaugguugggagggaaugauggaugguugguacgguuucaggcaucaaaauucugagggaagaggacaagcagcagaucucaaaagcacucaagcagcaaucgaucaaaucaaugggaagcugaaucgauugaucgggaaaaccaacgagaaauuccaucagauugaaaaagaauucucagaaguagaaggaagaauucaggaccuugagaaauauguugaggacacaaaaauagaucucuggucauacaacgcggagcuucuuguugcccuggagaaccaacauacaauugaucuaacugacucagaaaugaacaaacuguuugaaaaaacaaagaagcaacugagggaaaaugcugaggauaugggcaaugguuguuucaaaauauaccacaaaugugacaaugccugcauaggaucaaucagaaauggaaccuaugaccacgauguauacagggaugaagcauuaaacaaccgguuccagaucaagggaguugagcugaagucaggguacaaagauuggauccuauggauuuccuuugccauaucauguuuuuugcuuuguguugcuuuguugggguucaucaugugggccugccaaaaaggcaacauuaggugcaacauuugcauuuga

SEQ ID NO: 43735 - RNA, 1701 nt, Artificial Sequence; identical to SEQ ID NO: 41901
  derived and/or modified CDS sequence (wt) from hemagglutinin__InfluenzaA__AHL99784

SEQ ID NO: 43736 - RNA, 1701 nt, Artificial Sequence
  derived and/or modified CDS sequence (wt) from hemagglutinin__InfluenzaA__AHL99796
augaagacuaucauugcuuugagcuacauucuaugucugguuuucgcucaaaaaauuccuggaaaugacaauagcacggcaacgcugugccuugggcaccaugcaguaccaaacggaacgauagugaaaacaaucacgaaugaccgaauugaaguuacuaaugcuacugagcugguucagaauuccucaauaggugaaauaugcgacaguccucaucagauccuugauggagaaaacuguacacuaauagaugcucuauugggagacccucagugugauggcuuucaaaauaagaaaugggaccuuuuuguugaacgaagcaaagccuacagcaacuguuacccuuaugaugugccggauuaugccucccuuaggucacuaguugccucauccggcacacuggaguuuaacaaugaaagcuucaauuggacuggagucacucaaaacggaacaaguucugcuugcauaaggggaucuaauaguaguuucuuuaguagauuaaauugguugacccacuuaaacuucaaauacccagcauugaacgugacuaugccaaacaaugaacaauuugacaaauuguacauuugggggguucaccacccggguacggacaaggaccaaaucuuccuguaugcucaaucaucaggaagaaucacaguaucuaccaaaagaagccaacaagcuguaaucccgaauaucggaucuagacccagaauaaggaauaucccuagcagaauaagcaucuauuggacaauaguaaaaccaggagacauacuuuugauuaacagcacagggaaucuaauugcuccuagggguuacuucaaaauaagaagugggaaaagcucaauaaugagaucagaugcacccauuggcaaaugcaagucugaaugcaucacuccaaauggaagcauuccaaaugacaaaccauuccaaaauguaaacaggaucacauacggggccugucccagauauguuaagcaaagcacucugaaauuggcaacaggaaugcgaaauguaccagagaaacaaacuagaggcauauuuggcgcaauagcggguuucauagaaaaugguugggagggaaugguggaugguugguacgguuucaggcaucaaaauucugagggaagaggacaagcagcagaucucaaaagcacucaagcagcaaucgaucaaaucaaugggaagcugaaucgauugaucgggaaaaccaacgagaaauuccaucagauugaaaaagaauucucagaaguagaagggagaauucaggaccuugagaaauauguugaggacacuaaaauagaucucuggucauacaacgcggagcuucuuguugcccuggagaaccaacauacaauugaucuaacugacucagaaaugaacaaacuguuugaaaaaacaaagaagcaacugagggaaaaugcugaggauaugggcaaugguuguuucaaaauauaccacaaaugugacaaugccugcauaggaucaaucagaaauggaacuuaugaccacgauguauacagggaugaagcauuaaacaaccgguuccagaucaagggaguugagcugaagucaggguacaaagauuggauccuauggauuuccuuugccauaucaugcuuuuugcuuuguguugcuuuguugggguucaucaugugggccugccaaaagggcaacauuaggugcaacauuugcauuuga

SEQ ID NO: 43737 - RNA, 1701 nt, Artificial Sequence; identical to SEQ ID NO: 43605
  derived and/or modified CDS sequence (wt) from hemagglutinin__InfluenzaA__AHL99808

SEQ ID NO: 43738 - RNA, 1701 nt, Artificial Sequence
  derived and/or modified CDS sequence (wt) from hemagglutinin__InfluenzaA__AHL99820
augaagacuaucauugcuuugagcuacauucuaugucugguuuucgcucaaaaacuuccuggaaaugacaauagcacggcaacgcugugccuugggcaccaugcaguaccaaacggaacgauagugaaaacaaucacgaaugaccgaauugaaguuaccaaugcuacugaacugguucagaauuccucaauaggugaaauaugcgacaguccucaucagauccuugauggagaaaacugcacacuaauagaugcucuauugggagacccucagugugauggcuuucaaaauaagaaaugggaccuuuuuguugaacgaagcaaagccuacagcaacuguuacccuuaugaugugccggauuaugccucccuuaggucacuaguugccucauccggcacacuggaguuuaacaaugaaagcuucaauuggacuggagucacucaaaacggaacaaguucugcuugcauaaggagaucuaauaguaguuucuuuaguagauuaaauugguugacccacuuaaacuucaaauacccagcauugaacgugacuaugccaaacaaugaacaauuugacaaauuguacauuugggggguucaccacccggguacggacaaggaccaaaucuuccuguaugcucaaucaucaggaagaaucacaguaucuaccaaaagaagccaacaagcuguaaucccgaauaucggaucuagacccagaauaaggaauaucccuagcagaauaagcaucuauuggacaauaguaaaaccgggagacauacuuuugauuaacagcacagggaaucuaauugcuccuagggguuacuucaaaauacgaagugggaaaagcucaauaaugagaucagaugcacccauuggcaaaugcaagucugaaugcaucacuccaaauggaagcauucccaaugacaaaccauuccaaaauguaaacaggaucacauacggggccugucccagauauguuaagcaaagcacucugaaauuggcaacaggaaugcgaaauguaccagagaaacaaacuagaggcauauuuggcgcaauagcggguuuuauagaaaaugguugggagggaaugguggaugguugguacgguuucaggcaucaaaauucugauggaagaggacaagcagcagaucucaaaagcacucaagcagcaaucgaucaaaucaaugggaagcugaaucgauugauugggaaaaccaacgagaaauuccaucaaauugaaaaagaauucucagaaguagaagggagaauccaggaccuugagaaauauguugaggacacuaaaauagaucucuggucauacaacgcggagcuucuuguugcccuggagaaccaacauacaauugaucuaacugacucagaaaugaacaaacuguuugaaaaaacaaagaagcaacugagggaaaaugcugaggauaugggcaaugguuguuucaaaauauaccacaaaugugacaaugccugcauaggaucaaucagaaauggaacuuaugaccacgauguguacagggaugaagcauuaaacaaccgguuccagaucaagggaguugagcugaagucaggguacaaagauuggauccuauggauuuccuuugccauaucauguuuuuugcuuuguguuguuuuguugggguucaucaugugggccugccaaaagggcaacauuaggugcaacauuugcauuuga

SEQ ID NO: 43739 - RNA, 1701 nt, Artificial Sequence
  derived and/or modified CDS sequence (wt) from hemagglutinin__InfluenzaA__AHL99832
augaagacuaucauugcuuugagcuacauucuaugucugguuuucgcucaaaaacuuccuggaaaugacaauagcacggcaacgcugugccuugggcaccaugcaguaccaaacggaacgauagugaaaacaaucacgaaugaccgaauugaaguuacuaaugcuacugagcugguucaaaauuccucaauaggugaaauaugcgacaguccucaucagauucuugauggagaaaacugcacacuaauagaugcucuauugggagacccucagugugauggcuuucaaaauaagaaaugggaccuuuuuguugaacgaagcaaagccuacagcaacuguuacccuuaugaugugccggauuaugccucccuuaggucucuaguugccucauccggcacacuggaguuuaacaaugaaagcuucaauuggacuggagucacucaaaacggaacaaguucugcuugcauaaggagauccaauaguaguuucuuuaguagauuaaauugguugacccacuuaaacuucaaauacccagcauugaacgugacuaugccaaacaaugaacaauuugacaaauuguacauuugggggguucaccacccagguacggacaaggaccaaaucuuccuguaugcucaaucaucaggaagaaucacaguaucuaccaaaagaagccaacaagcuguaaucccaaauaucggaucuagacccagaauaaggaauaucccuagcagaauaagcaucuauuggacaauaguaaaaccgggagacauacuuuugauuaacagcacagggaaucuaauugcuccuagggguuacuucaaaauacgaagugggaaaagcucaauaaugagaucagaugcacccauuggcaaaugcaagucugaaugcaucacuccaaauggaagcauucccaaugacaaaccauuccaaaauguaaacaggaucacauacggggccugucccagauauguuaagcaaagcacucugaaauuggcaacaggaaugcgaaauguaccagagaaacaaacuagaggcauauuuggcgcaauagcagguuucauagaaaaugguugggagggaaugguggaugguugguacgguuucaggcaucaaaauucugagggaagaggacaagcagcagaucucaaaagcacccaagcagcaaucgaucaaaucaaugggaagcugaaucgauugaucgggaaaaccaacgagaaauuccaucagauugaaaaagaauucucagaaguagaagggagaauucaggaccuugagaaauauguugaggacacuaaaauagaucucuggucauacaacgcggagcuucuuguugcccuggagaaccaacauacaauugaucuaacugacucagaaaugaacaaacuguuugaaaaaacaaagaagcaacugagggaaaaugcugaggauaugggcaaugguuguuucaaaauauaccacaaaugugacaaugccugcauaggaucaauaagaaauggaacuuaugaccacaauguguacagggaugaagcauuaaacaaccgguuccagaucaagggaguugagcugaagucaggguacaaagauuggauccuauggauuuccuuugccauaucauguuuuuugcuuuguguugcuuuguugggguucaucaugugggccugccaaaagggcaacauuaggugcaacauuugcauuuga

SEQ ID NO: 43740 - RNA, 1701 nt, Artificial Sequence
  derived and/or modified CDS sequence (wt) from hemagglutinin__InfluenzaA__AHL99844
augaagacuaucauugcuuugagcuacauucuaugucugguuuucgcucaaaaacuuccuggaaaugacaauagcacggcaacgcugugccuugggcaccaugcaguaccaaacggaacgauagugaaaacaaucacgaaugaccgaauugaaguuacuaacgcuacugagcugguucagaauuccucaauaggugaaauaugcgacaguccucaucagauccuugauggagaaaacuguacacuaauagaugcucuauugggagacccucagugugauggcuuucaaaauaagaaaugggaccuuuuuguugaacgaagcaaagccuacagcaacuguuacccuuaugaugugccggauuaugccucccuuaggucacuaguugccucauccggcacacuggaguuuaacaaugaaagcuucaauuggacuggagucacucaaaacggaacaaguucugcuugcauaaggagaucuaauaguaguuucuuuaguagauuaaauugguugacccacuuaaacuucaaauacccagcauugaacgugacuaugccaaacaaugaacaauuugacaaauuguacauuugggggguucaccacccggguacugacaaggaccaaaucuuccuguaugcucaaucaucaggaagaaucacaguaucuaccaaaagaagccaacaagcuguaaucccgaauaucggaucuagacccagaauaaggaauaucccuagcagaauaagcaucuauuggacaauaguaaaaccaggagacauacuuuugauuaacagcacagggaaucuaauugcuccuagggguuacuucaaaauacgaagugggaaaagcucaauaaugagaucagaugcacccauuggcaaaugcaagucugaaugcaucacuccaaauggaagcauuccaaaugacaaaccauuccaaaauguaaacaggaucacauacggggccugucccagauauguuaagcaaagcacucugaaauuggcaacaggaaugcgaaacguaccagagaaacaaacuagaggcauauuuggcgcaauagcggguuucauagaaaaugguugggagggaaugguggaugguugguacgguuucaggcaucaaaauucugagggaagaggacaagcagcagaucucaaaagcacucaagcagcaaucgaucaaaucaaugggaagcugaaucgauugaucgggaaaaccaacgagaaauuccaucagauugaaaaagaauucucagaaguagaagggagaauucaggaccuugagaaauauguugaggacacuaaaauagaucucuggucauacaacgcggagcuucuuguugcccuggagaaccaacauacaauugaucuaacugacucagaaaugaacaaacuguuugaaaaaacaaagaagcaacugagggaaaaugcugaggauaugggcaaugguuguuucaaaauauaccacaaaugugacaaugccugcauaggaucaaucagaaauggaacuuaugaccacgauguauacagggaugaagcauuaaacaaccgguuccagaucaagggaguugagcugaagucaggguacaaagauuggauccuauggauuuccuuugccauaucauguuuuuugcuuuguguugcuuuguugggguucaucaugugggccugccaaaagggcaacauuaggugcaacauuugcauuuga

SEQ ID NO: 43741 - RNA, 1701 nt, Artificial Sequence
  derived and/or modified CDS sequence (wt) from hemagglutinin__InfluenzaA__AHL99856
augaagaccaucauugcuuugagcuacauucuaugucuaguuuuugcucaagaacuuccuggaaaugacgacagcacggcaacgcugugccuugggcaccaugcagugccaaacggaacgauagugaaaacaaucacgaaugaccaaauugaaguuacuaaugcuacugaacugguucagaguuccucaacaggugaaauaugcaacaguccucaucagauccuugauggagaaaacugcacacuaauagaugcucuauugggagacccucagugugauggcuuccaaaacaagaaaugggaccuuuuuguugaacgaagcaaagcccacagcaacuguuacccuuaugaugugccggauuaugccucccuuaggucacuaguugccucauccggcacacuggaguuuaacaaugaaagcuucaauuggacuggagucacucaaaacggaacaagcucugcuugcauaaggagaucuaauaauaguuucuuuaguagauugaauugguugacccacuuaaacuucaaauacccagcauugaacgugacuaugccaaacaaugaacaauuugacaaauuguacauuugggggguucaccacccggguacggacaaggaccaaaucuuccuguaugcucaagcaucaggaagaaucacaguaucuaccaaaagaagccaacaagcuguaauuccgaauauuggaucuagacccagaguaaggaauaucccuagcagaguaagcaucuauuggacaauaguaaaaccgggagacauacuuuugauuaacagcacagggaaucuaauugcuccuagggguuacuucaaaauacgaagugggaaaagcucaauaaugagaucagaugcacccauuggcaaaugcaauucugcaugcaucacuccaaauggaagcauucccaaugacaaaccauuccaaaauguaaacaggaucacauacggggccugucccagauaugucaagcaaaacacucugaaauuggcaacaggaaugagaaauguaccagagaaacaaacuagaggcauauuuggcgcaauagcggguuucauagaaaaugguugggagggaaugguggaugguugguacgguuucaggcaucaaaauucugagggaaggggacaagcagcagaucucaaaagcacucaagcagcaaucgaucaaaucaaugggaagcugaauagauugaucgggaaaaccaacgagaaauuccaucagauugaaaaagaauucucagaagucgaagggagaauucaggaccuugagaaauauguugaggacacuaaaauagaucucuggucauacaacgcggagcuucuuguugcccuggagaaccaacacacaauugaucuaacugacucagaaaugaacaaacuguuugaaaaaacaaagaagcaacugagggaaaaugcugaggauaugggcaaugguuguuucaaaauauaccacaaaugugacaaugccugcauaggaucaaucagaaauggaacuuaugaucacgauguauacagagaugaagcauuaaacaaccgauuccagaucaagggaguugagcugaagucaggguacaaagauuggauccuauggauuuccuuugccauaucauguuuuuugcuuuguguugcuuuguugggguucaucaugugggccugccaaaaaggcaacauuaggugcaacauuugcauuuga

SEQ ID NO: 43742 - RNA, 1701 nt, Artificial Sequence
  derived and/or modified CDS sequence (wt) from hemagglutinin__InfluenzaA__AHL99868
augaagaccaucauugcuuugagcuacauucuaugucuaguuuuugcucaagaacuuccuggaaaugacgacagcacggcaacgcugugccuugggcaccaugcagugccaaacggaacgauagugaaaacaaucacgaaugaccaaauugaaguuacuaaugcuacugaacugguucagaguuccucaacaggugaaauaugcaacaguccucaucagauccuugauggagaaaacugcacacuaauagaugcucuauugggagacccucagugugauggcuuccaaaacaagaaaugggaccuuuuuguugaacgaagcaaagcccacagcaacuguuacccuuaugaugugccggauuaugccucccuuaggucacuaguugccucauccggcacacuggaguuuaacaaugaaagcuucaauuggacuggagucacucaaaacggaacaagcucugcuugcauaaggagaucuaauaauaguuucuuuaguagauugaauugguugacccacuuaaacuucaaauacccagcauugaacgugacuaugccaaacaaugaacaauuugacaaauuguacauuugggggguucaccacccggguacggacaaggaccaaaucuuccuguaugcucaagcaucaggaagaaucacaguaucuaccaaaaaaagccaacaagcuguaauuccgaauaucggaucuagacccagaguaaggaauaucccuagcagaguaagcaucuauuggacaauaguaaaaccgggagacauacuuuugauuaacagcacagggaaucuaauugcuccuagggguuacuucaaaauacgaagugggaaaagcucaauaaugagaucagaugcacccauuggcaaaugcaauucugcaugcaucacuccaaauggaagcauucccaaugacaaaccauuccaaaauguaaacaggaucacauacggggccugucccagauaugucaagcaaaacacucugaaauuggcaacaggaaugagaaauguaccagagaaacaaacuagaggcauauuuggcgcaauagcggguuucauagaaaaugguugggagggaaugguggaugguugguacgguuucaggcaucaaaauucugagggaaggggacaagcagcagaucucaaaagcacucaagcagcaaucgaucaaaucaaugggaagcugaauagauugaucgggaaaaccaacgagaaauuccaucagauugaaaaagaauucucagaagucgaagggagaauucaggaccuugagaaauauguugaggacacuaaaauagaucucuggucauacaacgcggagcuucuuguugcccuggagaaccaacacacaauugaucuaacugacucagaaaugaacaaacuguuugaaaaaacaaagaagcaacugagggaaaaugcugaggauaugggcaaugguuguuucaaaauauaccacaaaugugacaaugccugcauaggaucaaucagaaauggaacuuaugaucacgauguguacagagaugaagcauuaaacaaccgauuccagaucaagggaguugagcugaagucaggguacaaagauuggauccuauggauuuccuuugccauaucauguuuuuugcuuuguguugcuuuguugggguucaucaugugggccugccaaaaaggcaacauuaggugcaacauuugcauuuga

SEQ ID NO: 43743 - RNA, 1701 nt, Artificial Sequence
  derived and/or modified CDS sequence (wt) from hemagglutinin__InfluenzaA__AHL99880
augaagacuaucauugcuuugagcuacauucuaugucugguuuucgcucaaaaacuuccuggaaaugacaauagcacggcaacgcugugccuugggcaccaugcaguaccaaacggaacgauagugaaaacaaucacgaaugaccaaauugaaguuacuaaugcuacugagcugguucagaauuccucaauaggugaaauaugcgacaguccucaucagauccuugauggagaaaacugcacacuaauagaugcucuauugggagacccucagugugauggcuuucaaaauaagaaaugggaccuuuuuguugaacgaagcaaagccuacagcaacuguuacccuuaugaugugccggauuaugccucccuuaggucacuaguugccucauccggcacacuggaguuuaacaaugaaagcuucaauugggcuggagucacucaaaacggaacaaguucugcuugcauaaggggaucuaauaguaguuucuuuaguagauuaaauugguugacccacuuaaacuucaaguacccagcauugaacgugacuaugccaaacaaugaacaauuugacaaauuguacauuugggggguucaccacccggguacggacaaggaccaaaucuuccuguaugcucaaucaucaggaagaaucacaguaucuaccaaaagaagccaacaagcuguaaucccaaauaucggaucuagacccagaauaaggaauaucccuagcagaauaagcaucuauuggacaauaguaaaaccgggagacauacuuuugauuaacagcacagggaaucuaauugcuccuagggguuacuucaaaauacgaagugggaaaagcucaauaaugagaucagaugcacccauuggcaaaugcaagucugaaugcaucacuccaaauggaagcauucccaaugacaaaccauuccaaaauguaaacaggaucacauacggggccugucccagauauguuaagcaaagcacucugaaauuggcaacaggaaugcgaaauguaccagagaaacaaacuagaggcauauuuggcgcaauagcggguuucauagaaaaugguugggagggaaugguggaugguugguacgguuucaggcaucaaaauucugagggaagaggacaagcagcagaucucaaaagcacucaagcagcaaucgaucaaaucaaugggaagcugaaucgauugaucgggaaaaccaacgagaaauuccaucagauugagaaagaauucucagaaguagaagggagaauucaggaccuugagaaauauguugaggacacaaaaauagaucucuggucauacaacgcagagcuucuuguugcccuggagaaccaacauacaauugaucuaacugacucagaaaugaacaaacuguuugaaaaaacaaagaagcaacugagggaaaaugcugaggauaugggcaaugguuguuucaaaauauaccacaaaugugacaaugccugcauaggaucaaucagaaauggaacuuaugaccacgauguauacagggaugaagcauuaaacaaccgguuccagaucaagggaguugagcugaagucaggguacaaagauuggauccuauggauuuccuuugccauaucauguuuuuugcuuuguguugcuuuguugggguucaucaugugggccugccaaaagggcaacauuaggugcaacauuugcauuuga

SEQ ID NO: 43744 - RNA, 1701 nt, Artificial Sequence; identical to SEQ ID NO: 42048
  derived and/or modified CDS sequence (wt) from hemagglutinin__InfluenzaA__AHL99892

SEQ ID NO: 43745 - RNA, 1701 nt, Artificial Sequence
  derived and/or modified CDS sequence (wt) from hemagglutinin__InfluenzaA__AHL99904
augaagacuaucauugcuuugagcuacauucuaugucugguuuucgcucaaaaacuuccuggaaaugacaauagcacggcaacgcugugccuugggcaccaugcaguaccaaacggaacaauagugaaaacaaucacgaaugaccgaauugaaguuacuaaugcuacugagcugguucagaauuccucaauaggugaaauaugcgacaguccucaucagauccuugauggagaaaacugcacacuaauagaugcucuauugggagacccucagugugauggcuuucaaaauaagaaaugggaccuuuuuguugaacgaagcaaagccuacagcaacuguuacccuuaugaugugccggauuaugccucccuuaggucacuaguugccucauccggcacacuggaguuuaacaaugaaagcuucaauugggcuggagucacucaaaacggaacaaguucugcuugcauaaggggaucuaauaguaguuucuuuaguagauuaaauugguugacccacuuaaacuucaaauacccagcauugaacgugacuaugccaaacaaugaacaauuugacaaauuguacauuugggggguucaccacccggguacggacaaggaccaaaucuuccuguaugcucaaucaucaggaagaaucacaguaucuaccaaaagaagccaacaagcuguaaucccgaauaucggaucuagacccagaauaaggaauaucccuagcagaauaagcaucuauuggacaauagugaaaccgggagacauacuuuugauuaacagcacagggaaucuaauugcuccuagggguuacuucaaaauacgaagugggaaaagcucaauaaugagaucagaugcacccauuggcaaaugcaagucugaaugcaucacuccaaauggaagcauucccaaugacaaaccauuccaaaauguaaacaggaucacauacggggccugucccagauauguuaagcaaagcacacugaaauuggcaacaggaaugcgaaauguaccagagaaacaaacuagaggaauauuuggcgcaauagcggguuucauagaaaaugguugggagggaaugguggaugguugguacgguuucaggcaucaaaauucugagggaagaggacaagcagcagaucucaaaagcacucaagcagcaaucgaucaaaucaaugggaagcugaaucgauugaucgggaaaaccaacgagaaauuccaucagauugaaaaagaauucucagaaguagaagggagaauucaggaccuugagaaauauguugaggacacaaaaauagaucucuggucauacaacgcggagcuucuuguugcccuggagaaccaacauacaauugaucuaacugacucagaaaugaacaaacuguuugaaaaaacaaagaagcaacugagggaaaaugcugaggauaugggcaaugguuguuucaaaauauaccacaaaugugacaaugccugcauaggaucaaucagaaauggaacuuaugaccacgauguauacagggaugaagcauuaaacaaccgguuccagaucaagggaguugagcugaagucaggguacaaagauuggauccuauggauuuccuuugccauaucauguuuuuugcuuuguguugcuuuguugggguucaucaugugggccugccaaaagggcaacauuaggugcaacauuugcauuuga

SEQ ID NO: 43746 - RNA, 1701 nt, Artificial Sequence
  derived and/or modified CDS sequence (wt) from hemagglutinin__InfluenzaA__AHL99916
augaagacuaucauugcuuugagcuacauucuaugucugguuuucgcucaaaaacuuccuggaaaugacaauagcacggcaacgcugugccuugggcaccaugcaguaccaaacggaacgauagugaaaacaaucacgaaugaccgaauugaaguuacuaaugcuacugagcugguucagaauuccucaauaggugaaauaugcgacaguccucaucagauccuugauggagaaaacugcacacuaauagaugcucuauugggagacccucagugugauggcuuucagaauaagaaaugggaccuuuuuguugaacgaagcaaagccuacagcaacuguuacccuuaugaugugccggauuaugccucccuuaggucacuaguugccucauccggcacacuggaguuuaacaaugaaagcuucaauugggcuggagucacucaaaacggaacaaguucugcuugcauaaggggaucuaauaguaguuucuuuaguagauuaaauugguugacccacuuaaacuucaaauacccagcauugaacgugacuaugccaaacaaugaacaauuugacaaauuguacauuugggggguucaccacccggguacggacaaggaccaaaucuuccuguaugcucaaucaucaggaagaaucacaguaucuaccaaaagaagccaacaagcuguaaucccgaauaucggaucuagacccagaauaaggaauaucccuagcagaauaagcaucuauuggacaauaguaaaaccgggagacauacuuuugauuaacagcacagggaaucuaauugcuccuagggguuacuucaaaaugcgaagugggaaaagcucaauaaugagaucagaugcacccauuggcaaaugcaagucugaaugcaucacuccaaauggaagcauucccaaugacaaaccauuccaaaauguaaacaggaucacauacggggccugucccagauauguuaagcaaagcacucugaaauuggcaacaggaaugcgaaauguaccagagaaacaaacuagaggcauauuuggcgcaauagcggguuucauagaaaaugguugggagggaaugauggaugguugguacgguuucaggcaucaaaauucugaggggagaggacaagcagcagaucucaaaagcacucaagcagcaaucgaucaaaucaaugggaagcugaaucgauugaucgggaaaaccaacgagaaauuccaucagauugaaaaagaauucucagagguagaagggagaauucaggaccuugagaaauauguugaggacacaaaaauagaucucuggucauacaacgcggagcuucuuguugcccuggagaaccaacauacaauugaucuaacugacucagaaaugaacaaacuguuugaaaaaacaaagaagcaacugagggaaaaugcugaggauaugggcaaugguuguuucaaaauauaccacaaaugugacaaugccugcauaggaucaaucagaaauggaacuuaugaccacgauguauacagggaugaagcauuaaacaaccgguuccagaucaagggaguugagcugaagucaggguacaaagauuggauccuauggauuuccuuugccauaucauguuuuuugcuuuguguugcuuuguugggguucaucaugugggccugccaaaagggcaacauuaggugcaacauuugcauuuga

SEQ ID NO: 43747 - RNA, 1701 nt, Artificial Sequence
  derived and/or modified CDS sequence (wt) from hemagglutinin__InfluenzaA__AHL99928
augaagacuaucauugcuuugagcuacauucuaugucugguuuucgcucaaaaacuuccuggaaaugacaauagcacggcaacgcugugccuugggcaccaugcaguaccaaacggaacgauagugaaaacaaucacgaaugaccgaauugaaguuacuaaugcuacugagcugguucagaauuccucaauaggugaaauaugcgacaguccucaucagauccuugauggagaaaacuguacacuaauagaugcucuauugggagacccucagugugauggcuuucaaaauaagaaaugggaccuuuuuguugaacgaagcaaagccuacagcaacuguuacccuuaugaugugccggauuaugccucccuuaggucacuaguugccucauccggcacacuggaguuuaacaaugaaagcuucaauuggacuggagucacucaaaacggaacaaguucugcuugcauaaggagaucuaauaguaguuucuuuaguagauuaaauugguugacccacuuaaacuucaaauacccagcauugaacgugacuaugccaaacaaugaacaauuugacaaauuguacauuugggggguucaccacccggguacggacaaggaccaaaucuuccuguaugcucaaucaucaggaagaaucacaguaucuaccaaaagaagccaacaagcuguaaucccgaauaucggaucuagacccagaauaaggaauaucccuagcagaauaagcaucuauuggacaauaguaaaaccaggagacauacuuuugauuaacagcacagggaaucuaauugcuccuagggguuacuucaaaauacgaagugggaaaagcucaauaaugagaucagaugcacccauuggcaaaugcaagucugaaugcaucacuccaaauggaagcauuccaaaugacaaaccauuccaaaauguaaacaggaucacauacggggccugucccagauauguuaagcaaagcacucugaaauuggcaacaggaaugcgaaacguaccagagaaacaaacuagaggcauauuuggcgcaauagcggguuucauagaaaaugguugggagggaaugguggaugguugguacgguuucaggcaucaaaauucugaaggaagaggacaagcagcagaucucaaaagcacucaagcagcaaucgaucaaaucaaugggaagcugaaucgauugaucgggaaaaccaacgagaaauuccaucagauugaaaaagaauucucagaaguagaagggagaauucaggaccuugagaaauauguugaggacacuaaaauagaucucuggucauacaacgcggagcuucuuguugcccuggagaaccaacauacaauugaucugacugacucagaaaugaacaaacuguuugaaaaaacaaagaagcaacugagggaaaaugcugaggauaugggcaaugguuguuucaaaauauaccacaaaugugacaaugccugcauaggaucaaucagaaauggaacuuaugaccacgauguauacagggaugaagcauuaaacaaccgguuccagaucaagggaguugagcugaagucaggguacaaagauuggauccuauggauuuccuuugccauaucauguuuuuugcuuuguguugcuuuguugggguucaucaugugggccugccaaaagggcaacauuaggugcaacauuugcauuuga

SEQ ID NO: 43748 - RNA, 1701 nt, Artificial Sequence
  derived and/or modified CDS sequence (wt) from hemagglutinin__InfluenzaA__AHL99940
augaagacuaucauugcuuugagcuacauucuaugucugguuuucgcucaaaaacuuccuggaaaugacaauagcacggcaacgcugugccuugggcaccaugcaguaccaaacggaacgauagugaaaacaaucacgaaugaccgaauugaaguuacuaaugcuacugagcugguucagaauuccucaauaggugaaauaugcgacaguccucaucagauccuugauggagaaaacuguacacuaauagaugcucuauugggagacccucagugugauggcuuucaaaauaagaaaugggaccuuuuuguugaacgaagcaaagccuacagcaacuguuacccuuaugaugugccggauuaugccucccuuaggucacuaguugccucauccggcacacuggaguuuaacaaugaaagcuucaauuggacuggagucacucaaaacggaacaaguucugcuugcauaaggagaucuaauaguaguuucuuuaguagauuaaauugguugacccacuuaaacuucaaauacccagcauugaacgugacuaugccaaacaaugaacaauuugacaaauuguacauuugggggguucaccacccggguacggacaaggaccaaaucuuccuguaugcucaaucaucaggaagaaucacaguaucuaccaaaagaagccaacaagcuguaaucccgaauaucggaucuagacccagaauaaggaauaucccuagcagaauaagcaucuauuggacaauaguaaaaccaggagacauacuuuugauuaacagcacagggaaucuaauugcuccuagggguuacuucaaaauacgaagugggaaaagcucaauaaugagaucagaugcacccauuggcaaaugcaagucugaaugcaucacuccaaauggaagcauuccaaaugacaaaccauuccaaaauguaaacaggaucacauacggggccugucccagauauguuaagcaaagcacucugaaauuggcaacaggaaugcgaaacguaccagagaaacaaacuagaggcauauuuggcgcaauagcggguuucauagaaaaugguugggagggaaugguggaugguugguacgguuucaggcaucaaaauucugaaggaagaggacaagcagcagaucucaaaagcacucaagcagcaaucgaucaaaucaaugggaagcugaaucgauugaucgggaaaaccaacgagaaauuccaucagauugaaaaagaauucucaggaguagaagggagaauucaggaccuugagaaauauguugaggacacuaaaauagaucucuggucauacaacgcggagcuucuuguugcccuggagaaccaacauacaauugaucugacugacucagaaaugaacaaacuguuugaaaaaacaaagaagcaacugagggaaaaugcugaggauaugggcaaugguuguuucaaaauauaccacaaaugugacaaugccugcauaggaucaaucagaaauggaacuuaugaccacgauguauacagggaugaagcauuaaacaaccgguuccagaucaagggaguugagcugaagucaggguacaaagauuggauccuauggauuuccuuugccauaucauguuuuuugcuuuguguugcuuuguugggguucaucaugugggccugccaaaagggcaacauuaggugcaacauuugcauuuga

SEQ ID NO: 43749 - RNA, 1701 nt, Artificial Sequence; identical to SEQ ID NO: 41870
  derived and/or modified CDS sequence (wt) from hemagglutinin__InfluenzaA__AHL99952

SEQ ID NO: 43750 - RNA, 1701 nt, Artificial Sequence
  derived and/or modified CDS sequence (wt) from hemagglutinin__InfluenzaA__AHL99964
augaagacuaucauugcuuugagcuacauucuaugucugguuuucgcucaaaaacuuccugggaaugacaauagcacggcaacgcugugccuugggcaccaugcaguaccaaacggaacgauagugaaaacaaucacgaaugaccgaauugaaguuacuaaugcuacugagcugguucagaauuccucaauaggugaaauaugcgacaguccucaucagauccuugauggagaaaacuguacacuaauagaugcucuauugggggacccucagugugauggcuuucaaaauaagaaaugggaccuuuuuguugaacggaguaaagccuacagcaacuguuacccuuaugaugugccggauuaugccucccuuaggucacuaguugccucauccggcacacuggaguuuaacaaugaaagcuucaauuggacuggagucacucaaaacggaacaaguucugcuugcauaaggagaucuaauaguaguuucuuuaguagauuaaauugguugacccacuuaaacuucaaauacccagcauugaacgugacuaugccaaacaaugaacaauuugacaaauuguacauuugggggguucaccacccggguacggacaaggaccaaaucuuccuguaugcucaaucaucaggaagaaucacaguaucuaccaaaagaagccaacaagcuguaaucccgaauaucggaucuagacccagaauaaggaauaucccuagcagaauaagcaucuauuggacaauaguaaaaccaggagacauacuuuugauuaacagcacagggaaucuaauugcuccuagggguuacuucaaaauacgaagugggaaaagcucaauaaugagaucagaugcacccauuggcaaaugcaagucugaaugcaucacuccaaauggaagcauuccaaaugacaaaccauuccaaaauguaaacaggaucacauacggggccugucccagauauguuaagcaaagcacucugaaauuggcaacaggaaugcgaaauguaccagagaaacaaacuagaggcauauuuggcgcaauagcggguuucauagaaaaugguugggagggaaugguggaugguugguacgguuucaggcaucaaaauucugagggaagaggacaagcagcagaucucaaaagcacucaagcagcaaucgaucaaaucaaugggaagcugaaucgauugaucgggaaaaccaacgagaaauuccaucagauugaaaaagaauucucagaaguagaagggagaauucaggaccuugagaaauauguugaggacacuaaaauagaucucuggucauacaacgcggagcuucuuguugcucuggagaaccaacauacaauugaucuaacugacucagaaaugaacaaacuguuugaaaaaacaaagaagcaacugagggaaaaugcugaggauaugggcaaugguuguuucaaaauauaccacaaaugugacaaugccugcauaggaucaaucagaaauggaacuuaugaccacgauguauacagggaugaagcauuaaacaaccgguuccagaucaagggaguugagcugaagucaggguacaaagauuggauccuauggauuuccuuugccauaucauguuuuuugcuuuguguugcuuuguugggguucaucaugugggccugccaaaagggcaacauuaggugcaacauuugcauuuga

SEQ ID NO: 43751 - RNA, 1701 nt, Artificial Sequence; identical to SEQ ID NO: 43747
  derived and/or modified CDS sequence (wt) from hemagglutinin__InfluenzaA__AHL99976

SEQ ID NO: 43752 - RNA, 1701 nt, Artificial Sequence; identical to SEQ ID NO: 43747
  derived and/or modified CDS sequence (wt) from hemagglutinin__InfluenzaA__AHL99988

SEQ ID NO: 43753 - RNA, 1701 nt, Artificial Sequence
  derived and/or modified CDS sequence (wt) from hemagglutinin__InfluenzaA__AHM00001
augaagacuaucauugcuuugagcuacauucuaugucugguuuucgcucaaaaacuuccuggaaaugacaauagcacggcaacgcugugccuugggcaccaugcaguaccaaacggaacgauagugaaaacaaucacgaaugaccgaauugaaguuacuaaugcuacugagcugguucaaaauuccucaauaggugaaauaugcgacaguccucaucagauucuugauggagaaaacugcacacuaauagaugcucuauugggagacccucagugugauggcuuucaaaauaagaaaugggaccuuuuuguugaacgaagcaaagccuacagcaacuguuacccuuaugaugugccggauuaugccucccuuaggucacuaguugccucauccggcacacuggaguuuaacaaugaaagcuucaauuggacuggagucacucaaaacggaacaaguucugcuugcauaaggagaucuaauaguaguuucuuuaguagauuaaauugguugacccacuuaaacuucaaauacccagcauugaacgugacuaugccaaacaaugaacaauuugacaaauuguacauuugggggguucaccacccagguacggacaaggaccaaaucuuccuguaugcucaaucaucaggaagaaucacaguaucuaccaaaagaagccaacaagcuguaaucccaaauaucggaucuagacccagaauaaggaauaucccuagcagaauaagcaucuauuggacaauaguaaaaccgggagacauacuuuugauuaacagcacagggaaucuaauugcuccuagggguuacuucaaaauacgaagugggaaaagcucaauaaugagaucagaugcacccauuggcaaaugcaagucugaaugcaucacuccaaauggaagcauucccaaugacaaaccauuccaaaauguaaacaggaucacauacggggccugucccagauauguuaagcaaagcacucugaaauuggcaacaggaaugcgaaauguaccagagaaacaaacuagaggcauauuuggcgcaauagcagguuucauagaaaaugguugggagggaaugguggaugguugguacgguuucaggcaucaaaauucugagggaagaggacaagcagcagaucucaaaagcacccaagcagcaaucgaucaaaucaaugggaagcugaaucgauugaucgggaaaaccaacgagaaauuccaucagauugaaaaagaauucucagaaguagaagggagaauucaggaccuugagaaauauguugaggacacuaaaauagaucucuggucauacaacgcggagcuucuuguugcccuggagaaccaacauacaauugaucuaacugacucagaaaugaacaaacuguuugaaaaaacaaagaagcaacugagggaaaaugcugaggauaugggcaaugguuguuucaaaauauaccacaaaugugacaaugcaugcauaggaucaauaagaaauggaacuuaugaccacaauguguacagggaugaagcauuaaacaaccgguuccagaucaagggaguugagcugaagucaggguacaaagauuggauccuauggauuuccuuugccauaucauguuuuuugcuuuguguugcuuuguugggguucaucaugugggccugccaaaagggcaacauuaggugcaacauuugcauuuga

SEQ ID NO: 43754 - RNA, 1701 nt, Artificial Sequence
  derived and/or modified CDS sequence (wt) from hemagglutinin__InfluenzaA__AHM00013
augaagacuaucauugcuuugagcuacauucuaugucugguuuucgcucaaaaacuuccuggaaaugacaauagcacggcaacgcugugccuugggcaccaugcaguaccaaacggaacgauagugaaaacaaucacgaaugaccgaauugaaguuacuaaugcuacugagcugguucagaauuccucaauaggugaaauaugcgacaguccucaucagauucuugauggagaaaacugcacacuaauagaugcucuauugggagacccucagugugauggcuuucaaaauaagaaaugggaccuuuuuguugaacgaagcaaagccuacagcaacuguuacccuuaugaugugccggauuaugccucccuuaggucacuaguugccucauccggcacacuggaguuuaacaaugaaagcuucaauuggacuggagucacucaaaacggaacaaguucugcuugcauaaggagaucuaauaguaguuucuuuaguagauuaaauugguugacccacuuaaacuucaaauacccagcauugaacgugacuaugccaaacaaugaacaauuugacaaauuguacauuugggggguucaccacccagguacggacaaggaccaaaucuuccuguaugcucaaucaucaggaagaaucacaguaucuaccaaaagaagccaacaagcuguaaucccaaauaucggaucuagacccagaauaaggaauaucccuagcagaauaagcaucuauuggacaauaguaaaaccgggagauauacuuuugauuaacagcacagggaaucuaauugcuccuagggguuacuucaaaauacgaagugggaaaagcucaauaaugagaucagaugcacccauuggcaaaugcaagucugaaugcaucacuccaaauggaagcauucccaaugacaaaccauuccaaaauguaaacaggaucacauacggggccugucccagauauguuaagcaaagcacucugaaauuggcaacaggaaugcgaaauguaccagagaaacaaacuagaggcauauuuggcgcaauagcagguuucauagaaaaugguugggagggaaugguggaugguugguacgguuucaggcaucaaaauucugagggaagaggacaagcagcagaucucaaaagcacccaagcagcaaucgaucaaaucaaugggaagcugaaucgauugaucgggaaaaccaacgagaaauuccaucagauugaaaaagaauucucagaaguagaagggagaauucaggaccuugagaaauauguugaggacacuaaaauagaucucuggucauacaacgcggagcuucuuguugcccuggagaaccaacauacaauugaucuaacugacucagaaaugaacaaacuguuugaaaaaacaaagaagcaacugagggaaaaugcugaggauaugggcaaugguuguuucaaaauauaccacaaaugugacaaugccugcauaggaucaauaagaaauggaacuuaugaccacaauguguacagggaugaagcauuaaacaaccgguuccagaucaagggaguugagcugaagucaggguacaaagauuggauccuauggauuuccuuugccauaucauguuuuuugcuuuguguugcuuuguugggguucaucaugugggccugccaaaagggcaacauuaggugcaacauuugcauuuga

SEQ ID NO: 43755 - RNA, 1701 nt, Artificial Sequence; identical to SEQ ID NO: 41880
  derived and/or modified CDS sequence (wt) from hemagglutinin__InfluenzaA__AHM00025

SEQ ID NO: 43756 - RNA, 1701 nt, Artificial Sequence
  derived and/or modified CDS sequence (wt) from hemagglutinin__InfluenzaA__AHM00037
augaagacuaucauugcuuugagcuacauucuaugucugguuuucgcucaaaaacuuccuggaaaugacaauagcacggcaacgcugugccuugggcaccaugcaguaccaaacggaacgauagugaaaacaaucacgaaugaccgaauugaaguuacuaaugcuacugagcugguucagaauuccucaauaggugaaauaugcgacaguccucaucagauccuugauggagaaaacuguacacuaauagaugcucuauugggagacccucagugugauggcuuucaaaauaagaaaugggaccuuuuuguugaacgaagcaaagccuacagcaacuguuacccuuaugaugugccggauuaugccucccuuaggucacuaguugccucauccggcacacuggaguuuaacaaugaaagcuucaauuggacuggagucacucaaaacggaacaaguucugcuugcauaaggagaucuaauaguaguuucuuuaguagauuaaauugguugacccacuuaaacuucaaauacccagcauugaacgugacuaugccaaacaaugaacaauuugacaaauuguacauuugggggguucaccacccggguacggacaaggaccaaaucuuccuguaugcucaaucaucaggaagaaucacaguaucuaccaaaagaagccaacaagcuguaaucccgaauaucggaucuagacccagaauaaggaauaucccuagcagaauaagcaucuauuggacaauaguaaaaccaggagacauacuuuugauuaacagcacagggaaucuaauugcuccuagggguuacuucaaaauacgaagugggaaaagcucaauaaugagaucagaugcacccauuggcaaaugcaagucugaaugcaucacuccaaauggaagcauuccaaaugacaaaccauuccaaaauguaaacaggaucacauacggggccugucccagauauguuaagcaaagcacucugaaauuggcaacaggaaugcgaaacguaccagagaaacaaacuagaggcauauuuggcgcaauagcggguuucauagaaaaugguugggagggaaugguggaugguugguacgguuucaggcaucaaaauucugaaggaagaggacaagcagcagaucucaaaagcacucaagcagcaaucgaucaaaucaaugggaagcugaaucgauugaucgggaaaaccaacgagaaauuccaucagauugaaaaagaauucucagaaguagaagggagaauucaggaccuugagaaauauguugaggacacuaaaauagaucucuggucauacaacgcggagcuucuuguugcccuggagaaccaacauacaauugaucugacugacucagaaaugaacaaacuguuugaaaaaacaaagaagcaacugagggaaaaugcugaggauaugggcaaugguuguuucaaaauauaccacaaaugugacaaugccugcauaggaucaaucagaaauggaacuuaugaccacgauguauacagggaugaagcauuaaacaaccgauuccagaucaagggaguugagcugaagucaggguacaaagauuggauccuauggauuuccuuugccauaucauguuuuuugcuuuguguugcuuuguugggguucaucaugugggccugccaaaagggcaacauuaggugcaacauuugcauuuga

SEQ ID NO: 43757 - RNA, 1701 nt, Artificial Sequence
  derived and/or modified CDS sequence (wt) from hemagglutinin__InfluenzaA__AHM00061
augaagacuaucauugcuuugagcuacauucuaugucugguuuucgcucaaaaacuuccuggaaaugacaauagcacggcaacgcugugccuugggcaccaugcaguaccaaacggaacgauagugaaaacaaucacgaaugaccgaauugaaguuacuaaugcuacugagcugguucagaauuccucaauaggugaaauaugcgacaguccucaucagauccuugauggagaaaacugcacacuaauagaugcucuauugggagacccucagugugauggcuuucaaaauaagaaaugggaccuuuuuguugaacgaagcaaagccuacagcaacuguuacccuuaugaugugccggauuaugccucccuuaggucacuaguugccucauccggcacacuggaguuuaacaaugaaagcuucaauuggacuggagucacucaaaacggaacaaguucugcuugcauaaggagaucuaauaguaguuucuuuaguagauuaaauugguugacccacuuaaacuucaaauacccagcauugaacgugacuaugccaaacaaugaacaauuugacaaauuguacauuugggggguucaccacccggguacggacaaggaccaaaucuuccuguaugcucaaucaucaggaagaaucacaguaucuaccaaaagaagccaacaagcuguaaucccgaauaucggaucuagacccagaauaaggaauaucccuagcagaauaagcaucuauuggacaauaguaaaaccgggagacauacuuuugauuaacagcacagggaaucuaauugcuccuagggguuacuucaaaauacgaagugggaaaagcucaauaaugagaucagaugcacccauuggcaaaugcaagucugaaugcaucacuccaaauggaagcauucccaaugacaaaccauuccaaaauguaaacaggaucacauacggggccugucccagauauguuaagcaaagcacucugaaauuggcaacaggaaugcgaaauguaccagagaaacaaacuagaggcauauuuggcgcaauagcggguuucauagaaaaugguugggagggaaugguggaugguugguacgguuucaggcaucaaaauucugagggaagaggacaagcagcagaucucaaaagcacucaagcagcaaucgaucaaaucaaugggaagcugaaucgauugaucgggaaaaccaacgagaaauuccaucagauugaaaaagaauucucagaaguagaagggagaauucaggaccuugagaaauauguugaggacacuaaaauagaucucuggucauacaacgcagagcuucuuguugcccuggagaaccaacauacaauugaucuaacugacucagaaaugaacaaacuguuugaaaaaacaaagaagcaacugagggaaaaugcugaggauaugggcaaugguuguuucaaaauauaccacaaaugugacaaugccugcauaggaucaaucagaaauggaacuuaugaccacgauguguacagggaugaagcauuaaacaaccgguuccagaucaagggaguugagcugaagucaggguacaaagauuggauccuauggauuuccuuugccauaucauguuuuuugcuuuguguugcuuuguugggguucaucaugugggccugccaaaagggcaacauuaggugcaacauuugcauuuga

SEQ ID NO: 43758 - RNA, 1701 nt, Artificial Sequence
  derived and/or modified CDS sequence (wt) from hemagglutinin__InfluenzaA__AHM00073
augaagacuaucauugcuuugagcuacauucuaugucugguuuucgcucaaaaacuuccuggaaaugacaauagcacggcaacgcugugccuugggcaccaugcaguaccaaacggaacgauagugaaaacaaucacgaaugaccgaauugaaguuacuaaugcuacugagcugguucagaauuccucaauaggugaaauaugcgacaguccucaucagauucuugauggagaaaacugcacacuaauagaugcucuauugggagacccucagugugauggcuuucaaaauaagaaaugggaccuuuuuguugaacgaagcaaagccuacagcaacuguuacccuuaugaugugccggauuaugccucccuuaggucacuaguugccucauccggcacacuggaguuuaacaaugaaagcuucaauuggacuggagucacucaaaacggaacaaguucugcuugcauaaggagaucuaauaguaguuucuuuaguagauuaaauugguugacccacuuaaacuucaaauacccagcauugaacgugacuaugccaaacaaugaacaauuugacaaauuguacauuugggggguucaccacccagguacggacaaggaccaaauuuuccuguaugcucaaucaucaggaagaaucacaguaucuaccaaaagaagccaacaagcuguaaucccaaauaucggaucuagacccagaauaaggaauaucccuagcagaauaagcaucuauuggacaauaguaaaaccgggagacauacuuuugauuaacagcacagggaaucuaauugcuccuagggguuacuucaaaauacgaagugggaaaagcucaauaaugagaucagaugcacccauuggcaaaugcaagucugaaugcaucacuccaaauggaagcauucccaaugacaaaccauuccaaaauguaaacaggaucacauacggggccugucccagauauguuaagcaaagcacucugaaauuggcaacaggaaugcgaaauguaccagagaaacaaacuagaggcauauuuggcgcaauagcagguuucauagaaaaugguugggagggaaugguggaugguugguacgguuucaggcaucaaaauucugagggaagaggacaagcagcagaucucaaaagcacccaagcagcaaucgaucaaaucaaugggaagcugaaucgauugaucgggaaaaccaacgagaaauuccaucagauugaaaaagaauucucagaaguagaagggagaauucaggaccuugagaaauauguugaggacacuaaaauagaucucuggucauacaacgcggagcuucuuguugcccuggagaaccaacauacaauugaucuaacugacucagaaaugaacaaacuguuugaaaaaacaaagaagcaacugagggaaaaugcugaggauaugggcaaugguuguuucaaaauauaccacaaaugugacaaugccugcauaggaucaauaagaaauggaacuuaugaccacaauguguacagggaugaagcauuaaacaaccgguuccagaucaagggaguugagcugaagucaggguacaaagauuggauccuauggauuuccuuugccauaucauguuuuuugcuuuguguugcuuuguugggguucaucaugugggccugccaaaagggcaacauuaggugcaacauuugcauuuga

SEQ ID NO: 43759 - RNA, 1701 nt, Artificial Sequence; identical to SEQ ID NO: 41870
  derived and/or modified CDS sequence (wt) from hemagglutinin__InfluenzaA__AHM00085

SEQ ID NO: 43760 - RNA, 1701 nt, Artificial Sequence
  derived and/or modified CDS sequence (wt) from hemagglutinin__InfluenzaA__AHM00097
augaaggcaauacuaguaguuuugcuauauacauuugcaaccgcaaaugcagacacauuauguauagguuaucaugcgaacaauucaacagacacuguagacacaguacuagaaaagaauguaacaguaacacacucuguuaaucuucuagaagacaagcauaacgggaaacuaugcaaacuaagagggguagccccauuacauuugggaaaauguaacauugcuggcuggauccugggaaauccagagugugaaucacucuccacagcaagcucaugguccuacauuguggaaacaucuaguucagacaauggaacguguuacccaggagauuucaucgauuaugaggagcuaagagagcaauugagcucagugucaucauuugaaagguuugagauauuccccaagacaaguucauggcccaaucaugacucgaacaaagguguaacggcagcauguccucaugcuggagcaaaaggcuucuacaaaaacuuaauauggcuaguuaaaaaaggaaauucauacccaaagcucagcaacuccuacauuaaugauaaagggaaagaaguccucgugcuauggggcauucaccauccaucuacuacugcugaucaacaaagucucuaucaaaaugcagauacauauguuuuugugggaacaucaagauacagcaagaaguucaagccggaaauagcaauaagacccaaagugagggaucaagaagggagaaugaacuauuacuggacacugguagagccgggagacaaaauaacauucgaagcaacuggaaaucuagugguaccgagauaugcauucgcaauggaaagaaaugcuggaucugguauuaucauuucagauacaacaguccacgauugcaauacaacuugucagacacccaagggugcuauaaacaccagccuaccauuucagaauauacauccgaucacaauugggaaauguccaaaauacguaaaaagcacaaaauugagacuggccacaggauugaggaaugucccgucuauucaaucuagaggccuauuuggggccauugccggcuucauugaagggggguggacagggaugguagauggaugguacgguuaucaccaucaaaaugagcaggggucaggauaugcagccgaccugaagagcacacagaaugccauugacaagauuacuaacaaaguaaauucuguuauugaaaagaugaauacacaguucacagcaguagguaaagaguucaaccaccuggaaaaaagaauagagaauuuaaauaaaaaaguugaugaugguuuccuggacauuuggacuuacaaugccgaacuguugguucuauuggaaaaugaaagaacuuuggacuaucacgauucgaaugugaagaacuuauaugaaaagguaagaaaccaguuaaaaaacaaugccaaggaaauuggaaauggcugcuuugaauuuuaccacaaaugcgauaacaugugcauggaaaguguuaaaaaugggacuuaugacuacccaaaauacucagaggaagcaaaauuaaacagagaaaaaauagaugggguaaagcuggaaucaacaaggauuuaccagauuuuggcgaucuauucaacugucgccaguucauugguacugguagucucccugggggcaaucaguuuuuggaugugcucuaaugggucucuacaguguagaauauguauuuaa

SEQ ID NO: 43761 - RNA, 1701 nt, Artificial Sequence; identical to SEQ ID NO: 43750
  derived and/or modified CDS sequence (wt) from hemagglutinin__InfluenzaA__AHM00108

SEQ ID NO: 43762 - RNA, 1701 nt, Artificial Sequence; identical to SEQ ID NO: 43747
  derived and/or modified CDS sequence (wt) from hemagglutinin__InfluenzaA__AHM00120

SEQ ID NO: 43763 - RNA, 1701 nt, Artificial Sequence
  derived and/or modified CDS sequence (wt) from hemagglutinin__InfluenzaA__AHM00132
augaagaccaucauugcuuugagcuacauucuaugucuaguuuucgcucaagaacuuccuggaaaugacgacagcacggcaacgcugugccuugggcaccaugcagugccaaacggaacgauagugaaaacaaucacgaaugaccaaauugaaguuacuaaugcuacugagcugguucagaguuccucaacaggugaaauaugcaacaguccucaucagauccuugauggagaaaacugcacacuaauagaugcucuauugggagacccucagugugauggcuuccaaaacaagaaaugggaccuuuuuguugaaagaagcaaagcccacagcaacuguuacccuuaugaugugccagauuaugccucccuuaggucacuaguugccucauccggcacacuggaguuuaacaaugaaagcuucaauuggacuggagucacucaaaacggaacaagcucugcuugcauaaggagaucuaauaauaguuucuuuaguagauugaauugguugacccacuuaaacuucaaauacccagcauugaacgugacuaugccaaacaaugaacaauuugacaaauuguacauuugggggguucaccacccggguacggacaaggaccaaaucucccuguaugcucaagcaucaggaagaaucacaguaucuaccaaaagaagccaacaagcuguaauuccgaauaucggaucuagacccagaguaaggaauaucccuagcagaguaagcaucuauuggacaauaguaaaaccaggagacauacuuuugauuaacagcacagggaaucuaauugcuccuagggguuacuucaaaauacgaagugggaaaagcucaauaaugagaucagaugcacccauuggcaaaugcaauucugcaugcaucacuccaaauggaagcauucccaaugacaaaccauuccaaaauguaaacaggaucacauacggggccugucccagauaugucaagcaaaacacucugaaauuggcaacaggaaugagaaauguaccagagaaacaaacuagaggcauauuuggcgcaauagcggguuucauagaaaaugguugggagggaaugguggaugguugguacgguuucaggcaucaaaauucugagggaaggggacaagcagcagaucucaaaagcacucaagcagcaaucgaucaaaucaaugggaagcugaauagauugaucgggaaaaccaacgagaaauuccaucagauugaaaaagaauucucagaagucgaagggagaauucaggaccuugagaaauauguugaggacacuaaaauagaucucuggucauacaacgcggagcuucuuguugcccuggagaaccaacacacaauugaucuaacugacucagaaaugaacaaacuguuugaaaaaacaaagaagcaacugagggaaaaugcugaggauaugggcaaugguuguuucaaaauauaccacaaaugugacaaugccugcauaggaucaaucagaaauggaacuuaugaucacgauguguacagagaugaagcauuaaacaaccgauuccagaucaagggaguugagcugaagucaggguacaaagauuggauccuauggauuuccuuugccauaucauguuuuuugcuuuguguugcuuuguugggguucaucaugugggccugccaaaaaggcaacauuaggugcaacauuugcauuuga

SEQ ID NO: 43764 - RNA, 1701 nt, Artificial Sequence
  derived and/or modified CDS sequence (wt) from hemagglutinin__InfluenzaA__AHM00144
augaagacuaucauugcuuugagcuacauucuaugucugguuuucgcucaaaaacuuccuggaaaugacaauagcacggcaacgcugugccuugggcaccaugcaguaccaaacggaacgauagugaaaacaaucacgaaugaccgaauugaaguuacuaaugcuacugagcugguucagaauuccucaauaggugaaauaugcgacaguccucaucagauccuugauggagaaaauugcacacuaauagaugcucuauugggagacccucagugugauggcuuucaaaauaagaaaugggaccuuuuuguugaacgaagcaaagccuacagcaacuguuacccuuaugaugugccggauuaugccucccuuaggucacuaguugccucauccggcacacuggaguuuaacaaugaaagcuucaauuggacuggagucacucaaaacggaacaaguucugcuugcauaaggagaucuaauaguaguuucuuuaguagauuaaauugguugacccacuuaaacuucaaauacccagcauugaacgugacuaugccaaacaaugaacaauuugacaaauuguacauuuggggaguucaccacccggguacggacaaggaccaaaucuuccuguaugcucaaucaucaggaagaaucacaguaucuaccaaaagaagccaacaagcuguaaucccaaauaucggaucuagacccagaauaaggaauaucccuagcagaauaagcaucuauuggacaauaguaaaaccgggagacauacuuuugauuaacagcacagggaaucuaauugcuccuagggguuacuucaaaauacgaagugggaaaagcucaauaaugagaucagaugcacccauuggcaaaugcaagucugaaugcaucacuccaaauggaagcauucccaaugacaaaccauuccaaaauguaaacaggaucacauacggggccugucccagauauguuaagcaaagcacucugaaauuggcaacaggaaugcgaaacguaccagagaaacaaacuagaggcauauuuggcgcaauagcggguuucauagaaaaugguugggagggaaugguggaugguugguacgguuucaggcaucaaaauucugagggaagaggacaagcagcagaucucaaaagcacucaagcagcaaucgaucaaaucaaugggaagcugaaucgauugaucgggaaaaccaacgagaaauuccaucagauugaaaaagaauucucagaaguagaagggagaauucaggaccuugagaaauauguugaggacacuaaaauagaucucuggucauacaacgcggagcuucuuguugcccuggagaaucaacauacaauugaucuaacugacucagaaaugaacaaacuguuugaaaaaacaaagaagcaacugagggaaaaugcugaggauaugggcaaugguuguuucaaaauauaccacaaaugugacaaugccugcauaggaucaaucagaaauggaacuuaugaccacaauguguacagggaugaagcauuaaacaaccgguuccagaucaagggaguugagcuuaagucaggguacaaagauuggauccuauggauuuccuuugccauaucauguuuuuugcuuuguguugcuuuguugggguucaucaugugggccugccaaaagggcaacauuaggugcaacauuugcauuuga

SEQ ID NO: 43765 - RNA, 1701 nt, Artificial Sequence
  derived and/or modified CDS sequence (wt) from hemagglutinin__InfluenzaA__AHM00156
augaagacuaucauugcuuugagcuacauucuaugucugguuuucgcucaaaaacuuccuggaaaugacaauagcacggcaacgcugugccuugggcaccaugcaguaccaaacggaacgauagugaaaacaaucacgaaugaccgaauugaaguuacuaaugcuacugagcugguucagaauuccucaauaggugaaauaugcgacaguccucaucagauccuugauggagaaaacuguacacuaauagaugcucuauugggagacccucagugugauggcuuucaaaauaagaaaugggaccuuuuuguugaacgaagcaaagccuacagcaacuguuacccuuaugaugugccggauuaugccucccuuaggucacuaguugccucauccggcacacuggaguuuaacaaugaaagcuucaauuggacuggagucacucaaaacggaacaaguucugcuugcauaaggagaucuaauaguaguuucuuuaguagauuaaauugguugacccacuuaaacuucaaauacccagcauugaacgugacuaugccaaacaaugaacaauuugacaaauuguacauuugggggguucaccacccggguacggacaaggaccaaaucuuccuguaugcucaaucaucaggaagaaucacaguaucuaccaaaagaagccaacaagcuguaaucccgaauaucggaucuagacccagaauaaggaauaucccuagcagaauaagcaucuauuggacaauaguaaaaccaggagacauacuuuugauuaacagcacagggaaucuaauugcuccuagggguuacuucaaaauacgaagugggaaaagcucaauaaugagaucagaugcacccauuggcaaaugcaagucugaaugcaucacuccaaauggaagcauuccaaaugacaaaccauuccaaaauguaaacaggaucacauacggggccugucccagauauguuaagcaaagcacucugaaauuagcaacaggaaugcgaaacguaccagagaaacaaacuagaggcauauuuggcgcaauagcggguuucauagaaaaugguugggagggaaugguggaugguugguacgguuucaggcaucaaaauucugaaggaagaggacaagcagcagaucucaaaagcacucaagcagcaaucgaucaaaucaaugggaagcugaaucgauugaucgggaaaaccaacgagaaauuccaucagauugaaaaagaauucucagaaguagaagggagaauucaggaccuugagaaauauguugaggacacuaaaauagaucucuggucauacaacgcggagcuucuuguugcucuggagaaccaacauacaauugaucugacugacucagaaaugaacaaacuguuugaaaaaacaaagaagcaacugagggaaaaugcugaggauaugggcaaugguuguuucaaaauauaccacaaaugugacaaugccugcauaggaucaaucagaaauggaacuuaugaccacgauguauacagggaugaagcauuaaacaaccgauuccagaucaagggaguugagcugaagucaggguacaaagauuggauccuauggauuuccuuugccauaucauguuuuuugcuuuguguugcuuuguugggguucaucaugugggccugccaaaagggcaacauuaggugcaacauuugcauuuga

SEQ ID NO: 43766 - RNA, 1701 nt, Artificial Sequence; identical to SEQ ID NO: 41870
  derived and/or modified CDS sequence (wt) from hemagglutinin__InfluenzaA__AHM00168

SEQ ID NO: 43767 - RNA, 1701 nt, Artificial Sequence
  derived and/or modified CDS sequence (wt) from hemagglutinin__InfluenzaA__AHM00180
augaagacuaucauugcuuugagcuacauucuaugucugguuuucgcucaaaaacuuccuggaaaugacaauagcacggcaacgcugugccuugggcaccaugcaguaccaaacggaacgauagugaaaacaaucacgaaugaccgaauugaaguuacuaaugcuacugagcugguucagaauuccucaauaggugaaauaugcgacaauccucaucagauucuugauggagaaaacugcacacuaauagaugcucuauugggagacccucagugugauggcuuucaaaauaagaaaugggaccuuuuuguugaacgaagcaaagccuacagcaacuguuacccuuaugaugugccggauuaugccucccuuaggucacuaguugccucauccggcacacuggaguuuaacaaugaaagcuucaauuggacuggagucacucaaaacggaacaaguucugcuugcauaaggagaucuaauaguaguuucuuuaguagauuaaauugguugacccacuuaaacuucaaauacccagcauugaacgugacuaugccaaacaaugaacaauuugacaaauuguacauuugggggguucaccacccagguacggacaaggaccaaaucuuccuguaugcucaaucaucaggaagaaucacaguaucuaccaaaagaagccaacaagcuguaaucccaaauaucggaucuagacccagaauaaggaauaucccuagcagaauaagcaucuauuggacaauaguaaaaccgggagacauacuuuugauuaacagcacagggaaucuaauugcuccuagggguuacuucaaaauacgaagugggaaaagcucaauaaugagaucagaugcacccauuggcaaaugcaagucugaaugcaucacuccaaauggaagcauucccaaugacaaaccauuccaaaauguaaacaggaucacauacggggccugucccagauauguuaagcaaagcacucugaaauuggcaacaggaaugcgaaauguaccagagaaacaaaccagaggcauauuuggcgcaauagcagguuucauagaaaaugguugggagggaaugguggaugguugguacgguuucaggcaucaaaauucugagggaagaggacaagcagcagaucucaaaagcacccaagcagcaaucgaucaaaucaaugggaagcugaaucgauugaucgggaaaaccaacgagaaauuccaucagauugaaaaagaauucucagaaguagaagggagaauucaggaccuugagaaauauguugaggacacuaaaauagaucucuggucauacaacgcggagcuucuuguugcccuggagaaccaacauacaauugaucuaacugacucagaaaugaacaaacuguuugaaaaaacaaagaagcaacugagggaaaaugcugaggauaugggcaaugguuguuucaaaauauaccacaaaugugacaaugccugcauagggucaauaagaaauggaacuuaugaccacaauguguacagggaugaagcauuaaacaaccgguuccagaucaaaggaguugagcugaagucaggguacaaagauuggauccuauggauuuccuuugccauaucauguuuuuugcuuuguguugcuuuguugggguucaucaugugggccugccaaaagggcaacauuaggugcaacauuugcauuuga

SEQ ID NO: 43768 - RNA, 1701 nt, Artificial Sequence
  derived and/or modified CDS sequence (wt) from hemagglutinin__InfluenzaA__AHM00192
augaagaccaucauugcuuugagcuacauucuaugccuaguuuucgcucaagaacucccuggaaaugacgacagcacggcaacgcugugccuugggcaccaugcagugccaaacggaacgauagugaaaacaaucacgaaugaccaaauugaaguuacuaaugcuacugagcugguucagaguuccucaacaggugaaauaugcaacaguccucaucagauccuugauggagaaaacugcacacuaauagaugcucuauugggagacccucagugugauggcuuccaaaacaagaaaugggaccuuuuuguugaacgaagcaaagcccacagcaacuguuacccuuaugaugugccggauuaugccucccuuaggucacuaguugccucauccggcacacuggaguuuaacaaugaaagcuucaauuggacuggagucacucaaaacggaacaagcucugcuugcauaaggagaucuaauaauaguuucuuuaguagauugaauugguugacccacuuaaacuucaaauacccagcauugaacgugacuaugccaaacaaugaacaauuugacaaauuguacauuugggggguucaccacccggguacggacaaggaccaaaucuuccuguaugcucaagcaucaggaagaaucacaguaucuaccaaaagaagccaacaagcuguaauuccgaauaucggaucuagacccagaguaaggaauaucccuagcagaguaagcaucuauuggacaauaguaaaaccgggagacauacuuuugauuaacagcacagggaaucuaauugcuccuagggguuacuucaaaauacgaagugggaaaagcucaauaaugagaucagaugcacccauuggcaaaugcaauucugcaugcaucacuccaaauggaagcauucccaaugacaaaccauuccaaaauguaaacaggaucacauacggggccugucccagauaugucaagcaaaacacucugaaauuggcaacaggaaugagaaauguaccagagaaacaaacuagaggcauauuuggcgcaauagcggguuucauagaaaaugguugggagggaaugguggaugguugguacgguuucaggcaucaaaauucugagggaaggggacaagcagcagaucucaaaagcacucaagcagcaaucgaucaaaucaaugggaagcugaauagauugaucgggaaaaccaacgagaaauuccaucagauugaaaaagaauucucagaagucgaagggagaauucaggaccuugagaaauauguugaggacacuaaaauagaucucuggucauacaacgcggagcuucuuguugcccuggagaaccaacacacaauugaucuaacugacucagaaaugaacaaacuguuugaaaaaacaaagaagcaacugagggaaaaugcugaggauaugggcaaugguuguuucaaaauauaccacaaaugugacaaugccugcauaggaucaaucagaaauggaacuuaugaucacgauguguacagagaugaagcauuaaacaaccgauuccagaucaagggaguugagcugaagucaggguacaaagauuggauccuauggauuuccuuugccauaucauguuuuuugcuuuguguugcuuuguugggguucaucaugugggccugccaaaaaggcaacauuaggugcaacauuugcauuuga

SEQ ID NO: 43769 - RNA, 1701 nt, Artificial Sequence
  derived and/or modified CDS sequence (wt) from hemagglutinin__InfluenzaA__AHM00204
augaagacuaucauugcuuugagcuacauucuaugucugguuuucgcucaaaaacuuccuggaaaugacaauagcacggcaacgcugugccuugggcaccaugcaguaccaaacggaacgauagugaaaacaaucacgaaugaccgaauugaaguuacuaaugcuacugagcugguucagaauuccucaauaggugaaauaugcgacaguccucaucagauccuugauggagaaaacuguacacuaauagaugcucuauugggagacccucagugugauggcuuucaaaauaagaaaugggaccuuuuuguugaacgaagcaaagccuacagcaacuguuacccuuaugaugugccggauuaugccucccuuaggucgcuaguugccucauccggcacacuggaguuuaacaaugaaagcuucaauuggacuggagucacucaaaacggaacaaguucugcuugcauaaggagaucuaauaguaguuucuuuaguagauuaaauugguugacccacuuaaacuucaaauacccagcauugaacgugacuaugccaaacaaugaacaauuugacaaauuguacauuugggggguucaccacccggguacggacaaggaccaaaucuuccuguaugcucaaucaucaggaagaaucacaguaucuaccaaaagaagccaacaagcuguaaucccgaauaucggaucuagacccagaauaaggaauaucccuagcagaauaagcaucuauuggacaauaguaaaaccaggagacauacuuuugauuaacagcacagggaaucuaauugcuccuagggguuacuucaaaauacgaagugggaaaagcucaauaaugagaucagaugcacccauuggcaaaugcaagucugaaugcaucacuccaaauggaagcauuccaaaugacaaaccauuccaaaauguaaacaggaucacauacggggccugucccagauauguuaagcaaagcacucugaaauuggcaacaggaaugcgaaacguaccagagaaacaaacuagaggcauauuuggcgcaauagcggguuucauagaaaaugguugggagggaaugguggaugguugguacgguuucaggcaucaaaauucugaaggaagaggacaagcagcagaucucaaaagcacucaagcagcaaucgaucaaaucaaugggaagcugaaucgauugaucgggaaaaccaacgagaaauuccaucagauugaaaaagaauucucagaaguagaagggagaauucaggaccuugagaaauauguugaggacacuaaaauagaucucuggucauacaacgcggagcuucuuguugcccuggagaaccaacauacaauugaucugacugacucagaaaugaacaaacuguuugaaaaaacaaagaagcaacugagggaaaaugcugaggauaugggcaaugguuguuucaaaauauaccacaaaugugacaaugccugcauaggaucaaucagaaauggaacuuaugaccacgauguauacagggaugaagcauuaaacaaccgguuccagaucaagggaguugagcugaagucaggguacaaagauuggauccuauggauuuccuuugccauaucauguuuuuugcuuuguguugcuuuguugggguucaucaugugggccugccaaaagggcaacauuaggugcaacauuugcauuuga

SEQ ID NO: 43770 - RNA, 1701 nt, Artificial Sequence; identical to SEQ ID NO: 43747
  derived and/or modified CDS sequence (wt) from hemagglutinin__InfluenzaA__AHM00216

SEQ ID NO: 43771 - RNA, 1701 nt, Artificial Sequence
  derived and/or modified CDS sequence (wt) from hemagglutinin__InfluenzaA__AHM00228
augaagacuaucauugcuuugagcuacauucuaugucugguuuucgcucaaaaacuuccuggaaaugacaauagcacggcaacgcugugccuugggcaccaugcaguaccaaacggaacgauagugaaaacaaucacgaaugaccgaauugaaguuacuaaugcuacugagcugguucagaauuccucaauaggugaaauaugcgacaguccucaucagauucuugauggagaaaacugcacacuaauagaugcucuauugggagacccucagugugauggcuuucaaaauaagaaaugggaccuuuuuguugaacgaagcaaagccuacagcaacuguuacccuuaugaugugccggauuaugccucccuuaggucacuaguugccucauccggcacacuggaguuuaacaaugaaagcuucaauuggacuggagucacucaaaacggaacaaguucugcuugcauaaggagaucuaauaguaguuucuuuaguagauuaaauugguugacccacuuaaacuucaaauacccagcauugaacgugacuaugccaaacaaugaacaauuugacaaauuguacauuugggggguucaccacccagguacggacaaggaccaaaucuuccuguaugcucaaucaucaggaagaaucacaguaucuaccaaaagaagccaacaagcuguaaucccaaauaucggaucuagacccagaauaaggaauaucccuagcagaauaagcaucuauuggacaauaguaaaaccgggagacauacuuuugauuaacagcacagggaaucuaauugcuccuagggguuacuucaaaauacgaagugggaaaagcucaauaaugagaucagaugcacccauuggcaaaugcaagucugaaugcaucacuccaaauggaagcauucccaaugacaaaccauuccaaaauguaaacaggaucacauacggggccugucccagauauguuaagcaaagcacucugaaauuggcaacaggaaugcgaaauguaccagagaaacaaacuagaggcauauuuggcgcaauagcagguuucauagaaaaugguugggagggaaugguggaugguugguacgguuucaggcaucaaaauucugagggaagaggacaagcagcagaucucaaaagcacccaagcagcaaucgaucaaaucaauggaaagcugaaucgauugaucgggaaaaccaacgagaaauuccaucagauugaaaaagaauucucagaaguagaagggagaauucaggaccuugagaaauauguugaggacacuaaaauagaucucuggucauacaacgcggagcuucuuguugcccuggagaaccaacauacaauugaucuaacugacucagaaaugaacaaacuguuugaaaaaacaaagaagcaacugagggaaaaugcugaggauaugggcaaugguuguuucaaaauauaccacaaaugugacaaugccugcauaggaucaauaagaaauggaacuuaugaccacaauguguacagggaugaagcauuaaacaaccgguuccagaucaagggaguugagcugaagucaggguacaaagauuggauccuauggauuuccuuugccauaucauguuuuuugcuuuguguugcuuuguugggguucaucaugugggccugccaaaagggcaacauuaggugcaacauuugcauuuga

SEQ ID NO: 43772 - RNA, 1701 nt, Artificial Sequence; identical to SEQ ID NO: 41870
  derived and/or modified CDS sequence (wt) from hemagglutinin__InfluenzaA__AHM00240

SEQ ID NO: 43773 - RNA, 1701 nt, Artificial Sequence; identical to SEQ ID NO: 41870
  derived and/or modified CDS sequence (wt) from hemagglutinin__InfluenzaA__AHM00252

SEQ ID NO: 43774 - RNA, 1701 nt, Artificial Sequence
  derived and/or modified CDS sequence (wt) from hemagglutinin__InfluenzaA__AHM00264
augaagacuaucauugcuuugagcuacauucuaugucugguuuucgcucaaaaacuuccuggaaaugacaauagcacggcaacgcugugccuugggcaccaugcaguaccaaacggaacgauagugaaaacaaucacgaaugaccgaauugaaguuacuaaugcuacugagcugguucagaauuccucaauaggugaaauaugcgacaguccucaucagauucuugauggagaaaacugcacacuaauagaugcucuauugggagacccucagugugauggcuuucaaaauaagaaaugggaccuuuuuguugaacgaagcaaagccuacagcaacuguuacccuuaugaugugccggauuaugccucccuuaggucacuaguugccucauccggcacacuggaguuuaacaaugaaagcuucaauuggacuggagucacucaaaacggaacaaguucugcuugcauaaggagaucuaauaguaguuucuuuaguagauuaaauugguugacccacuuaaacuucaaauacccagcauugaacgugacuaugccaaacaaugaacaauuugacaaauuguacauuugggggguucaccacccagguacggacaaggaccaaaucuuccuguaugcucaaucaucaggaagaaucacaguaucuaccaaaagaagccaacaagcuguaaucccaaauaucggaucuagacccagaauaaggaauaucccuagcagaauaagcaucuauuggacaauaguaaaaccgggagacauacuuuugauuaacagcacagggaaucuaauugcuccuagggguuacuucaaaauacgaagugggaaaagcucaauaaugagaucagaugcacccauuggcaaaugcaagucugaaugcaucacuccaaauggaagcauucccaaugacaaaccauuccaaaauguaaacaggaucacauacggggccugucccagauauguuaagcaaagcacucugaaauuggcaacaggaaugcgaaauguaccagagaaacaaacuagaggcauauuuggcgcaauagcagguuucauagaaaaugguugggagggaaugguggaugguugguacgguuucaggcaucaaaauucugagggacgaggacaagcagcagaucucaaaagcacccaagcagcaaucgaucaaaucaaugggaagcugaaucgauugaucgggaaaaccaacgagaaauuccaucagauugaaaaagaauucucagaaguagaagggagaauucaggaccuugagaaauauguugaggacacuaaaauagaucucuggucauacaacgcggagcuucuuguugcccuggagaaccaacauacaauugaucuaacugacucagaaaugaacaaacuguuugaaaaaacaaagaagcaacugagggaaaaugcugaggauaugggcaaugguuguuucaaaauauaccacaaaugugacaaugccugcauaggaucaauaagaaauggaacuuaugaccacaauguguacagggaugaagcauuaaacaaccgguuccagaucaagggaguugagcugaagucaggguacaaagauuggauccuauggauuuccuuugccauaucauguuuuuugcuuuguguugcuuuguugggguucaucaugugggccugccaaaagggcaacauuaggugcaacauuugcauuuga

SEQ ID NO: 43775 - RNA, 1701 nt, Artificial Sequence
  derived and/or modified CDS sequence (wt) from hemagglutinin__InfluenzaA__AHM00276
augaagaccaucauugcuuugagcuacauucuaugucuaguuuucgcucaagaacuuccuggaaaugacgacagcacggcaacgcugugccuugggcaccaugcagugccaaacggaacgauagugaaaacaaucacgaaugaccaaauugaaguuacuaaugcuacugagcugguucagaguuccucaacaggugaaauaugcaacaguccucaucagauccuugauggagaaaacugcacacuaauagaugcucuauugggagacccucagugugauggcuuccaaaacaagaaaugggaccuuuuuguugaaagaagcaaagcccacagcaacuguuacccuuaugaugugccagauuaugccucccuuaggucacuaguugccucauccggcacacuggaguuuaacaaugaaagcuucaauuggacuggagucacucaaaacggaacaagcucugcuugcauaaggagaucuaauaauaguuucuuuaguagauugaauugguugacccacuuaaacuucaaauacccagcauugaacgugacuaugccaaacaaugaacaauuugacaaauuguacauuugggggguucaccacccggguacggacaaggaccaaaucuuccuguaugcucaagcaucaggaagaaucacaguaucuaccaaaagaagccaacaagcuguaauuccgaauaucggaucuagacccagaguaaggaauaucccuagcagaguaagcaucuauuggacaauaguaaaaccaggagacauacuuuugauuaacagcacagggaaucuaauugcuccuagggguuacuucaaaauacgaagugggaaaagcucaauaaugagaucagaugcacccauuggcaaaugcaauucugcaugcaucacuccaaauggaagcauucccaaugacaaaccauuccaaaauguaaacaggaucacauacggggccugucccagauaugucaagcaaaacacucugaaauuggcaacaggaaugagaaauguaccagagaaacaaacuagaggcauauuuggcgcaauagcggguuucauagaaaaugguugggagggaaugguggaugguugguacgguuucaggcaucaaaauucugagggaaggggacaagcagcagaucucaaaagcacucaagcagcaaucgaucaaaucaaugggaagcugaauagauugaucgggaaaaccaacgagaaauuccaucagauugaaaaagaauucucagaagucgaagggagaauucaggaccuugagaaauauguugaggacacuaaaauagaucucuggucauacaacgcggagcuucuuguugcccuggagaaccaacacacaauugaucuaacugacucagaaaugaacaaacuguuugaaaaaacaaagaagcaacugagggaaaaugcugaggauaugggcaaugguuguuucaaaauauaccacaaaugugacaaugccugcauaggaucaaucagaaauggaacuuaugaucacgauguguacagagaugaagcauuaaacaaccgauuccagaucaagggaguugagcugaagucaggguacaaagauuggauccuauggauuuccuuugccauaucauguuuuuugcuuuguguugcuuuguugggguucaucaugugggccugccaaaaaggcaacauuaggugcaacauuugcauuuga

SEQ ID NO: 43776 - RNA, 1701 nt, Artificial Sequence
  derived and/or modified CDS sequence (wt) from hemagglutinin__InfluenzaA__AHM00288
augaagacuaucauugcuuugagcuacauucuaugucugguuuucgcucaaaaacuuccuggaaaugacaauagcacggcaacgcugugccuugggcaccaugcaguaccaaacggaacgauagugaaaacaaucacgaaugaccgaauugaaguuacuaaugcuacugagcugguucagaauuccucaauaggugaaauaugcgacaguccucaucagauucuugauggagaaaacugcacacuaauagaugcucuauugggagacccucagugugauggcuuucaaaauaagaaaugggaccuuuuuguugaacgaagcaaagccuacagcaacuguuacccuuaugaugugccggauuaugccucccuuaggucacuaguugccucauccggcacacuggaguuuaacaaugaaagcuucaauuggacuggagucacucaaaacggaacaaguucugcuugcauaaggagaucuaauaguaguuucuuuaguagauuaaauugguugacccacuuaaacuucaaauacccagcauugaacgugacuaugccaaacaaugaacaauuugacaaauuguacauuugggggguucaccacccagguacggacaaggaccaaaucuuccuguaugcucaaucaucaggaagaaucacaguaucuaccaaaagaagccaacaagcuguaaucccaaauaucggaucuagacccagaauaaggaauaucccuagcagaauaagcaucuauuggacaauaguaaaaccgggagacauacuuuugauuaacagcacagggaaucuaauugcuccuagggguuacuucaaaauacgaagugggaaaagcucaauaaugagaucagaugcacccauuggcaaaugcaagucugaaugcaucacuccaaauggaagcauucccaaugacaaaccauuccaaaauguaaacaggaucacauacggggccugucccagauauguuaagcaaagcacucugaaauuggcaacaggaaugcgaaauguaccagagaaacaaaccagaggcauauuuggcgcaauagcagguuucauagaaaaugguugggagggaaugguggaugguugguacgguuucaggcaccaaaauucugagggaagaggacaagcagcagaucucaaaagcacccaagcagcaaucgaucaaaucaaugggaagcugaaucgauugaucgggaaaaccaacgagaaauuccaucagauugaaaaagaauucucagaaguagaagggagaauucaggaccuugagaaauauguugaggacacuaaaauagaucucuggucauacaacgcggagcuucuuguugcccuggagaaccaacauacaauugaucuaacugacucagaaaugaacaaacuguuugaaaaaacaaagaagcaacugagggaaaaugcugaggauaugggcaaugguuguuucaaaauauaccacaaaugugacaaugccugcauagggucaauaagaaauggaacuuaugaccacaauguguacagggaugaagcauuaaacaaccgguuccagaucaaaggaguugagcugaagucaggguacaaagauuggauccuauggauuuccuuugccauaucauguuuuuugcuuuguguugcuuuguugggguucaucaugugggccugccaaaagggcaacauuaggugcaacauuugcauuuga

SEQ ID NO: 43777 - RNA, 1701 nt, Artificial Sequence; identical to SEQ ID NO: 41870
  derived and/or modified CDS sequence (wt) from hemagglutinin__InfluenzaA__AHM00300

SEQ ID NO: 43778 - RNA, 1701 nt, Artificial Sequence
  derived and/or modified CDS sequence (wt) from hemagglutinin__InfluenzaA__AHM00312
augaagacuaucauugcuuugagcuacauucuaugucugguuuucgcucaaaaacuuccuggaaaugacaauagcacggcaacgcugugccuugggcaccaugcaguaccaaacggaacgauagugaaaacaaucacgaaugaccgaauugaaguuacuaacgcuacugagcugguucagaauuccucaauaggugaaauaugcgacaguccucaucagauccuugauggagaaaacuguacacuaauagaugcucuauugggagacccucagugugauggcuuucaaaauaagaaaugggaccuuuuuguugaacgaagcaaagccuacagcaacuguuacccuuaugaugugccggauuaugccucccuuaggucacuaguugccucauccggcacacuggaguuuaacaaugaaagcuucaauuggacuggagucacucaaaacggaacaaguucugcuugcauaaggagaucuaauaguaguuucuuuaguagauuaaauugguugacccacuuaaacuucaaauacccagcauugaacgugacuaugccaaacaaugaacaauuugacaaauuguacauuugggggguucaccacccggguacugacaaggaccaaaucuuccuguaugcucaaucaucaggaagaaucacaguaucuaccaaaagaagccaacaagcuguaaucccgaauaucggaucuagacccagaauaaggaauaucccuagcagaauaagcaucuauuggacaauaguaaaaccaggagacauacuuuugauuaacagcacagggaaucuaauugcuccuagggguuacuucaaaauacgaagugggaaaagcucaauaaugagaucagaugcacccauuggcaaaugcaagucugaaugcaucacuccaaauggaagcauuccaaaugacaaaccauuccaaaauguaaacaggaucacauacggggccugucccagauauguuaagcaaagcacucugaaauuggcaacaggaaugcgaaacguaccagagaaacaaacuagaggcauauuuggcgcaauagcggguuucauagaaaaugguugggagggaaugguggaugguugguacgguuucaggcaucaaaauucugagggaagaggacaagcagcagaucucaaaagcacucaagcagcaaucgaucaaaucaaugggaagcugaaucgauugaucgggaaaaccaacgagaaauuccaucagauugaaaaagaauucucagaaguagaagggagaauucaggaccuugagaaauauguugaggacacuaaaauagaucucuggucauacaacgcggagcuccuuguugcccuggagaaccaacauacaauugaucuaacugacucagaaaugaacaaacuguuugaaaaaacaaagaagcaacugagggaaaaugcugaggauaugggcaaugguuguuucaaaauauaccacaaaugugacaaugccugcauaggaucaaucagaaauggaacuuaugaccacgauguauacagggaugaagcauuaaacaaccgguuccagaucaagggaguugagcugaagucaggguacaaagauuggauccuauggauuuccuuugccauaucauguuuuuugcuuuguguugcuuuguugggguucaucaugugggccugccaaaagggcaacauuaggugcaacauuugcauuuga

SEQ ID NO: 43779 - RNA, 1701 nt, Artificial Sequence; identical to SEQ ID NO: 43775
  derived and/or modified CDS sequence (wt) from hemagglutinin__InfluenzaA__AHM00324

SEQ ID NO: 43780 - RNA, 1701 nt, Artificial Sequence; identical to SEQ ID NO: 43775
  derived and/or modified CDS sequence (wt) from hemagglutinin__InfluenzaA__AHM00336

SEQ ID NO: 43781 - RNA, 1701 nt, Artificial Sequence; identical to SEQ ID NO: 43747
  derived and/or modified CDS sequence (wt) from hemagglutinin__InfluenzaA__AHM00348

SEQ ID NO: 43782 - RNA, 1701 nt, Artificial Sequence
  derived and/or modified CDS sequence (wt) from hemagglutinin__InfluenzaA__AHM00360
augaagacuaucauugcuuugagcuacauucuaugucugguuuucgcucaaaaacuuccugggaaugacaauagcacggcaacgcugugccuugggcaccaugcaguaccaaacggaacgauagugaaaacaaucacgaaugaccaaauugaaguuacuaaugcuacugagcugguucagaauuccucaauaggugaaauaugcgacaguccucaucagauccuugauggagaaaacuguacacuaauagaugcucuauugggggacccucagugugauggcuuucaaaauaagaaaugggaccuuuuuguugaacggaguaaagccuacagcaacuguuacccuuaugaugugccggauuaugccucccuuaggucacuaguugccucauccggcacacuggaguuuaacaaugaaagcuucaauuggacuggagucacucaaaacggaacaaguucugcuugcauaaggagaucuaauaguaguuucuuuaguagauuaaauugguugacccacuuaaacuucaaauacccagcauugaacgugacuaugccaaacaaugaacaauuugacaaauuguacauuugggggguucaccacccggguacggacaaggaccaaaucuuccuguaugcucaaucaucaggaagaaucacaguaucuaccaaaagaagccaacaagcuguaaucccgaauaucggaucuagacccagaauaaggaauaucccuagcagaauaagcaucuauuggacaauaguaaaaccaggagacauacuuuugauuaacagcacagggaaucuaauugcuccuagggguuacuucaaaauacgaagugggaaaagcucaauaaugagaucagaugcacccauuggcaaaugcaagucugaaugcaucacuccaaauggaagcauuccaaaugacaaaccauuccaaaauguaaacaggaucacauacggggccugucccagauauguuaagcaaagcacucugaaauuggcaacaggaaugcgaaauguaccagagaaacaaacuagaggcauauuuggcgcaauagcggguuucauagaaaaugguugggagggaaugguggaugguugguacgguuucaggcaucaaaauucugagggaagaggacaagcagcagaucucaaaagcacucaagcagcaaucgaucaaaucaaugggaagcugaaucgauugaucgggaaaaccaacgagaaauuccaucagauugaaaaagaauucucagaaguagaagggagaauucaggaccuugagaaauauguugaggacacuaaaauagaucucuggucauacaacgcggagcuucuuguugcucuggagaaccaacauacaauugaucuaacugacucagaaaugaacaaacuguuugaaaaaacaaagaagcaacugagggaaaaugcugaggauaugggcaaugguuguuucaaaauauaccacaaaugugacaaugccugcauaggaucaaucagaaauggaacuuaugaccacgauguauacagggaugaagcauuaaacaaccgguuccagaucaagggaguugagcugaagucaggguacaaagauuggauccuauggauuuccuuugccauaucauguuuuuugcuuuguguugcuuuguugggguucaucaugugggccugccaaaagggcaacauuaggugcaacauuugcauuuga

SEQ ID NO: 43783 - RNA, 1701 nt, Artificial Sequence; identical to SEQ ID NO: 43747
  derived and/or modified CDS sequence (wt) from hemagglutinin__InfluenzaA__AHM00372

SEQ ID NO: 43784 - RNA, 1701 nt, Artificial Sequence
  derived and/or modified CDS sequence (wt) from hemagglutinin__InfluenzaA__AHM00395
augaagacuaucauugcuuugagcuacauucuaugucugguuuucgcucaaaaacuuccuggaaaugacaauagcacggcaacgcugugccuugggcaccaugcaguaccaaacggaacgauagugaaaacaaucacgaaugaccgaauugaaguuacuaaugcuacugagcugguucagaauuccucaauaggugaaauaugcgacaguccucaucagauccuugauggagaaaacuguacacuaauagaugcucuauugggagacccucagugugauggcuuucaaaauaagaaaugggaccuuuuuguugaacgaagcaaagccuacagcaacuguuacccuuaugaugugccggauuaugccucccuuaggucacuaguugccucauccggcacacuggaguuuaacaaugaaagcuucaauuggacuggagucacucaaaacggaacaaguucugcuugcauaaggagaucuaauaguaguuucuuuaguagauuaaauugguugacccacuuaaacuucaaauacccagcauugaacgugacuaugccaaacaaugaacaauuugacaaauuguacauuugggggguucaccacccggguacggacaaggaccaaaucuuccuguaugcucaaucaucaggaagaaucacaguaucuaccaaaagaagccaacaagcuguaaucccgaauaucggaucuagacccagaauaaggaauaucccuagcagaauaagcaucuauuggacaauaguaaaaccaggagacauacuuuugauuaacagcacagggaaucuaauugcuccuagggguuacuucaaaauacgaagugggaaaagcucaauaaugagaucagaugcacccauuggcaaaugcaagucugaaugcaucacuccaaauggaagcauuccaaaugacaaaccauuccaaaauguaaacaggaucacauacggggccugucccagauauguuaagcaaagcacucugaaauuggcaacaggaaugcgaaacguaccagagaaacaaacuagaggcauauuuggagcaauagcggguuucauagaaaaugguugggagggaaugguggaugguugguacgguuucaggcaucaaaauucugaaggaagaggacaagcagcagaucucaaaagcacucaagcagcaaucgaucaaaucaaugggaagcugaaucgauugaucgggaaaaccaacgagaaauuccaucagauugaaaaagaauucucagaaguagaagggagaauucaggaccuugagaaauauguugaggacacuaaaauagaucucuggucauacaacgcggagcuucuuguugcccuggagaaccaacauacaauugaucugacugacucagaaaugaacaaacuguuugaaaaaacaaagaagcaacugagggaaaaugcugaggauaugggcaaugguuguuucaaaauauaccacaaaugugacaaugccugcauaggaucaaucagaaauggaacuuaugaccacgauguauacagggaugaagcauuaaacaaccgguuccagaucaagggaguugagcugaagucaggguacaaagauuggauccuauggauuuccuuugccauaucauguuuuuugcuuuguguugcuuuguugggguucaucaugugggccugccaaaagggcaacauuaggugcaacauuugcauuuga

SEQ ID NO: 43785 - RNA, 1701 nt, Artificial Sequence
  derived and/or modified CDS sequence (wt) from hemagglutinin__InfluenzaA__AHM00407
augaagacuaucauugcuuugagcuacauucuaugucugguuuucgcucaaaaacuuccuggaaaugacaauagcacggcaacgcugugccuugggcaccaugcaguaccaaacggaacgauagugaaaacaaucacgaaugaccgaauugaaguuacuaaugcuacugagcugguucagaauuccucaauaggugaaauaugcgacaguccucaucagauucuugauggagaaaacugcacacuaauagaugcucuauugggagacccucagugugauggcuuucaaaauaagaaaugggaccuuuuuguugaacgaagcaaagccuacagcaacuguuacccuuaugaugugccggauuaugccucccuuaggucacuaguugccucauccggcacacuggaguuuaacaaugaaagcuucaauuggacuggagucacucaaaacggaacaaguucugcuugcauaaggagaucuaauaguaguuucuuuaguagguuaaauugguugacccacuuaaacuucaaauacccagcauugaacgugacuaugccaaacaaugaacaauuugacaaauuguacauuugggggguucaccacccagguacggacaaggaccaaaucuuccuguaugcucaaucaucaggaagaaucacaguaucuaccaaaagaagccaacaagcuguaaucccaaauaucggaucuagacccagaauaaggaauaucccuagcagaauaagcaucuauuggacaauaguaaaaccaggagacauacuuuugauuaacagcacagggaaucuaauugcuccuagggguuacuucaaaauacgaagugggaaaagcucaauaaugagaucagaugcacccauuggcaaaugcaagucugaaugcaucacuccaaauggaagcauucccaaugacaaaccauuccaaaauguaaacaggaucacauacggggccugucccagauauguuaagcaaagcacucugaaauuggcaacaggaaugcgaaauguaccagagaaacaaacuagaggcauauuuggcgcaauagcagguuucauagaaaaugguugggagggaaugguggaugguugguacgguuucaggcaucaaaauucugagggaagaggacaagcagcagaucucaaaagcacccaagcagcaaucgaucaaaucaaugggaagcugaaucgauugaucgggaaaaccaacgagaaauuccaucagauugaaaaagaauucucagaaguagaagggagaauucaggaccuugagaaauauguugaggacacuaaaauagaucucuggucauacaacgcggagcuucuuguugcccuggagaaccaacauacaauugaucuaacugacucagaaaugaacaaacuguuugaaaaaacaaagaagcaacugagggaaaaugcugaggauaugggcaaugguuguuucaaaauauaccacaaaugugacaaugccugcauaggaucaauaagaaauggaacuuaugaccacaauguguacagggaugaagcauuaaacaaccgguuccagaucaagggaguugagcugaagucaggguacaaagauuggauccuauggauuuccuuugccauaucauguuuuuugcuuuguguugcuuuguugggguucaucaugugggccugccaaaagggcaacauuaggugcaacauuugcauuuga

SEQ ID NO: 43786 - RNA, 1701 nt, Artificial Sequence
  derived and/or modified CDS sequence (wt) from hemagglutinin__InfluenzaA__AHM00419
augaagacuaucauugcuuugagcuacauucuaugucugguuuucgcucaaaaacuuccuggaaaugacaauagcacggcaacgcugugccuugggcaccaugcaguaccaaacggaacgauagugaaaacaaucacgaaugaccgaauugaaguuacuaaugccacugagcugguucagaauuccucaauaggugaaauaugcgacaguccucaucagauccuugauggagaaaacugcacacuaauagaugcucuauugggagacccucagugcgauggcuuucaaaauaagaaaugggaccuuuuuguugaacgaagcaaagccuacagcaacuguuacccuuaugaugugccggauuaugccucccuuaggucacuaguugccucauccggcacacuggaguuuaacaaugaaagcuucaauuggacuggagucacucaaaacggaacaaguucugcuugcauaaggagaucuaauaguaguuucuuuaguagauuaaauugguugacccacuuaaacuucaaauacccagcauugaacgugacuaugccaaacaaugaacaauuugacaaauuguacauuugggggguucaccacccggguacggacaaggaccaaaucuuccuguaugcucaaucaucaggaagaaucacaguaucuaccaaaagaagccaacaagcuguaaucccaaauaucggaucuagacccagaauaaggaauaucccuagcagaauaagcaucuauuggacaauaguaaaaccgggagacauacuuuugauuaacagcacagggaaucuaauugcuccuagggguuacuucaaaauacgaagugggaaaagcucaauaaugagaucagaugcacccauuggcaaaugcaagucugaaugcaucacuccaaauggaagcauucccaaugacaaaccauuccaaaauguaaacaggaucacauacggggccugccccagauauguuaagcaaagcacucugaaauuggcaacaggaaugcggaauguaccagagaaacaaacuagaggcauauuuggugcaauagcggguuucauagaaaaugguugggagggaaugguggaugguugguacgguuucaggcaucaaaauucugagggaagaggacaagcagcagaucucaaaagcacucaagcagcaaucgaucaaaucaaugggaagcugaaucgauugaucgggaaaaccaacgagaaauuccaucagauugaaaaagaauucucagaaguagaagggagaauucaagaccuugagaaauauguugaggacacuaaaauagaucucuggucauacaacgcggagcuucuuguugcccuggagaaccaacauacaauugaucuaacugacucagaaaugaacaaacuguuugaaaaaacaaagaagcaacugagggaaaaugcugaggauaugggcaaugguuguuucaaaauauaccacaaaugugacaaugccugcauaggaucaaucagaaauggaacuuaugaccacaauguguacagggaugaagcauuaaacaaccgguuccagaucaagggaguugagcugaagucaggguacaaagauuggauccuauggauuuccuuugccauaucauguuuuuugcuuuguguugcuuuguugggguucaucaugugggcaugccaaaagggcaacauuaggugcaacauuugcauuuga

SEQ ID NO: 43787 - RNA, 1701 nt, Artificial Sequence
  derived and/or modified CDS sequence (wt) from hemagglutinin__InfluenzaA__AHM00443
augaagacuaucauugcuuugagcuacauucuaugucugguuuucgcucaaaaacuuccuggaaaugacaauagcacggcaacgcugugccuugggcaccaugcaguaccaaacggaacgauagugaaaacaaucacgaaugaccgaauugaaguuacuaaugcuacugagcugguucaaaauuccucaauaggugaaauaugcgacaguccucaucagauucuugauggagaaaacugcacacuaauagaugcucuauugggagacccucagugugauggcuuucaaaauaagaaaugggaccuuuuuguugaacgaagcaaagccuacagcaacuguuacccuuaugaugugccggauuaugccucccuuaggucacuaguugccucauccggcacacuggaguuuaacaaugaaagcuucaauuggacuggagucacucaaaacggaacaaguucugcuugcauaaggagaucuaauaguaguuucuuuaguagauuaaauugguugacccacuuaaacuucaaauacccagcauugaacgugacuaugccaaacaaugaacaauuugacaaauuguacauuugggggguucaccacccagguacggacaaggaccaaaucuuccuguaugcucaaucaucaggaagaaucacaguaucuaccaaaagaagccaacaagcuguaaucccaaauaucggaucuagacccagaauaaggaauaucccuagcagaauaagcaucuauuggacaauaguaaaaccgggagacauacuuuugauuaacagcacagggaaucuaauugcuccuagggguuacuucaaaauacgaagugggaaaagcucaauaaugagaucagaugcacccauuggcaaaugcaagucugaaugcaucacuccaaauggaagcauucccaaugacaaaccauuccaaaauguaaacaggaucacauacggggccugucccagauauguuaagcaaagcacucugaaauuggcaacaggaaugcgaaauguaccagagaaacaaacuagaggcauauuuggcgcaauagcagguuucauagaaaaugguugggagggaaugguggaugguugguacgguuucaggcaucaaaauucugagggaagaggacaagcagcagaucucaaaagcacccaagcagcaaucgaucaaaucaaugggaagcugaaucgauugaucgggaaaaccaacgagaaauuccaucagauugaaaaagaauucucagaaguagaagggagaauucaggaccuugagaaauauguugaggacacuaaaauagaucucuggucauacaacgcggagcuucuuguugcccuggagaaccaacauacaauugaucuaacugacucagaaaugaacaaacuguuugaaaaaacaaagaagcaacugagggaaaaugcugaggauaugggcaaugguuguuucaaaauauaccacaaaugugacaaugccugcauaggaucaauaagaaauggaacuuaugaccacaauguguacagggaugaagcauuaaacaaccgguuccagaucaagggaguugagcugaagucaggguacaaagauuggauccuauggauuuccuuugccauaucauguuuuuugcuuuguguugcuuuguugggguucaucaugugggccugccaaaagggcaacauuaggugcaacauuugcauuuga

SEQ ID NO: 43788 - RNA, 1701 nt, Artificial Sequence; identical to SEQ ID NO: 43747
  derived and/or modified CDS sequence (wt) from hemagglutinin__InfluenzaA__AHM00455

SEQ ID NO: 43789 - RNA, 1701 nt, Artificial Sequence; identical to SEQ ID NO: 43747
  derived and/or modified CDS sequence (wt) from hemagglutinin__InfluenzaA__AHM00467

SEQ ID NO: 43790 - RNA, 1701 nt, Artificial Sequence
  derived and/or modified CDS sequence (wt) from hemagglutinin__InfluenzaA__AHM00479
augaagacuaucauugcuuugagcuacauucuaugucugguuuucgcucaaaaacuuccuggaaaugacaauagcacggcaacgcugugccuugggcaccaugcaguaccaaacggaacgauagugaaaacaaucacgaaugaccgaauugaaguuacuaaugcuacugagcugguucagaauuccucaauaggugaaauaugcgacaguccucaucagauccuugauggagaaaacuguacacuaauagaugcucuauugggagacccucagugugauggcuuucaaaauaagaaaugggaccuuuuuguugaacgaagcaaagccuacagcaacuguuacccuuaugaugugccggauuaugccucccuuaggucacuaguugccucauccggcacacuggaguuuaacaaugaaagcuucaauuggacuggagucacucaaaacggaacaaguucugcuugcauaaggagaucuaauagcaguuucuuuaguagauuaaauugguugacccacuuaaacuucaaauacccagcauugaacgugacuaugccaaacaaugaacaauuugacaaauuguacauuugggggguucaccacccggguacggacaaggaccaaaucuuccuguaugcucaaucaucaggaagaaucacaguaucuaccaaaagaagccaacaagcuguaaucccgaauaucggaucuagacccagaauaaggaauaucccuagcagaauaagcaucuauuggacaauaguaaaaccaggagacauacuuuugauuaacagcacagggaaucuaauugcuccuagggguuacuucaaaauacgaagugggaaaagcucaauaaugagaucagaugcacccauuggcaaaugcaagucugaaugcaucacuccaaauggaagcauuccaaaugacaaaccauuccaaaauguaaacaggaucacauacggggccugucccagauauguuaagcaaagcacucugaaauuggcaacaggaaugcgaaacguaccagagaaacaaacuagaggcauauuuggcgcaauagcggguuucauagaaaaugguugggagggaaugguggaugguugguacgguuucaggcaucaaaauucugaaggaagaggacaagcagcagaucucaaaagcacucaagcagcaaucgaucaaaucaaugggaagcugaaucgauugaucgggaaaaccaacgagaaauuccaucagauugaaaaagaauucucagaaguagaagggagaauucaggaccuugagaaauauguugaggacacuaaaauagaucucuggucauacaacgcggagcuucuuguugcccuggagaaccaacauacaauugaucugacugacucagaaaugaacaaacuguuugaaaaaacaaagaagcaacugagggaaaaugcugaggauaugggcaaugguuguuucaaaauauaccacaaaugugacaaugccugcauaggaucaaucagaaauggaacuuaugaccacgauguauacagggaugaagcauuaaacaaccgguuccagaucaagggaguugagcugaagucaggguacaaagauuggauccuauggauuuccuuugccauaucauguuuuuugcuuuguguugcuuuguugggguucaucaugugggccugccaaaagggcaacauuaggugcaacauuugcauuuga

SEQ ID NO: 43791 - RNA, 1701 nt, Artificial Sequence; identical to SEQ ID NO: 43747
  derived and/or modified CDS sequence (wt) from hemagglutinin__InfluenzaA__AHM00491

SEQ ID NO: 43792 - RNA, 1701 nt, Artificial Sequence
  derived and/or modified CDS sequence (wt) from hemagglutinin__InfluenzaA__AHM00503
augaagacuaucauugcuuugagcuacauucuaugucugguuuucgcucaaaaacuuccuggaaaugacaauagcacggcaacgcugugccuugggcaccaugcaguaccaaacggaacgauagugaaaacaaucacgaaugaccgaauugaaguuacuaaugcuacugagcugguucagaauuccucaauaggugaaauaugcgacaguccucaucagauucuugauggagaaaacugcacacuaauagaugcucuauugggagacccucagugugauggcuuucaaaauaagaaaugggaccuuuuuguugaacgaagcaaagccuacagcaacuguuacccuuaugaugugccggauuaugccucccuuaggucacuaguugccucauccggcacacuggaguuuaacaaugaaagcuucaauuggacuggagucacucaaaacggaacaaguucugcuugcauaaggagaucuaauaguaguuucuuuaguagauuaaauugguugacccacuuaaacuucaaauacccagcauugaacgugacuaugccaaacaaugaacaauuugacaaauuguacauuugggggguucaccacccagguacggacaaggaccaaaucuuccuguaugcucaaucaucaggaagaaucacaguaucuaccaaaagaagccaacaagcuguaaucccaaauaucggaucuagacccagaauaaggaauaucccuagcagaauaagcaucuauuggacaauaguaaaaccgggagacauacuuuugauuaacagcacagggaaucuaauugcuccuagggguuacuucaaaauacgaagugggaaaagcucaauaaugagaucagaugcacccauuggcaaaugcaagucugaaugcaucacuccaaauggaagcauucccaaugacaaaccauuccaaaauguaaacaggaucacauacggggccugucccagauauguuaagcaaagcacucugaaauuggcaacaggaaugcgaaauguaccagagaaacaaacuagaggcauauuuggcgcaauagcagguuucauagaaaaugguugggagggaaugguggaugguugguacgguuucaggcaucaaaauucugagggaagaggacaagcagcagaucucaaaagcacccaagcagcaaucgaucaaaucaaugggaagcugaaucgauugaucgggaaaaccaacgagaaauuccaucagauugaaaaagaauucucagaaguagaagggagaauucaggaccuugagaaauauguggaggacacuaaaauagaucucuggucauacaacgcggagcuucuuguugcccuggagaaccaacauacaauugaucuaacugacucagaaaugaacaaacuguuugaaaaaacaaagaagcaacugagggaaaaugcugaggauaugggcaaugguuguuucaaaauauaccacaaaugugacaaugccugcauaggaucaauaagaaauggaacuuaugaccacaauguguacagggaugaagcauuaaacaaccgguuccagaucaagggaguugagcugaagucaggguacaaagauuggauccuauggauuuccuuugccauaucauguuuuuugcuuuguguugcuuuguugggguucaucaugugggccugccaaaagggcaacauuaggugcaacauuugcauuuga

SEQ ID NO: 43793 - RNA, 1701 nt, Artificial Sequence
  derived and/or modified CDS sequence (wt) from hemagglutinin__InfluenzaA__AHM00515
augaagacuaucauugcuuugagcuacauucuaugucugguuuucgcucaaaaacuuccuggaaaugacaauagcacggcaacgcugugccuugggcaccaugcaguaccaaacggaacgauagugaaaacaaucacgaaugaccgaauugaaguuacuaaugcuacugagcugguucagaauuccucaauaggugaaauaugcgacaguccucaucagauucuugauggagaaaacugcacacuaauagaugcucuauugggagacccucagugugauggcuuucaaaauaagaaaugggaccuuuuuguugaacgaagcaaagccuacagcaacuguuauccuuaugaugugccggauuaugccucccuuaggucacuaguugccucauccggcacacuggaguuuaacaaugaaagcuucaauuggacuggagucacucaaaacggaacaaguucugcuugcauaaggagaucuaauaguaguuucuuuaguagauuaaauugguugacccacuuaaacuucaaauacccagcauugaacgugacuaugccaaacaaugaacaauuugacaaauuguacauuugggggguucaccacccagguacggacaaggaccaaaucuuccuguaugcucaaucaucaggaagaaucacaguaucuaccaaaagaagccaacaagcuguaaucccaaauaucggaucuagacccagaauaaggaauaucccuagcagaauaagcaucuauuggacaauaguaaaaccgggagacauacuuuugauuaacagcacagggaaucuaauugcuccuagggguuacuucaaaauacgaagugggaaaagcucaauaaugagaucagaugcacccauuggcaaaugcaagucugaaugcaucacuccaaauggaagcauucccaaugacaaaccauuccaaaauguaaacaggaucacauacggggccugucccagauauguuaagcaaagcacucugaaauuggcaacaggaaugcgaaauguaccagagaaacaaacuagaggcauauuuggcgcaauagcagguuucauagaaaaugguugggagggaaugguggaugguugguacgguuucaggcaucaaaauucugagggaagaggacaagcagcagaucucaaaagcacccaagcagcaaucgaucaaaucaaugggaagcugaaucgauugaucgggaaaaccaacgagaaauuccaucagauugaaaaagaauucucagaaguagaagggagaauucaggaccuugagaaauauguugaggacacuaaaauagaucucuggucauacaacgcggagcuucuuguugcccuggagaaccaacauacaauugaucuaacugacucagaaaugaacaaacuguuugaaaaaacaaagaagcaacugagggaaaaugcugaggauaugggcaaugguuguuucaaaauauaccacaaaugugacaaugccugcauaggaucaauaagaaauggaacuuaugaccacaauguguacagggaugaagcauuaaacaaccgguuccagaucaagggaguugagcugaagucaggguacaaagauuggauccuauggauuuccuuugccauaucauguuuuuugcuuuguguugcuuuguugggguucaucaugugggccugccaaaagggcaacauuaggugcaacauuugcauuuga

SEQ ID NO: 43794 - RNA, 1701 nt, Artificial Sequence
  derived and/or modified CDS sequence (wt) from hemagglutinin__InfluenzaA__AHM00527
augaagacuaucauugcuuugagcuacauucuaugucugguuuucgcucaaaaacuuccuggaaaugacaauagcacggcaacgcugugccuugggcaccaugcaguaccaaacggaacgauagugaaaacaaucacgaaugaccgaauugaaguuacuaaugcuacugagcugguucagaauuccccaauaggugaaauaugcgacaguccucaucagauucuugauggagaaaacugcacacuaauagaugcucuauugggagacccucagugugauggcuuucaaaauaagaaaugggaccuuuuuguugaacgaagcaaagccuacagcaacuguuacccuuaugaugugccggauuaugccucccuuaggucacuaguugccucauccggcacacuggaguuuaacaaugaaagcuucaauuggacuggagucacucaaaacggaacaaguucugcuugcauaaggagaucuaauaguaguuucuuuaguagauuaaauugguugacccacuuaaacuucaaauacccagcauugaacgugacuaugccaaacaaugaacaauuugacaaauuguacauuugggggguucaccacccagguacggacaaagaccaaaucuuccuguaugcucaaucaucaggaagaaucacaguaucuaccaaaagaagccaacaagcuguaaucccaaauaucggaucuagacccagaauaaggaauaucccuagcagaauaagcaucuauuggacaauaguaaaaccgggagacauacuuuugauuaacagcacagggaaucuaauugcuccuagggguuacuucaaaauacgaagugggaaaagcucaauaaugagaucagaugcacccauuggcaaaugcaagucugaaugcaucacuccaaauggaagcauucccaaugacaaaccauuccaaaauguaaacaggaucacauacggggccugucccagauauguuaagcaaagcacucugaaauuggcaacaggaaugcgaaauguaccagagaaacaaacuagaggcauauuuggcgcaauagcagguuucauagaaaaugguugggagggaaugguggaugguugguacgguuucaggcaucaaaauucugagggaagaggacaagcagcagaucucaaaagcacccaagcagcaaucgaucaaaucaaugggaagcugaaucgauugaucgggaaaaccaacgagaaauuccaucagauugaaaaagaauucucagaaguagaagggagaauucaggaccuugagaaauauguugaggacacuaaaauagaucucuggucauacaacgcggagcuucuuguugcccuggagaaccaacauacaauugaucuaacugacucagaaaugaacaaacuguuugaaaaaacaaagaagcaacugagggaaaaugcugaggauaugggcaaugguuguuucaaaauauaccacaaaugugacaaugccugcauaggaucaauaagaaauggaacuuaugaccacaauguguacagggaugaagcauuaaacaaccgguuccagaucaagggaguugagcugaagucaggguacaaagauuggauccuauggauuuccuuugccauaucauguuuuuugcuuuguguugcuuuguugggguucaucaugugggccugccaaaagggcaacauuaggugcaacauuugcauuuga

SEQ ID NO: 43795 - RNA, 1701 nt, Artificial Sequence; identical to SEQ ID NO: 43775
  derived and/or modified CDS sequence (wt) from hemagglutinin__InfluenzaA__AHM00539

SEQ ID NO: 43796 - RNA, 1701 nt, Artificial Sequence
  derived and/or modified CDS sequence (wt) from hemagglutinin__InfluenzaA__AHM00543
augaagaccaucauugcuuugagcuacauucuaugucuaguuuuugcucaagaacuuccuggaaaugacgacagcacggcaacgcugugccuugggcaccaugcagugccaaacggaacgauagugaaaacaaucacgaaugaccaaauugaaguuacuaaugcuacugaacugguucagaguuccucaacaggugaaauaugcaacaguccucaucagauccuugauggagaaaacugcacacuaauagaugcucuauugggagacccucagugugauggcuuccagaacaagaaaugggaccuuuuuguugaacgaagcaaagcccacagcaacuguuacccuuaugaugugccggauuaugccucccuuaggucacuaguugccucauccggcacaauggaguuuaacaaugaaagcuucaauuggacuggagucacucaaaacggaacaagcucugcuugcauaaggagaucuaauaauaguuucuuuaguagauugaauugguugacccacuuaaacuucaaauacccagcauugaacgugacuaugccaaacaaugaacaauuugacaaauuguacauuugggggguucaccacccggguacggacaaggaccaaaucuuccuguaugcucaagcaucaggaagaaucacaguaucuaccaaaagaagccaacaagcuguaauuccgaauaucggaucuagacccagaguaaggaauaucccuagcagaguaagcaucuauuggacaauaguaaaaccgggagacauacuuuugauuaacagcacagggaaucuaauugcuccuagggguuacuucaaaauacgaagugggaaaagcucaauaaugagaucagaugcacccauuggcaaaugcaauucugcaugcaucacuccaaauggaagcauucccaaugacaaaccauuccaaaauguaaacaggaucacauacggggccugucccagauaugucaagcaaaacacucugaaauuggcaacaggaaugagaaauguaccagagaaacaaacuagaggcauauuuggcgcaauagcggguuucauagaaaaugguugggagggaaugguggaugguugguacgguuucaggcaucaaaauucugagggaaggggacaagcagcagaucucaaaagcacucaagcagcaaucgaucaaaucaaugggaagcugaauagauugaucgggaaaaccaacgagaaauuccaucagauugaaaaagaauucucagaagucgaagggagaauucaggaccuugagaaauauguugaggacacuaaaauagaucuauggucauacaacgcggagcuucuuguugcccuggagaaccaacacacaauugaucuaacugacucagaaaugaacaaacuguuugaaaaaacaaagaagcaacugagggaaaaugcugaggauaugggcaaugguuguuucaaaauauaccacaaaugugacaaugccugcauaggaucaaucagaaauggaacuuaugaucacgauguguacagagaugaagcauuaaacaaccgauuccagaucaagggaguugagcugaagucaggguacaaagauuggauccuauggauuuccuuugccauaucauguuuuuugcuuuguguugcuuuguugggguucaucaugugggccugccaaaaaggcaacauuaggugcaacauuugcauuuga

SEQ ID NO: 43797 - RNA, 1701 nt, Artificial Sequence
  derived and/or modified CDS sequence (wt) from hemagglutinin__InfluenzaA__AHM00555
augaagacuaucauugcuuugagcuacauucuaugucugguuuucgcucaaaaacuuccuggaaaugacaauagcacggcaacgcugugccuugggcaccaugcaguaccaaacggaacgauagugaaaacaaucacgaaugaccgaauugaaguuacuaaugcuacugagcugguucagaauuccucaauaggugaaauaugcgacaguccucaucagauucuugauggagaaaacugcacacuaauagaugcucuauugggagacccucagugugauggcuuucaaaauaagaaaugggaccuuuuuguugaacgaagcaaagccuacagcaacuguuacccuuaugaugugccggauuaugccucccuuaggucacuaguugccucauccggcacacuggaguuuaacaaugaaagcuucaauuggacuggagucacucaaaacggaacaaguucugcuugcauaaggagaucuaauaguaguuucuuuaguagauuaaauugguugacccacuuaaacuucaaauacccagcauugaacgugacuaugccaaacaaugaacaauuugacaaauuguacauuugggggguucaccacccagguacggacaaggaccaaaucuuccuguaugcucaaucaucaggaagaaucacaguaucuaccaaaagaagccaacaagcuguaaucccaaauaucggaucuagacccagaauaaggaauaucccuagcagaauaagcaucuauuggacaauaguaaaaccgggagacauacuuuugauuaacagcacagggaaucuaauugcuccuagggguuacuucaaaauacgaagugggaaaagcucaauaaugagaucagaugcacccauuggcaaaugcaagucugaaugcaucacuccaaauggaagcauucccaaugacaaaccauuccaaaauguaaacaggaucacauacggggccugucccagauauguuaagcaaagcacucugaaauuggcaacaggaaugcgaaauguaccagagaaacaaacuagaggcauauuuggcgcaauagcagguuucauagaaaaugguugggagggaaugguggaugguugguacgguuucaggcaucaaaauucugagggaagaggacaagcagcagaucucaaaagcacccaagcagcaaucgaucaaaucaaugggaagcugaaucgauugaucgggaaaaccaacgagaaauuccaucagauugaaaaagaauucucagaaguagaagggagaauucaggaccuugagaaauauguugaggacacuaaaauagaucucuggucauacaacgcggagcuucuuguugcccuggagaaccaacauacaauugaucuaacugacucagaaaugaacaaacuguuugaaaaaacaaagaagcaacugagggaaaaugcugaggauaugggcaaugguuguuucaaaauauaccacaaaugugacaaugccugcauaggaucaauaagaaauggaacuuaugaccacaauguguacagggaugaagcauuaaacaaccgguuccagaucaagggaguugagcugaagucaggguacaaagauuggauccuauggauuuccuuugccauaucuuguuuuuugcuuuguguugcuuuguugggguucaucaugugggccugccaaaagggcaacauuaggugcaacauuugcauuuga

SEQ ID NO: 43798 - RNA, 1701 nt, Artificial Sequence
  derived and/or modified CDS sequence (wt) from hemagglutinin__InfluenzaA__AHM00567
augaagacuaucauugcuuugagcuacauucuaugucugguuuucgcucaaaaacuuccuggaaaugacaauagcacggcaacgcugugccuugggcaccaugcaguaccaaacggaacgauagugaaaacaaucacgaaugaccgaauugaaguuacuaaugcuacugagcugguucagaauuccucaauaggugaaauaugcgacaguccucaucagauccuugauggagaaaacugcacacuaauagaugcucuauugggagacccucagugugauggcuuucaaaauaagaaaugggaccuuuuuguugaacgaagcaaagccuacagcaacuguuacccuuaugaugugccggauuaugccucccuuaggucacuaguugccucauccggcacacuggaguuuaacaaugaaagcuucaauuggacuggagucacucaaaacggaacaaguucugcuugcauaaggaaaucuaauaguaguuucuuuaguagauuaaauugguugacccacuuaaacuucaaauacccagcauugaacgugacuaugccaaacaaugaacaauuugacaaauuguacauuugggggguucaccacccggguacggacaaggaccaaaucuuccuguaugcucaaucaucaggaagaaucacaguaucuaccaaaagaagccaacaagcuguaaucccgaauaucggaucuagacccagaauaaggaauaucccuagcagaauaagcaucuauuggacaauaguaaaaccgggagacauacuuuugauuaacagcacagggaaucuaauugcuccuagggguuacuucaaaauacgaagugggaaaagcucaauaaugagaucagaugcacccauuggcaaaugcaagucugaaugcaucacuccaaauggaagcauucccaaugacaaaccauuccaaaauguaaacaggaucacauacggggccugucccagauauguuaagcaaagcacucugaaauuggcaacaggaaugcgaaauguaccagagaaacaaacuagaggcauauuuggcgcaauagcggguuucauagaaaaugguugggagggaaugguggaugguugguacgguuucaggcaucaaaauucugagggaagaggacaagcagcagaucucaaaagcacucaagcagcaaucgaucaaaucaaugggaagcugaaucgauugaucgggaaaaccaacgagaaauuccaucagauugaaaaagaauucucagaaguagaagggagaauucaggaccuugagaaauauguugaggacacuaaaauagaucucuggucauacaacgcggagcuucuuguugcccuggagaaccaacauacaauugaucuaacugacucagaaaugaacaaacuguuugaaaaaacaaagaagcaacugagggaaaaugcugaggauaugggcaaugguuguuucaaaauauaccacaaaugugacaaugccugcauaggaucaaucagaaauggaacuuaugaccacgauguauacagggaugaagcauuaaacaaccgguuccagaucaagggaguugagcugaagucaggguacaaagauuggauccuauggauuuccuuugccauaucauguuuuuugcuuuguguugcuuuguugggguucaucaugugggccugccaaaagggcaacauuaggugcaacauuugcauuuga

SEQ ID NO: 43799 - RNA, 1701 nt, Artificial Sequence; identical to SEQ ID NO: 41870
  derived and/or modified CDS sequence (wt) from hemagglutinin__InfluenzaA__AHM00579

SEQ ID NO: 43800 - RNA, 1701 nt, Artificial Sequence; identical to SEQ ID NO: 43747
  derived and/or modified CDS sequence (wt) from hemagglutinin__InfluenzaA__AHM00591

SEQ ID NO: 43801 - RNA, 1701 nt, Artificial Sequence
  derived and/or modified CDS sequence (wt) from hemagglutinin__InfluenzaA__AHM00603
augaagacuaucauugcuuugagcuacauucuaugucugguuuucgcucaaaaacuuccuggaaaugacaauagcacggcaacgcugugccuugggcaccaugcaguaccaaacggaacgauagugaaaacaaucacgaaugaccgaauugaaguuacuaaugcuacugagcugguucagaauuccucaauaggugaaauaugcgacaguccucaucagauucuugauggagaaaacugcacacuaauagaugcucuauugggagacccucagugugauggcuuucaaaauaagaaaugggaccuuuuuguugaacgaagcaaagccuacagcaacuguuacccuuaugaugugccggauuaugccucccuuaggucacuaguugccucauccggcacacuggaguuuaacaaugaaagcuucaauuggacuggagucacucaaaacggaacaaguucugcuugcauaaggagaucuaauaguaguuucuuuaguagauuaaauugguugacccacuuaaacuucaaauacccagcauugaacgugacuaugccaaacaaugaacaauuugacaaauuguacauuugggggguucaccacccagguacggacaaggaccaaaucuuccuguaugcucaaucaucaggaagaaucacaguaucuaccaaaagaagccaacaagcuguaaucccaaauaucggaucuagacccagaauaaggaacaucccuagcagaauaagcaucuauuggacaauaguaaaaccgggagacauacuuuugauuaacagcacagggaaucuaauugcuccuagggguuacuucaaaauacgaagugggaaaagcucaauaaugagaucagaugcacccauuggcaaaugcaagucugaaugcaucacuccaaauggaagcauucccaaugacaaaccauuccaaaauguaaacaggaucacauacggggccugucccagauauguuaagcaaagcacucugaaauuggcaacaggaaugcgaaauguaccagagaaacaaacuagaggcauauuuggcgcaauagcagguuucauagaaaaugguugggagggaaugguggaugguugguacgguuucaggcaucaaaauucugagggaagaggacaagcagcagaucucaaaagcacccaagcagcaaucgaucaaaucaaugggaagcugaaucgauugaucgggaaaaccaacgagaaauuccaucagauugaaaaagaauucucagaaguagaagggagaauucaggaccuugagaaauauguugaggacacuaaaauagaucucuggucauacaacgcggagcuucuuguugcccuggagaaccaacauacaauugaucuaacugacucagaaaugaacaaacuguuugaaaaaacaaagaagcaacugagggaaaaugcugaggauaugggcaaugguuguuucaaaauauaccacaaaugugacaaugccugcauaggaucaauaagaaauggaacuuaugaccacaauguguacagggaugaagcauuaaacaaccgguuccagaucaagggaguugagcugaagucaggguacaaagauuggauccuauggauuuccuuugccauaucauguuuuuugcuuuguguugcuuuguugggguucaucaugugggccugccaaaagggcaacauuaggugcaacauuugcauuuga

SEQ ID NO: 43802 - RNA, 1701 nt, Artificial Sequence; identical to SEQ ID NO: 43793
  derived and/or modified CDS sequence (wt) from hemagglutinin__InfluenzaA__AHM00615

SEQ ID NO: 43803 - RNA, 1701 nt, Artificial Sequence
  derived and/or modified CDS sequence (wt) from hemagglutinin__InfluenzaA__AHM00627
augaagacuaccauugcuuugagcuacauucuaugucugguuuucgcucaaaaacuuccuggaaaugacaauagcacggcaacgcugugccuugggcaccaugcaguaccaaacggaacgauagugaaaacaaucacgaaugaccgaauugaaguuacuaaugcuacugagcugguucagaauuccucaauaggugaaauaugcgacaguccucaucagauucuugauggagaaaacugcacacuaauagaugcucuauugggagacccucagugugauggcuuucaaaauaagaaaugggaccuuuuuguugaacgaagcaaagccuacagcaacuguuacccuuaugaugugccggauuaugccucccuuaggucacuaguugccucauccggcacacuggaguuuaacaaugaaagcuucaauuggacuggagucacucaaaacggaacaaguucugcuugcauaaggagaucuaauaguaguuucuuuaguagauuaaauugguugacccacuuaaacuucaaauacccagcauugaacgugacuaugccaaacaaugaacaauuugacaaauuguacauuugggggguucaccacccagguacggacaaggaccaaaucuuccuguaugcucaaucaucaggaagaaucacaguaucuaccaaaagaagccaacaagcuguaaucccaaauaucggaucuagacccagaauaaggaauaucccuagcagaauaagcaucuauuggacaauaguaaaaccgggagacauacuuuugauuaacagcacagggaaucuaauugcuccuagggguuacuucaaaauacgaagugggaaaagcucaauaaugagaucagaugcacccauuggcaaaugcaagucagaaugcaucacuccaaauggaagcauucccaaugacaaaccauuccaaaauguaaacaggaucacauacggggccugucccagauauguuaagcaaagcacucugaaauuggcaacaggaaugcgaaauguaccagagaaacaaacuagaggcauauuuggcgcaauagcagguuucauagaaaaugguugggagggaaugguggaugguugguacgguuucaggcaucaaaauucugagggaagaggacaagcagcagaucucaaaagcacccaagcagcaaucgaucaaaucaaugggaagcugaaucgauugaucgggaaaaccaacgagaaauuccaucagauugaaaaagaauucucagaaguagaagggagaauucaggaccuugagaaauauguugaggacacuaaaauagaucucuggucauacaacgcggagcuucuuguugcccuggagaaccaacauacaauugaucuaacugacucagaaaugaacaaacuguuugaaaaaacaaagaagcaacugagggaaaaugcugaggauaugggcaaugguuguuucaaaauauaccacaaaugugacaaugccugcauaggaucaauaagaaauggaacuuaugaccacaauguguacagggaugaagcauuaaacaaccgguuccagaucaagggaguugagcugaagucaggguacaaagauuggauccuauggauuuccuuugccauaucauguuuuuugcuuuguguugcuuuguugggguucaucaugugggccugccaaaagggcaacauuaggugcaacauuugcauuuga

SEQ ID NO: 43804 - RNA, 1701 nt, Artificial Sequence; identical to SEQ ID NO: 41870
  derived and/or modified CDS sequence (wt) from hemagglutinin__InfluenzaA__AHM00639

SEQ ID NO: 43805 - RNA, 1701 nt, Artificial Sequence; identical to SEQ ID NO: 43775
  derived and/or modified CDS sequence (wt) from hemagglutinin__InfluenzaA__AHM00651

SEQ ID NO: 43806 - RNA, 1701 nt, Artificial Sequence
  derived and/or modified CDS sequence (wt) from hemagglutinin__InfluenzaA__AHM00663
augaagacuaucauugcuuugagcuacauucuaugucugguuuucgcucaaaaacuuccuggaaaugacaauagcacggcaacgcugugccuuggacaccaugcaguaccaaacggaacgauagugaaaacaaucacgaaugaccgaauugaaguuacuaaugcuacugagcugguucagaauuccucaauaggugaaauaugcgacaguccucaucagauccuugauggagaaaauugcacacuaauagaugcucuauugggagacccucagugugauggcuuucaaaauaagaaaugggaccuuuuuguugaacgaagcaaagccuacagcaacuguuacccuuaugaugugccggauuaugccucccuuaggucacuaguugccucauccggcacacuggaguuuaacaaugaaagcuucaauugggcuggagucacucaaaacggaacaaguucugcuugcauaaggggaucuaauaguaguuucuuuaguagauuaaauugguugacccacuuaaacuucaaauacccagcauugaacgugacuaugccaaacaaugaacaauuugacaaauuguacauuugggggguucaccacccggguacggacaaggaccaaaucuuccuguaugcucaaucaucaggaagaaucacaguaucuaccaaaagaagccaacaagcuguaaucccgaauaucggaucuagacccagaauaaggaauaucccuagcagaauaagcaucuauuggacaauaguaaaaccgggagacauacuuuugauuaacagcacagggaaucuaauugcuccuagggguuacuucaaaauacgaagugggaaaagcucaauaaugagaucagaugcacccauuggcaaaugcaagucugaaugcaucacuccaaauggaagcauucccaaugacaaaccauuccaaaauguaaacaggaucacauacggggccugucccagauauguuaagcaaagcacucugaaauuggcaacaggaaugcgaaauguaccagagaaacaaacuagaggcauauuuggcgcaauagcggguuucauagaaaaugguugggagggaaugguggaugguugguacgguuucaggcaucaaaauucugagggaagaggacaagcagcagaucucaaaagcacucaagcagcaaucgaucaaaucaaugggaagcugaaucgauugaucgggaaaaccaacgagaaauuccaucagauugaaaaagaauucucagaaguagaagggagaauucaggaccuugagaaauauguugaggacacaaaaauagaucucuggucauacaacgcggagcuucuuguugcccuggagaaccaacauacaauugaucuaacugacucagaaaugaacaaacuguuugaaaaaacaaagaagcaacugagggaaaaugcugaggauaugggcaaugguuguuucaaaauauaccacaaaugugacaaugccugcauaggaucaaucagaaauggaacuuaugaccacgauguauacagggaugaagcauuaaacaaccgguuccagaucaagggaguugagcugaagucaggguacaaagauuggauccuauggauuuccuuugccauaucauguuuuuugcuuuguguugcuuuguugggguucaucaugugggccugccaaaaaggcaacauuaggugcaacauuugcauuuga

SEQ ID NO: 43807 - RNA, 1701 nt, Artificial Sequence; identical to SEQ ID NO: 43747
  derived and/or modified CDS sequence (wt) from hemagglutinin__InfluenzaA__AHM00675

SEQ ID NO: 43808 - RNA, 1701 nt, Artificial Sequence; identical to SEQ ID NO: 42957
  derived and/or modified CDS sequence (wt) from hemagglutinin__InfluenzaA__AHM00687

SEQ ID NO: 43809 - RNA, 1701 nt, Artificial Sequence
  derived and/or modified CDS sequence (wt) from hemagglutinin__InfluenzaA__AHM00698
augaagaccaucauugcuuugagcuacauucuaugucuaguuuucgcucaagaacuuccuggaaaugacgacagcacggcaacgcugugccuugggcaccaugcagugccaaacggaacgauagugaaaacaaucacgaaugaccaaauugaaguuacuaaugcuacugagcugguucagaguuccucaacaggugaaauaugcaacaguccucaucagauccuugauggagaaaacugcacacuaauagaugcucuauugggagacccucagugugauggcuuccaaaacaagaaaugggaccuuuuuguugaaagaagcaaagcccacagcaacuguuacccuuaugaugugccagauuaugccucccuuaggucacuaguugccucauccggcacacuggaguuuaacaaugaaagcuucaauuggacuggagucacucaaaacggaacaagcucugcuugcacaaggagaucuaauaauaguuucuuuaguagauugaauugguugacccacuuaaacuucaaauacccagcauugaacgugacuaugccaaacaaugaacaauuugacaaauuguacauuugggggguucaccacccggguacggacaaggaccaaaucuuccuguaugcucaagcaucaggaagaaucacaguaucuaccaaaagaagccaacaagcuguaauuccgaauaucggaucuagacccagaguaaggaauaucccuagcagaguaagcaucuauuggacaauaguaaaaccaggagacauacuuuugauuaacagcacagggaaucuaauugcuccuagggguuacuucaaaauacgaagugggaaaagcucaauaaugagaucagaugcacccauuggcaaaugcaauucugcaugcaucacuccaaauggaagcauucccaaugacaaaccauuccaaaauguaaacaggaucacauacggggccugucccagauaugucaagcaaaacacucugaaauuggcaacaggaaugagaaauguaccagagaaacaaacuagaggcauauuuggcgcaauagcggguuucauagaaaaugguugggagggaaugguggaugguugguacgguuucaggcaucaaaauucugagggaaggggacaagcagcagaucucaaaagcacucaagcagcaaucgaucaaaucaaugggaagcugaauagauugaucgggaaaaccaacgagaaauuccaucagauugaaaaagaauucucagaagucgaagggagaauucaggaccuugagaaauauguugaggacacuaaaauagaucucuggucauacaacgcggagcuucuuguugcccuggagaaccaacacacaauugaucuaacugacucagaaaugaacaaacuguuugaaaaaacaaagaagcaacugagggaaaaugcugaggauaugggcaaugguuguuucaaaauauaccacaaaugugacaaugccugcauaggaucaaucagaaauggaacuuaugaucacgauguguacagagaugaagcauuaaacaaccgauuccagaucaagggaguugagcugaagucaggguacaaagauuggauccuauggauuuccuuugccauaucauguuuuuugcuuuguguugcuuuguugggguucaucaugugggccugccaaaaaggcaacauuaggugcaacauuugcauuuga

SEQ ID NO: 43810 - RNA, 1701 nt, Artificial Sequence; identical to SEQ ID NO: 41870
  derived and/or modified CDS sequence (wt) from hemagglutinin__InfluenzaA__AHM00710

SEQ ID NO: 43811 - RNA, 1701 nt, Artificial Sequence
  derived and/or modified CDS sequence (wt) from hemagglutinin__InfluenzaA__AHM00722
augaaaacuaucauugcuuugagcuacauucuaugucugguuuucgcucaaaaacuuccuggaaaugacaauagcacggcaacgcugugccuugggcaccaugcaguaccaaacggaacgauagugaaaacaaucacgaaugaccgaauugaaguuacuaaugcuacugagcugguucagaauuccucaauaggugaaauaugcgacaguccucaucagauucuugauggagaaaacugcacacuaauagaugcucuauugggagacccucagugugauggcuuucaaaauaagaaaugggaccuuuuuguugaacgaagcaaagccuacagcaacuguuacccuuaugaugugccggauuaugccucccuuaggucacuaguugccucauccggcacacuggaguuuaacaaugaaagcuucaauuggacuggagucacucaaaacggaacaaguucugcuugcauaaggagaucuaauaguaguuucuuuaguagauuaaauugguugacccacuuaaacuucaaauacccagcauugaacgugacuaugccaaacaaugaacaauuugacaaauuguacauuugggggguucaccacccagguacggacaaggaccaaaucuuccuguaugcucaaucaucaggaagaaucacaguaucuaccaaaagaagccaacaagcuguaaucccaaauaucggaucuagacccagaauaaggaauaucccuagcagaauaagcaucuauuggacaauaguaaaaccgggagacauacuuuugauuaacagcacagggaaucuaauugcuccuagggguuacuucaaaauacgaagugggaaaagcucaauaaugagaucagaugcacccauuggcaaaugcaagucugaaugcaucacuccaaauggaagcauucccaaugacaaaccauuccaaaauguaaacaggaucacauacggggccugucccagauauguuaagcaaagcacucugaaauuggcaacaggaaugcgaaauguaccagagaaacaaacuagaggcauauuuggcgcaauagcagguuucauagaaaaugguugggagggaaugguggaugguugguacgguuucaggcaucaaaauucugagggaagaggacaagcagcagaucucaaaagcacccaagcagcaaucgaucaaaucaaugggaagcugaaucgauugaucgggaaaaccaacgagaaauuccaucagauugaaaaagaauucucagaaguagaagggagaauucaggaccuugagaaauauguugaggacacuaaaauagaucucuggucauacaacgcggagcuucuuguugcccuggagaaccaacauacaauugaucuaacugacucagaaaugaacaaacuguuugaaaaaacaaagaagcaacugagggaaaaugcugaggauaugggcaaugguuguuucaaaauauaccacaaaugugacaaugccugcauaggaucaauaagaaauggaacuuaugaccacaauguguacagggaugaagcauuaaacaaccgguuccagaucaagggaguugagcugaagucaggguacaaagauuggauccuauggauuuccuuugccauaucauguuuuuugcuuuguguugcuuuguugggguucaucaugugggccugccaaaagggcaacauuaggugcaacauuugcauuuga

SEQ ID NO: 43812 - RNA, 1701 nt, Artificial Sequence; identical to SEQ ID NO: 41870
  derived and/or modified CDS sequence (wt) from hemagglutinin__InfluenzaA__AHM00734

SEQ ID NO: 43813 - RNA, 1701 nt, Artificial Sequence
  derived and/or modified CDS sequence (wt) from hemagglutinin__InfluenzaA__AHM00746
augaagacuaucauugcuuugagcuacauucuaugucugguuuucgcucaaaaaauuccuggaaaugacaauagcacggcaacgcugugccuugggcaccaugcaguaccaaacggaacgauagugaaaacaaucacgaaugaccgaauugaaguuacuaaugcuacugagcugguucagaauuccucaauaggugaaauaugcgacaguccucaucagauccuugauggagaaaacuguacacuaauagaugcucuauugggagacccucagugugauggcuuucaaaauaagaaaugggaccuuuuuguugaacgaagcaaagccuacagcaacuguuacccuuaugaugugccggauuaugccucccuuaggucacuaguugccucauccggcacacuggaguuuaacaaugaaagcuucaauuggacuggagucacucaaaacggaacaaguucugcuugcauaaggagaucuaauaguaguuucuuuaguagauuaaauugguugacccacuuaaacuucaaauacccagcauugaacgugacuaugccaaacaaugaacaauuugacaaauuguacauuugggggguucaccacccggguacggacaaggaccaaaucuuccuguaugcucaaucaucaggaagaaucacaguaucuaccaaaagaagccaacaagcuguaaucccgaauaucggaucuagacccagaauaaggaauaucccuagcagaauaagcaucuauuggacaauaguaaaaccaggagacauacuuuugauuaacagcacagggaaucuaauugcuccuagggguuacuucaaaauacgaagugggaaaagcucaauaaugagaucagaugcacccauuggcaaaugcaagucugaaugcaucacuccaaauggaagcauuccaaaugacaaaccauuccaaaauguaaacaggaucacauacggggccugucccagauauguuaagcaaagcacucugaaauuggcaacaggaaugcgaaacguaccagagaaacaaacuagaggcauauuuggcgcaauagcggguuucauagaaaaugguugggagggaaugguggaugguugguacgguuucaggcaucaaaauucugaaggaagaggacaagcagcagaucucaaaagcacucaagcagcaaucgaucaaaucaaugggaagcugaaucgauugaucgggaaaaccaacgagaaauuccaucagauugaaaaagaauucucagaaguagaagggagaauucaggaccuugagaaauauguugaggacacuaaaauagaucucuggucauacaacgcggagcuucuuguugcccuggagaaccaacauacaauugaucugacugacucagaaaugaacaaacuguuugaaaaaacaaagaagcaacugagggaaaaugcugaggauaugggcaaugguuguuucaaaauauaccacaaaugugacaaugccugcauaggaucaaucagaaauggaacuuaugaccacgauguauacagggaugaagcauuaaacaaccgguuccagaucaagggaguugagcugaagucaggguacaaagauuggauccuauggauuuccuuugccauaucauguuuuuugcuuuguguugcuuuguugggguucaucaugugggccugccaaaagggcaacauuaggugcaacauuugcauuuga

SEQ ID NO: 43814 - RNA, 1701 nt, Artificial Sequence
  derived and/or modified CDS sequence (wt) from hemagglutinin__InfluenzaA__AHM00758
augaagacuaucauugcuuugagcuacauucuaugucugguuuucgcucaaaaacuuccuggaaaugacaauagcacggcaacgcugugccuugggcaccaugcaguaccaaacggaacgauagugaaaacaaucacgaaugaccgaauugaaguuacuaaugcuacugagcugguucagaauuccucaauaggugaaauaugcgacaguccucaucagauucuugauggagaaaacugcacacuaauagaugcucuauugggagacccucagugugauggcuuucaaaauaagaaaugggaccuuuuuguugaacgaagcaaagccuacagcaacuguuacccuuaugaugugccggauuaugccucccuuaggucacuaguugccucauccggcacacuggaguuuaacaaugaaagcuucaauuggacuggagucacucaaaacggaacaaguucugcuugcauaaggagaucuaauaguaguuucuuuaguagauuaaauugguugacccacuuaaacuucaaauacccagcauugaacgugacuaugccaaacaaugaacaauuugacaaauuguacauuugggggguucaccacccagguacggacaaggaccaaaucuuccuguaugcucaaucaucagggagaaucacaguaucuaccaaaagaagccaacaagcuguaaucccaaauaucggaucuagacccagaauaaggaauaucccuagcagaauaagcaucuauuggacaauaguaaaaccgggagacauacuuuugauuaacagcacagggaaucuaauugcuccuagggguuacuucaaaauacgaagugggaaaagcucaauaaugagaucagaugcacccauuggcaaaugcaagucugaaugcaucacuccaaauggaagcauucccaaugacaaaccauuccaaaauguaaacaggaucacauacggggccugucccagauauguuaagcaaagcacucugaaauuggcaacaggaaugcgaaauguaccagagaaacaaacuagaggcauauuuggcgcaauagcagguuucauagaaaaugguugggagggaaugguggaugguugguacgguuucaggcaucaaaauucugagggaagaggacaagcagcagaucucaaaagcacccaagcagcaaucgaucaaaucaaugggaagcugaaucgauugaucgggaaaaccaacgagaaauuccaucagauugaaaaagaauucucagaaguagaagggagaauucaggaccuugagaaauauguugaggacacuaaaauagaucucuggucauacaacgcggagcuucuuguugcccuggagaaccaacauacaauugaucuaacugacucagaaaugaacaaacuguuugaaaaaacaaagaagcaacugagggaaaaugcugaggauaugggcaaugguuguuucaaaauauaccacaaaugugacaaugccugcauaggaucaauaagaaauggaacuuaugaccacaauguguacagggaugaagcauuaaacaaccgguuccagaucaagggaguugagcugaagucaggguacaaagauuggauccuauggauuuccuuugccauaucauguuuuuugcuuuguguugcuuuguugggguucaucaugugggccugccaaaagggcaacauuaggugcaacauuugcauuuga

SEQ ID NO: 43815 - RNA, 1701 nt, Artificial Sequence; identical to SEQ ID NO: 42038
  derived and/or modified CDS sequence (wt) from hemagglutinin__InfluenzaA__AHM00770

SEQ ID NO: 43816 - RNA, 1701 nt, Artificial Sequence; identical to SEQ ID NO: 43775
  derived and/or modified CDS sequence (wt) from hemagglutinin__InfluenzaA__AHM00782

SEQ ID NO: 43817 - RNA, 1701 nt, Artificial Sequence
  derived and/or modified CDS sequence (wt) from hemagglutinin__InfluenzaA__AHM00794
augaagacuaucauugcuuugagcuacauucuaugucugguuuucacucaaaaacuuccuggaaaugacaauagcacggcaacgcugugccuugggcaccaugcaguaccaaacggaacgauagugaaaacaaucacgaaugaccgaauugaaguuacuaaugcuacugagcugguucagaauuccucaauaggugaaauaugcgacaguccucaucagauccuugauggagaaaacugcacacuaauagaugcucuauugggagacccucagugugauggcuuucaaaauaagaaaugggaccuuuuuguugaacgaagcaaagccuacagcaacuguuacccuuaugaugugccggauuaugccucccuuaggucacuaguugccucauccggcacacuggaguuuaacaaugaaagcuucaauuggacuggagucacucaaaacggaacaaguucugcuugcauaaggagaucuaauaguaguuucuuuaguagauuaaauugguugacccacuuaaacuucaaauacccagcauugaacgugacuaugccaaacaaugaacaauuugacaaauuguacauuugggggguucaccacccggguacggacaaggaccaaaucuuccuguaugcucaaucaucaggaagaaucacaguaucuaccaaaagaagccaacaagcuguaaucccgaauaucggaucuagacccagaauaaggaauaucccuagcagaauaagcaucuauuggacaauaguaaaaccgggagacauacuuuugauuaacagcacagggaaucuaauugcuccuagggguuacuucaaaauacgaagugggaaaagcucaauaaugagaucagaugcacccauuggcaaaugcaagucugaaugcaucacuccaaauggaagcauucccaaugacaaaccauuccaaaauguaaacaggaucacauacggggccugucccagauauguuaagcaaagcacucugaaauuggcaacaggaaugcgaaauguaccagagaaacaaacuagaggcauauuuggcgcaauagcggguuucauagaaaaugguugggagggaaugguggaugguugguacgguuucaggcaucaaaauucugagggaagaggacaagcagcagaucucaaaagcacucaagcagcaaucgaucaaaucaaugggaagcugaaucgauugaucgggaaaaccaacgagaaauuccaucagauugaaaaagaauucucagaaguagaagggagaauucaggaccuugagaaauauguugaggacacuaaaauagaucucuggucauacaacgcagagcuucuuguugcccuggagaaccaacauacaauugaucuaacugacucagaaaugaacaaacuguuugaaaaaacaaagaagcaacugagggaaaaugcugaggauaugggcaaugguuguuucaaaauauaccacaaaugugacaaugccugcauaggaucaaucagaaauggaacuuaugaccacgauguguacagggaugaagcauuaaacaaccgguuccagaucaagggaguugagcugaagucaggguacaaagauuggauccuauggauuuccuuugccauaucauguuuuuugcuuuguguugcuuuguugggguucaucaugugggccugccaaaagggcaacauuaggugcaacauuugcauuuga

SEQ ID NO: 43818 - RNA, 1701 nt, Artificial Sequence
  derived and/or modified CDS sequence (wt) from hemagglutinin__InfluenzaA__AHM00806
augaagacuaucauugcuuugagcuacauucuaugucugguuuucgcucaaaaacuuccuggaaaugacaacagcacggcaacgcugugccuugggcaccaugcagugccaaacggaacgauagugaaaacaaucacgaaugaccaaauugaaguuacuaaugcuacugagcugguucagaguuccucaacaggugaaauaugcaacaguccucaucagauccuugauggagaaaacugcacacuaauagaugcucuauugggagacccucagugugauggcuuccaaaacaagaaaugggaccuuuuuguugaacgaagcaaagcccacagcaacuguuaccccuaugaugugccggauuaugccucccuuaggucacuaguugccucauccggcacacuggaguuuaacaaugaaagcuucaauuggacuggagucacucaaaacggaacaagcucugcuugcauaaggagaucuaauaauaguuucuuuaguagauugaauugguugacccacuuaaacuucaaauacccagcauugaacgugacuaugccaaacaaugaacaauuugacaaauuguacauuuggggaguucaccacccggguacggacaaggaccaaaucuuccuguaugcucaagcagcaggaagaaucacaguaucuaccaaaagaagccaacaagcuguaauuccgaauaucggauccagacccaggguaaggaauaucccuagcagaguaagcaucuauuggacaauaguaaaaccgggagacauacuuuugauuaacagcacagggaaucuaauugcuccuagggguuacuucaaaauacgaagugggaaaagcucaauaaugagaucagaugcacccauuggcaaaugcaauucugcaugcaucacuccaaacggaagcauucccaaugacaaaccauuccaaaauguaaacaggaucacauacggggccugucccagauauguuaagcaaaacacucugaaauuggcaacaggaaugagaaauguaccagagaaacaaacuagaggcauauuuggcgcaauagcugguuucauagaaaaugguugggagggaaugguggaugguugguaugguuucaggcaucaaaauucugagggaaggggacaagcagcagaucuuaaaagcacucaagcagcaaucgaucaaaucaaugggaagcugaauagauugaucgggaaaaccaacgagaaauuccaucagauugaaaaagaauucucagaagucgaagggagaauucaggaccuugagaaauauguugaggacacuaaaauagaucucuggucauacaacgcggaacuucuuguugcccuggagaaccaacacacaauugaucuaacugauucagaaaugaacaaacuguuugaaaaaacaaagaagcaacugagggaaaaugcugaggauaugggcaaugguuguuucaaaauauaccacaaaugugacaaugccugcauaggaucaaucagaaauggaacuuaugaccacuauguguacagagaugaagcauuaaacaaccgauuccagaucaagggaguugagcugaagucaggguacaaagauuggauccuauggauuuccuuugccacaucauguuuuuugcuuuguguugcuuuguugggguucaucaugugggccugccaaaaaggcaacauuaggugcaacauuugcauuuga

SEQ ID NO: 43819 - RNA, 1701 nt, Artificial Sequence
  derived and/or modified CDS sequence (wt) from hemagglutinin__InfluenzaA__AHM00818
augaagacuaucauugcuuugagcuacauucuaugucugguuuucgcucaaaaacuuccuggaaaugacaauagcacggcaacgcugugccuugggcaccaugcaguaccaaacggaacgauagugaaaacaaucacgaaugaccgaauugaaguuacuaaugcuacugagcugguucagaauuccucaauaggugaaauaugcgacaguccucaucagauccuugauggagaaaacuguacacuaauagaugcucuauugggagacccucagugugauggcuuucaaaauaagaaaugggaccuuuuuguugaacgaagcaaagccuacagcaacuguuacccuuaugaugugccggauuaugccucccuuaggucacuaguugccucauccggcacacuggaguuuaacaaugaaaacuucaauuggacuggagucacucaaaacggaacaaguucugcuugcauaaggagaucuaauaguaguuucuuuaguagauuaaauugguugacccacuuaaacuucaaauacccagcauugaacgugacuaugccaaacaaugaacaauuugacaaauuguacauuugggggguucaccacccggguacggacaaggaccaaaucuuccuguaugcucaaucaucaggaagaaucacaguaucuaccaaaagaagccaacaagcuguaaucccgaauaucggaucuagacccagaauaaggaauaucccuagcagaauaagcaucuauuggacaauaguaaaaccaggagacauacuuuugauuaacagcacagggaaucuaauugcuccuagggguuacuucaaaauacgaagugggaaaagcucaauaaugagaucagaugcacccauuggcaaaugcaagucugaaugcaucacuccaaauggaagcauuccaaaugacaaaccauuccaaaauguaaacaggaucacauacggggccugucccagauauguuaagcaaagcacucugaaauuggcaacaggaaugcgaaacguaccagagaaacaaacuagaggcauauuuggcgcaauagcggguuucauagaaaaugguugggagggaaugguggaugguugguacgguuucaggcaucaaaauucugaaggaagaggacaagcagcagaucucaaaagcacucaagcagcaaucgaucaaaucaaugggaagcugaaucgauugaucgggaaaaccaacgagaaauuccaucagauugaaaaagaauucucagaaguagaagggagaauucaggaccuugagaaauauguugaggacacuaaaauagaucucuggucauacaacgcggagcuucuuguugcccuggagaaccagcauacaauugaucugacugacucagaaaugaacaaacuguuugaaaaaacaaagaagcaacugagggaaaaugcugaggauaugggcaaugguuguuucaaaauauaccacaaaugugacaaugccugcauaggaucaaucagaaauggaacuuaugaccacgauguauacagggaugaagcauuaaacaaccgguuccagaucaagggaguugagcugaagucaggguacaaagauuggauccuauggauuuccuuugccauaucauguuuuuugcuuuguguugcuuuguugggguucaucaugugggccugccaaaagggcaacauuaggugcaacauuugcauuuga

SEQ ID NO: 43820 - RNA, 1701 nt, Artificial Sequence
  derived and/or modified CDS sequence (wt) from hemagglutinin__InfluenzaA__AHM00830
augaagacuaucauugcuuugagcuacauucuaugucugguuuucgcgcaaaaacuuccuggaaaugacaauagcacggcaacgcugugccuugggcaccaugcaguaccaaacggaacgauagugaaaacaaucacgaaugaccgaauugaaguuacuaaugcuacugagcugguucagaauuccucaauaggugaaauaugcgacaguccucaucagauccuugauggagaaaacuguacacuaauagaugcucuauugggagacccucagugugauggcuuucaaaauaagaaaugggaccuuuuuguugaacgaagcaaagccuacagcaacuguuacccuuaugaugugccggauuaugccucccuuaggucacuaguugccucauccggcacacuggaguuuaacaaugaaagcuucaauuggacuggagucacucaaaacggaacaaguucugcuugcauaaggagaucuaauaguaguuucuuuaguagauuaaauugguugacccacuuaaacuucaaauacccagcauugaacgugacuaugccaaacaaugaacaauuugacaaauuguacauuugggggguucaccacccggguacggacaaggaccaaaucuuccuguaugcucaaucaucaggaagaaucacaguaucuaccaaaagaagccaacaagcuguaaucccgaauaucggaucuagacccagaauaaggaauaucccuagcagaauaagcaucuauuggacaauaguaaaaccaggagacauacuuuugauuaacagcacagggaaucuaauugcuccuagggguuacuucaaaauacgaagugggaaaagcucaauaaugagaucagaugcacccauuggcaaaugcaagucugaaugcaucacuccaaauggaagcauuccaaaugacaaaccauuccaaaauguaaacaggaucacauacggggccugucccagauauguuaagcaaagcacucugaaauuggcaacaggaaugcgaaacguaccagagaaacaaacuagaggcauauuuggcgcaauagcggguuucauagaaaaugguugggagggaaugguggaugguugguacgguuucaggcaucaaaauuccgaaggaagaggacaagcagcagaucucaaaagcacucaagcagcaaucgaucaaaucaaugggaagcugaaucgauugaucgggaaaaccaacgagaaauuccaucagauugaaaaagaauucucagaaguagaagggagaauucaggaccuugagaaauauguugaggacacuaaaauagaucucuggucauacaacgcggagcuucuuguugcccuggagaaccaacauacaauugaucugacugacucagaaaugaacaaacuguuugaaaaaacaaagaagcaacugagggaaaaugcugaggauaugggcaaugguuguuucaaaauauaccacaaaugugacaaugccugcauaggaucaaucagaaauggaacuuaugaccacgauguauacagggaugaagcauuaaacaaccgguuccagaucaagggaguugagcugaagucaggguacaaagauuggauccuauggauuuccuuugccauaucauguuuuuugcuuuguguugcuuuguugggguucaucaugugggccugccaaaagggcaacauuaggugcaacauuugcauuuga

SEQ ID NO: 43821 - RNA, 1701 nt, Artificial Sequence
  derived and/or modified CDS sequence (wt) from hemagglutinin__InfluenzaA__AHM00842
augaagacuaucauugcuuugagcuacauucuaugucugguuuucgcucaaaaacuuccuggaaaugacaauagcacggcaacgcugugccuugggcaccaugcaguaccaaacggaacgauagugaaaacaaucacgaaugaccgaauugaaguuacuaaugcuacugagcugguucagaauuccucaauaggugaaauaugcgacaguccucaucagauccuugauggagaaaacugcacacuaauagaugcucuauugggagacccucagugugauggcuuucaaaauaagaaaugggaccuuuuuguugaacgaagcaaagccuacagcaacuguuacccuuaugaugugccggauuaugccucccuuaggucacuaguugccucauccggcacacuggaguuuaacaaugaaagcuucaauuggacuggagucacucaaaacggaacaaguucugcuugcauaaggagaucuaauaguaguuucuuuaguagauuaaauugguugacccacuuaaacuucaaauacccagcauugaacgugacuaugccaaacaaugaacaauuugacaaauuguacauuugggggguucaccacccggguacggacaaggaccaaaucuuccuguaugcucaaucaucaggaagaaucacaguaucuaccaaaagaagccaacaagcuguaaucccgaauaucggaucuagacccagaauaaggaauaucccuagcagaauaagcaucuauuggacaauaguaaaaccgggagacauacuuuugauuaacagcacagggaaucuaauugcuccuagggguuacuucaaaauacgaagugggaaaagcucaauaaugagaucagaugcacccauuggcaaaugcaagucugaaugcaucacuccaaauggaagcauucccaaugacaaaccauuccaaaauguaaacaggaucacauacggggccugucccagauauguuaagcaaagcacucugaaauuggcaacaggaaugcgaaauguaccagagaaacaaacuagaggcauauuuggcgcaauagcggguuucauagaaaaugguugggagggaaugguggaugguugguacgguuucaggcaucaaaauucugagggaagaggacaagcagcagaucucaaaagcacucaagcagcaaucgaucaaaucaaugggaagcugaaucgauugaucgggaaaaccaacgagaaauuccaucagauugaaaaagaauucucagaaguagaagggagaauucaggaccuugagaaauauguugaggacacuaaaauagaucucuggucauacaacgcagagcuucuuguugcccuggagaaccaacauacaauugaucuaacugacucagaaaugaacaaacuguuugaaaaaacaaagaagcaacugagggaaaaugcugaggauaugggcaaugguuguuucaaaauauaccacaaaugugacaaugccugcauaggaucaaucagaaauggaacuuaugaccacgauguguacagggaugaagcauuaaacaacagguuccagaucaagggaguugagcugaagucaggguacaaagauuggauccuauggauuuccuuugccauaucauguuuuuugcuuuguguugcuuuguugggguucaucaugugggccugccaaaagggcaacauuaggugcaacauuugcauuuga

SEQ ID NO: 43822 - RNA, 1701 nt, Artificial Sequence
  derived and/or modified CDS sequence (wt) from hemagglutinin__InfluenzaA__AHM00854
augaagacuaucauugcuuugagcuacauucuaugucugguuuucgcucaaaaacuuccuggaaaugacaauagcacggcaacgcugugccuugggcaccaugcaguaccaaacggaacgauagugaaaacaaucacgaaugaccgaauugaaguuacuaaugcuacugagcugguucagaauuccucaauaggugaaauaugcgacaguccucaucagauccuugauggagaaaacugcacacuaauagaugcucuauugggagacccucagugugauggcuuucaaaauaagaaaugggaccuuuuuguugaacgaagcaaagccuacagcaacuguuacccuuaugaugugccggauuaugccucccuuaggucacuaguugccucauccggcacacuggaguuuaacaaugaaagcuucaauuggacuggagucacucaaaacggaacaaguucugcuugcauaaggaaaucuaauaguaguuucuuuaguagauuaaauugguugacccacuuaaacuucaaauacccagcauugaacgugacuaugccaaacaaugaacaauuugacaaauuguacauuugggggguucaccacccggguacggacaaggaccaaaucuuccuguaugcucaaucaucaggaagaaucacaguaucuaccaaaagaagccaacaagcuguaaucccgaauaucggaucuagacccagaauaaggaauaucccuagcagaauaagcaucuauuggacaauaguaaaaccgggagacauacuuuugauuaacagcacagggaaucuaauugcuccuagggguuacuucaaaauacgaagugggaaaagcucaauaaugagaucagaugcacccauuggcaaaugcaagucugaaugcaucacuccaaauggaagcauucccaaugacaaaccauuccaaaauguaaacaggaucacauacggggccugucccagauauguuaagcaaagcacucugaaauuggcaacaggaaugcgaaauguaccagagaaacaaacuagaggcauauuuggcgcaauagcggguuucauagaaaaugguugggagggaaugguggaugguugguacgguuucaggcaucaaaauucugagggaagaggacaagcagcagaucucaaaagcacucaagcagcaaucgaucaaaucaaugggaagcugaaucgauugaucgggaaaaccaacgagaaauuccaucagauugaaaaagaauucucagaaguagaagggagaauucaggaccuugaaaaauauguugaggacacuaaaauagaucucuggucauacaacgcggagcuucuuguugcccuggagaaccaacauacaauugaucuaacugacucagaaaugaacaaacuguuugaaaaaacaaagaagcaacugagggaaaaugcugaggauaugggcaaugguuguuucaaaauauaccacaaaugugacaaugccugcauaggaucaaucagaaauggaacuuaugaccacgauguauacagggaugaagcauuaaacaaccgguuccagaucaagggaguugagcugaagucaggguacaaagauuggauccuauggauuuccuuugccauaucauguuuuuugcuuuguguugcuuuguugggguucaucaugugggccugccaaaagggcaacauuaggugcaacauuugcauuuga

SEQ ID NO: 43823 - RNA, 1701 nt, Artificial Sequence; identical to SEQ ID NO: 43822
  derived and/or modified CDS sequence (wt) from hemagglutinin__InfluenzaA__AHM00866

SEQ ID NO: 43824 - RNA, 1701 nt, Artificial Sequence; identical to SEQ ID NO: 41870
  derived and/or modified CDS sequence (wt) from hemagglutinin__InfluenzaA__AHM00878

SEQ ID NO: 43825 - RNA, 1701 nt, Artificial Sequence; identical to SEQ ID NO: 42100
  derived and/or modified CDS sequence (wt) from hemagglutinin__InfluenzaA__AHM00890

SEQ ID NO: 43826 - RNA, 1701 nt, Artificial Sequence; identical to SEQ ID NO: 41880
  derived and/or modified CDS sequence (wt) from hemagglutinin__InfluenzaA__AHM00902

SEQ ID NO: 43827 - RNA, 1701 nt, Artificial Sequence; identical to SEQ ID NO: 43758
  derived and/or modified CDS sequence (wt) from hemagglutinin__InfluenzaA__AHM00914

SEQ ID NO: 43828 - RNA, 1701 nt, Artificial Sequence
  derived and/or modified CDS sequence (wt) from hemagglutinin__InfluenzaA__AHM00926
augaagacuaucauugcuuugagcuacauucuaugucugguuuucgcucaaaaacuuccuggaaaugacaauagcacggcaacgcugugccuugggcaccaugcaguaccaaacggaacgauagugaaaacaaucacgaaugaccgaauugaaguuacuaaugcuacugagcugguucagaauuccucaauaggugaaauaugcgacaguccucaucagauucuugauggagaaaacugcacacuaauagaugcucuauugggagacccucagugugauggcuuucaaaauaagaaaugggaccuuuuuguugaacgaagcaaagccuacagcaacuguuacccuuaugaugugccggauuaugccucccuuaggucacuaguugccucauccggcacacuggaguuuaacaaugaaagcuucaauuggacuggagucacucaaaacggaacaaguucugcuugcauaaggagaucuaauaguaguuucuuuaguagauuaaauugguugacccauuuaaacuucaaauacccagcauugaacgugacuaugccaaacaaugaacaauuugacaaauuguacauuugggggguucaccacccagguacggacaaggaccaaaucuuccuguaugcucaaucaucaggaagaaucacaguaucuaccaaaagaagccaacaagcuguaaucccaaauaucggaucuagacccagaauaaggaauaucccuagcagaauaagcaucuauuggacaauaguaaaaccgggagacauacuuuugauuaacagcacagggaaucuaauugcuccuagggguuacuucaaaauacgaagugggaaaagcucaauaaugagaucagaugcacccauuggcaaaugcaagucugaaugcaucacuccaaauggaagcauucccaaugacaaaccauuccaaaauguaaacaggaucacauacggggccugucccagauauguuaagcaaagcacucugaaauuggcaacaggaaugcgaaauguaccagagaaacaaacuagaggcauauuuggcgcaauagcagguuucauagaaaaugguugggagggaaugguggaugguugguacgguuucaggcaucaaaauucugagggaagaggacaagcagcagaucucaaaagcacccaagcagcaaucgaucaaaucaaugggaagcugaaucgauugaucgggaaaaccaacgagaaauuccaucagauugaaaaagaauucucagaaguagaagggagaauucaggaccuugagaaauauguugaggacacuaaaauagaucucuggucauacaacgcggagcuucuuguugcccuggagaaccaacauacaauugaucuaacugacucagaaaugaacaaacuguuugaaaaaacaaagaagcaacugagggaaaaugcugaggauaugggcaaugguuguuucaaaauauaccacaaaugugacaaugccugcauaggaucaauaagaaauggaacuuaugaccacaauguguacagggaugaagcauuaaacaaccgguuccagaucaagggaguugagcugaagucaggguacaaagauuggauccuauggauuuccuuugccauaucauguuuuuugcuuuguguugcuuuguugggguucaucaugugggccugccaaaagggcaacauuaggugcaacauuugcauuuga

SEQ ID NO: 43829 - RNA, 1701 nt, Artificial Sequence
  derived and/or modified CDS sequence (wt) from hemagglutinin__InfluenzaA__AHM00938
augaagaccaucauugcuuugagcuacauucuaugucuaguuuucgcucaagaacuuccuggaaaugacgacagcacggcaacgcugugccuugggcaccaugcagugccaaacggaacgauagugaaaacaaucacgaaugaccaaauugaaguuacuaaugcuacugagcugguucagaguuccucaacaggugaaauaugcaacaguccucaucagauccuugauggagaaaacugcacacuaauagaugcucuauugggagacccucagugugauggcuuccaaaacaagaaaugggaccuuuuuguugaaagaagcaaagcccacagcaacuguuacccuuaugaugugccagauuaugccucccuuaggucacuaguugccucauccggcacacuggaguuuaacaaugaaagcuucaauuggacuggagucacucaaaacggaacaagcucugcuugcauaaggagaucuaauaauaguuucuuuaguagauugaauugguugacccacuuaaacuucaaauacccagcauugaacgugacuaugccaaacaaugaacaauuugacaaauuguacauuugggggguucaccacccggguacggacaaggaccaaaucuuccuguaugcucaagcaucaggaagaaucacaguaucuaccaaaagaagccaacaagcuguaauuccgaauaucggaucuagacccagaguaaggaauaucccuagcagaguaagcaucuauuggacaauaguaaaaccaggagacauacuuuugauuaacagcacagggaaucuaauugcuccuagggguuacuucaaaauacgaagugggaaaagcucaauaaugagaucagaugcacccauuggcaaaugcaauucugcaugcaucacuccaaauggaagcauucccaaugacaaaccauuccaaaauguaaacaggaucacauacggggccugucccagauaugucaagcaaaacacucugaaauuggcaacaggaaugagaaauguaccagagaaacaaacuagaggcauauuuggcgcaauagcggguuucauagaaaaugguugggagggaaugguggaugguugguacgguuucaggcaucaaaauucugagggaaggggacaagcagcagaucucaaaagcacucaagcagcaaucgaucaaaucaaugggaagcugaauagauugaucgggaaaaccaacgagaaauuccaucagauugaaaaagaauucucagaagucgaagggagaauucaggaccuugagaaauauguugaggacacuaaaauagaucucuggucauacaacgcggagcuucuuguugcccuggagaaccaacacacaauugaucuaacugacucagaaaugaacaaacuguuugaaaaaacaaagaagcaacugagggaaaaugcugaggauaugggcaaugguuguuucaaaauauaccacaaaugugacaaugccugcauaggaucaaucagaaaugggacuuaugaucacgauguguacagagaugaagcauuaaacaaccgauuccagaucaagggaguugagcugaagucaggguacaaagauuggauccuauggauuuccuuugccauaucauguuuuuugcuuuguguugcuuuguugggguucaucaugugggccugccaaaaaggcaacauuaggugcaacauuugcauuuga

SEQ ID NO: 43830 - RNA, 1701 nt, Artificial Sequence
  derived and/or modified CDS sequence (wt) from hemagglutinin__InfluenzaA__AHM00950
augaagacuaucauugcuuugagcuacauucuaugucugguuuucgcucaaaaacuuccuggaaaugacaauagcacggcaacgcugugccuugggcaccaugcaguaccaaacggaacgauagugaaaacaaucacgaaugaccgaauugaaguuacuaaugcuacugagcugguucagaauuccucaauaggugaaauaugcgacaguccucaucagauucuugauggagaaaacugcacacuaauagaugcucuauugggagacccucagugugauggcuuucaaaauaagaaaugggaccuuuuuguugaacgaagcaaagccuacagcaacuguuacccuuaugaugugccggauuaugucucccuuaggucacuaguugccucauccggcacacuggaguuuaacaaugaaagcuucaauuggacuggagucacucaaaacggaacaaguucugcuugcauaaggagaucuaauaguaguuucuuuaguagauuaaauugguugacccacuuaaacuucaaauacccagcauugaacgugacuaugccaaacaaugaacaauuugacaaauuguacauuugggggguucaccacccagguacggacaaggaccaaaucuuccuguaugcucaaucaucaggaagaaucacaguaucuaccaaaagaagccaacaagcuguaaucccaaauaucggaucuagacccagaauaaggaauaucccuagcagaauaagcaucuauuggacaauaguaaaaccgggagacauacuuuugauuaacagcacagggaaucuaauugcuccuagggguuacuucaaaauacgaagugggaaaagcucaauaaugagaucagaugcacccauuggcaaaugcaagucugaaugcaucacuccaaauggaagcauucccaaugacaaaccauuccaaaauguaaacaggaucacauacggggccugucccagauauguuaagcaaagcacucugaaauuggcaacaggaaugcgaaauguaccagagaaacaaacuagaggcauauuuggcgcaauagcagguuucauagaaaaugguugggagggaaugguggaugguugguacgguuucaggcaucaaaauucugagggaagaggacaagcagcagaucucaaaagcacccaagcagcaaucgaucaaaucaaugggaagcugaaucgauugaucgggaaaaccaacgagaaauuccaucagauugaaaaagaauucucagaaguagaagggagaauucaggaccuugagaaauauguugaggacacuaaaauagaucucuggucauacaacgcggagcuucuuguugcccuggagaaccaacauacaauugaucuaacugacucagaaaugaacaaacuguuugaaaaaacaaagaagcaacugagggaaaaugcugaggauaugggcaaugguuguuucaaaauauaccacaaaugugacaaugccugcauaggaucaauaagaaauggaacuuaugaccacaauguguacagggaugaagcauuaaacaaccgguuccagaucaagggaguugagcugaagucaggguacaaagauuggauccuauggauuuccuuugccaugucauguuuuuugcuuuguguugcuuuguugggguucaucaugugggccugccaaaagggcaacauuaggugcaacauuugcauuuga

SEQ ID NO: 43831 - RNA, 1701 nt, Artificial Sequence
  derived and/or modified CDS sequence (wt) from hemagglutinin__InfluenzaA__AHM00962
augaagaccaucauugcuuugagcuacauucuaugucuaguuuucgcucaagaacuuccuggaaaugacgacagcacggcaacgcugugccuugggcaccaugcagugccaaacggaacgauagugaaaacaaucacgaaugaccaaauugaaguuacuaaugcuacugagcugguucagaguuccucaacaggugaaauaugcaacaguccucaucagauccuugauggagaaaacugcacacuaauagaugcucuauugggagacccucagugugauggcuuccaaaacaagaaaugggaccuuuuuguugaaagaagcaaagcccacagcaacuguuacccuuaugaugugccagauuaugccucccuuaggucacuaguugccucauccggcacacuggaguuuaacaaugaaagcuucaauuggacuggagucacucaaaacggaacaagcucugcuugcauaaggagaucuaauaauaguuucuuuaguagauugaauugguugacccacuuaaacuucaaauacccagcauugaacgugacuaugccaaacaaugaacaauuugacaaauuguacauuugggggguucaccacccggguacggacaaggaccaaaucuuccuguaugcucaagcaucaggaagaaucacaguaucuaccaaaagaagccaacaagcuguaauuccgaauauuggaucuagacccagaguaaggaauaucccuagcagaguaagcaucuauuggacaauaguaaaaccaggagacauacuuuugauuaacagcacagggaaucuaauugcuccuagggguuacuucaaaauacgaagugggaaaagcucaauaaugagaucagaugcacccauuggcaaaugcaauucugcaugcaucacuccaaauggaagcauucccaaugacaaaccauuccaaaauguaaacaggaucacauacggggccugucccagauaugucaagcaaaacacucugaaauuggcaacaggaaugagaaauguaccagagaaacaaacuagaggcauauuuggcgcaauagcggguuucauagaaaaugguugggagggaaugguggaugguugguacgguuucaggcaucaaaauucugagggaaggggacaagcagcagaucucaaaagcacucaagcagcaaucgaucaaaucaaugggaagcugaauagauugaucgggaaaaccaacgagaaauuccaucagauugaaaaagaauucucagaagucgaagggagaauucaggaccuugagaaauauguugaggacacuaaaauagaucucuggucauacaacgcggagcuucuuguugcccuggagaaccaacacacaauugaucuaacugacucagaaaugaacaaacuguuugaaaaaacaaagaagcaacugagggaaaaugcugaggauaugggcaaugguuguuucaaaauauaccacaaaugugacaaugccugcauaggaucaaucagaaauggaacuuaugaucacgauguguacagagaugaagcauuaaacaaccgauuccagaucaagggaguugagcugaagucaggguacaaagauuggauccuauggauuuccuuugccauaucauguuuuuugcuuuguguugcuuuguugggguucaucaugugggccugccaaaaaggcaacauuaggugcaacauuugcauuuga

SEQ ID NO: 43832 - RNA, 1701 nt, Artificial Sequence
  derived and/or modified CDS sequence (wt) from hemagglutinin__InfluenzaA__AHM00974
augaagaccaucauugcuuugagcuacauucuaugucuaguuuucgcucaagaacuuccuggaaaugacgacagcacggcaacgcugugccuugggcaccaugcagugccaaacggaacgauagugaaaacaaucacgaaugaccaaauugaaguuacuaaugcuacugagcugguucagaguuccucaacaggugaaauaugcaacaguccucaucagauccuugauggagaaaacugcacacuaauagaugcucuauugggagacccucagugugauggcuuccaaaacaagaaaugggaccuuuuuguugaaagaagcaaagcccacagcaacuguuacccuuaugaugugccagauuaugccucccuuaggucacuaguugccucauccggcacacuggaguuuaacaaugaaagcuucaauuggacuggagucacucaaaacggaacaagcucugcuugcauaaggagaucuaauaauaguuucuuuaguagauugaauugguugacccacuuaaacuucaaauacccagcauugaacgugacuaugccaaacaaugaacaauuugacaaauuguacauuugggggguucaccacccggguacggacaaggaccaaaucuuccuguaugcucaagcaucaggaggaaucacaguaucuaccaaaagaagccaacaagcuguaauuccgaauaucggaucuagacccagaguaaggaauaucccuagcagaguaagcaucuauuggacaauaguaaaaccaggagacauacuuuugauuaacagcacagggaaucuaauugcuccuagggguuacuucaaaauacgaagugggaaaagcucaauaaugagaucagaugcacccauuggcaaaugcaauucugcaugcaucacuccaaauggaagcauucccaaugacaaaccauuccaaaauguaaacaggaucacauacggggccugucccagauaugucaagcaaaacacucugaaauuggcaacaggaaugagaaauguaccagagaaacaaacuagaggcauauuuggcgcaauagcggguuucauagaaaaugguugggagggaaugguggaugguugguacgguuucaggcaucaaaauucugagggaaggggacaagcagcagaucucaaaagcacucaagcagcaaucgaucaaaucaaugggaagcugaauagauugaucgggaaaaccaacgagaaauuccaucagauugaaaaagaauucucagaagucgaagggagaauucaggaccuugagaaauauguugaggacacuaaaauagaucucuggucauacaacgcggagcuucuuguugcccuggagaaccaacacacaauugaucuaacugacucagaaaugaacaaacuguuugaaaaaacaaagaagcaacugagagaaaaugcugaggauaugggcaaugguuguuucaaaauauaccacaaaugugacaaugccugcauaggaucaaucagaaauggaacuuaugaucacgauguguacagagaugaagcauuaaacaaccgauuccagaucaagggaguugagcugaagucaggguacaaagauuggauccuauggauuuccuuugccauaucauguuuuuugcuuuguguugcuuuguugggguucaucaugugggccugccaaaaaggcaacauuaggugcaacauuugcauuuga

SEQ ID NO: 43833 - RNA, 1683 nt, Artificial Sequence
  derived and/or modified CDS sequence (wt) from hemagglutinin__InfluenzaA__AHM24224
augaacacucaaauccugguauucgcucugauugcgaucauuccaacaaaugcagacaaaaucugccucggacaucaugccgugucaaacggaaccaaaguaaacacauuaacugaaagaggaguggaagucgucaaugcaacugaaacaguggaacgaacaaacauccccaggaucugcucaaaagggaaaaggacaguugaccucggucaauguggacuccuggggacaaucacuggaccaccucaaugugaccaauuccuagaauuuucagccgauuuaauuauugagaggcgagaaggaagugaugucuguuauccugggaaauucgugaaagaagaagcucugaggcaaauucucagagaaucaggcggaauugacaaggaagcaaugggauucacauacaguggaauaagaacuaauggagcaaccagugcauguaggagaucaggaucuucauucuaugcagaaaugaaauggcuccugucaaacacagauaaugcugcauucccgcagaugacuaagucauauaaaaauacaagaaaaagcccagcucuaauaguaugggggauccaucauuccguaucaacugcagagcaaaccaagcuauaugggaguggaaacaaacuggugacaguugggaguucuaauuaucaacaaucuuuuguaccgaguccaggagcgagaccacaaguuaauggucuaucuggaagaauugacuuucauuggcuaaugcuaaaucccaaugauacagucacuuucaguuucaauggggcuuucauagcuccagaccgugcaagcuuccugagaggaaaaucuaugggaauccagaguggaguacagguugaugccaauugugaaggggacugcuaucauaguggagggacaauaauaaguaacuugccauuucagaacauagauagcagggcaguuggaaaauguccgagauauguuaagcaaaggagucugcugcuagcaacagggaugaagaauguuccugagauuccaaagggaagaggccuauuuggugcuauagcggguuucauugaaaauggaugggaaggccuaauugaugguugguaugguuucagacaccagaaugcacagggagagggaacugcugcagauuacaaaagcacucaaucggcaauugaucaaauaacaggaaaauuaaaccggcuuauagaaaaaaccaaccaacaauuugaguugauagacaaugaauucaaugagguagagaagcaaaucgguaaugugauaaauuggaccagagauucuauaacagaaguguggucauacaaugcugaacucuugguagcaauggagaaccagcauacaauugaucuggcugauucagaaauggacaaacuguacgaacgagugaaaagacagcugagagagaaugcugaagaagauggcacugguugcuuugaaauauuucacaagugugaugaugacuguauggccaguauuagaaauaacaccuaugaucacagcaaauacagggaagaggcaaugcaaaauagaauacagauugacccagucaaacuaagcagcggcuacaaagaugugauacuuugguuuagcuucggggcaucauguuucauacuucuagccauuguaaugggccuugucuucauauguguaaagaauggaaacaugcggugcacuauuuguauauaa

SEQ ID NO: 43834 - RNA, 1683 nt, Artificial Sequence
  derived and/or modified CDS sequence (wt) from hemagglutinin__InfluenzaA__AHM24236
augaacacucaaauccugguauucgcucugauugcgaucauuccaacaaaugcagacaaaaucugccucggacaucaugccgugucaaacggaaccaaaguaaacacauuaacugaaagaggaguggaagucgucaaugcaacugaaacaguggaacgaacaaacauccccaggaucugcucaaaagggaaaaggacaguugaccucggucaauguggacuccuggggacaaucacuggaccaccucaaugugaccaauuccuagaauuuucagccgauuuaauuauugagaggcgagaaggaagugaugucuguuauccugggaaauucgugaaugaagaagcucugaggcaaauucucagagaaucaggcggaauugacaaggaagcaaugggauucacauacaguggaauaagaacuaauggagcaaccagugcauguaggagaucaggaucuucauucuaugcagaaaugaaauggcuccugucaaacacagauaaugcugcauucccgcagaugacuaagucauauaaaaauacaagaaaaagcccagcucuaauaguaugggggauccaucauuccguaucaacugcagagcaaaccaagcuauaugggaguggaaacaaacuggugacaguugggaguucuaauuaucaacaaucuuuuguaccgaguccaggagcgagaccacaaguuaauggucuaucuggaagaauugacuuucauuggcuaaugcuaaaccccaaugauacagucacuuucaguuucaauggggcuuucauagcuccagaccgugcaagcuuccugagaggaaaaucuaugggaauccagaguggaguacagguugaugccaauugugaaggggacugcuaucauaguggagggacaauaauaaguaacuugccauuucagaacauagauagcagggcaguuggaaaauguccgagauauguuaagcaaaggagucugcugcuagcaacagggaugaagaauguuccugagauuccaaagggaagaggccuauuuggugcuauagcggguuucauugaaaauggaugggaaggccuaauugaugguugguaugguuucagacaccagaaugcacagggagagggaacugcugcagauuacaaaagcacucaaucggcaauugaucaaauaacaggaaaauuaaaccggcuuauagaaaaaaccaaccaacaauuugaguugauagacaaugaauucaaugagguagagaagcaaaucgguaaugugauaaauuggaccagagauucuauaacagaaguguggucauacaaugcugaacucuugguagcaauggagaaccagcauacaauugaucuggcugauucagaaauggacaaacuguacgaacgagugaaaagacagcugagagagaaugcugaagaagauggcacugguugcuuugaaauauuucacaagugugaugaugacuguauggccaguauuagaaauaacaccuaugaucacagcaaauacagggaagaggcaaugcaaaauagaauacagauugacccagucaaacuaagcagcggcuacaaagaugugauacuuugguuuagcuucggggcaucauguuucauacuucuagccauuguaaugggccuugucuucauauguguaaagaauggaaacaugcggugcacuauuuguauauaa

SEQ ID NO: 43835 - RNA, 1683 nt, Artificial Sequence
  derived and/or modified CDS sequence (wt) from hemagglutinin__InfluenzaA__AHM24248
augaacacucaaauccugguauucgcucugauugcgaucauuccaacaaaugcagacaaaaucugccucggacaucaugccgugucaaacggaaccaaaguaaacacauuaacugaaagaggaguggaagucgucaaugcaacugaaacaguggaacgaacaaacauccccaggaucugcucaaaagggaaaaggacaguugaccucggccaauguggacuccuggggacaaucacuggaccaccucaaugugaccaauuccuagaauuuucagccgauuuaauuauugagaggcgagaaggaagugaugucuguuauccugggaaauucgugaaugaagaagcucugaggcaaauucucagagaaucaggcggaauugacaaggaagcaaugggauucacauacaguggaauaagaacuaauggagcaaccagugcauguaggagaucaggaucuucauucuaugcagaaaugaaauggcuccugucaaacacagauaaugcugcauucccgcagaugacuaagucauauaaaaauacaagaaaaagcccagcucuaauaguaugggggauccaucauuccguaucaacugcagagcaaaccaagcuauaugggaguggaaacaaacuggugacaguugggaguucuaauuaucaacaaucuuuuguaccgaguccaggagcgagaccacaaguuaauggucuaucuggaagaauugacuuucauuggcuaaugcuaaaucccaaugauacagucacuuucaguuucaauggggcuuucauagcuccagaccgugcaagcuuccugagaggaaaaucuaugggaauccagaguggaguacagguugaugccaauugugaaggggacugcuaucauaguggagggacaauaauaaguaacuugccauuucagaacauagauagcagggcaguuggaaaauguccgagauauguuaagcaaaggagucugcugcuagcaacagggaugaagaauguuccugagauuccaaagggaagaggccuauuuggugcuauagcggguuucauugaaaauggaugggaaggccuaauugaugguugguaugguuucagacaccagaaugcacagggagagggaacugcugcagauuacaaaagcacucaaucggcaauugaucaaauaacaggaaaauuaaaccggcuuauagaaaaaaccaaccaacaauuugaguugauagacaaugaauucaaugagguagagaagcaaaucgguaaugugauaaauuggaccagagauucuauaacagaaguguggucauacaaugcugaacucuugguagcaauggagaaccagcauacaauugaucuggcugauucagaaauggacaaacuguacgaacgagugaaaagacagcugagagagaaugcugaagaagauggcacugguugcuuugaaauauuucacaagugugaugaugacuguauggccaguauuagaaauaacaccuaugaucacagcaaauacagggaagaggcaaugcaaaauagaauacagauugacccagucaaacuaagcagcggcuacaaagaugugauacuuugguuuagcuucggggcaucauguuucauacuucuagccauuguaaugggccuugucuucauauguguaaagaauggaaacaugcggugcacuauuuguauauaa

SEQ ID NO: 43836 - RNA, 1701 nt, Artificial Sequence
  derived and/or modified CDS sequence (wt) from hemagglutinin__InfluenzaA__AHM98309
augaaggcaauacuaguaguucugcuauauacauuugcaaccgcaaaugcagacacauuauguauagguuaucaugcgaacaauucaacagacacuguagacacaguacuagaaaagaauguaacaguaacacacucuguuaaccuucuagaagacaagcauaacgggaaacuaugcaaacuaagagggguagccccauugcauuuggguaaauguaacauugcuggcuggauucugggaaauccagagugugaaucacucuccacagcaagcucaugguccuacauuguggaaacaucuaguucagacaauggaacguguuacccaggagauuucaucaauuaugaggagcuaagagagcaauugagcucagugucaucauuugaaagguuugagguauuccccaagacaaguucauggcccaaucaugacucgaacaaagguguaacggcagcauguccucaugcuggagcaaaaagcuucuacaaaaauuuaauauggcuaguuaaaaaaggaaauucauacccaaagcucagcaaauccuacauuaaugauaaagggaaagaaguccucgugcuguggggcauucaccauccaucuacuacugcugaccaacaaagucucuaucagaaugcagaugcauauguuuuuguggggacaucaagauacagcaagaaguucaagccggaaauagcaauaagacccaaagugagggaucaagaagggagaaugaacuauuacuggacacuaguagagccgggagacaaaauaacauucgaagcaacuggaaaucuagugguaccgagauaugcauucgcaauggaaagaaaugcuggaucugguauuaucauuucagauacaccaguccacgauugcaauacaacuugucagacacccaagggugcuauaaacaccagccucccauuucagaauauacauccgaucacaauuggaaaauguccaaaauauguaaaaagcacaaaauugagacuggccacaggauugaggaaugucccgucuauucaaucuagaggccuauuuggggccauugccggcuucauugaagggggguggacagggaugguagauggaugguacgguuaucaccaucaaaaugagcaggggucaggauaugcagccgaccugaagagcacacagaaugccauugacaagauuacuaacaaaguaaauucuguuauugaaaagaugaauacacaguucacagcaguagguaaagaguucaaccaccuggaaaaaagaauagagaauuuaaauaaaaaaguugaugaugguuuccuggacauuuggacuuacaaugccgaacuguugguucuauuggaaaaugaaagaacuuuggacuaccacgauucaaaugugaagaacuuguaugaaaagguaagaaaccaguuaaaaaacaaugccaaggaaauuggaaacggcugcuuugaauuuuaccacaaaugcgauaacacgugcauggaaagugucaaaaaugggacuuaugacuacccaaaauacucagaggaagcaaaauuaaacagagaagaaauagaugggguaaagcuggaaucaacaaggauuuaccagauuuuggcgaucuauucaacugucgccaguucauugguacugguagucucccugggggcaaucaguuucuggaugugcucuaaugggucucuacaguguagaauauguauuuaa

SEQ ID NO: 43837 - RNA, 1710 nt, Artificial Sequence
  derived and/or modified CDS sequence (wt) from hemagglutinin__InfluenzaA__AHM98339
augaaggcaauacuaguaguucugcuauauacauuugcaaccgcaaaugcagacacauuauguauagguuaucaugcgaacaauucaacagacacuguagacacaguacuagaaaagaauguaacaguaacacacucugucaaccuucuagaagacaagcauaacgggaaacuaugcaagcuaagagggguagccccauugcauuuggguaaauguaacauugcuggcuggauccugggaaauccagagugugaaucacucuccacagcaagcucaugguccuacauuguggaaacaucuaguucagacaauggaacguguuacccaggagauuucaucgauuaugaggagcuaagagagcaauugagcucagugucaucauuugaaagguuugagauauuccccaagacaaguucauggcccaaucaugacucgaacaaagguguaacggcagcauguccucaugcuggagcaaaaagcuucuacaaaaauuuaauauggcuaguuaaaaaaggaaauucauacccaaagcucagcaaauccuacauuaaugauaaagggaaagaaguccucgugcuauggggcauucaccauccaucuacuacugcugaccaacaaagucucuaucagaaugcagaugcauauguuuuuguggggacaucaagauacagcaagaaguucaagccggaaauagcaauaagacccaaagugagagaucaagaagggagaaugaacuauuacuggacacuaguagagccgggagacaaaauaacauucgaagcaacuggaaaucuagugguaccgagauaugcauucgcaauggaaagaaaugcuggaucugguauuaucauuucagauacaccaguccacgauugcaauacaacuugucagacacccaagggugcuauaaacaccagccucaccagccucccauuucagaauauacauccgaucacaauuggaaaauguccaaaauauguaaaaagcacaaaauugagacuggccacaggauugaggaaugucccaucuauucaaucuagaggccuauuuggggccauugccggcuucauugaagggggguggacagggaugguagauggaugguacgguuaucaccaucaaaaugagcaggggucaggauaugcagccgaccugaagagcacacagaaugccauugacaagauuacuaacaaaguaaauucuguuauugaaaaaaugaauacacaguucacagcaguagguaaagaguucaaccaccuggaaaaaagaauagagaauuuaaauaaaaaaguugaugaugguuuccuggacauuuggacuuacaaugccgaacuguugguucuauuggaaaaugaaagaacuuuggacuaccacgauucaaaugugaagaacuuauaugaaaagguaagaaaccaguuaaaaaacaaugccaaggaaauuggaaacggcugcuuugaauuuuaccacaaaugcgauaacacgugcauggaaagugucaaaaaugggacuuaugacuacccaaaauacucagaggaagcaaaauuaaacagagaagaaauagaugggguaaagcuggaaucaacaaggauuuaccagauuuuggcgaucuauucaacugucgccaguucauuaguacugguagucucccugggggcaaucaguuucuggaugugcucuaaugggucucuacaguguagaauauguauuuaa

SEQ ID NO: 43838 - RNA, 1701 nt, Artificial Sequence
  derived and/or modified CDS sequence (wt) from hemagglutinin__InfluenzaA__AHM98350
augaaggcaauacuaguaguuaugcuauauacauuugcaaccgcaaaugcagacacauuauguauagguuaucaugcgaacaauucaacagacacuguagacacaguacuagaaaagaauguaacaguaacacacucuguuaaucuucuagaagacaagcauaacgggaaacuaugcaaacuaagagggguagccccauugcauuuggguaaauguaacauugcuggcuggauucugggaaauccagagugugaaucacucuccacagcaagcucaugguccuacauuguggaaacaucuaguucagacaauggaacguguuacccaggagauuucaucgauuaugaggagcuaagagagcaauugagcucagugucaucauuugaaagguuugagauauuccccaaaacaaguucauggcccaaucaugacgcgaacaaagguguaacggcagcauguccucaugcuggagcaaaaggcuucuacaaaaauuuaauauggcuaguuaaaaaaggaaauucauacccaaagcucagcaaauccuacauuaaugauaaagggaaagaaguccucgugcuauggggcauucaccauccaucuacuacugcugaccaacaaagucucuaucagaaugcagauacauauguuuuuguggggacaucaagauacagcaagaaguucaagccggaaauagcaauaagacccaaagugagggaucaagaagggagaaugaacuauuacuggacacuaguagagccgggagacaaaauaacauucgaagcaacuggaaaucuagugguaccgagauaugcauucgcaauggaaagaaaugcuggaucugguauuaucauuucagauacaccaguccacgauugcaauacaacuugucagacacccaagggugcuauaaacaccagccucccauuucagaauauacauccgaucacaauuggaaaauguccaaaauauguaaaaagcacaaaauugagacuggccacaggauugaggaaugucccgucuauucaaucuagaggccuauuuggggccauugccggcuucauugaagggggguggacagggaugguagauggaugguacgguuaucaccaucaaaaugagcaggggucaggauaugcagccgaccugaagagcacacagaaugccauugacaagauuacuaacaaaguaaauucuguuauugaaaagaugaauacacaguucacagcaguagguaaagaguucaaccaccuggaaaaaagaauagagaauuuaaauaaaaaaguugaugaugguuuccuggacauuuggacuuacaaugccgaacuguugguucuauuggaaaaugaaagaacuuuggacuaccacgauucaaaugugaagaacuuauaugaaaagguaagaaaccaguuaaaaaacaaugccaaggaaauuggaaauggcugcuuugaauuuuaccacaaaugcgauaacacgugcauggaaagugucaaaaaugggacuuaugacuacccaaaauacucagaggaagcaaaauuaaacagagaagaaauagaugggguaaagcuggaaucaacaaggauuuaccagauuuuggcgaucuauucaacugucgccaguucauugguacugguagucucccugggggcaaucaguuuuuggaugugcucuaaugggucucuacaguguagaauauguauuuaa

SEQ ID NO: 43839 - RNA, 1701 nt, Artificial Sequence
  derived and/or modified CDS sequence (wt) from hemagglutinin__InfluenzaA__AHM98361
augaaggcaauacuaguaguucugcuauauacauuugcaaccgcaaaugcagacacauuauguauagguuaucaugcgaacaauucaacagacacuguagacacaguacuagaaaagaauguaacaguaacacacucuguuaaucuucuagaagacaagcauaacgggaaacuaugcaaacuaagagggguagccccauugcauuuggguaaauguaacauugcuggcuggauccugggaaauccagagugugaaucacucuccacagcaagcucaugguccuacauuguggaaacaucuaguucagacaauggaacguguuacccaggagauuucaucgauuaugaggagcuaagagagcaauugagcucagugucaucauuugaaagguuugagauauuccccaagacaaguucauggcccaaucaugacucgaacaaagguguaacggcagcauguccucaugcuggagcaaaaggcuucuacaaaaauuuaauauggcuaguuaaaaaaggaaauucauacccaaagcucagcaaauccuacauuaaugauaaagggaaagaaguccucgugcuauggggcauucaccauccaucuacuacugcugaccaacaaagucucuaucagaaugcagauacauauguuuuuguggggacaucaagauacagcaagaaguucaagccggaaauagcaauaagacccaaagugagggaucaagaagggagaaugaacuauuacuggacacuaguagagccgggagacaaaauaacauucgaagcaacuggaaaucuagugguaccgagauaugcauucgcaauggaaagaaaugcuggaucugguauuaucauuucagauacaccaguccacgauugcaauacaacuugucagacacccaagggugcuauaaacaccagccucccauuucagaauauacauccgaucacaauuggaaaauguccaaaauauguaaaaagcacaaaauugagacuggccacaggauugaggaaugucccguccauucaaucuagaggccuauuuggggccauugccggcuucauugaagggggguggacagggaugguagauggaugguacgguuaucaccaucaaaaugagcaggggucaggauaugcagccgaccugaagagcacacagaaugccauugacaagauuacuaacaaaguaaauucuguuauugaaaagaugaauacacaguucacagcaguagguaaagaguucaaccaccuggaaaaaagaauagagaauuuaaauaaaaaaguugaugaugguuuccuggacauuuggacuuacaaugccgaacuguugguucuauuggaaaaugaaagaacuuuggacuaccacgauucaaaugugaagaacuuauaugaaaagguaagaaaccaguuaaaaaacaaugccaaggaaauuggaaauggcugcuuugaauuuuaccacaaaugcgauaacacgugcauggaaagugucaaaaaugggacuuaugacuacccaaaauacucagaggaagcaaaauuaaacagagaagaaauagaugggguaaagcuggaaucaacaaggauuuaccagauuuuggcgaucuauucaacugucgccaguucauugguacugguagucucccugggggcaaucaguuuuuggaugugcucuaaugggucucuacaguguagaauauguauuuaa

SEQ ID NO: 43840 - RNA, 1701 nt, Artificial Sequence
  derived and/or modified CDS sequence (wt) from hemagglutinin__InfluenzaA__AHM98372
augaaggcaauacuaguaguucugcuauauacauuugcaaccgcaaaugcagacacauuauguauagguuaucaugcgaacaauucaacagacacuguagacacaguacuagaaaagaauguaacaguaacacacucuguuaaccuucuagaagacaagcauaacgggaaacuaugcaaacuaagagggguagccccauugcauuuggguaaauguaacauugcuggcuggauccugggaaacccagagugugaaucacucuccacagcaagcucaugguccuacauuguggaaacaucuaguucagacaauggaacguguuacccaggagauuucaucaauuaugaggagcuaagagagcaauugagcucagugucaucauuugaaagguuugagauauuccccaagacaaguucauggcccaaucaugacucgaacaaagguguaacggcagcauguccucaugcuggagcaaaaagcuucuacaaaaauuuaauauggcuaguuaaaaaaggaaauucauacccaaagcucagcaaauccuacauuaaugauaaagggaaagaaguccucgugcuauggggcauucaccauccaucuacuacugcugaccaacaaagucucuaucagaaugcagaugcauauguuuuuguggggacaucaagauacagcaagaaguucaagccggaaauagcaauaagacccaaagugagggaucaagaagggagaaugaacuauuacuggacacuaguagagccgggagacaaaauaacauuugaagcaacuggaaaucuagugguaccgagauaugcauucgcaauggaaagaaaugcuggaucugguauuaucauuucagauacaccaguccacgauugcaauacaacuugucagacacccaagggugcuauaaacaccagccucccauuucagaauauacauccgaucacaauuggaaaauguccaaaauauguaaaaagcacaaaauugagacuggccacaggauugaggaaugucccgucuauucaaucuagaggccuauuuggggccauugccggcuucauugaagggggguggacagggaugguagauggaugguacgguuaucaccaucaaaaugagcaggggucaggauaugcagccgaccugaagagcacacagaaugccauugacaagauuacuaacaaaguaaauucuguuauugaaaagaugaauacacaguucacagcaguagguaaagaguucaaccaccuggaaaaaagaauagagaauuuaaauaaaaaaguugaugaugguuuccuggacauuuggacuuacaaugccgaacuguugguucuauuggaaaaugaaagaacuuuggacuaccacgauucaaaugugaagaacuuauaugaaaagguaagaaaccaguuaaaaaacaaugccaaggaaauuggaaacggcugcuuugaauuuuaccacaaaugcgauaacacgugcauggaaagugucaaaaaugggacuuaugacuacccaaaauacucagaggaagcaaaauuaaacagagaagaaauagaugggguaaagcuggaaucaacaaggauuuaccagauuuuggcgaucuauucaacugucgccaguucauugguacugguagucucccugggggcaaucagcuucuggaugugcucuaaugggucucuacaguguagaauauguauuuaa

SEQ ID NO: 43841 - RNA, 1701 nt, Artificial Sequence; identical to SEQ ID NO: 41783
  derived and/or modified CDS sequence (wt) from hemagglutinin__InfluenzaA__AHM98383

SEQ ID NO: 43842 - RNA, 1701 nt, Artificial Sequence
  derived and/or modified CDS sequence (wt) from hemagglutinin__InfluenzaA__AHM98394
augaaggcaauacuaguaguuaugcuauauacauuugcaaccgcaaaugcagacacauuauguauagguuaucaugcgaacaauucaacagacacuguagacacaguacuagaaaagaauguaacaguaacacacucuguuaaucuucuagaagacaagcauaacgggaaacuaugcaaacuaagagggguagccccauugcauuuggguaaauguaacauugcuggcuggauccugggaaauccagagugugaaucacucuccacagcaagcucaugguccuacauuguggaaacaucuaguucagacaauggaacguguuacccaggagauuucaucgauuaugaggagcuaagagagcaauugagcucagugucaucauuugaaagguuugagauauuccccaaaacaaguucauggcccaaucaugacucgaacaaagguguaacggcagcuuguccucaugcuggagcaaaaggcuucuacaaaaauuuaauauggcuaguuaaaaaaggaaauucauacccaaagcucagcaaauccuacauuaaugauaaagggaaagaaguccucgugcuauggggcauucaccauccaucuacuacugcugaccaacaaagucucuaucagaaugcagauacauauguuuuuguggggacaucaagauacagcaagaaguucaagccggaaauagcaauaagacccaaagugagggaucaagaagggagaaugaacuauuacuggacacuaguagagccgggagacaaaauaacauucgaagcaacuggaaaucuagugguaccgagauaugcauuugcaauggaaagaaaugcuggaucugguauuaucauuucagauacaccaguccacgauugcaauacaacuugucagacacccaagggugcuauaaacaccagccucccauuucagaauauacauccgaucacaauuggaaaauguccaaaauauguaaaaagcacaaaauugagacuggccacaggauugaggaaugucccgucuauccaaucuagaggccuauuuggggccauugccggcuucauugaagggggguggacagggaugguagauggaugguacgguuaucaccaucaaaaugagcaggggucaggauaugcagccgaccugaagagcacacagaaugccauugacaagauuacuaacaaaguaaauucuguuauugaaaagaugaauacacaguucacagcaguagguaaagaguucaaccaccuggaaaaaagaauagagaauuuaaauaaaaaaguugaugaugguuuccuggacauuuggacuuacaaugccgaacuguugguucuauuggaaaaugaaagaacuuuggacuaccacgauucaaaugugaagaacuuauaugaaaagguaagaaaccaguuaaaaaacaaugcuaaggaaauuggaaauggcugcuuugaauuuuaccacaaaugcgauaacacgugcauggaaagugucaaaaaugggacuuaugacuacccaaaauacucagaggaagcaaaauuaaacagagaagaaauagaugggguaaagcuggaaucaacaaggauuuaccagauuuuggcgaucuauucaacugucgccaguucauugguacugguagucucccugggggcaaucaguuuuuggaugugcucuaaugggucucuacaguguagaauauguauuuaa

SEQ ID NO: 43843 - RNA, 1701 nt, Artificial Sequence
  derived and/or modified CDS sequence (wt) from hemagglutinin__InfluenzaA__AHM98405
augaaggcaauacuaguaguuuugcuauauacauuugcaaccgcaaaugcagacacauuauguauagguuaucaugcgaacaauucaacagacacuguagacacaguacuagaaaagaauguaacaguaacacacucuguuaaucuucuagaagacaagcauaacgggaaacuaugcaaacuaagagggguagccccauuacauuuggguaaauguaacauugcuggcuggauccugggaaauccagagugugaaucacucuccacagcaagcucaugguccuacauuguggaaacaucuaguucagacaauggaacguguuacccaggagauuucaucgauuaugaggagcuaagagagcaauugagcucagugucaucauuuaaaagguuugagauauuccccaagacaaguucauggcccaaucaugacucgaacaaagguguaacggcagcauguccucaugcuggagcaaaaggcuucuacaaaaauuuaauauggcuaguuaaaaaaggaaauucauacccaaagcucagcaaauccuacauuaaugauaaagggaaagaaguccucgugcuauggggcauucaccauccaucuacuacugcugaccaacaaagucucuaucagaaugcagauacauauguuuuuguggggacaucaagauacagcaagaaguucaagccggaaauagcaauaagacccaaagugagggaucaagaagggagaaugaacuauuacuggacacuaguagagccgggagacaaaauaacauucgaagcaacuggaaaucuagugguaccgagauaugcauucgcaauggaaagaaaugcuggaucugguauuaucauuucagauacaccaguccacgauugcaauacaacuugucagacacccaagggugcuauaaacaccagccucccauuucagaauauacauccgaucacaauuggaaaauguccaaaauauguaaaaagcacaaaauugagacuggccacaggauugaggaaugucccgucuauucaaucuagaggccuauuuggggccauugccggcuucauugaagggggguggacagggaugguagauggaugguacgguuaucaccaucaaaaugagcaggggucaggauaugcagccgaccugaagagcacacagaaugccauugacaagauuacuaacaaaguaaauucuguuauugaaaagaugaauacacaguucacagcaguagguaaagaguucaaccaccuggaaaaaagaauagagaauuuaaauaaaaaaguugaugaugguuuccuggacauuuggacuuacaaugccgaacuguugguucuauuggaaaaugaaagaacuuuggacuaccacgauucgaaugugaagaacuuauaugaaaagguaagaaaccaguuaaaaaacaaugccaaggaaauuggaaauggcugcuuugaauuuuaccacaaaugcgauaacacgugcauggaaagugucaaaaaugggacuuaugacuacccaaaauacucagaggaagcaaaauuaaacagagaagaaauagaugggguaaagcuggaaucaacaaggauuuaucagauuuuggcgaucuauucaacugucgccaguucauugguacugguagucucccugggggcaaucaguuuuuggaugugcucuaaugggucucuacaguguagaauauguauuuaa

SEQ ID NO: 43844 - RNA, 1701 nt, Artificial Sequence
  derived and/or modified CDS sequence (wt) from hemagglutinin__InfluenzaA__AHM98416
augaaggcaauacuaguaguuuugcuauauacauuugcaaccgcaaaugcagacacauuauguauagguuaucaugcgaacaauucaacagacacuguagacacaguacuagaaaagaauguaacaguaacacacucuguuaaucuucuagaagacaagcauaacgggaaacuaugcaaacuaagagggguagccccauuacauuuggguaaauguaacauugcuggcuggauccugggaaauccagagugugaaucacucuccacagcaagcucaugguccuacauuguggaaacaucuaguucagacaauggaacguguuacccaggagauuucaucgauuaugaggagcuaagagagcaauugagcucagugucaucauuuaaaagguuugagauauuccccaagacaaguucauggcccaaucaugacucgaacaaagguguaacggcagcauguccucaugcuggagcaaaaggcuucuacaaaaauuuaauauggcuaguuaaaaaaggaaauucauacccaaagcucagcaaauccuacauuaaugauaaagggaaagaaguccucgugcuauggggcauucaccauccaucuacuacugcugaccaacaaagucucuaucagaaugcagauacauauguuuuuguggggacaucaagauacagcaagaaguucaagccggaaauagcaauaagacccaaagugagggaucaagaagggagaaugaacuauuacuggacacuaguagagccgggagacaaaauaacauucgaagcaacuggaaaucuagugguaccgagauaugcauucgcaauggaaagaaaugcuggaucugguauuaucauuucagauacaccaguccacgauugcaauacaacuugucagacacccaagggugcuauaaacaccagccucccauuucagaauauacauccgaucacaauuggaaaauguccaaaauauguaaaaagcacaaaauuaagacuggccacaggauugaggaaugucccgucuauucaaucuagaggccuauuuggggccauugccggcuucauugaagggggguggacagggaugguagauggaugguacgguuaucaccaucaaaaugagcaggggucaggauaugcagccgaccugaagagcacacagaaugccauugacaagauuacuaacaaaguaaauucuguuauugaaaagaugaauacacaguucacagcaguagguaaagaguucaaccaccuggaaaaaagaauagagaauuuaaauaaaaaaguugaugaugguuuccuggacauuuggacuuacaaugccgaacuguugguucuauuggaaaaugaaagaacuuuggacuaccacgauucgaaugugaagaacuuauaugaaaagguaagaaaccaguuaaaaaacaaugccaaggaaauuggaaauggcugcuuugaauuuuaccacaaaugcgauaacacgugcauggaaagugucaaaaaugggacuuaugacuacccaaaauacucagaggaagcaaaauuaaacagagaagaaauagaugggguaaagcuggaaucaacaaggauuuaccagauuuuggcgaucuauucaacugucgccaguucauugguacugguagucucccugggggcaaucaguuuuuggaugugcucuaaugggucucuacaguguagaauauguauuuaa

SEQ ID NO: 43845 - RNA, 1701 nt, Artificial Sequence
  derived and/or modified CDS sequence (wt) from hemagglutinin__InfluenzaA__AHM98427
augaaggcaauacuaguaguuaugcuauauacauuugcaaccgcaaaugcagacacauuauguauagguuaucaugcgaacaauucaacagacacuguagacacaguacuagaaaagaauguaacaguaacacacucuguuaaucuucuagaagacaagcauaacgggaaacuaugcaaacuaagagggguagccccauugcauuuggguaaauguaacauugcuggcuggauccugggaaauccagagugugaaucacucuccacagcaagcucaugguccuacauuguggaaacaucuaguucagacaauggaacguguuacccaggagauuucaucgauuaugaggagcuaagagagcaauugagcucagugucaucauuugaaagguuugagauauuccccaaaacaaguucauggcccaaucaugacucgaacaaagguguaacggcagcuuguccucaugcuggagcaaaaggcuucuacaaaaauuuaauauggcuaguuaaaaaaggaaauucauacccaaagcucagcaaauccuacauuaaugauaaagggaaagaaguccucgugcuauggggcauucaccauccaucuacuacugcugaccaacaaagucucuaucagaaugcagauacauauguuuuuguggggacaucaagauacagcaagaaguucaagccggaaauagcaauaagacccaaagugagggaucaagaagggagaaugaacuauuacuggacacuaguagagccgggagacaaaauaacauucgaagcaacuggaaaucuagugguaccgagauaugcauuugcaauggaaagaaaugcuggaucugguauuaucauuucagauacaccaguccacgauugcaauacaacuugucagacacccaagggugcuauaaacaccagccucccauuucagaauauacauccgaucacaauuggaaaauguccaaaauauguaaaaagcacaaaauugagacuggccacaggauugaggaaugucccgucuauccaaucuagaggccuauuuggggccauugccggcuucauugaagggggguggacagggaugguagauggaugguacgguuaucaccaucaaaaugagcaggggucaggauaugcagccgaccugaagagcacacagaaugccauugacaagauuacuaacaaaguaaauucuguuauugaaaagaugaauacacaguucacagcaguagguaaagaguucaaccaccuggaaaaaagaauagagaauuuaaauaaaaaaguugaugaugguuuccuggacauuuggacuuacaaugccgaacuguugguucuauuggaaaaugaaagaacuuuggacuaccacgauucaaaugugaagaacuuauaugaaaagguaagaaaccaguuaaaaaacaaugcuaaggaaauuggaaauggcugcuuugaauuuuaccacaaaugcgacaacacgugcauggaaagugucaaaaaugggacuuaugacuacccaaaauacucagaggaagcaaaauuaaacagagaagaaauagaugggguaaagcuggaaucaacaaggauuuaccagauuuuggcgaucuauucaacugucgccaguucauugguacugguagucucccugggggcaaucaguuuuuggaugugcucuaaugggucucuacaguguagaauauguauuuaa

SEQ ID NO: 43846 - RNA, 1701 nt, Artificial Sequence
  derived and/or modified CDS sequence (wt) from hemagglutinin__InfluenzaA__AHM98438
augaaggcaauacuaguaguucugcuauauacauuugcaaccgcaaaugcagacacauuauguauagguuaucaugcgaacaauucaacagacacuguagacacaguacuagaaaagaauguaacaguaacacacucuguuaaccuucuagaagacaagcauaacgggaaacuaugcaaacuaagagggguagccccauugcauuuggguaaauguaacauugcuggcuggauccugggaaauccagagugugaaucacucuccacagcaagcucaugguccuacauuguggaaacaucuaguucagacaauggaacguguuacccaggagauuucaucgauuaugaggagcuaagagagcaauugagcucagugucaucauuugaaagguuugagauauuccccaagacaaguucauggcccaaucaugacucgaacaaagguguaacgacagcauguccucaugcuggagcaaaaagcuucuacaaaaauuuaauauggcuaguuaaaaaaggaaauucauacccaaagcucagcaaauccuacauuaaugauaaagggaaagaaguccucgugcuauggggcauucaccauccaccuacuagugcugaccaacaaagucucuaucagaaugcagaugcauauguuuuuguggggacaucaagauacagcaagaaguucaagccggaaauagcaauaagacccaaagugagggaucaagaagggagaaugaacuauuacuggacacuaguagagccgggagacaaaauaacauucgaagcaacuggaaaucuagugguaccgagauaugcauucgcaauggaaagaaaugcuggaucugguauuaucauuucagauacaccaguccacgauugcaauacaacuugucagacacccaagggugcuauaaacaccagccucccauuucagaauauacauccgaucacaauuggaaaauguccaaaauauguaaaaagcacaaaauugagacuggccacaggauugaggaaugucccgucuauucaaucuagaggccuauuuggggccauugccgguuucauugaagggggguggacagggaugguagauggaugguacgguuaucaccaucaaaaugagcaggggucaggauaugcagccgaccugaagagcacacagaaugccauugacgggauuacuaacaaaguaaauucuguuauugaaaagaugaauacacaguucacagcaguagguaaagaguucaaccaccuggaaaaaagaauagagaauuuaaauaaaaaaguugaugaugguuuccuggacauuuggacuuacaaugccgaacuguugguucuauuggaaaaugaaagaacuuuggacuaccacgauucaaaugugaagaacuuauaugaaaagguaagaagccaguuaaaaaacaaugccaaggaaauuggaaacggcugcuuugaauuuuaccacaaaugugauaacacgugcauggaaagugucaaaaaugggacuuaugacuacccaaaauacucagaggaagcaaaauuaaacagagaagaaauagaugggguaaagcuggaaucaacaaugauuuaccagauuuuggcgaucuauucaacugucgccaguucauugguacugguagucucccugggggcaaucaguuucuggaugugcucuaaugggucucuacaguguagaauauguauuuga

SEQ ID NO: 43847 - RNA, 1701 nt, Artificial Sequence
  derived and/or modified CDS sequence (wt) from hemagglutinin__InfluenzaA__AHM98449
augaaggcaauacuaguaguucugcuauauacauuugcaaccgcaaaugcagacacauuauguauagguuaccaugcgaacaauucaacagacacuguagacacaguacuagaaaagaauguaacaguaacacacucuguuaaucuucuagaagacaagcauaacgggaaacuaugcaaacuaagagggguagccccauugcauuuggguaaauguaacauugcuggcuggauccugggaaauccagagugugaaacacucuccacagcaagcucaugguccuacauuguggaaacaucuaguucagacaauggaacguguuacccaggagauuucaucgauuaugaggagcuaagagagcaauugagcucagugucaucauuugaaagguuugagauauuccccaagacaaguucauggcccaaucaugacucgaacaaagguguaacggcagcauguccacaugcuggagcaaaaggcuucuacaaaaauuuaauauggcuaguuaaaaaaggaaauucauacccaaagcucagcaaauccuacauuaaugauaaagggaaagaaguccucgugcuauggggcauucaccauccaucuacuacugcugaccaacaaagucucuaucagaaugcagauacauauguuuuuguggggacaucaagauacagcaagaaguucaagccggaaauagcaauaagacccaaagugagggaucaagaagggagaaugaacuauuacuggacacuaguagagccgggagacaaaauaacauucgaagcaacuggaaaucuagugguaccgagauaugcauucgcaauggaaagagaugcuggaucugguauuaucauuucagauacaccaguccacgauugcaauacaacuugucagacacccaagggugcuauaaacaccagccucccauuucagaauauacauccgaucacaauuggaaaauguccaaaauauguaaaaagcacaaaauugagacuggccacaggauugaggaaugucccgucuauucaaucuagaggccuauuuggggccauugccggcuucauugaagggggguggacagggaugguagauggaugguacgguuaucaccaucaaaaugagcaggggucaggauaugcagccgaccugaagagcacacagaaugccauugacaagauuacuaacaaaguaaauucuguuauugaaaaaaugaauacacaguucacagcaguagguaaagaguucaaccaccuggaaaaaagaauagagaauuuaaauaaaaaaguugaugauggguuccuggacauuuggacuuacaaugccgaacuguugguucuauuggaaaaugaaagaacuuuggacuaccacgauucaaaugugaagaacuuauaugaaaagguaagaaaccaguuaaaaaacaaugccaaggaaauuggaaauggcugcuuugaauuuuaccacaaaugcgauaacacguguauggaaagugucaaaaaugggacuuaugacuacccaaaauacucagaggaagcaaaauuaaacagagaagaaauagaugggguaaagcuggaaucaacaaggauuuaccagauuuuggcgaucuauucaacugccgccaguucauugguacugguagucucccugggggcaaucaguuuuuggaugugcucuaaugggucucuacaguguagaauauguauuuaa

SEQ ID NO: 43848 - RNA, 1701 nt, Artificial Sequence
  derived and/or modified CDS sequence (wt) from hemagglutinin__InfluenzaA__AHM98460
augaaggcaauacuaguaguuuugcuauguacauuugcaaccgcaaaugcagacacauuauguauagguuaucaugcgaacaauucaacagacacuguagacacaguacuagaaaagaauguaacaguaacacacucuguuaaucuucuagaagacaagcauaacgggaaacuaugcaaacuaagagggguagccccauuacauuugggaaaauguaacauugcuggcuggauccugggaaauccagagugugaaucacucuccacagcaagcucaugguccuacauuguggaaacaucuaguucagacaauggaacguguuacccaggagauuucaucgauuaugaggagcuaagagagcaauuaagcucagugucaucauuugaaagguuugagauauuccccaagacaaguucauggcccaaucaugacucgaacaaagguguaacggcagcauguccucaugcuggagcaaaaggcuucuacaaaaauuuaauauggcuaguuaaaaaaggaaauucauacccaaagcucagcaaauccuacauuaaugauaaagggaaagaaguccucgugcuauggggcauucaccauccaucuacuacugcugaccaacaaagucucuaucaaaaugcagauacauauguuuuuguggggacaucaagauacagcaagaaguucaagccggaaauagcaauaagacccaaagugagggaucaagaagggagaaugaacuauuacuggacacuaguagagccgggagacaaaauaacauucgaagcaacuggaaaucuagugguaccgagauaugcauucgcaauggaaagaaaugcuggaucugguauuaucauuucagauacaacaguccacgauugcaauacaacuugucagacacccaagggugcuauaaacaccagccuaccauuucagaauauacauccgaucacaauuggaaaauguccaaaauauguaaaaagcacaaaauugagacuggccacaggauugaggaaugucccgucuauucaaucuagaggccuauuuggggccauugccggcuucauugaagggggguggacagggaugguagauggaugguacgguuaucaccaucaaaaugagcaggggucaggauaugcagccgaccugaagagcacacagaaugccauugacaagauuacuaacaaaguaaauucuguuauugaaaagaugaauacacaguucacagcaguagguaaagaguucaaccaccuggaaaaaagaauagagaauuuaaauaaaaaaguugaugaugguuuccuggacauuuggacuuacaaugccgaacuguugguucuauuggaaaaugaaagaacuuuggacuaccacgauucgaaugugaagaacuuauaugaaaagguaagaaaccaauuaaaaaacaaugccaaggaaauuggaaauggcugcuuugaauuuuaccacaaaugcgauaacacgugcauggaaaguguuaaaaaugggacuuaugacuacccaaaauacucagaggaagcaaaauuaaacagagaaaaaauagaugggguaaagcuggaaucaacaaggauuuaccagauuuuggcgaucuauucaacugucgccaguucauugguacugguagucucccugggggcaaucaguuuuuggaugugcucuaaugggucucuacaguguagaauauguauuuaa

SEQ ID NO: 43849 - RNA, 1701 nt, Artificial Sequence; identical to SEQ ID NO: 41790
  derived and/or modified CDS sequence (wt) from hemagglutinin__InfluenzaA__AHM98471

SEQ ID NO: 43850 - RNA, 1701 nt, Artificial Sequence
  derived and/or modified CDS sequence (wt) from hemagglutinin__InfluenzaA__AHM98482
augaaggcaauacuaguaguucugcuauauacauuugcaaccgcaaaugcagacacauuauguauagguuaucaugcgaacaauucaacagacacuguagacacaguacuagaaaagaauguaacaguaacacacucuguuaaucuucuagaagacaagcauaacgggaaacuaugcaaacuaagagggguagccccauugcauuuggguaaauguaacauugcuggcuggauccugggaaauccagagugugaaucacucuccacagcaagcucaugguccuacauuguggaaacaucuaguucagacaauggaacguguuacccaggagauuucaucgauuaugaggagcuaagagagcaauugagcucagugucaucauuugaaagguuugagauauuccccaaaacaaguucauggcccaaucaugacucgaacaaagguguaacggcagcauguccucaugcuggagcaaaaggcuucuacaaaaauuuaauauggcuaguuaaaaaaggaaauucauacccaaagcucagcaaauccuacauuaaugauaaagggaaagaaguccucgugcuauggggcauucaccauccaucuacuacugcugaccaacaaagucucuaucagaaugcagauacauauguuuuuguggggacaucaagauacagcaagaaguucaagccggaaauagcaauaagacccaaagugagggaucaagaagggagaaugaacuauuacuggacacuaguagagccgggagacaaaauaacauucgaagcaacuggaaaucuagugguaccgagauaugcauucgcaauggaaagaaaugcuggaucugguauuaucauuucagauacaccaguccacgauugcaauacaacuugucagacacccaagggugcuauaaacaccagccucccauuucagaauauacauccgaucacaauuggaaaauguccaaaauauguaaaaagcacaaaauugagacuggccacaggauugaggaaugucccgucuauucaaucuagaggccuauuuggggccauugccggcuucauugaagggggguggacagggaugguagauggaugguacgguuaucaccaucaaaaugagcaggggucaggauaugcagccgaccugaagagcacacagaaugccauugacaagauuacuaacaaaguaaauucuguuauugacaagaugaauacacaguucacagcaguagguaaagaguucaaccaccuggaaaaaagaauagagaauuuaaauaaaaaaguugaugaugguuuccuggacauuuggacuuacaaugccgaacuguugguucuauuggaaaaugaaagaacuuuggacuaccacgauucaaaugugaagaacuuauaugaaaagguaagaaaccaguuaaaaaacaaugccaaggaaauuggaaauggcugcuuugaauuuuaccacaaaugcgauaacacgugcauggaaagugucaaaaaugggacuuaugacuacccaaaauacucagaggaagcaaaauuaaacagagaagaaauagaugggguaaagcuggaaucaacaaggauuuaccagauuuuggcgaucuauucaacugucgccaguucauugguacugguagucucccugggggcaaucaguuuuuggaugugcucuaaugggucucuacaguguagaauauguauuuaa

SEQ ID NO: 43851 - RNA, 1701 nt, Artificial Sequence
  derived and/or modified CDS sequence (wt) from hemagglutinin__InfluenzaA__AHM98493
augaaggcaauacuaguaguucugcuauauacauuugcaaccgcaaaugcagacacauuauguauagguuaucaugcgaacaauucaacagacacuguagacacaguacuagaaaagaauguaacaguaacacacucuguuaaccuucuagaagacaagcauaacgggaaacuaugcaaacugagagggguagccccauugcauuuggguaaauguaacauugcuggcuggauccugggaaauccagagugugaaucacucuccacagcaagcucaugguccuacauuguggaaacaucuaguucagacaauggaacguguuacccaggagauuucaucaauuaugaagagcuaagagagcaauugagcucagugucaucauuugaaagguuugagauauuccccaagacaaguucauggcccaaucaugacucgaacaaagguguaacggcagcauguccucaugcuggagcaaaaagcuucuacaaaaauuuaauauggcuaguuaaaaaaggaaauucauacccaaagcucagcaaauccuacauuaacgauaaagggaaagaaguccucgugcuauggggcauucaccauccaucuacuagugcugaccaacaaagucucuaucagaaugcagaugcauauguuuuuguggggacaucaaaauacagcaagaaguucaagccggaaauagcaguaagacccaaagugagggaucaagaagggagaaugaacuauuacuggacacuaguagagccgggagacaaaauaacauucgaagcaacugggaaucuauugguaccgagauaugcauucgcaauggaaagaaaugcuggaucugguauuaucauuucagauacaccaguccacgauugcaauacaacuugucagacacccaagggugcuauaaacaccagccucccauuucagaauauacauccgaucacaauuggaaaauauccaaaauauguaaaaagcacaaaauugagacuggccacaggauugaggaaugucccgucuauucaaucuagaggccuauuuggggccauugccgguuucauugaagggggguggacagggaugguagauggaugguacgguuaucaccaucaaaaugagcaggggucaggauaugcagccgaccugaagagcacacagaaugccauugacaagauuacuaacaaaguaaauucuguuauugaaaagaugaauacacaguucacagcaguagguaaagaguucaaccaccuggaaaaaagaauagagaauuuaaauaaaaaaguugaugaugguuuccuggacauuuggacuuacaaugccgaacuguugguucuauuggaaaaugaaagaacuuuggacuaccacgauucaaaugugaaaaacuuauaugaaaagguaagaagccaguuaaaaaacaaugccaaggaaauuggaaacggcugcuuugaauuuuaccacaaaugcgauaacacgugcauggaaagugucaaaaaugggacuuaugacuacccaaaauacucagaggaagcaaaauuaaacagagaagaaauagaugggguaaagcuggaaucaacaaggauuuaccagauuuuggcgaucuauucaacugucgccaguucauugguacugguagucucccugggggcaaucaguuucuggaugugcucuaaugggucucuacaguguagaauauguauuuaa

SEQ ID NO: 43852 - RNA, 1701 nt, Artificial Sequence
  derived and/or modified CDS sequence (wt) from hemagglutinin__InfluenzaA__AHM98504
augaaggcaauacuaguaguucugcuauauacauuugcaaccgcaaaugcagacacauuauguauagguuaucaugcgaacaauucaacagacacuguagacacaguacuagaaaagaauguaacaguaacacacucuguuaaccuucuagaagacaagcauaacgggaaacuaugcaaacuaagagggguagccccauugcauuuggguaaauguaacauugcuggcuggauccugggaaauccagagugugaaucacucuccacagcaagcucaugguccuacauuguggaaacaucuaguucagacaauggaacguguuacccaggagauuucaucaauuaugaggagcuaagagagcaauugagcucagugucaucauuugaaagguuugagauauuccccaagacaaguucauggcccaaucaugacucgaacaaagguguaacggcagcauguccucaugcuggagcaaaaagcuucuacaaaaauuuaauauggcuaguuaaaaaaggaaauucauacccaaagcucagcaaauccuacauuaaugauaaagggaaagaaguccucgugcuguggggcauucaccauccaucuacuacugcugaccaacaaagucucuaucagaaugcagaugcauauguuuuuguggggacaucaagauacagcaagaaguucaagccggaaauagcaauaagacccaaagugagggaucaagaagggagaaugaacuauuacuggacacuaguagagccgggagacaaaauaacauucgaagcaacuggaaaucuagugguaccgagauaugcauucgcaauggaaagaaaugcuggaucugguauuaucauuucagauacaccaguccacgauugcaauacaacuugucagacacccaagggugcuauaaacaccagccucccauuucagaauauacauccgauuacaauuggaaaauguccaaaauauguaaaaagcacaaaauugagacuggccacaggauugaggaaugucccgucuauucaaucuagaggccuauuuggggccauugccggcuucauugaagggggguggacagggaugguagauggaugguacgguuaucaccaucaaaaugagcaggggucaggauaugcagccgaccugaagagcacacagaaugccauugacaagauuacuaacaaaguaaauucuguuauugaaaagaugaauacacaguucacagcaguagguaaagaguucaaccaccuggaaaaaagaauagagaauuuaaauaaaaaaguugaugaugguuuccuggacauuuggacuuacaaugccgaacuguugguucuauuggaaaaugaaagaacuuuggacuaccacgauucaaaugugaagaacuuguaugaaaagguaagaaaccaguuaaaaaacaaugccaaggaaauuggaaacggcugcuuugaauuuuaccacaaaugcgauaacacgugcauggaaagugucaaaaaugggacuuaugacuacccaaaauacucaaaggaagcaaaauuaaacagagaagaaauagaugggguaaagcuggaaucaacaaggauuuaccagauuuuggcgaucuauucaacugucgccaguucauugguacugguagucucccugggggcaaucaguuucuggaugugcucuaaugggucucuacaguguagaauauguauuuaa

SEQ ID NO: 43853 - RNA, 1701 nt, Artificial Sequence
  derived and/or modified CDS sequence (wt) from hemagglutinin__InfluenzaA__AHM98515
augaaggcaauacuaguaguuuugcuauauacauuugcaaccgcaaaugcagacacauuauguauagguuaucaugcgaacaauucaacagacacuguagacacaguacuagaaaagaauguaacaguaacacacucuguuaaucuucuagaagacaagcauaacgggaaacuaugcaaacuaagagggguagccccauuacauuuggguaaauguaacauugcuggcuggauccugggaaauccagagugugaaucacucuccacagcaagcucaugguccuacauuguggaaacaucuaguucagacaauggaacguguuacccaggagauuucaucgauuaugaggagcuaagagagcaauugagcucagugucaucauuugaaagguuugagauauuccccaagacaaguucauggcccaaucaugacucgaacaaagguguaacggcagcauguccucaugcuggagcaaaaggcuucuacaaaaauuuaauauggcuaguuaaaaaaggaaauucauacccaaagcucagcaaauccuacauuaaugauaaagggaaagaaguccucgugcuauggggcauucaccauccaucuacuacugcugaccaacaaagucucuaucagaaugcagauacauauguuuuuguggggacaucaagauacagcaagaaguucaagccggaaauagcaauaagacccaaagugagggaucaagaagggagaaugaacuauuacuggacacuaguagagccgggagacaaaauaacauucgaagcaacuggaaaucuagugguaccgagauaugcauucgcaauggaaagaaaugcuggaucugguauuaucauuucagauacaccaguccacgauugcaauacaacuugucagacacccaagggugcuauaaacaccagccucccauuucagaauauacauccgaucacaauuggaaaauguccaaaauauguaaaaagcacaaaauugagacuggccacaggauugaggaaugucccgucuauucaaucuagaggccuauuuggggccauugccggcuucauugaagggggguggacagggaugguagauggaugguacgguuaucaccaucaaaaugagcaggggucaggauaugcagccgaccugaagagcacacagaaugccauugacaagauuacuaacaaaguaaauucuguuauugaaaagaugaauacacaguucacagcaguagguaaagaguucaaccaccuggaaaaaagaauagagaauuuaaauaaaaaaguugaugaugguuuccuggacauuuggacuuacaaugccgaacuguugguucuauuggaaaaugaaagaacuuuggacuaccacgauucgaaugugaagaacuuauaugaaaagguaagaaaccaguuaaaaaacaaugccaaggaaauuggaaauggcugcuuugaauuuuaccacaaaugcgauaacacgugcauggaaagugucaaaaaugggacuuaugacuacccaaaauacucagaggaagcaaaauuaaacagagaagaaauagaugggguaaagcuggaaucaacaaggauuuaccagauuuuggcgaucuauucaacugucgccaguucauugguacugguagucucccugggggcaaucaguuuuuggaugugcucuaaugggucucuacaguguagaauauguauuuaa

SEQ ID NO: 43854 - RNA, 1701 nt, Artificial Sequence
  derived and/or modified CDS sequence (wt) from hemagglutinin__InfluenzaA__AHM98526
augaaggcaauacuaguaguucugcuacauacauuugcaaccgcaaaugcagacacauuauguauagguuaucaugcgaacaauucaacagacacuguagacacaguacuagaaaagaauguaacaguaacacacucuguuaaucuucuagaagacaagcauaacgggaaacuaugcaaacuaagagggguagccccauugcauuuggguaaauguaacauugcuggcuggauccugggaaauccagagugugaaucacucuccacagcaagcucaugguccuacauuguggaaacaucuaguucagacaauggaacguguuacccaggagauuucaucgauuaugaggagcuaagagaacaauugagcucagugucaucauuugaaagguuugagauauuccccaagacaaguucauggcccaaucaugacucgaacaaagguguaacggcagcauguccucaugcuggagcaaaaggcuucuacaaaaauuuaauauggcuaguuaaaaaaggaaauucauacccaaagcucagcaaauccuacauuaaugauaaagggaaagaaguccucgugcuauggggcauucaccauccaucuacuacugcugaccaacaaagucucuaucagaaugcagauacauauguuuuuguggggacaucaagauacagcaagaaguucaagccggaaauagcaauaagacccaaagugagggaucaagaggggagaaugaacuauuacuggacacuaguagagccgggagacaaaauaacauucgaagcaacuggaaaucuagugguaccgagauaugcauucgcaauggaaagaaaugcuggaucugguauuaucauuucagauacaccaguccacgauugcaauacaacuugucagacacccaagggugcuauaaacaccagccucccauuucagaauauacauccgaucacaauuggaaaauguccaaaauauguaaaaagcacaaaauugagacuggccacaggauugaggaaugucccgucuauucaaucuagaggcuuauuuggggccauugccggcuucauugaagggggguggacagggaugguagauggaugguacgguuaucaccaucaaaaugagcaggggucaggauaugcagccgaccugaggagcacacagaaugccauugacaagauuacuaacaaaguaaauucuguuauugaaaagaugaauacacaguucacagcaguagguaaagaguucaaccaccuggaaaaaagaauagagaauuuaaauaaaaaaguugaugaugguuuccuggacauuuggacuuacaaugccgaacuguugauucuauuggaaaaugaaagaacuuuggacuaccacgauucaaaugugaagaacuuauaugaaaagguaagaaaccaguuaaaaaacaaugccaaggaaauuggaaauggcugcuuugaauuuuaccacaaaugcgauaacacgugcauggaaagugucaaaaaugggacuuaugacuacccaaaauacucagaggaagcaaaauuaaacagagaagaaauagaugggguaaagcuggaaucaacaaggauuuaccagauuuuggcgaucuauucaacugucgccaguucauugguacugguagucucccugggggcaaucaguuuuuggaugugcucuaaugggucucuacaguguagaauauguauuuaa

SEQ ID NO: 43855 - RNA, 1701 nt, Artificial Sequence
  derived and/or modified CDS sequence (wt) from hemagglutinin__InfluenzaA__AHM98537
augaaggcaauacuaguaguucugcuauauacauuugcaaccgcaaaugcagacacauuauguauagguuaucaugcgaacaauucaacagacacuguagacacaguacuagaaaagaauguaacaguaacacacucuguuaaucuucuagaagacaagcauaacgggaaacuaugcaaacuaagagggguagccccauugcauuuggguaaauguaacauugcuggcuggauccuggggaauccagagugugaaucacucuccacagcaagcucaugguccuacauuguggaaacaucuaguucagacaauggaacguguuacccaggagauuucaucgauuaugaggagcuaagagagcaauugagcucagugucaucauuugaaagguuugagauauuccccaagacaaguucauggcccaaucaugacucgaacaaagguguaacggcagcauguccucaugcuggagcaaaaggcuucuacaaaaauuuaauauggcuaguuaaaaaaggaaauucauacccaaaacucagcaaauccuacauuaaugauaaagggaaagaaguccucgugcuauggggcauucaccauccaucuacuacugcugaccaacaaagucucuaucagaaugcagauacauauguuuuuguggggacaucaagauacagcaagaaguucaagccggaaauagcaauaagacccaaagugagggaucaagaagggagaaugaacuauuacuggacacuaguagagccgggagacaaaauaacauucgaagcaacuggaaaucuagugguaccgagauaugcauucgcaauggaaagaaaugcuggaucugguauuaucauuucagauacaccaguccacgauugcaauacaacuugucagacacccaagggugcuauaaacaccagccucccauuucagaauauacauccgaucacaauuggaaaauguccaaaauauguaaaaagcacaaaauugagacuggccacaggauugaggaaugucccgucuauucaaucuagaggccuauuuggggccauugccggcuucauugaagggggguggacagggaugguagauggaugguacgguuaucaccaucaaaaugagcaggggucaggauaugcagccgaccugaagagcacacagaaugccauugacaagauuacuaacaaaguaaauucuguuauugaaaagaugaauacacaguucacagcaguagguaaagaguucaaccaccuggaaaaaagaauagagaauuuaaauaaaaaaguugaugaugguuuccuggacauuuggacuuacaaugccgaacuguugguucuauuggaaaaugaaagaacuuuggacuaccacgauucaaaugugaagaacuuauaugaaaagguaagaaaccaguuaaaaaacaaugccaaggaaauuggaaauggcugcuuugaauuuuaccacaaaugcgauaacacgugcauggaaagugucaaaaaugggacuuaugacuacccaaaauacucagaggaagcaaaauuaaacagagaagaaauagaugggguaaagcuggaaucaacaaggauuuaccagauuuuggcgaucuauucaacugucgccaguucauugguacugguagucucccugggggcaaucaguuuuuggaugugcucuaaugggucucuacaguguagaauauguauuuaa

SEQ ID NO: 43856 - RNA, 1701 nt, Artificial Sequence
  derived and/or modified CDS sequence (wt) from hemagglutinin__InfluenzaA__AHM98548
augaaggcaauacuaguaguucugcuauauacauuugcaaccgcaaaugcagacacauuauguauagguuaucaugcgaacaauucaacagacacuguagacacaguacuagaaaagaauguaacaguaacacacucuguuaaccuucuagaagacaagcauaacgggaagcuaugcaaacuaagagggguagccccauugcauuuggguaaauguaacauugcuggcuggauccugggaaauccagagugugaaucacucuccacagcaagcucaugguccuacauuguggaaacaucuaguucagacaauggaacguguuacccaggagauuucaucaauuaugaggagcuaagagagcaauugagcucagugucaucauuugaaagguuugagauauuccccaagacaaguucauggcccaaucaugacucgaacaaagguguaacggcagcauguccucaugcuggagcaaaaagcuucuacaaaaauuuaauauggcuaguuaaaaaaggaaauucauacccaaagcucagcaaauccuacauuaaugauaaagggaaagaaguccucgugcuauggggcauucaccauccaucuacuacugcugaccaacaaagucucuaucagaaugcagaugcauauguuuuuguggggacaucaagauacagcaagaaguucaagccggaaauagcaauaagacccaaagugagggaucaagaagggagaaugaacuauuacuggacacuaguagagccgggagacaaaauaacauucgaagcaacuggaaaucuagugguaccgagauaugcauucgcaauggaaagaaaugcuggaucugguauuaucauuucagauacaccaguccacgauugcaauacaacuugucagacacccaagggugcuauaaacaccagccucccauuucagaauauacauccggucacaauuggaaaauguccaaaauauguaaaaagcacaaaauugagacuggccacaggauugaggaaugucccgucuauucaaucuagaggccuauuuggggccauugccggcuucauugaagggggguggacagggaugguagauggaugguacgguuaucaccaucaaaaugagcaggggucaggauaugcagccgaccugaagagcacacagaaugccauugacaagauuacuaacaaaguaaauucuguuauugaaaagaugaauacacaguucacagcaguagguaaagaguucaaccaccuggaaaaaagaauagagaauuuaaauaaaaaaguugaugaugguuuccuggacauuuggacuuacaaugccgaacuguugguucuauuggaaaaugaaagaacuuuggacuaccacgauucaaaugugaagaacuuauaugaaaagguaagaaaccaguuaaaaaacaaugccaaggaaauuggaaacggcugcuuugaauuuuaccacaaaugcgauaacacgugcauggaaagugucaaaaaugggacuuaugacuacccaaaauacucagaggaagcaaaauuaaacagagaagaaauagaugggguaaagcuggaaucaacaaggauuuaccagauuuuggcgaucuauucaacugucgccaguucauugguacugguagucucccugggggcaaucagcuucuggaugugcucuaaugggucucuacaguguagaauauguauuuaa

SEQ ID NO: 43857 - RNA, 1701 nt, Artificial Sequence
  derived and/or modified CDS sequence (wt) from hemagglutinin__InfluenzaA__AHM98559
augaaggcaauacuaguaguucugcuauacacauuugcaaccgcaaaagcagacacauuauguauagguuaucaugcgaacaauucaacagacacuguagacacaguacuagaaaagaauguaacaguaacacacucuguuaaccuucuagaagacaagcauaacgggaaacuaugcaagcuaagagggguagccccauugcauuuggguaaauguaacauugcuggcuggaucuugggaaauccagagugugaaucacucuccacagcaagcucaugguccuacauuguggaaacaucuaguucagacaauggaacguguuacccaggagauuucaucaauuaugaggagcuaagagagcaauugagcucagugucaucauuugaaagguuugagauauuccccaagacaaguucauggcccaaucaugacucgaacaaagguguaacggcagcauguccucaugcuggagcaaaaagcuucuacaaaaauuuaauauggcuaguuaaaaaaggaaauucauacccaaagcucagcaaauccuacauuaaugauaaagggaaagaaguccucgugcuguggggcauucaccauccaucuacuacugcugaccaacaaagucucuaucagaaugcagaugcauauguuuuuguggggacaucaagauacagcaagaaguucaagccggaaauagcaauaagacccaaagugagggaucaagaagggagaaugaacuauuacuggacacuaguagagccgggagacaaaauaacauucgaagcaacuggaaaucuagugguaccgagauaugcauucgcaauggaaagaaaugcuggaucugguauuaucauuucagauacaccaguccacgauugcaauacaacuugucagacacccaagggugccauaaacaccagccucccauuucagaauauacauccgaucacaauuggaaaauguccaaaauauguaaaaagcacaaaauugagacuggccacaggauugaggaaugucccgucuauucaaucuagaggccuauuuggggccauugccggcuucauugaagggggguggacagggaugguagauggaugguacgguuaucaccaucaaaaugagcaggggucaggauaugcagccgaccugaagagcacacagaaugccauugacaagauuacuaacaaaguaaauucuguuauugaaaagaugaauacacaguucacagcaguagguaaagaguucaaccaccuggaaaaaagaauagagaauuuaaauaaaaaaguugaugaugguuuccuggacauuuggacuuacaaugccgaacuguugguucuauuggaaaaugaaagaacuuuggacuaccacgauucaaaugugaagaacuuguaugaaaagguaagaaaccaguuaaaaaacaaugccaaggaaauuggaaacggcugcuuugaauuuuaccacaaaugcgauaacacgugcauggaaagugucaaaaaugggacuuaugacuacccaaaauacucagaggaagcaaaauuaaacagagaagaaauagaugggguaaagcuggaaucaacaaggauuuaccagauuuuggcgaucuauucaacugucgccaguucauugguacugguagucucccugggggcaaucaguuucuggaugugcucuaaugggucucuacaguguagaauauguauuuaa

SEQ ID NO: 43858 - RNA, 1701 nt, Artificial Sequence; identical to SEQ ID NO: 43842
  derived and/or modified CDS sequence (wt) from hemagglutinin__InfluenzaA__AHM98570

SEQ ID NO: 43859 - RNA, 1701 nt, Artificial Sequence
  derived and/or modified CDS sequence (wt) from hemagglutinin__InfluenzaA__AHM98581
augaaggcaauacuaguaguuuugcuauauacauuugcaaccgcaaaugcagacacauuauguauagguuaucaugcgaacaauucaacagacacuguagacacaguacuagaaaagaauguaacaguaacacacucuguuaaucuucuagaagacaagcauaacgggaaacuaugcaaacuaagagggguagccccauuacauuuggguaaauguaacauugcuggcuggauccugggaaauccagagugugaaucacucuccacagcaagaucaugguccuacauuguggaaacaucuaguucagacaauggaacguguuacccaggagauuucaucgauuaugaggagcuaagagagcaauugagcucagugucaucauuuaaaagguuugagauauuccccaagacaaguucauggcccaaucaugacucgaacaaagguguaacggcagcauguccucaugcuggagcaaaaggcuucuacaaaaauuuaauauggcuaguuaaaaaaggaaauucauacccaaagcucagcaaauccuacauuaaugauaaagggaaagaaguccucgugcuauggggcauucaccauccaucuacuacugcugaccaacaaagucucuaucagaaugcagauacauauguuuuuguggggacaucaagauacagcaagaaguucaagccggaaauagcaauaagacccaaagugagggaucaagaagggagaaugaacuauuacuggacacuaguagagccgggagacaaaauaacauucgaagcaacuggaaaucuagugguaccgagauaugcauucgcaauggaaagaaaugcuggaucugguauuaucauuucagauacaccaguccacgauugcaauacaacuugucagacacccaagggugcuauaaacaccagccucccauuucagaauauacauccgaucacaauuggaaaauguccaaaauauguaaaaagcacaaaauugagacuggccacaggauugaggaaugucccgucuauucaaucuagaggccuauuuggggccauugccggcuucauugaagggggguggacagggaugguagauggaugguacgguuaucaccaucaaaaugagcaggggucaggauaugcagccgaccugaagagcacacagaaugccauugacaagauuacuaacaaaguaaauucuguuauugaaaagaugaauacacaguucacagcaguagguaaagaguucaaccaccuggaaaaaagaauagagaauuuaaauaaaaaaguugaugaugguuuccuggacauuuggacuuacaaugccgaacuguugguucuauuggaaaaugaaagaacuuuggacuaccacgauucgaaugugaagaacuuauaugaaaagguaagaaaccaguuaaaaaacaaugccaaggaaauuggaaauggcugcuuugaauuuuaccacaaaugcgauaacacgugcauggaaagugucaaaaaugggacuuaugacuacccaaaauacucagaggaagcaaaauuaaacagagaagaaauagaugggguaaagcuggaaucaacaaggauuuaucagauuuuggcgaucuauucaacugucgccaguucauugguacugguagucucccugggggcaaucaguuuuuggaugugcucuaaugggucucuacaguguagaauauguauuuaa

SEQ ID NO: 43860 - RNA, 1701 nt, Artificial Sequence; identical to SEQ ID NO: 43842
  derived and/or modified CDS sequence (wt) from hemagglutinin__InfluenzaA__AHM98592

SEQ ID NO: 43861 - RNA, 1701 nt, Artificial Sequence
  derived and/or modified CDS sequence (wt) from hemagglutinin__InfluenzaA__AHM98603
augaaggcaauacuaguaguucugcuauauacauuugcaaccgcaaaugcagacacauuauguauagguuaucaugcgaacaauucaacagacacuguagacacaguacuagaaaagaauguaacaguaacacacucuguuaaccuucuagaagacaagcauaacgggaaacuaugcaaacuaagagggguagccccauugcauuuggguaaauguaacauugcuggauggauccugggaaauccagagugugaaucacucuccacagcaagcucaugguccuacauuguggaaacaucuaguucagacaauggaacguguuacccaggagauuucaucaauuaugaggagcuaagagagcaauugagcucagugucaucauuugaaagguuugagauauuccccaagacaaguucauggcccaaucaugacucgaacaaagguguaacggcagcauguccucaugcuggagcaaaaagcuucuacaaaaauuuaauauggcuaguuaaaaaaggaaauucauacccaaagcucagcaaauccuacauuaaugauaaagggaaagaaguccucgugcuguggggcauucaccauccaucuacuacugcugaccaacaaagucucuaucagaaugcagaugcauauguuuuuguggggacaucaagauacagcaagaaguucaagccggaaauagcaauaagacccaaagugagggaucaagaagggagaaugaacuacuacuggacacuaguagagccgggagacaaaauaacauucgaagcaacuggaaaucuagugguaccgagauaugcauucgcaauggaaagaaaugcuggaucugguauuaucauuucagauacaccaguccacgauugcaauacaacuugucagacacccaagggugcuauaaacaccagccucccauuucagaauauacauccgaucacaauuggaaaauguccaaaauauguaaaaagcacaaaauugagacuggccacaggauugaggaaugucccgucuauucaaucuagaggccuauuuggggccauugccggcuucauugaagggggguggacagggaugguagauggaugguacgguuaucaccaucaaaaugagcaggggucaggauaugcagccgaccugaagagcacacagaaugccauugacaagauuacuaacaaaguaaauucuguuauugaaaagaugaauacacaguucacagcaguagguaaagaguucaaccaccuggaaaaaagaauagagaauuuaaauaaaaaaguugaugaugguuuccuggacauuuggacuuacaaugccgaacuguugguucuauuggaaaaugaaagaacuuuggacuaccacgauucaaaugugaagaacuuguaugaaaagguaagaaaccaguuaaaaaacaaugccaaggaaauuggaaacggcugcuuugaauuuuaccacaaaugugauaacacgugcauggaaagugucaaaaaugggacuuaugacuacccaaaauacucagaggaagcaaaauuaaacagagaagaaauagaugggguaaagcuggaaucaacaaggauuuaccagauuuuggcgaucuauucaacugucgccaguucauugguacugguagucucccugggggcaaucaguuucuggaugugcucuaaugggucucuacaguguagaauauguauuuaa

SEQ ID NO: 43862 - RNA, 1701 nt, Artificial Sequence; identical to SEQ ID NO: 43853
  derived and/or modified CDS sequence (wt) from hemagglutinin__InfluenzaA__AHM98614

SEQ ID NO: 43863 - RNA, 1701 nt, Artificial Sequence; identical to SEQ ID NO: 43843
  derived and/or modified CDS sequence (wt) from hemagglutinin__InfluenzaA__AHM98625

SEQ ID NO: 43864 - RNA, 1701 nt, Artificial Sequence; identical to SEQ ID NO: 43843
  derived and/or modified CDS sequence (wt) from hemagglutinin__InfluenzaA__AHM98636

SEQ ID NO: 43865 - RNA, 1701 nt, Artificial Sequence
  derived and/or modified CDS sequence (wt) from hemagglutinin__InfluenzaA__AHM98647
augaaggcaauacuaguaguucugcuauacacauuugcaaccgcaaaagcagacacauuauguauagguuaucaugcgaacaauucaacagacacuguagacacaguacuagaaaagaauguaacaguaacacacucuguuaaccuucuagaagacaagcauaacgggaaacuaugcaagcuaagagggguagccccauugcauuuggguaaauguaacauugcuggcuggaucuugggaaauccagagugugaaucacucuccacagcaagcucaugguccuacauuguggaaacaucuaguucagacaauggaacguguuacccaggagauuucaucaauuaugaggagcuaagagagcaauugagcucagugucaucauuugaaagguuugagauauuccccaagacaaguucauggcccaaucaugacucgaacaaagguguaacggcagcauguccucaugcuggagcaaaaagcuucuacaaaaauuuaauauggcuaguuaaaaaaggaaauucauacccaaagcucagccaauccuacauuaaugauaaagggaaagaaguccucgugcuguggggcauucaccauccaucuacuacugcugaccaacaaagucucuaucagaaugcagaugcauauguuuuuguggggacaucaagauacagcaagaaguucaagccggaaauagcaauaagacccaaagugagggaucaagaagggagaaugaacuauuacuggacacuaguagagccgggagacaaaauaacauucgaagcaacuggaaaucuagugguaccgagauaugcauucgcaauggaaagaaaugcuggaucugguauuaucauuucagauacaccaguccacgauugcaauacaacuugucagacacccaagggugccauaaacaccagccucccauuucagaauauacauccgaucacaauuggaaaauguccaaaauauguaaaaagcacaaaauugagacuggccacaggauugaggaaugucccgucuauucaaucuagaggccuauuuggggccauugccggcuucauugaagggggguggacagggaugguagauggaugguacgguuaucaccaucaaaaugagcaggggucaggauaugcagccgaccugaagagcacacagaaugccauugacaagauuacuaacaaaguaaauucuguuauugaaaagaugaauacacaguucacagcaguagguaaagaguucaaccaccuggaaaaaagaauagagaauuuaaauaaaaaaguugaugaugguuuccuggacauuuggacuuacaaugccgaacuguugguucuauuggaaaaugaaagaacuuuggacuaccacgauucaaaugugaagaacuuguaugaaaagguaagaaaccaguuaaaaaacaaugccaaggaaauuggaaacggcugcuuugaauuuuaccacaaaugcgauaacacgugcauggaaagugucaaaaaugggacuuaugacuacccaaaauacucagaggaagcaaaauuaaacagagaagaaauagaugggguaaagcuggaaucaacaaggauuuaccagauuuuggcgaucuauucaacugucgccaguucauugguacugguagucucccugggggcaaucaguuucuggaugugcucuaaugggucucuacaguguagaauauguauuuaa

SEQ ID NO: 43866 - RNA, 1701 nt, Artificial Sequence; identical to SEQ ID NO: 41783
  derived and/or modified CDS sequence (wt) from hemagglutinin__InfluenzaA__AHM98658

SEQ ID NO: 43867 - RNA, 1701 nt, Artificial Sequence; identical to SEQ ID NO: 43842
  derived and/or modified CDS sequence (wt) from hemagglutinin__InfluenzaA__AHM98669

SEQ ID NO: 43868 - RNA, 1701 nt, Artificial Sequence
  derived and/or modified CDS sequence (wt) from hemagglutinin__InfluenzaA__AHM98701
augaaggcaauacuaguaguucugcuauauacauuugcaaccgcaaaugcagacacauuauguauagguuaccaugcgaacaauucaacagacacuguagacacaguacuagaaaagaauguaacaguaacacacucuguuaaucuucuagaagacaagcauaacgggaaacuaugcaaacuaagagggguagccccauugcauuuggguaaauguaacauugcuggcuggauccugggaaauccagagugugaaacacucuccacagcaagcucaugguccuacauuguggaaacaucuaguucagacaauggaacguguuacccaggagauuucaucgauuaugaggagcuaagagagcaauugagcucagugucaucauuugaaagguuugagauauuccccaagacaaguucauggcccaaucaugacucgaacaaagguguaacggcagcauguccucaugcuggagcaaaaggcuucuacaaaaauuuaauauggcuaguuaaaaaaggaaauucauacccaaagcucagcaaauccuacauuaaugauaaagggaaagaaguccucgugcuauggggcauucaccauccaucuacuacugcugaccaacaaagucucuaucagaaugcagauacauauguuuuuguggggacaucaagauacagcaagaaguucaagccggaaauagcaauaagacccaaagugagggaucaagaagggagaaugaacuauuacuggacacuaguagaaccgggagacaaaauaacauucgaagcaacuggaaaucuagugguaccgagauaugcauucgcaauggaaagagaugcuggaucugguauuaucauuucagauacaccaguccacgauugcaauacaacuugucagacacccaagggugcuauaaacaccagccucccauuucagaauauacauccgaucacaauuggaaaauguccaaaauauguaaaaagcacaaaauugagacuggccacaggauugaggaaugucccgucuauucaaucuagaggccuauuuggggccauugccggcuucauugaagggggguggacagggaugguagauggaugguacgguuaucaccaucaaaaugagcaggggucaggauaugcagccgaccugaagagcacacagaaugccauugacaagauuacuaacaaaguaaauucuguuauugaaaaaaugaauacacaguucacagcaguagguaaagaguucaaccaccuggaaaaaagaauagagaauuuaaauaaaaaaguugaugauggguuucuggacauuuggacuuacaaugccgaacuguugguucuauuggaaaaugaaagaacuuuggacuaccacgauucaaaugugaagaacuuauaugaaaagguaagaaaccaguuaaaaaacaaugccaaggaaauuggaaauggcugcuuugaauuuuaccacaaaugcgauaacacguguauggaaagugucaaaaaugggacuuaugacuacccaaaauacucagaggaagcaaaauuaaacagagaagaaauagaugggguaaagcuggaaucaacaaggauuuaccagauuuuggcgaucuauucaacugccgccaguucauugguacugguagucucccugggggcaaucaguuuuuggaugugcucuaaugggucucuacaguguagaauauguauuuaa

SEQ ID NO: 43869 - RNA, 1701 nt, Artificial Sequence
  derived and/or modified CDS sequence (wt) from hemagglutinin__InfluenzaA__AHM98712
augaaggcaauacuaguaguucugcuauauacauuugcaaccgcaaaugcagacacauuauguauagguuaccaugcgaacaauucaacagacacuguagacacaguacuagaaaagaauguaacaguaacacacucuguuaaucuucuagaagacaagcauaacgggaaacuaugcaaacuaagagggguagccccauugcauuuggguaaauguaacauugcuggcuggauccugggaaauccagagugugaaacacucuccacagcaagcucaugguccuacauuguggaaacaucuaguucagacaauggaacguguuacccaggagauuucaucgauuaugaggagcuaagagagcaauugagcucagugucaucauuugaaagguuugagauauuccccaagacaaguucauggcccaaucaugacucgaacaaagguguaacggcagcauguccucaugcuggagcaaaaggcuucuacaaaaauuuaauauggcuaguuaaaaaaggaaauucauacccaaagcucagcaaauccuacauuaaugauaaagggaaagaaguccucgugcuauggggcauucaccauccaucuacuacugcugaccaacaaagucucuaucagaaugcagauacauauguuuuuguggggacaucaagauacagcaagaaguucaagccggaaauagcaauaagacccaaagugagggaucaagaagggagaaugaacuauuacuggacacuaguagagccgggagacaaaauaacauucgaagcaacuggaaaucuagugguaccgagauaugcauucgcaauggaaagagaugcuggaucugguauuaucauuucagauacaccaguccacgauugcaauacaacuugucagacacccaagggugcuauaaacaccagccucccauuucaaaauauacauccgaucacaauuggaaaauguccaaaauauguaaaaagcacaaaauugagacuggccacaggauugaggaaugucccgucuauucaaucuagaggccuauuuggggccauugccggcuucauugaagggggguggacagggaugguagauggaugguacgguuaucaccaucaaaaugagcaggggucaggauaugcagccgaccugaagagcacacagaaugccauugacaagauuacuaacaaaguaaauucuguuauugaaaaaaugaauacacaguucacagcaguagguaaagaguucaaccaccuggaaaaaagaauagagaauuuaaauaaaaaaguugaugauggguuccuggacauuuggacuuacaaugccgaacuguugguucuauuggaaaaugaaagaacuuuggacuaccacgauucaaaugugaagaacuuauaugaaaagguaagaaaccaguuaaaaaacaaugccaaggaaauuggaaauggcugcuuugaauuuuaccacaaaugcgauaacacguguauggaaagugucaaaaaugggacuuaugacuacccaaaauacucagaggaagcaaaauuaaacagagaagaaauagaugggguaaagcuggaaucaacaaggauuuaccagauuuuggcgaucuauucaacugccgccaguucauugguacugguagucucccugggggcaaucaguuuuuggaugugcucuaaugggucucuacaguguagaauauguauuuaa

SEQ ID NO: 43870 - RNA, 1701 nt, Artificial Sequence
  derived and/or modified CDS sequence (wt) from hemagglutinin__InfluenzaA__AHM98723
augaaggcaauacuaguaguucugcuauauacauuugcaaccgcaaaugcagacacauuauguauagguuaucaugcgaacaacucaacagacacuguagacacaguacuagaaaagaauguaacaguaacacacucuguuaaccuucuagaagacaagcauaacgggaaacuaugcaaacugagagggguagccccauugcauuuggguaauuguaacauugcuggcuggauccugggaaauccagagugugaaucacucuccacagcaagcucaugguccuacaucguggaaacaucuaguucagacaauggaacaugcuacccaggagauuucaucaauuaugaggagcuaagagagcaauugagcucagugucaucauuugaaagguuugagauacuccccaagacaaguucauggcccaaucaugacucgaacaaagguguaacggcagcauguccucaagcuggagcaaaaagcuucuacaaaaauuuaauauggcuaguuaaaaaaggaaauucauacccaaagcucagcaaauccuacauuaacgauaaagggaaagaaguccucgugcuauggggcauucaccauccaucuacuagugcugaccaacaaagucucuaucagaaugcagaugcauauguuuuuguggggacaucaaaauacagcaagaaguucaagccggaaauagcaguaagacccaaagugagggaucaagaagggagaaugaacuauuacuggacacuaauagagccgggagacaaaauaacauucgaagcaacuggaaaucuauugguaccaagauaugcauucgcaauggaaagaaaugcuggaucugguauuaucauuucagauacaccaguccacgauugcaauacaacuugucagacacccaagggugcuauaaacaccagccucccauuucagaauauacauccgaucacaauuggaaaaugucccaaauauguaaaaagcacaaaauugagacuggccacaggauugaggaaugucccgucuauucaaucuagaggccuauuuggggccauugccgguuucauugaagggggguggacagggaugguagauggaugguacgguuaucaccaucaaaaugcgcaggggucaggauaugcagccgaccugaagagcacacagaaugccauugacaagauuacuaacaaaguaaauucuguuauugaaaagaugaauacacaguucacagcaguagguaaagaguucaaccaccuggaaaaaagaauagagaauuuaaauaaaaaaguugaugaugguuuccuggacauuuggacuuacaaugccgaacuguugguucuauuggaaaaugaaagaacuuuggacuaccacgauucaaaugugaaaaacuuauaugaaaagguaagaagccaguuaaaaaacaaugccaaggaaauuggaaacggcugcuuugaauuuuaccacaaaugcgauaacacgugcauggaaagugucaaaaaugggacuuaugacuacccaagauacucagaggaagcaaaauuaaacagagaagaaauagaugggguaaagcuagaaucaacaaggauuuaccagauuuuggcgaucuauucaacugucgccaguucauugguacugauagucucccugggggcaaucaguuucuggaugugcucuaaugggucucuacaguguagaauauguauuuaa

SEQ ID NO: 43871 - RNA, 1701 nt, Artificial Sequence
  derived and/or modified CDS sequence (wt) from hemagglutinin__InfluenzaA__AHM98734
augaaggcaauacuaguaguucugcuauauacauuugcaaccgcaaaugcagacacauuauguauagguuaccaugcgaacaauucaacagacacuguagacacaguacuagaaaagaauguaacaguaacacacucuguuaaucuucuagaagacaagcauaacgggaaacuaugcaaacuaagagggguagccccauugcauuuggguaaauguaacauugcuggcuggauccugggaaauccagagugugaaacacucuccacagcaagcucaugguccuacauuguggaaacaucuaauucagacaauggaacguguuacccaggagauuucaucgauuaugaggagcuaagagagcaauugagcucagugucaucauuugaaagguuugagauauuccccaagacaaguucauggcccaaucaugacucgaacaaagguguaacggcagcauguccucaugcuggaucaaaaggcuucuacaaaaauuuaauauggcuaguuaaaaaaggaaauucauacccaaagcucagcaaauccuacauuaaugauaaagggaaagaaguccucgugcuauggggcauucaccauccaucuacuacugcugaccaacaaagucucuaucagaaugcagauacauauguuuuuguggggacaucaagauacagcaagaaguucaagccggaaauagcaauaagacccaaagugagggaucaagaagggagaaugaacuauuacuggacacuaguagagccgggagacaaaauaacauucgaagcaacuggaaaucuagugguaccgagauaugcauucgcaauggaaagagaugcuggaucugguauuaucauuucagauacaccaguccacgauugcaauacaacuugucagacacccaagggugcuauaaacaccagccucccauuucagaauauacauccgaucacaauuggaaaauguccaaaauauguaaaaagcacaaaauugagacuggccacaggauugaggaaugucccgucuauucaaucuagaggccuauuuggggccauugccggcuucauugaagggggguggacagggaugguagauggaugguacgguuaucaccaucaaaaugagcaggggucaggauaugcagccgaccugaagagcacacagaaugccauugacaagauuacuaacaaaguaaauucuguuauugaaaaaaugaauacacaguucacagcaguagguaaagaguucaaccaccuggaaaaaagaauagagaauuuaaauaaaaaaguugaugauggguuccuggacauuuggacuuacaaugccgaacuguugguucuauuggaaaaugaaagaacuuuggacuaccacgauucaaaugugaagaacuuauaugaaaagguaagaaaccaguuaaaaaacaaugccaaggaaauuggaaauggcugcuuugaauuuuaccacaaaugcgauaacacguguauggaaagugucaaaaaugggacuuaugacuacccaaaauacucagaggaagcaaaauuaaacagagaagaaauagaugggguaaagcuggaaucaacaaggauuuaccagauuuuggcgaucuauucaacugccgccaguucauugguacugguagucucccugggggcaaucaguuuuuggaugugcucuaaugggucucuacaguguagaauauguauuuaa

SEQ ID NO: 43872 - RNA, 1701 nt, Artificial Sequence
  derived and/or modified CDS sequence (wt) from hemagglutinin__InfluenzaA__AHM98745
augaaggcaauacuaguaguucugcuauauacauuugcaaccgcaaaugcagacacauuauguauagguuaccaugcgaacaacucaacagacacuguagacacaguacuagaaaagaauguaacaguaacacacucuguuaaucuucuagaagacaagcauaacgggaaacuaugcaagcuaagaggaguagccccauugcauuuggguaaauguaacauugcuggcuggauccugggaaauccagagugugaaacacucuccacagcaagcucaugguccuacauuguggaaacaucuaguucagacaauggaacguguuacccaggagauuucaucgauuaugaggagcuaagagagcaauugagcucagugucaucauuugaaagguuugagauauuccccaagacaaguucauggcccaaucaugacucgaacaaagguguaacggcagcuuguccucaugcuggagcaaaaggcuucuacaaaaauuuaauauggcuaguuaaaaaaggaaauucauacccaaagcucagcaaauccuacauuaaugauaaagggaaagaaguccucgugcuauggggcauucaccauccaucuacuacugcugaccaacaaagucucuaucagaaugcagauacauauguuuuuguggggacaucaagauacagcaagaaguucaagccggaaauagcaauaagacccaaagugagggaucaagaagggagaaugaacuauuacuggacacuaguagagccgggagacaaaauaacauucgaagcaacuggaaaucuagugguaccgagauaugcauucgcaauggaaagagaugcuggaucugguauuaucauuucagauacaccaguccacgauugcaauacaacuugucagacacccaagggugcuauaaacaccagccucccauuucagaauauacauccgaucacaauuggaaaauguccaaaauauguaaaaagcacaaaauugagacuggccacaggauugaggaaugucccgucuauucaaucuagaggccuauuuggggccauugccggcuucauugaagggggauggacagggaugguagauggaugguacgguuaucaccaucaaaaugagcaggggucaggauaugcagccgaccugaagagcacacagaaugccauugacaagauuacuaacaaaguaaauucuguuauugaaaaaaugaauacacaguucacagcaguagguaaagaguucaaccaccuggaaaaaagaauagagaauuuaaauaaaaaaguugaugauggguuccuggacauuuggacuuacaaugccgaacuguugguucuauuggaaaaugaaagaacuuuggacuaccacgauucaaaugugaagaacuuauaugaaaagguaagaaaccaguuaaaaaacaaugccaaggaaauuggaaauggcugcuuugaauuuuaccacaaaugcgauaacacguguauggaaagugucaaaaaugggacuuaugacuacccaaaauacucagaggaagcaaaauuaaacagagaagaaauagaugggguaaagcuggaaucaacaaggauuuaccagauuuuggcgaucuauucaaccgccgccaguucauugguacugguagucucccugggggcaaucaguuuuuggaugugcucuaaugggucucuacaguguagaauauguauuuaa

SEQ ID NO: 43873 - RNA, 1701 nt, Artificial Sequence
  derived and/or modified CDS sequence (wt) from hemagglutinin__InfluenzaA__AHM98756
augaaggcaauacuaguaguucugcuauauacauuugcaaccgcaaaugcagacacauuauguauagguuaccaugcgaacaacucaacagacacuguagacacaguacuagaaaagaauguaacaguaacacacucuguuaaucuucuagaagacaagcauaacgggaaacuaugcaaacuaagaggaguagccccauugcauuuggguaaauguaacauugcuggcuggauccugggaaauccagagugugaaacacucuccacagcaagcucaugguccuacauuguggaaacaucuaguucagacaauggaacguguuacccaggagauuucaucgauuaugaggagcuaagagagcaauugagcucagugucaucauuugaaagguuugagauauuccccaagacaaguucauggcccaaucaugacucgaacaaaggaguaacggcagcauguccucaugcuggagcaaaaggcuucuacaaaaauuuaauauggcuaguuaaaaaaggaaauucauacccaaagcucagcaaauccuacauuaaugauaaagggaaagaaguccucgugcuauggggcauucaccauccaucuacuacugcugaccaacaaagucuuuaucagaaugcagauacauauguuuuuguggggacaucaagauacagcaagaaguucaagccggaaauagcaauaagacccaaagugagggaucaagaagggagaaugaacuauuacuggacauuaguagagccgggagacaaaauaacauucgaagcaacuggaaaucuagugguaccgagauaugcauucgcaauggaaagagaugcuggaucugguauuaucauuucagauacaccaguccacgauugcaauacaacuugucagacacccaagggugcuauaaacaccagccucccauuucagaauauacauccgaucacaauuggaaaauguccaaaauauguaaaaagcacaaaauugagacuggccacaggauugaggaaugucccgucuauucaaucuagaggccuauuuggggccauugccggcuucauugaagggggauggacagggaugguagauggaugguacgguuaucaccaucaaaaugagcaggggucaggauaugcagccgaccugaagagcacacagaaugccauugacaagauuacuaacaaaguaaauucuguuauuguaaaaaugaauacacaguucacagcaguagguaaagaguucaaccaccuggaaaaaagaauagagaauuuaaauaaaaaaguugaugauggguuccuggacauuuggacuuacaaugccgaacuguugguucuauuggaaaaugaaagaacuuuggacuaccacgauucaaaugugaagaacuuauaugaaaagguaagaaaccaguuaaaaaacaaugccaaggaaauuggaaauggcugcuuugaauuuuaccacaaaugcgauaacacguguauggaaagugucaaaaaugggacuuaugacuacccaaaauacucagaggaagcaaaauuaaacagagaagaaauagaugggguaaagcuggaaucaacaaggauuuaccagauuuuggcgaucuauucaacugccgccaguucauugguacugguagucucccugggggcaaucaguuuuuggaugugcucuaaugggucucuacaguguagaauauguauuuaa

SEQ ID NO: 43874 - RNA, 1701 nt, Artificial Sequence
  derived and/or modified CDS sequence (wt) from hemagglutinin__InfluenzaA__AHM98767
augaaggcaauacuaguaguucugcuauauacauuugcaaccgcaaaugcagacacauuauguauagguuaccaugcgaacaacucaacagacacuguagacacaguacuagaaaagaauguaacaguaacacacucuguuaaucuucuagaagacaagcauaacgggaaacuaugcaaacuaagaggaguagccccauugcauuuggguaaauguaacauugcuggcuggauccugggaaauccagagugugaaacacucuccacagcaagcucaugguccuacauuguggaaacaucuaguucagacaauggaacguguuacccaggagauuucaucgauuaugaggagcuaagagagcaauugagcucagugucaucauuugaaagguuugagauauuccccaagacaaguucauggcccaaucaugacucgaacaaagguguaacggcagcauguccucaugcuggagcaaaaggcuucuacaaaaauuuaauauggcuaguuaaaaaaggaaauucauacccaaagcucagcaaauccuacauuaaugauaaagggaaagaaguccucgugcuauggggcauucaccauccaucuacuacugcugaccaacaaagucucuaucagaaugcagauacauauguuuuuguggggacaucaagauacagcaagaaguucaagccggaaauagcaauaagacccaaagugagggaucaagaagggagaaugaacuauuacuggacacuaguagagccgggagacaaaauaacauucgaagcaacuggaaaucuagugguaccgagauaugcauucgcaauggaaagagaugcuggaucugguauuaucauuucagauacaccaguccacgauugcaauacaacuugucagacacccaagggugcuauaaacaccagccucccauuucagaauauacauccgaucacaauuggaaaauguccaaaauauguaaaaagcacaaaauugagacuggccacaggauugaggaaugucccgucuauucaaucuagaggccuauuuggggccauugccggcuucauugaagggggauggacagggaugguagauggaugguacgguuaucaccaccaaaaugagcaggggucaggauaugcagccgaccugaagagcacacagaaugccauugacaagauuacuaacaaaguaaauucuguuauugaaaaaaugaauacacaguucacagcaguagguaaagaguucaaccaccuggaaaaaagaauagagaauuuaaauaaaaaaguugaugauggguuccuggacauuuggacuuacaaugccgaacuguugguucuauuggaaaaugaaagaacuuuggacuaccacgauucaaaugugaagaacuuauaugaaaagguaagaaaccaguuaaaaaacaaugccaaggaaauuggaaauggcugcuuugaauuuuaccacaaaugcgauaacacguguauggaaagugucaaaaaugggacuuaugacuacccaaaauacucagaggaagcaaaauuaaacagagaagaaauagaugggguaaagcuggaaucaacaaggauuuaccagauuuuggcgaucuauucaacugccgccaguucauugguacugguagucucccugggggcaaucaguuuuuggaugugcucuaaugggucucuacaguguagaauauguauuuaa

SEQ ID NO: 43875 - RNA, 1701 nt, Artificial Sequence
  derived and/or modified CDS sequence (wt) from hemagglutinin__InfluenzaA__AHM98778
augaaggcaauacuaguaguucugcuauauacauuugcaaccgcaaaugcagacacauuauguauagguuaucaugcgaacaauucaacagacacuguagacacaguauuagaaaagaauguaacaguaacucacucuguuaaccuucuagaagacaagcauaacaggaaacuaugcaaacuaagagggguugccccauugcauuuggguaaauguaacauugcgggcuggauccugggaaauccagagugugaaucacucuccacagcaagcucaugguccuacauuguggaaacaucuaguucagacaauggaacguguuacccaggagauuucaucaauuaugaggagcuaagagagcaauugagcucagugucaucauuugaaagguuugaaauauuccccaagacaaguucauggcccaaucaugacucgaacaaagguguaacggcagcauguccucgugcuggagcaaaaagcuucuacaaaaauuuaauauggcuaguuaaaaaaggaaauucauacccaaagcucagcaaauccuacauuaaugauaaagggaaagaaguccucgugcuguggggcauucaccauccaucuacuacugcugaccaacaaagucucuaucagaaugcagaugcauauguuuuuguggggacaucaagauacagcaagaaguucaagccggaaauagcaauaagacccaaagugagggaucaagaagggagaaugaacuauuacuggacacuaguagagccgggagacaaaauaacauucgaagcaacuggaaaucuauugguaccgagauaugcauucgcaauggaaagaaaugcuggaucugguauuaucauuucagauacaccaguccacgauugcaauacaacuugucagacacccaagggugcuauaaacaccagccucccauuucagaauauacauccgaucacaauuggaaaauguccaaaauauguaaaaagcacaaaauugagacuggccacaggauugaggaaugucccgucuauucaaucuagaggccuauuuggagccauugccggcuucauugaagggggguggacagggaugguagauggaugguacgguuaucaccaucaaaaugagcaggggucaggauaugcagccgaccugaagagcacacagaaugccauugacaagauuacuaacaaaguaaauucuguuauugaaaagaugaauacacaguucacagcaguagguaaagaguucaaccaccuggaaaaaagaauagagaauuuaaauaaaaaaguugaugaugguuuccuggacauuuggacuuacaaugccgaacuguugguucuauuggaaaaugaaagaacuuuggacuaccacgauucaaaugugaagaacuuguaugaaaagguaagaaaccaguuaaaaaacaaugccaaggaaauuggaaacggcugcuuugaauuuuaccacaaaugcgauaacacgugcauggaaagugucaaaaaugggacuuaugacuacccaaaauacucagaggaagcaaaauuaaacagagaagaaauagaugggguaaagcuggaaucaacaaggauuuaccagauuuuggcgaucuauucaacugucgccaguucauugguacugguagucucccugggggcaaucaguuucuggaugugcucuaaugggucucuacaguguagaauaugcauuuaa

SEQ ID NO: 43876 - RNA, 1701 nt, Artificial Sequence; identical to SEQ ID NO: 41829
  derived and/or modified CDS sequence (wt) from hemagglutinin__InfluenzaA__AHM98798

SEQ ID NO: 43877 - RNA, 1701 nt, Artificial Sequence
  derived and/or modified CDS sequence (wt) from hemagglutinin__InfluenzaA__AHM98809
augaaggcaauacuaguaguuaugcuauauacauuugcaaccgcaaaugcagacacauuauguauagguuaucaugcgaacaauucaacagacacuguagacacaguacuagaaaagaauguaacaguaacacacucuguuaaucuucuagaagacaagcauaacgggaaacuaugcaaacuaagagggguggccccauugcauuugggaaaauguaacauugcuggcuggauccugggaaauccagagugugaaucacucuccacagcaagcucaugguccuacauuguggaaacaucuaguucagacaauggaacguguuacccaggagauuucaucgauuaugaggagcuaagagagcaauugagcucagugucaucauuugaaagguuugagauauuccccaaaacaaguucauggcccaaucaugacucgaacaaagguguaacggcagcauguccucaugcuggagcaaaaggcuucuacaaaaauuuaauauggcuaguuaaaaaaggaaauucauacccaaagcucagcaaauccuacauuaaugauaaagggaaagaaguccucgugcuauggggcauucaccauccaucuacuacugcugaccaacaaagucucuaucagaaugcagauacauauguuuuuguggggacaucaagauacagcaagaaguucaagccggaaauagcaauaagacccaaagugagggaucaagaagggagaaugaacuauuacuggacacuaguagagccgggagacaaaauaacauucgaagcaacuggaaaucuagugguaccgagauaugcauucgcaauggaaagaaaugcuggaucugguauuaucauuucagauacaccaguccacgauugcaauacaacuugucagacacccaagggugcuauaaacaccagccucccauuucagaauauacauccgaucacaauuggaaaauguccaaaauauguaaaaagcacaaaauugagacuggccacaggauugaggaaugucccgucuauucaaucuagaggccuauuuggggccauugccggcuucauugaagggggguggacagggaugguagauggaugguacgguuaucaccaucaaaaugagcaggggucaggauaugcagccgaccugaagagcacacagaaugccauugacaagauuacuaacaaaguaaauucuguuauugaaaagaugaauacacaguucacagcaguagguaaagaguucaaccaccuggaaaaaagaauagagaauuuaaauaaaaaaguugaugaugguuucuuggacauuuggacuuacaaugccgaacuguugguucuauuggaaaaugaaagaacuuuggacuaccacgauucaaaugugaagaacuuauaugaaaagguaagaaaccaguuaaaaaacaaugccaaggaaauuggaaauggcugcuuugaauuuuaccacaaaugcgauaacacgugcauggaaagugucaaaaaugggacuuaugacuacccaaaauacucagaggaagcaaaauuaaacagagaagaaauagaugggguaaagcuggaaucaacaaggauuuaccagauuuuggcgaucuauucaacugucgccaguucauugguacugguagucucccugggggcaaucaguuuuuggaugugcucuaaugggucucuacaguguagaauauguauuuaa

SEQ ID NO: 43878 - RNA, 1701 nt, Artificial Sequence; identical to SEQ ID NO: 38923
  derived and/or modified CDS sequence (wt) from hemagglutinin__InfluenzaA__AHM98820

SEQ ID NO: 43879 - RNA, 1701 nt, Artificial Sequence
  derived and/or modified CDS sequence (wt) from hemagglutinin__InfluenzaA__AHM98831
augaaggcaauacuaguaguuaugcuauauacauuugcaaccgcaaaugcagacacauuauguauagguuaucaugcgaacaauucaacagacacuguagacacaguacuagaaaagaauguaacaguaacacacucuguuaaucuucuagaagacaagcauaacgggaaacuaugcaaacuaagagggguagccccauugcauuuggguaaauguaacauugcuggcuggauccugggaaauccagagugugaaucacucuccacagcaagcucaugguccuacauuguggaaacaucuaguucagacaauggaacguguuacccaggagauuucaucgauuaugaggagcuaagagagcaauugagcucagugucaucauuugaaagguuugagauauuccccaaaacaaguucauggcccaaucaugacucgaacaaagguguaacggcagcauguccucaugcuggagcaaaaggcuucuacaaaaauuuaauauggcuaguuaaaaaaggaaauucauacccaaagcucagcaaauccuacauuaaugauaaagggaaagaaguccucgugcuauggggcauucaucauccaucuacuacugcugaccaacaaagucucuaucagaaugcagauacauauguuuuuguggggacaucaagauacagcaagaaguucaagccggaaauagcaauaagacccaaagugagggaucaagaagggagaaugaacuauuacuggacacuaguagagccgggagacaaaauaacauucgaagcaacuggaaaucuagugguaccgagauaugcauucgcaauggaaagaaaugcuggaucugguauuaucauuucagauacaccaguccacgauugcaauacaacuugucagacacccaagggugcuauaaacaccagccucccauuucagaauauacauccgaucacaauuggaaaauguccaaaauauguaaaaagcacaaaauugagacuggccacaggauugaggaaugucccgucuauucaaucuagaggccuauuuggggccauugccggcuucauugaagggggguggacagggaugguagauggaugguacgguuaucaccaucaaaaugagcaggggucaggauaugcagccgaccugaagagcacacagaaugccauugacaagauuacuaacaaaguaaauucuguuauugaaaagaugaauacacaguucacagcaguagguaaagaguucaaccaccuggaaaaaagaauagagaauuuaaauaaaaaaguugaugaugguuuccuggacauuuggacuuacaaugccgaacuguugguucuauuggaaaaugaaagaacuuuggacuaccacgauucaaaugugaagaauuuauaugaaaagguaagaaaccaguuaaaaaacaaugccaaggaaauuggaaauggcugcuuugaauuuuaccacaaaugcgauaacacgugcauggaaagugucaaaaaugggacuuaugacuacccaaaauacucagaggaagcaaaauuaaacagagaagaaauagaugggguaaagcuggaaucaacaaggauuuaccagauuuuggcgaucuauucaacugucgccaguucauugguacugguagucucccugggggcaaucaguuuuuggaugugcucuaaugggucucuacaguguagaauauguauuuaa

SEQ ID NO: 43880 - RNA, 1701 nt, Artificial Sequence
  derived and/or modified CDS sequence (wt) from hemagglutinin__InfluenzaA__AHM98836
augaaggcaauacuaguaguuaugcuauauacauuugcaaccgcaaaugcagacacauuauguauagguuaucaugcgaacaauucaacagacacuguagacacaguacuagaaaagaauguaacaguaacacacucuguuaaucuucuagaagacaagcauaacgggaaacuaugcaaacuaagagggguagccccauugcauuuggguaaauguaacauugcuggcuggauccugggaaauccagagugugaaucacucuccacagcaagcucaugguccuacauuguggaaacaucuaguucagacaauggaacguguuacccaggagauuucaucgauuaugaggagcuaagagagcaauugagcucagugucaucauuugaaagguuugagauauuccccaaaacaaguucauggcccaaucaugacucgaacaaagguguaacggcagcauguccucaugcuggagcaaaaggcuucuacaaaaauuuaauauggcuaguuaaaaaaggaaauucauacccaaagcucagcaaauccuacauuaaugauaaagggaaagaaguccucgugcuauggggcauucaccauccaucuacuacugcugaccaacaaagucucuaucagaaugcagauacauauguuuuuguggggacaucaagauacagcaagaaguucaagccggaaauagcaauaagacccaaagugagggaucaagaagggagaaugaacuauuacuggauacuaguagagccgggagacaaaauaacauucgaagcaacuggaaaucuagugguaccgagauaugcauucgcaauggaaagaaaugcuggaucugguauuaucauuucagauacaccaguccacgauugcaauacaacuugucagacacccaagggugcuauaaacaccagccucccauuucagaauauacauccgaucacaauuggaaaauguccaaaauauguaaaaagcacaaaauugagacuggccacaggauugaggaaugucccgucuauucaaucuagaggccuauuuggggccauugccggcuucauugaagggggguggacagggaugguagauggaugguacgguuaucaccaucaaaaugagcaggggucaggauaugcagccgaccugaagagcacacagaaugccauugacaagauuacuaacaaaguaaauucuguuauugaaaagaugaauacacaguucacagcaguagguaaagaguucaaccaccuggaaaaaagaauagagaauuuaaauaaaaaaguugaugaugguuuccuggacauuuggacuuacaaugccgaacuguugguucuauuggaaaaugaaagaacuuuggacuaccacgauucaaaugugaagaacuuauaugaaaagguaagaaaccaguuaaaaaacaaugccaaggaaauuggaaauggcugcuuugaauuuuaccacaaaugcgauaacacgugcauggaaagugucaaaaaugggacuuaugacuacccaaaauacucagaggaagcaaaauuaaacagagaagaaauagaugggguaaagcuggaaucaacaaggauuuaccagauuuuggcgaucuauucaacugucgccaguucauugguacugguagucucccugggggcaaucaguuuuuggaugugcucuaaugggucucuacaguguagaauauguauuuaa

SEQ ID NO: 43881 - RNA, 1701 nt, Artificial Sequence
  derived and/or modified CDS sequence (wt) from hemagglutinin__InfluenzaA__AHM98847
augaaggcaauacuaguaguuaugcuauauacauuugcaaccgcaaaugcagacacauuauguauagguuaucaugcgaacaauucaacagacacuguagacacaguacuagaaaagaauguaacaguaacacacucuguuaaucuucuagaagacaagcaugacgggaaacuaugcaaacuaagagggguagccccauugcauuuggguaaauguaacauugcuggcuggauccugggaaauccagagugugaaucacucuccacagcaagcucaugguccuacauuguggaaacaucuaguucagacaauggaacguguuacccaggagauuucaucgauuaugaggagcuaagagagcaauugagcucagugucaucauuugaaagguuugagauauuccccaaaacaaguucauggcccaaucaugacucgaacaaagguguaacggcagcauguccucaugcuggagcaaaaggcuucuacaaaaauuuaauauggcuaguuaaaaaaggaaauucauacccaaagcucagcaaauccuacauuaaugauaaagggaaagaaguccucgugcuauggggcauucaccauccaucuacuacugcugaccaacaaagucucuaucagaaugcagauacauauguuuuuguggggacaucaagauacagcaagaaguucaagccggaaauagcaauaagacccaaagugagggaucaagaagggagaaugaacuauuacuggacacuaguagagccgggagacaaaauaacauucgaagcaacuggaaaucuagugguaccgagauaugcauucgcaauggaaagaaaugcuggaucugguauuaucauuucagauacaccaguccacgauugcaauacaacuugucagacacccaagggugcuauaaacaccagccucccauuucagaauauacauccgaucacaauuggaaaauguccaaaauauguaaaaagcacaaaauugagacuggccacaggauugaggaaugucccgucuauucaaucuagaggccuauuuggggccauugccggcuucauugaagggggguggacagggaugguagauggaugguacgguuaucaccaucaaaaugagcaggggucaggauaugcagccgaccugaagagcacacagaaugccauugacaagauuacuaacaaaguaaauucuguuauugaaaagaugaauacacaguucacagcaguagguaaagaguucaaccaccuggaaaaaagaauagagaauuuaaauaaaaaaguugaugaugguuuccuggacauuuggacuuacaaugccgaacuguugguucuauuggaaaaugaaagaacuuuggacuaccacgauucaaaugugaagaacuuauaugaaaagguaagaaaccaguuaaaaaacaaugccaaggaaauuggaaauggcugcuuugaauuuuaccacaaaugcgauaacacgugcauggaaagugucaaaaaugggacuuaugacuacccaaaauacucagaggaagcaaaauuaaacagagaagaaauagaugggguaaagcuggaaucaacaaggauuuaccagauuuuggcgaucuauucaacugucgccaguucauugguacugguagucucccugggggcaaucaguuuuuggaugugcucuaaugggucucuacaguguagaauauguauuuaa

SEQ ID NO: 43882 - RNA, 1701 nt, Artificial Sequence; identical to SEQ ID NO: 41840
  derived and/or modified CDS sequence (wt) from hemagglutinin__InfluenzaA__AHM98858

SEQ ID NO: 43883 - RNA, 1701 nt, Artificial Sequence
  derived and/or modified CDS sequence (wt) from hemagglutinin__InfluenzaA__AHM98877
augaaggcaauacuaguaguucugcuauauacauuugcaaccgcaaaugcagacacauuauguauagguuaucaugcgaacaauucaacagacacuguagacacaguacuagaaaagaauguaacaguaacacacucuguuaaccuucuagaagacaagcauaacgggaaacuaugcaaacuaagagggguagccccauugcauuuggguaaauguaacauugcuggcuggauccugggaaauccagagugugaaucacucuccacagcaagcucaugguccuacauuguggaaacaucuaguucagacaauggaacguguuacccaggagauuucaucaauuaugaggagcuaagagagcaauugagcucagugucaucauuugaaagguuugagauauuccccaagacaaguucauggcccaaucaugacucgaacaaagguguaacggcagcauguccucaugcuggagcaaaaagcuucuacaaaaauuuaauauggcuaguuaaaaaaggaaauucauacccaaagcucagcaaauccuacauuaaugauaaagggaaagaaguccucgugcuguggggcauucaccauccaucuacuacugcugaccaacaaagucucuaucagaaugcagaugcauauguuuuuguggggacaucaagauacagcaagaaguucaagccggaaauagcaauaagacccaaagugagggaucaagaagggagaaugaacuauuacuggacacuaguagagccgggagacaaaauaacauucgaagcaacuggaaaucuagugguaccgagauaugcauucgcaauggaaagaaaugcuggaucugguauuaucauuucagauacaccaguccacgauugcaauacaacuugucagacacccaagggugcuauaaacaccagccucccauuucagaauauacauccgaucacaauuggaaaauguccaaaauauguaaaaagcacaaaauugagacuggccacaggauugaggaaugucccgucuauucaaucuagaggccuauuuggggccauugccggauucauugaagggggguggacagggaugguagauggaugguacgguuaucaccaucaaaaugagcaggggucaggauaugcagccgaccugaagagcacacagaaugccauugacaagauuacuaacaaaguaaauucuguuauugaaaagaugaauacacaguucacagcaguagguaaagaguucaaccaccuggaaaaaagaauagagaauuuaaauaaaaaaguugaugaugguuuccuggacauuuggacuuacaaugccgaacuguugguucuauuggaaaaugaaagaacuuuggacuaccacgauucaaaugugaagaacuuguaugaaaagguaagaaaccaguuaaaaaacaaugccaaggaaauuggaaacggcugcuuugaauuuuaccacaaaugcgauaacacgugcauggaaagugucaaaaaugggacuuaugacuacccaaaauacucagaggaagcaaaauuaaacagagaagaaauagaugggguaaagcuggaaucaacaaggauuuaccagauuuuggcgaucuauucaacugucgccaguucauugguacugguagucucccugggggcaaucaguuucuggaugugcucuaaugggucucuacaguguagaauauguauuuaa

SEQ ID NO: 43884 - RNA, 1701 nt, Artificial Sequence
  derived and/or modified CDS sequence (wt) from hemagglutinin__InfluenzaA__AHM98898
augaaggcaauacuaguaguucugcuauauacauuugcaaccgcaaaugcagacacauuauguauagguuaucaugcgaacaauucaacagacacuguagacacaguacuagaaaagaauguaacaguaacacacucuguuaaccuucuagaagacaaucauaacgggaaacuaugcaaacuaagagggguagccccauugcauuuggguaaauguaacauugcuggcuggauccugggaaauccagagugugaaucacucuccacagcaagcucaugguccuacauuguggaaacaucuaguucagacaauggaacguguuacccaggagauuucaucaauuaugaggagcuaagagagcaauugagcucagugucaucauuugaaagguuugagauauuccccaagacaaguucauggcccaaucaugacucgaacaaagguguaacggcagcauguccucaugcuggagcaaaaagcuucuacaaaaauuuaauauggcuaguuaaaaaaggaaauucauacccaaagcucagcaaauccuacauuaaugauaaagggaaagaaguccucgugcuguggggcauucaccauccaucuacuacugcugaccaacaaagucucuaucagaaugcagaugcauauguuuuuguggggacaucaagauacagcaagaaguucaagccggaaauagcaauaagacccaaagugagggaucaagaagggagaaugaacuauuacuggacacuaguagagccgggagacaaaauaacauucgaagcaacuggaaaucuagugguaccgagauaugcauucgcaauggaaagaaaugcuggaucugguauuaucauuucagauacaccaguccacgauugcaauacaacuugucagacacccaagggugcuauaaacaccagccucccauuucagaauauacauccgaucacaauuggaaaauguccaaaauauguaaaaagcacaaaauugagacuggccacaggauugaggaaugucccgucuauucaaucuagaggccuauuuggggccauugccggauucauugaagggggguggacagggaugguagauggaugguacgguuaucaccaucaaaaugagcaggggucaggauaugcagccgaccugaagagcacacagaaugccauugacaagauuacuaacaaaguaaauucuguuauugaaaagaugaauacacaguucacagcaguagguaaagaguucaaccaccuggaaaaaagaauagagaauuuaaauaaaaaaguugaugaugguuuccuggacauuuggacuuacaaugccgaacuguugguucuauuggaaaaugaaagaacuuuggacuaccacgauucaaaugugaagaacuuguaugaaaagguaagaaaccaguuaaaaaacaaugccaaggaaauuggaaacggcugcuuugaauuuuaccacaaaugcgauaacacgugcauggaaagugucaaaaaugggacuuaugacuacccaaaauacucagaggaagcaaaauuaaacagagaagaaauagaugggguaaagcuggaaucaacaaggauuuaccagaucuuggcgaucuauucaacugucgccaguucauugguacugguagucucccugggggcaaucaguuucuggaugugcucuaaugggucucuacaguguagaauauguauuuaa

SEQ ID NO: 43885 - RNA, 1701 nt, Artificial Sequence; identical to SEQ ID NO: 42472
  derived and/or modified CDS sequence (wt) from hemagglutinin__InfluenzaA__AHM98909

SEQ ID NO: 43886 - RNA, 1701 nt, Artificial Sequence
  derived and/or modified CDS sequence (wt) from hemagglutinin__InfluenzaA__AHM98932
augaaggcaauacuaguaguucugcuauauacauuugcaaccgcaaaugcagacacauuauguauagguuaucaugcgaacaauucaacagacacuguagacacaguacuagaaaagaauguaacaguaacacacucuguuaaccuucuagaagacaagcauaacgggaaacuaugcaaacuaggagggguagccccauugcauuuggguaaauguaacauugcuggcuggauccugggaaauccagagugugaaucacucuccacagcaagcucaugguccuacauuguggaaacaucuaguucagacaauggaacguguuacccaggagauuucaucgauuaugaggagcuaagagagcaauugagcucagugucaucauuugaaagguuugagauauuccccaagacaaguucauggcccaaucaugacucgaacaaagguguaacggcagcauguccucaugcuggagcaaaaagcuucuacaaaaauuuaauauggcuaguuaaaaaaggagauucauacccaaagcucagcaaauccuacauuaaugauaaagggaaagaaguccucgugcuauggggcauucaccauccaucuacuagugcugaccaacaaagucucuaucagaaugcagaugcauauguuuuuguggggucaucaagauacagcaagaaguucaagccggaaauagcaauaagacccaaagugagggaucgagaagggagaaugaacuauuacuggacacuaguagagccgggagacaaaauaacauucgaagcaacuggaaaucuagugguaccgagauaugcauucgcaauggaaagaaaugcuggaucugguauuaucauuucagauacaccaguccacgauugcaauacaacuugucagacacccaagggugcuauaaacaccagccucccauuucagaauauacauccgaucacaauuggaaaauguccaaaauauguaaaaagcacaaaauugagacuggccacaggauugaggaaugucccgucuauucaaucuagaggccuauuuggggccauugccgguuucauugaagggggguggacagggaugguagauggaugguacgguuaucaccaucaaaaugagcaggggucaggauaugcagccgaccugaagagcacacagaaugccauugacgagauuacuaacaaaguaaauucuguuauugaaaagaugaauacacaguucacagcaguagguaaagaguucaaccaccuggaaaaaagaauagagaauuuaaauaaaaaaguugaugaugguuuccuggacauuuggacuuacaaugccgaacuguugguucuauuggaaaaugaaagaacuuuggacuaccacgauucaaaugugaagaacuuauaugaaaagguaagaagccagcuaaaaaacaaugccaaggaaauuggaaacggcugcuuugaauuuuaccacaaaugcgauaacacgugcauggaaagugucaaaaaugggacuuaugacuacccaaaauacucagaggaagcaaaauuaaacagagaagaaauagaugggguaaagcuggaaucaacaaggauuuaccagauuuuggcgaucuauucaacugucgccaguucauugguacugguagucucccugggggcaaucaguuucuggaugugcucuaaugggucucuacaguguagaauauguauuuaa

SEQ ID NO: 43887 - RNA, 1701 nt, Artificial Sequence; identical to SEQ ID NO: 43886
  derived and/or modified CDS sequence (wt) from hemagglutinin__InfluenzaA__AHM98940

SEQ ID NO: 43888 - RNA, 1701 nt, Artificial Sequence; identical to SEQ ID NO: 43886
  derived and/or modified CDS sequence (wt) from hemagglutinin__InfluenzaA__AHM98951

SEQ ID NO: 43889 - RNA, 1701 nt, Artificial Sequence
  derived and/or modified CDS sequence (wt) from hemagglutinin__InfluenzaA__AHM98975
augaaggcaauacuaguaguucugcuauauacauuugcaaccgcaaaugcagacacauuauguauagguuaucaugcgaacaauucaacagacacuguagacacaguacuagaaaagaauguaacaguaacacacucuguuaaccuucuagaagacaagcauaacgggaaacuaugcaaacuaagagggguagccccauugcauuuggguaaauguaacauugcuggcuggauccugggaaauccagagugugaaucacucuccacagcaagcucaugguccuacauuguggaaacaucuaguucagacaauggaacguguuacccaggagauuucaucgauuaugaggagcuaagagagcaauugagcucagugucaucauuugaaagguuugagauauuccccaagacaaguucauggcccaaucaugaaucgaacaaagguguaacggcagcauguccucaugcuggagcaaaaagcuucuacaaaaauuuaauauggcuaguuaaaaaaggaaauucauacccaaagcucagcaaauccuacauuaaugauaaagggaaagaaguccucgugcuauggggcauucaccauccaucuacuagugcugaccaacaaagucucuaucagaaugcagaugcauauguuuuuguggggucaucaagauacagcaagaaguucaagccggaaauagcaauaagacccaaagugagggaucaagaagggagaaugaacuauuacuggacacuaguagagccgggagacaaaauaacauucgaagcaacuggaaaucuagugguaccgagauaugcauucgcaauggaaagaaaugcuggaucugguauuaucauuucagauacaccaguccacgauugcaauacaacuugucagacacccaagggugcuauaaacaccagccucccauuucagaauauacauccgaucacaauuggaaaauguccaaaauauguaaaaagcacaaaauugagacuggccacaggauugaggaaugucccgucuauucaaucuagaggccuauuuggggccauugccgguuucauugaagggggguggacagggaugguagauggaugguacgguuaucaccaucaaaaugagcaggggucaggauaugcagccgaccugaagagcacacagaaugccauugacgagauuacuaacaaaguaaauucuguuauugaaaagaugaauacacaguucacagcaguagguaaagaguucaaccaccuggaaaaaagaauagagaauuuaaauaaaaaaguugaugaugguuuccuggacauuuggacuuacaaugccgaacuguugguucuauuggaaaaugaaagaacuuuggacuaccacgauucaaaugugaagaacuuauaugaaaagguaagaagccagcuaaaaaacaaugccaaggaaauuggaaacggcugcuuugaauuuuaccacaaaugcgauaacacgugcauggaaagugucaaaaaugggacuuaugacuacccaaaauacucagaggaagcaaaauuaaacagagaagaaauagaugggguaaagcuggaaucaacaaggauuuaccagauuuuggcgaucuauucaacugucgccaguucauugguacugguagucucccugggggcaaucaguuucuggaugugcucuaaugggucucuacaguguagaauauguauuuaa

SEQ ID NO: 43890 - RNA, 1701 nt, Artificial Sequence
  derived and/or modified CDS sequence (wt) from hemagglutinin__InfluenzaA__AHM98997
augaaggcaauacuaguaguucugcuauauacauuugcaaccgcaaaugcagacacauuauguauagguuaucaugcgaacaauucaacagacacuguagacacaguacuagaaaagaauguaacaguaacacacucuguuaaccuucuagaagacaagcauaacgggaaacuaugcaaacuaagagggguagccccauugcauuuggguaaauguaacauugcuggcuggauccugggaaauccagagugugaaucacucuccacagcaagcucaugguccuacauuguggaaacaucuaguucagacaauggaacguguuacccaggagauuucaucgauuaugaggagcuaagagagcaauugagcucagugucaucauuugaaagguuugagauauuccccaagacaaguucauggcccaaucaugacucgaacaaagguguaacggcagcauguccucaugcuggagcaaaaagcuucuacaaaaauuuaauauggcuaguuaaaaaaggagauucauacccaaagcucagcaaauccuacauuaaugauaaagggaaagaaguccucgugcuauggggcauucaccauccaucuacuagugcugaccaacaaagucucuaucagaaugcagaugcauauguuuuuguggggucaucaagauacagcaagaaguucaagccggaaauagcaauaagacccaaagugaggggucaagaagggagaaugaacuauuacuggacacuaguagagccgggagacaaaauaacauucgaagcaacuggaaaucuagugguaccgagauaugcauucgcaauggaaagaaaugcuggaucugguauuaucauuucagauacaccaguccacgauugcaauacaacuugucagacacccaagggugcuauaaacaccagccucccauuucagaauauacauccgaucacaauuggaaaauguccaaaauauguaaaaagcacaaaauugagacuggccacaggauugaggaaugucccgucuauucaaucuagaggccuauuuggggccauugccgguuucauugaagggggguggacagggaugguagauggaugguacgguuaucaccaucaaaaugagcaggggucaggauaugcagccgaccugaagagcacacagaaugccauugacgagauuacuaacaaaguaaauucuguuauugaaaagaugaauacacaguucacagcaguagguaaagaguucaaccaccuggaaaaaagaauagagaauuuaaauaaaaaaguugaugaugguuuccuggacauuuggacuuacaaugccgaacuguugguucuauuggaaaaugaaagaacuuuggacuaccacgauucaaaugugaagaacuuauaugaaaagguaagaagccagcuaaaaaacaaugccaaggaaauuggaaacggcugcuuugaauuuuaccacaaaugcgauaacacgugcauggaaagugucaaaaaugggacuuaugacuacccaaaauacucagaggaagcaaaauuaaacagagaagaaauagaugggguaaagcuggaaucaacaaggauuuaccagauuuuggcgaucuauucaacugucgccaguucauugguacugguagucucccugggggcaaucaguuucuggaugugcucuaaugggucucuacaguguagaauauguauuuaa

SEQ ID NO: 43891 - RNA, 1701 nt, Artificial Sequence
  derived and/or modified CDS sequence (wt) from hemagglutinin__InfluenzaA__AHM99019
augaaggcaauacuaguaguucugcuauauacauuugcaaccgcaaaugcagacacauuauguauagguuaucaugcgaacaauucaacagacacuguagacacaguacuagaaaagaauguaacaguaacacacucuguuaaccuucuagaagacaagcauaacgggaaacuaugcaaacuaaaagggguagccccauugcauuuggguaaauguaacauugcuggcuggauccugggaaauccagagugugaaucacucuccacagcaagcucaugguccuacauuguggaaacaucuaguucagacaauggaacguguuacccaggagauuucaucgauuaugaggagcuaagagagcaauugagcucagugucaucauuugaaagguuugagauauuccccaagacaaguucauggcccaaucaugacucgaacaaagguguaacggcagcauguccucaugcuggagcaaaaagcuucuacaaaaauuuaauauggcuaguuaaaaaaggagauucauacccaaagcucagcaaauccuacauuaaugauaaagggaaagaaguccucgugcuauggggcauucaccauccaucuacuagugcugaccaacaaagucucuaucagaaugcagaugcauauguuuuuguggggucaucaagauacagcaagaaguucaagccggaaauagcaauaagacccaaagugaggggucaagaagggagaaugaacuauuacuggacacuaguagagccgggagacaaaauaacauucgaagcaacuggaaaucuagugguaccgagauaugcauucgcaauggaaagaaaugcuggaucugguauuaucauuucagauacaccaguccacgauugcaauacaacuugucagacacccaagggugcuauaaacaccagccucccauuucagaauauacauccgaucacaauuggaaaauguccaaaauauguaaaaagcacaaaauugagacuggccacaggauugaggaaugucccgucuauucaaucuagaggccuauuuggggccauugccgguuucauugaagggggguggacagggaugguagauggaugguacgguuaucaccaucaaaaugagcaggggucaggauaugcagccgaccugaagagcacacagaaugccauugacgagauuacuaacaaaguaaauucuguuauugaaaagaugaauacacaguucacagcaguagguaaagaguucaaccaccuggaaaaaagaauagagaauuuaaauaaaaaaguugaugaugguuuccuggacauuuggacuuacaaugccgaacuguugguucuauuggaaaaugaaagaacuuuggacuaccacgauucaaaugugaagaacuuauaugaaaagguaagaagccagcuaaaaaacaaugccaaggaaauuggaaacggcugcuuugaauuuuaccacaaaugcgauaacacgugcauggaaagugucaaaaaugggacuuaugacuacccaaaauacucagaggaagcaaaauuaaacagagaagaaauagaugggguaaagcuggaaucaacaaggauuuaccagauuuuggcgaucuauucaacugucgccaguucauugguacugguagucucccugggggcaaucaguuucuggaugugcucuaaugggucucuacaguguagaauauguauuuaa

SEQ ID NO: 43892 - RNA, 1701 nt, Artificial Sequence; identical to SEQ ID NO: 43891
  derived and/or modified CDS sequence (wt) from hemagglutinin__InfluenzaA__AHM99031

SEQ ID NO: 43893 - RNA, 1701 nt, Artificial Sequence; identical to SEQ ID NO: 43891
  derived and/or modified CDS sequence (wt) from hemagglutinin__InfluenzaA__AHM99043

SEQ ID NO: 43894 - RNA, 1701 nt, Artificial Sequence; identical to SEQ ID NO: 43891
  derived and/or modified CDS sequence (wt) from hemagglutinin__InfluenzaA__AHM99054

SEQ ID NO: 43895 - RNA, 1701 nt, Artificial Sequence; identical to SEQ ID NO: 43891
  derived and/or modified CDS sequence (wt) from hemagglutinin__InfluenzaA__AHM99065

SEQ ID NO: 43896 - RNA, 1701 nt, Artificial Sequence
  derived and/or modified CDS sequence (wt) from hemagglutinin__InfluenzaA__AHM99075
augaaggcaauacuaguaguucugcuauauacauuugcaaccgcaaaugcagacacauuauguauagguuaucaugcgaacaauucaacagacacuguagacacaguacuagaaaagaauguaacaguaacacacucuguuaaccuucuagaagacaagcauaacgggaaacuaugcaaacuaagagggguagccccauugcauuuggguaaauguaacauugcuggcuggauccugggaaauccagagugugaaucacucuccacagcaagcucaugguccuacauuguggaaacaucuaguucagacaauggaacguguuacccaggagauuucaucgauuaugaggagcuaagagagcaauugagcucagugucaucauuugaaagguuugagauauuccccaagacaaguucauggcccaaucaugacucgaacaaagguguaacggcagcauguccucaugcuggagcaaaaagcuucuacaaaaauuuaauauggcuaguuaaaaaaggagauucauacccaaagcucagcaaauccuacauuaaugauaaagggaaagaaguccucgugcuauggggcauucaccauccaucuacuagugcugaccaacaaagucucuaucagaaugcagaugcauauguuuuuguggggucaucaagauacagcaagaaguucaagccggaaauagcaauaagacccaaagugagggaucaagaagggagaaugaacuauuacuggacacuaguagagccgggagacaaaauaacauucgaagcaacuggaaaucuagugguaccgagauaugcauucgcaauggaaagaaaugcuggaucugguauuaucauuucagauacaccaguccacgauugcaauacaacuugucagacacccaagggugcuauaaacaccagccucccauuucagaauauacauccgaucacaauuggaaaauguccaaaauauguaaaaagcacaaaauugagacuggccacaggauugaggaaugucccgucuauucaaucuagaggccuauuuggggccauugccgguuucauugaagggggguggacagggaugguagauggaugguacgguuaucaccaucaaaaugagcaggggucaggauaugcagccgaccugaagagcacacagaaugccauugacgagauuacuaacaaaguaaauucuguuauugaaaagaugaauacacaguucacagcaguagguaaagaguucaaccaccuggaaaaaagaauagagaauuuaaauaaaaaaguugaugaugguuuccuggacauuuggacuuacaaugccgaacuguugguucuauuggaaaaugaaagaacuuuggacuaccacgauucaaaugugaagaacuuauaugaaaagguaagaagccagcuaaaaaacaaugccaaggaaauuggaaacggcugcuuugaauuuuaccacaaaugcgauaacacgugcauggaaagugucaaaaaugggacuuaugacuacccaaaauacucagaggaagcaaaauuaaacagagaagaaauagaugggguaaagcuggaaucaacaaggauuuaccagauuuuggcgaucuauucaacugucgccaguucauugguacugguagucucccugggggcaaucaguuucuggaugugcucuaaugggucucuacaguguagaauauguauuuaa

SEQ ID NO: 43897 - RNA, 1701 nt, Artificial Sequence
  derived and/or modified CDS sequence (wt) from hemagglutinin__InfluenzaA__AHN00717
augaaggcaauacuauuagucuugcuauguacauuugcagccacaaaugcagacacacuauguauagguuaccaugcaaauaauucaacugacacuguugauacaguauuagaaaagaauguaacaguaacacacucuguuaaccuucuugaagacagacauaacggaaaacuauguaaacuaggggggauagccccauugcaccuggguaaauguaacauugccggauggcuuuugggaaauccagaaugugaauuacuauucacaguaagcucauggucuuacauuguggaaacaucgaacucagacaaugggacauguuacccaggggauuucaucaauuaugaagagcugagagagcaguugagcucagugucaucauuugaaagauucgagauauuccccaagacaaguucguggcccaaucaugaaacaaacagaggugugacggcagcaugcccuuaugcuggagcaaacagcuucuacagaaauuuaauauggcuggugaaaaaaggaaacucauauccaaagcucagcaaauccuauguuaacaauaaggggaaggaaguccuugugcuauggggcauccaccauccaccuaccaguacugaucaacaaagucucuaccagaaugcagaugccuauguuuuuguagggucaucaaaauauaacaggaaguucaagccagaaauagcagcaagacccaaggugagaggucaagcagggaggaugaacuauuacuggacacuaauagaaccuggagacacaauaacauucgaagcaacuggaaaucuagugguaccaagauaugcuuucgcaaugaauagagguccuggaucugguauuauaauuucggaugcaccaguucaugauuguaacacgacgugucaaacacccaagggugccauaaacaccagccucccauuucagaauauacauccagucacaauuggagaauguccaaaauaugucaaaagcacaaaauugagaauggcuacaggacuaaggaauaucccgucuauucaaucuagaggucuguuuggagccauugcugguuuuauugaggggggauggacaggaaugauagauggaugguaugguuaucaccaucagaaugaacagggaucaggauaugcagcggaccaaaaaagcacacagaaugccauugacgggaucacuaacaaaguaaauucuguuauuaaaaagaugaacacacaauucacagcaguggguaaagaauucaaccacuuggaaaaaagaauagagaauuuaaacaaaaagguugaugaugguuuucuggauguuuggacauacaaugccgaacuguugguucuauuggaaaaugaaagaacucuggauuuccacgacucgaauguaaagaaccuguaugagaaaguaagaagccaacuaaggaacaaugccaaggaaauugggaauggcugcuuugaauucuaucacaaaugugaugauacaugcauggagagcgucaaaaaugggacuuaugauuacccaaaguacucagaagaaucaaaacuaaacagagaggaaauagauggaguaaaguuggagucaacaaggauuuaccagauuuuggcgaucuauucaacugccgccaguucauugguacuguuggucucccugggggcaaucaguuucuggaugugcuccaaugggucuuuacagugcagaauauguauuuaa

SEQ ID NO: 43898 - RNA, 1701 nt, Artificial Sequence
  derived and/or modified CDS sequence (wt) from hemagglutinin__InfluenzaA__AHN00764
augaaggcaauacuauuagucuugcuauguacauuugcagccacaaaugcagacacacuauguauagguuaccaugcaaauaauucaacugacacuguugauacaguacuagaaaagaauguaacaguaacacacucuguuaaccuucuugaagacaaacauaacggaaaacuauguaaacuaggggggauagccccauugcaccuggguaaauguaacauugccggauggcuuuugggaaauccagaaugugaauuacuauucacaguaagcucauggucuuacauuguggaaacaucgaacucagacaaugggacauguuacccaggggauuucaucaauuaugaagagcugagagagcaguugagcucagugucaucauuugaaagauucgagauauuccccaagacaaguucguggcccaaucaugaaacaaacagaggugugacggcagcaugcccuuaugcuggagcaaacagcuucuacagaaauuuaauauggcuggugaaaaaaggaaacucauauccaaagcucagcaaauccuauguuaacaauaaggggaaggaaguccuugugcuauggggcauucaccauccaccuaccaguacugaucaacaaagucucuaccagaaugcagaugccuauguuuuuguagggucaucaaaauauaacaggaaguucaagccagaaauagcagcaagacccaaggugagaggucaagcagggaggaugaacuauuacuggacacuaauagaaccuggagacacaauaacauucgaagcaacuggaaaucuagugguaccaagauaugcuuucgcaaugaauagagguccuggaucugguauuauaauuucggaugcaccaguucaugauuguaacacgacgugucaaacacccaagggugccauaaacaccagccucccauuucagaauauacauccagucacaauuggagaauguccaaaauaugucaaaagcacaaaauugagaauggcuacaggacuaaggaauaucccaucuauucaaucuagaggucuguuuggagccauugcugguuuuauugaggggggauggacaggaaugauagauggaugguaugguuaucaccaucagaaugaacagggaucaggauaugcagcggaccaaaaaagcacacagaaugccauugacgggaucacuaacaaaguaaauucuguuauuaaaaagaugaacacacaauucacagcaguggguaaagaauucaaccacuuggaaaaaagaauagagaauuuaaacaaaaagguugaugaugguuuucuggauguuuggacauacaaugccgaacuguugguucuauuggaaaaugaaagaacucuggauuuccacgacucgaauguaaagaaccuguaugagaaaguaagaagccaacuaaggaacaaugccaaggaaauugggaauggcugcuuugaauucuaucacaaaugugaugauacaugcauggagagcgucaaaaaugggacuuaugauuacccaaaguacucagaagaaucaaaacuaaacagagaggaaauagauggaguaaaguuggagucaacaaggauuuaccagauuuuggcgaucuauucaacugccgccaguucauugguacuguuggucucccugggggcaaucaguuucuggaugugcuccaaugggucuuuacagugcagaauauguauuuaa

SEQ ID NO: 43899 - RNA, 1683 nt, Artificial Sequence
  derived and/or modified CDS sequence (wt) from hemagglutinin__InfluenzaA__AHN96323
augaacacucaaauccugguauucgcucugauugcgaucauuccaacaaaugcagacaaaaucugccucggacaucaugccgugucaaacggaaccaaaguaaacacauuaacugaaagaggaguggaagucgucaaugcaacugaaacaguggaacgaacaaacauccccaggaucugcucaaaagggaaaaggacaguugaccucggucaauguggacuccuggggacaaucacuggaccaccucaaugugaccaauuccuagaauuuucagccgauuuaauuauugagaggcgagaaggaagugaugucuguuauccugggaaauucgugaaugaagaagcucugaggcaaauucucagagaaucaggcggaauugacaaggaagcaaugggauucacauacaguggaauaagaacuaauggagcaaccagugcauguaggagaucaggaucuucauucuaugcagaaaugaaauggcuccugucaaacacagauaaugcugcauucccgcagaugacuaagucauauaaaaauacaagaaaaagcccagcucuaauaguaugggggauccaccauuccguaucaacugcagagcaaaccaagcuauaugggaguggaaacaaacuggugacaguugggaguucuaauuaucaacaaucuuuuguaccgaguccaggagcgagaccacaaguuaauggucuaucuggaagaauugacuuucauuggcuaaugcuaaaucccaaugauacagucacuuucaguuucaauggggcuuucauagcuccagaccgugcaagcuuccugagaggaaaaucuaugggaauccagaguggaguacagguugaugccaauugugaaggggacugcuaucauaguggagggacaauaauaaguaacuugccauuucagaacauagauagcagggcaguuggaaaauguccgagauauguuaagcaaaggagucugcugcuagcaacagggaugaagaauguuccugagaucccaaagggaagaggccuauuuggugcuauagcggguuucauugaaaauggaugggaaggccuaauugaugguugguaugguuucagacaccagaaugcacagggagagggaacugcugcagauuacaaaagcacucaaucggcaauugaucaaauaacaggaaaauuaaaccggcuuauagaaaaaaccaaccaacaauuugaguuaauagacaaugaauucaaugagguagagaagcaaaucgguaaugugauaaauuggaccagagauucuauaacagaaguguggucauacaaugcugaacucuugguagcaauggagaaccagcauacaauugaucuggcugauucagaaauggacaaacuguacgaacgagugaaaagacagcugagagagaaugcugaagaagauggcacugguugcuuugaaauauuucacaagugugaugaugacuguauggccaguauuagaaauaacaccuaugaucacagcaaauacagggaagaggcaaugcaaaauagaauacagauugacccagucaaacuaagcagcggcuacaaagaugugauacuuugguuuagcuucggggcaucauguuucauacuucuagccauuguaaugggccuugucuucauauguguaaagaauggaaacaugcggugcacuauugguauauaa

SEQ ID NO: 43900 - RNA, 1701 nt, Artificial Sequence
  derived and/or modified CDS sequence (wt) from hemagglutinin__InfluenzaA__AHN96442
augaagacuaucauugcuuugagcuacauucuaugucugguuuucgcucaaaaacuuccuggaaaugacaacagcacggcaacgcugugccuugggcaccaugcagugccaaacggaacgauagugaaaacaaucacgaaugaccaaauugaaguuacuaaugcuacugagcugguucagaguuccucaacaggugaaauaugcaacaguccucaucagauccuugauggagaaaacugcacacuaauagaugcucuauugggagacccucagugugauggcuuccaaaacaagaaaugggaccuuuuuguugaacgaagcaaagcccacagcaacuguuacccuuaugaugugccggauuaugccucccuuaggucacuaguugccucauccggcacacuggaguuuaacaaugaaagcuucaauuggacuggagucacucaaaacggaacaagcucugcuugcauaaggagaucuaauaauaguuucuuuaguagauugaauugguugacccacuuaaacuucaaauacccagcauugaacgugacuaugccaaacaaugaacaauuugacaaauuguacauuugggggguucaccacccggguacggacaaggaccaaaucuuccuguaugcucaagcaucaggaagaaucacaguaucuaccaaaagaagccaacaagcuguaauuccgaauaucggaucuagacccagaguaaggaauaucccuagcagaguaagcaucuauuggacaauaguaaaaccgggagacauacuuuugauuaacagcacagggaaucuaauugcuccuagggguuacuucaaaauacgaagugggaaaagcucaauaaugagaucagaugcacccauuggcaaaugcaauucugcaugcaucacuccaaauggaagcauucccaaugacaaaccauuccaaaauguaaacaggaucacauacggggccugucccagauauguuaagcaaaacacucugaaauuggcaacaggaaugagaaauguaccagagaaacaaacuagaggcauauuuggcgcaauagcggguuucauagaaaaugguugggagggaaugguggaugguugguacgguuucaggcaucaaaauucugagggaaggggacaagcagcagaucucaaaagcacucaagcagcaaucgaucaaaucaaugggaagcugaauagauugaucgggaaaacuaacgagaaauuccaucagauugaaaaagaauucucagaagucgaagggagaauucaggaccuugagaaauauguugaggacacuaaaauagaucucuggucauacaacgcggagcuucuuguugcccuggagaaccaacacacaauugaucuaacugacucagaaaugaacaaacuguuugaaaaaacaaagaagcaacugagggaaaaugcugaggauaugggcaaugguuguuucaaaauauaccacaaaugugacaaugccugcauaggaucaaucagaaauggaacuuaugaccacgauguguacagagaugaagcauuaaacaaccgauuccagaucaagggaguugagcugaagucaggguacaaagauuggauccuauggauuuccuuugccauaucauguuuuuugcuuuguguugcuuuguugggguucaucaugugggccugccaaaaaggcaacauuaggugcaacauuugcauuuga

SEQ ID NO: 43901 - RNA, 1701 nt, Artificial Sequence
  derived and/or modified CDS sequence (wt) from hemagglutinin__InfluenzaA__AHN96443
augaagacuaucauugcuuugagcuacauucuaugucugguuuucgcucaaaaacuuccuggaaaugacaacagcacggcaacgcugugccuugggcaccaugcagugccaaacggaacgauagugaaaacaaucacgaaugaccaaauugaagucacuaaugcuacugagcugguucagaguuccucaacaggugaaauaugcaacaguccucaucagauccuugauggagaaaacugcacacuaauagaugcucuauugggagacccucagugugauggcuuccaaaacaagaaaugggaccuuuuuguugaacgaagcaaagcccacagcaacuguuacccuuaugaugugccggauuauaccucccuuaggucacuaguugccucauccggcacacuggaguuuaacaaugaaagcuucaauuggacuggagucacucaaaacggaacaagcucugcuugcauaaggagaucuaauaauaguuucuuuaguagauugaauugguugacccacuuaaacuucaaguacccagcauugaacgugacuaugccaaacaaugaacaauuugacaaauuguacauuugggggguucaccacccggguacggacaaggaccaaaucuuccuguaugcucaagcaucaggaagaaucacaguaucuaccaaaagaagccaacaagcuguaauuccgaauaucggaucuagacccagaguaaggaauaucccuagcagaguaagcaucuauuggacaauaguaaaaccgggagacauacuuuugauuaacagcacagggaaucuaauugcuccuagggguuacuucaaaauacgaagugggaaaagcucaauaaugagaucagaugcacccauuggcaaaugcaauucugcaugcaucacuccaaauggaagcauucccaaugacaaaccauuccaaaauguaaacaggaucacauacggggccugucccagauauguuaagcaaaacacucugaaauuggcaacaggaaugagaaauguaccagagaaacaaacuagaggcauauuuggcgcaauagcggguuucauagaaaaugguugggagggaaugguggaugguugguacgguuucaggcaucaaaauucugagggaaggggacaagcagcagaucucaaaagcacucaagcagcaaucgaucaaaucaacgggaagcugaauagauugaucgggaaaaccaacgagaaauuccaucagauugaaaaagaauucucagaagucgaagggagaauucaggaccuugagaaauauguugaggacacuaaaauagaucucuggucauacaaugcggagcuucuuguugcccuggagaaccaacacacaauugaucuaacugacucagaaaugaacaaacuguuugaaaaaacaaagaagcaacugagggaaaaugcugaggauaugggcaaugguuguuucaaaauauaccacaaaugugacaaugccugcauaggaucaaucagaaauggaacuuaugaccacgauguguacagagaugaagcauuaaacaaccgauuccagaucaagggaguugagcugaagucaggguacaaagauuggauccuauggauuuccuuugccauaucauguuuuuugcuuuguguugcuuuguugggguucaucaugugggccugccaaaaaggcaacauuaggugcaacauuugcauuuga

SEQ ID NO: 43902 - RNA, 1701 nt, Artificial Sequence
  derived and/or modified CDS sequence (wt) from hemagglutinin__InfluenzaA__AHN96444
augaagacuaucauugcuuugagcuacauucuaugucugguuuucgcucaaaaacuuccuggaaaugacaauagcacggcaacgcugugccuugggcaccaugcaguaccaaacggaacgauagugaaaacaaucacgaaugaccgaauugaaguuacuaaugcuacugagcugguucagaauuccucaauaggugaaauaugcgacaguccucaucagauccuugauggagaaaacugcacacuaauagaugcucuauugggagacccucagugugauggcuuccaaaauaagaaaugggaccuuuuuguugaacgaagcaaagccuacagcaacuguuacccuuaugaugugccggauuaugccucccuuaggucacuaguugccucauccggcacacuggaguuuaacaaugaaagcuucaauuggacuggagucacucaaaacggaacaaguucugcuugcauaaggagaucuaauaauaguuucuuuaguagauuaaauugguugacccacuuaaacuucaaauacccagcauugaacgugacuaugccaaacaaucaacaauuugacaaauuguacauuugggggguucaccacccggguacggacaaggaccaaaucuuccuguaugcucaaucaucaggaagaaucacaguaucuaccaaaagaagccaacaagcuguaaucccgaauaucggaucuagacccagaauaaggaauaucccuagcagaauaagcaucuauuggacaauaguaaaaccgggagacauacuuuugauuaacagcacagggaaucuaauugcuccuagggguuacuucaaaauacgaagugggaaaagcucaauaaugagaucagaugcacccauuggcaaaugcaagucugaaugcaucacuccaaauggaagcauucccaaugacaaaccauuccaaaauguaaacaggaucacauacggggccugucccagauauguuaagcaaagcacucugaaauuggcaacaggaaugcgaaauguaccagagaaacaaacuagaggcauauucggcgcaauagcggguuucauagaaaaugguugggagggaaugguggaugguugguacgguuucaggcaucaaaauucugagggaagaggacaagcagcagaucucaaaagcacucaagcagcaaucgaucaaaucaaugggaagcugaaucgauugaucgggaaaaccaacgagaaauuccaucagauugaaaaagaauucucagaaguagaagggagaauucaggaccuugagaaauauguugaggacacuaaaauagaucucuggucauacaacgcggagcuucuuguugcccuggagaaccaacauacaauugaucuaacugacucagaaaugaacaaacuguuugaaaaaacaaagaagcaacugagagaaaaugcugaggauaugggcaaugguuguuucaaaauauaccacaaaugugacaaugccugcauaggaucaaucagaaauggaacuuaugaccacgauguauacagagaugaagcauuaaacaaccgguuccagaucaagggaauugagcugaagucaggguacaaagauuggauccuauggauuuccuuugccauaucauguuuuuugcuuuguguugcuuuguugggguucaucaugugggccugccaaaagggcaacauuaggugcaacauuugcauuuga

SEQ ID NO: 43903 - RNA, 1701 nt, Artificial Sequence
  derived and/or modified CDS sequence (wt) from hemagglutinin__InfluenzaA__AHN96445
augaagacuaucauugcuuugagcuacauucuaugucugguuuucgcccaaaaacuuccuggaaaugacaauagcacggcaacgcugugccuugggcaccaugcaguaccaaacggaacgauagugaaaacaaucacgaaugaccgaauugaaguuacuaaugcuacugagcugguucagaauuccucaauaggugaaauaugcgacaguccucaucagauccuugauggagaaaacugcacacuaauagaugcucuauugggagacccucagugugauggcuuccaaaauaagaaaugggaccuuuuuguugaacgaagcaaagccuacagcaacuguuacccuuaugaugugccggauuaugccucccuuaggucacuaguugccucauccggcacacuggaguuuaacaaugaaagcuucaauuggacuggagucacucaaaacggaacaaguucugcuugcauaaggagaucuaauaauaguuucuuuaguagauuaaauugguugacccacuuaaacuucaaauacccagcauugaacgugacuaugccaaacaaucaacaauuugacaaauuauacauuugggggguucaccacccggguacggacaaggaccaaaucuuccuguaugcucaaucaucaggaagaaucacaguaucuaccaaaagaagccaacaagcuguaaucccgaauaucggaucuagacccagaauaaggaauaucccuagcagaauaagcaucuauuggacaauaguaaaaccgggagacauacuuuugauuaacagcacagggaaucuaauugcuccuagggguuacuucaaaauacuaagugggaaaagcucaauaaugagaucagaugcacccauuggcaaaugcaagucugaaugcaucacuccaaauggaagcauucccaaugacaaaccauuccaaaauguaaacaggaucacauacggggccugucccagauauguuaagcaaagcacucugaaauuggcaacaggaaugcgaaauguaccagagaaacaaacuagaggcauauuuggcgcaauagcggguuucauagaaaaugguugggagggaaugguggaugguugguacgguuucaggcaucaaaauucugagggaagaggacaagcagcagaucucaaaagcacucaagcagcaaucgaucaaaucaaugggaagcugaaucgauugaucgggaaaaccaacgagaaauuccaucagauugaaaaagaauucucagaaguagaagggagaauucaggaccuugagaaauauguugaggacacuaaaauagaucucuggucauacaacgcggagcuucuuguugcccuggagaaccaacauacaauugaucuaacugacucagaaaugaacaaacuguuugaaaaaacaaagaagcaacugagggaaaaugcugaggauauggguaaugguuguuucaaaauauaccacaaaugugacaaugccugcauaggaucaaucagaaauggaacuuaugaccacgauguauacagagaugaagcauuaaacaaccgguuccagaucaagggaguugagcugaagucaggguacaaagauuggauccuauggauuuccuuugccauaucauguuuuuugcuuuguguugcuuuguugggguucaucaugugggccugccaaaagggcaacauuaggugcaacauuugcauuuga

SEQ ID NO: 43904 - RNA, 1701 nt, Artificial Sequence
  derived and/or modified CDS sequence (wt) from hemagglutinin__InfluenzaA__AHN96447
augaagacuaucauugcuuugagcuacauucuaugucugguuuucgcucaaaaacuuccuggaaaugacaauagcacggcaacgcugugccuugggcaccaugcaguaccaaacggaacgauagugaaaacaaucacgaaugaccgaauugaaguuacuaaugcuacugagcugguucagaauuccucaauaggugaaauaugcgacaguccucaucagauccuugauggagaaaacugcacacuaauagaugcucuauugggagacccucagugugauggcuuucaaaauaagaaaugggaccuuuuuguugaacgaagcaaagccuacagcaacuguuacccuuaugaugugccggauuaugccucccuuaggucacuaguugccucauccggcacacuggaguuuaacaaugaaagcuucaauugggcuggagucacucaaaacggaacaaguucugcuugcauaagggggucuaauaguaguuucuuuaguagauuaaauugguugacccacuuaaacuucaaauacccagcauugaacgugacuaugccaaacaaugaacaauuugacaaauuguacauuugggggguucaccacccggguacggacaaggaccaaaucuuccuguaugcucaaucaucaggaagaaucacaguaucuaccaaaagaagccaacaagcuguaaucccgaauaucggaucuagacccagaauaaggaauaucccuagcagaauaagcaucuauuggacaauaguaaaaccgggagacauacuuuugauuaacagcacagggaaucuaauugcuccuagggguuacuucaaaauacgaagugggaaaagcucaauaaugagaucagaugcacccauuggcaaaugcaagucugaaugcaucacuccaaauggaagcauucccaaugacaaaccauuccaaaauguaaacaggaucacauacggggccugucccagauauguuaagcaaagcacucugaaauuggcaacaggaaugcgaaauguaccagagaaacaaacuagaggcauauuuggcgcaauagcggguuucauagaaaaugguugggagggaaugguggaugguugguacgguuucaggcaucaaaauucugagggaagaggacaagcagcagaucucaaaagcacucaagcagcaaucgaucaaaucaaugggaagcugaaucgauugaucgggaaaaccaacgagaaauuccaucagauugaaaaagaauucucagaaguagaagggagaauucaggaccuugagaaauauguugaggacacuaaaauagaucucuggucauacaacgcggagcuucuuguugcccuggagaaccaacauacaauugaucuaacugacucagaaaugaacaaacuguuugaaaaaacaaagaagcaacugagggaaaaugcugaggauaugggcaaugguuguuucaaaauauaccacaaaugugacaaugccugcauaggaucaaucagaaauggaacuuaugaccacgauguauacagggaugaagcauuaaacaaccgguuccagaucaagggaguugagcugaagucaggguacaaagauuggauccuauggauuuccuuugccauaucauguuuuuugcuuuguguuguuuuguugggguucaucaugugggccugccaaaagggcaacauuaggugcaacauuugcauuuga

SEQ ID NO: 43905 - RNA, 1701 nt, Artificial Sequence
  derived and/or modified CDS sequence (wt) from hemagglutinin__InfluenzaA__AHV83765
augaaggcaauacuaguaguucugcuauauacauuugcaaccgcaaaugcagacacauuauguauagguuaucaugcgaacaauucaacagacacuguagacacaguacuagaaaagaauguaacaguaacacacucuguuaaccuucuagaagacaagcauaacgggaaacuaugcaaacuaagagggguagccccauugcauuuggguaaauguaacauugcuggcuggauccugggaaauccagagugugaaucacucuccacagcaaguucaugguccuacauuguggaaacaucuaguucagacaauggaacguguuacccaggagauuucaucaauuaugaggagcuaagagagcaauugagcucagugucaucauuugaaagguuugagauauuccccaagacaaguucauggcccaaucaugacucgaacaaagguguaacggcagcauguccucacgcuggagcaaaaagcuucuacaaaaauuuaauauggcuaguuaaaaaaggaaauucauacccaaagcucagccaauccuacauuaaugauaaagggaaagaaguccucgugcuguggggcauucaccacccaucuacuacugcugaccaacaaagucucuaucagaaugcagaugcauauguuuuuguggggacaucaagauacagcaagaaguucaagccggaaauagcaauaagacccaaagugagggaucaagaagggagaaugaacuauuacuggacacuaguagagccgggagacaaaauaacauucgaagcaacuggaaaucuagugguaccgagauaugcauucacaauggaaagaaaugcuggaucugguauuaucauuucagauacaccaguccacgauugcaauacaacuugucagacacccgagggugcuauaaacaccagccucccauuucagaauauacauccgaucacaauuggaaaauguccaaaguauguaaaaagcacaaaauugagacuggccacaggauugaggaaugucccgucuauucaaucuagaggccuauucggggccauugccggcuucauugaaggaggguggacagggaugguagauggaugguacgguuaucaccaucaaaaugagcaggggucaggauaugcagccgaccugaagagcacacaaaaugccauugacaagauuacuaacaaaguaaauucuguuauugaaaagaugaauacacaguucacagcaguggguaaagaguucaaccaccuggaaaaaagaauagagaauuuaaauaaaaaaguugaugaugguuuccuggacauuuggacuuacaaugccgaacuguugguucuauuggaaaaugaaagaacuuuggacuaccacgauucaaaugugaagaacuuguaugaaaagguaagaaaccaguuaaaaaccaaugccaaggaaauuggaaacggcugcuuugaauuuuaccacaaaugcgauaacacgugcauggaaagugucaaaaaugggacuuaugacuacccaaaauacucagaggaagcaaaauuaaacagagaaaaaauagaugggguaaagcuggaaucaacaaggauuuaccagauuuuggcgaucuauucaacugucgccaguucauugguacugguagucucccugggggcaaucagcuucuggaugugcucuaaugggucucuacaguguagaauauguauuuaa

SEQ ID NO: 43906 - RNA, 1701 nt, Artificial Sequence
  derived and/or modified CDS sequence (wt) from hemagglutinin__InfluenzaA__AHV83766
augaaggcaauacuaguaguucugcuauauacauuugcaaccacaaaugcagacacauuauguauagguuaucaugcgaacaauucaacagacacuguagacacaguacuagaaaagaauguaacaguaacacacucuguuaaccuucuagaagacaagcauaacgggaaacuaugcaaacuaagagggguagccccauugcauuuggguaaauguaacauugcuggcuggauccugggaaauccagagugugaaucacucuccacagcaaguucaugguccuacauuguggaaacaucuaguucagacaauggaacguguuacccaggagauuucaucaauuaugaggagcuaagagagcaauugagcucagugucaucauuugaaagguuugagauauuccccaagacaaguucauggcccaaucaugacucgaacaaagguguaacggcagcauguccucacgcuggagcaaaaagcuucuacaaaaauuuaauauggcuaguuaaaaaaggaaauucauacccaaagcucagccaauccuacauuaaugauaaagggaaagaaguccucgugcuguggggcauucaccauccaucuacuacugcugaccaacaaagucucuaucagaaugcagaugcauauguuuuuguggggacaucaagauacagcaagaaguucaagccggaaauagcaauaagacccaaagugagggaucaagaagggagaaugaacuauuacuggacacuaguagagccgggagacaaaauaacauucgaagcaacuggaaaucuagugguaccgagauaugcauucacaauggaaagaaaugcuggaucugguauuaucauuucagauacaccaguccacgauugcaauacaacuugucagacacccgagggugcuauaaacaccagccucccauuucagaauauacauccgaucacaauuggaaaauguccaaaguauguaaaaagcacaaaauugagacuggccacaggauugaggaaugucccgucuauucaaucuagaggccuauucggggccauugccgguuucauugaagggggguggacagggaugguagauggaugguacgguuaucaccaucaaaaugagcaggggucaggauaugcagccgaccugaagagcacacaaaaugccauugacaagauuacuaacaaaguaaauucuguuauugaaaagaugaauacacaguucacagcaguggguaaagaguucaaccaccuggaaaaaagaauagagaauuuaaauaaaaaaguugaugaugguuuccuggacauuuggacuuacaacgccgaacuguugguucuauuggaaaaugaaagaacuuuggacuaccacgauucaaaugugaagaacuuguaugaaaagguaagaaaccaguuaaaaaacaaugcaaaggaaauuggaaacggcugcuuugaauuuuaccacaaaugcgauaacacgugcauggaaagugucaaaaaugggacuuaugacuacccaaaauacucagaggaagcaaaauuaaacagagaaaaaauagaugggguaaagcuggaaucaacaaggauuuaccagauuuuggcgaucuauucaacugucgccaguucauugguacugguagucucccugggggcaaucagcuucuggaugugcucuaaugggucucuacaguguagaauauguauuuaa

SEQ ID NO: 43907 - RNA, 1701 nt, Artificial Sequence; identical to SEQ ID NO: 43005
  derived and/or modified CDS sequence (wt) from hemagglutinin__InfluenzaA__AHV83767

SEQ ID NO: 43908 - RNA, 1701 nt, Artificial Sequence
  derived and/or modified CDS sequence (wt) from hemagglutinin__InfluenzaA__AHV83768
augaaggcaauacuaguaguucugcuauauacauuuacaaccgcaaaugcagacacauuauguauagguuaucaugcgaacaauucaacagacacuguagacacaguacuagaaaagaauguaacaguaacacacucuguuaaccuucuagaagacaagcauaacgggaaacuaugcaaacuaagagggguagccccauugcauuuggguaaauguaacauugcuggcuggauccugggaaauccagagugugaaucacucuccacagcaaguucaugguccuacauuguggaaacaucuaguucagacaauggaacguguuacccaggagauuucaucaauuaugaggagcuaagagagcaauugagcucagugucaucauuugaaagguuugagauauuccccaagacaaguucauggcccaaucaugacucgaacaaagguguaacggcagcauguccucacgcuggagcaaaaagcuucuacaaaaauuuaauauggcuaguuaaaaaaggaaauucauacccaaagcucagccaauccuacauuaaugauaaagggaaagaaguccucgugcuguggggcauucaccauccaucuacuacugcugaccaacaaagucucuaucagaaugcagaugcauauguuuuuguggggacaucaagauacagcaagaaguucaagccggaaauagcaauaagacccaaagugagggaucaagaagggagaaugaacuauuacuggacacuauuagagccgggagacaaaauaacauucgaagcaacuggaaaucuagugguaccgagauaugcauucacaauggaaagaaaugcuggaucugguauuaucauuucagauacaccaguccacgauugcaauacaacuugucagacacccgagggugcuauaaacaccagccucccauuucagaauauacauccgaucacaauuggaaaauguccaaaguauguaaaaagcacaaaauugagacuggccacaggauugaggaaugucccgucuauucaaucuagaggccuauucggggccauugccggcuucauugaagggggguggacagggaugguagauggaugguacgguuaucaccaucaaaaugagcaggggucaggauaugcagccgaccugaagagcacacaaaaugccauugacaagauuacuaacaaaguaaauucuguuauugaaaagaugaauacacaguucacagcaguggguaaagaguucaaccaccuggaaaaaagaauagagaauuuaaauaaaaaaguugaugaugguuuccuggacauuuggacuuacaaugccgaacuguugguucuauuggaaaaugaaagaacuuuggacuaccacgauucaaaugugaagaacuuguaugaaaagguaagaaaccaguuaaaaaacaaugccaaggaaauuggaaacggcugcuuugaauuuuaccacaaaugcgauaauacgugcauggacagugucaaaaaugggacuuaugacuacccaaaauacucagaggaagcaaaauuaaacagagaaaaaauagaugggguaaagcuggaaucaacaaggauuuaccagauuuuggcgaucuauucaacugucgccaguucauugguacugguagucucccuaggggcaaucagcuucuggaugugcucuaaugggucucuacaguguagaauauguauuuaa

SEQ ID NO: 43909 - RNA, 1701 nt, Artificial Sequence
  derived and/or modified CDS sequence (wt) from hemagglutinin__InfluenzaA__AHV83770
augaaggcaauacuaguaguucugcuauauacauuugcaaccgcaaaugcagacacauuauguauagguuaucaugcgaacaauucaacagacacuguagacacaguacuagaaaagaauguaacaguaacacacucuguuaaccuucuagaagacaagcauaacgggaaacuaugcaaacuaagagggguagccccauugcauuuggguaaauguaacauugcuggcuggauccugggaaauccagagugugaaucacucuccacagcaaguucaugguccuacauuguggaaacaucuaauucagacaauggaacguguuacccaggagauuucaucaauuaugaggagcuaagagagcaauugagcucagugucaucauuugaaagguuugagauauuccccaagacaaguucauggcccaaucaugacucgaacaaagguguaacggcagcauguccucacgcuggagcaaaaagcuucuacaaaaauuuaauauggcuaguuaaaaaaggaaauucauacccaaagcucagccaauccuacauuaaugauaaagggaaagaaguccucgugcuguggggcauucaccacccaucuacuacugcugaccaacaaagucucuaucagaaugcagaugcauauguuuuuguggggacaucaagauacagcaagaaguucaagccggaaauagcaauaagacccaaagugagggaucaagaagggagaaugaacuauuacuggacacuaguagagccgggagacaaaauaacauucgaagcaacuggaaaucuagugguaccgagauaugcauucacaauggaaagaaaugcuggaucugguauuaucauuucagauacaccaguccacgauugcaauacaacuugucagacacccgagggugcuauaaacaccagccucccauuucagaauauacauccgaucacaauuggaaaauguccaaaguauguaaaaagcacaaaauugagacuggccacaggauugaggaaugucccgucuauucaaucuagaggccuauucggggccauugccggcuucauugaaggaggguggacagggaugguagauggaugguacgguuaucaccaucaaaaugagcaggggucaggauaugcagccgaccugaagagcacacaaaaugccauugacaagauuacuaacaaaguaaauucuguuauugaaaagaugaauacacaguucacagcaguggguaaagaguucaaccaccuggaaaaaagaauagagaauuuaaauaaaaaaguugaugaugguuuccuggacauuuggacuuacaaugccgaacuguugguucuauuggaaaaugaaagaacuuuggacuaccacgauucaaaugugaagaacuuguaugaaaagguaagaaaccaguuaaaaaacaaugccaaggaaauuggaaacggcugcuuugaauuuuaccacaaaugcgauaacacgugcauggaaagugucaaaaaugggacuuaugacuacccaaaauauucagaggaagcaaaauuaaacagagaaaaaauagaugggguaaagcuggaaucaacaaggauuuaccagauuuuggcgaucuauucaacugucgccaguucauugguacugguagucucccugggggcaaucagcuucuggaugugcucuaaugggucucuacaguguagaauauguauuuaa

SEQ ID NO: 43910 - RNA, 1701 nt, Artificial Sequence
  derived and/or modified CDS sequence (wt) from hemagglutinin__InfluenzaA__AHV83771
augaaggcaauacuaguaguucugcuauauacauuugcaaccgcaaaugcagacacauuauguauagguuaucaugcgaacaauucaacagacacuguagacacaguacuagaaaagaauguaacaguaacacacucuguuaaccuucuagaagacaagcauaacgggaaacuaugcaaacuaagagggguagccccauugcauuuggguaaauguaacauugcuggcuggauccugggaaauccagagugugaaucacucuccacagcaaguucaugguccuacauuguggaaacaucuaguucagacaauggaacguguuacccaggagauuucaucaauuaugaggagcuaagagagcaauugagcucagugucaucauuugaaagguuugagauauuccccaagacaaguucauggcccaaucaugacucgaacaaagguguaacggcagcauguccucacgcuggagcaaaaagcuucuacaaaaauuuaauauggcuaguuaaaaaaggaaauucauacccaaagcucagccaauccuacauuaaugauaaagggaaagaaguccucgugcuguggggcauucaccauccaucuacuacuacugaccaacaaagucucuaucagaaugcagaugcauauguuuuuguggggacaucaagauacagcaagaaguucaagccggaaauagcaauaagacccaaagugagggaucaagaagggagaaugaacuauuacuggacacuaguagagccgggagacaaaauaacauucgaagcaacuggaaaucuagugguaccgagauaugcauucacaauggaaagaaaugcuggaucugguauuaucauuucagauacaccaguccacgauugcaauacaacuugucagacacccgagggugcuauaaacaccagccucccauuucagaauauacauccgaucacaauuggaaaaugcccaaaguauguaaaaagcacaaaauugagacuggccacaggauugaggaaugucccgucuauucaaucuagaggccuauucggggccauugccggcuucauugaagggggguggacagggaugguagauggaugguacgguuaucaccaucaaaaugagcaggggucaggauaugcagccgaccagaagagcacacaaaaugccauugacaagauuacuaacaaaguaaauucuguuauugaaaagaugaauacacaguucacagcaguggguaaagaguucaaccaccuggaaaaaagaauagagaauuuaaauaaaaaaguugaugaugguuuccuggacauuuggacuuacaaugccgaacuguugguucuauuggaaaaugaaagaacuuuggacuaccacgauucaaaugugaagaacuuguaugaaaagguaagaaaccaguuaaaaaacaaugccaaggaaauuggaaacggcugcuuugaauuuuaccacaaaugcgauaacacgugcauggaaagugucaaaaaugggacuuaugacuacccaaaauacucagaggaagcaaaauuaaacagagaaaaaauagaugggguaaagcuggaaucaacaaggauuuaccagauuuuggcgaucuauucaacugucgccaguucauugguacugguagucucccugggggcaaucagcuucuggaugugcucuaaugggucucuacaguguagaauauguauuuaa

SEQ ID NO: 43911 - RNA, 1701 nt, Artificial Sequence
  derived and/or modified CDS sequence (wt) from hemagglutinin__InfluenzaA__AHV83772
augaaggcaauacuaguaguucugcuauauacauuugcaaccgcaaaugcagacacauuauguauagguuaucaugcgaacaauucaacagacacuguagacacaguacuagaaaagaauguaacaguaacacacucuguuaaccuucuagaagacaagcauaacgggaaacuaugcaaacuaagagggguagccccauugcauuuggguaaauguaacauugcuggcuggauccugggaaauccagagugugaaucacucuccacagcaaguucaugguccuacauuguggaaacaucuaguucagacaauggaacguguuacccaggagauuucaucaauuaugaggagcuaagagagcaauugagcucagugucaucauuugaaagguuugagauauuccccaagacaaguucauggcccaaucaugacucgaacaaagguguaacggcagcauguccucacgcuggagcaaaaagcuucuacaaaaauuuaauauggcuaguuaaaaaaggaaauucauacccaaagcucagccaauccuacauuaaugauaaagggaaagaaguccucgugcuguggggcauucaccacccaucuacuacugcugaccaacaaagucucuaucagaaugcagaugcauauguuuuuguggggacaucaagauacagcaagaaguucaagccggaaauagcaauaagacccaaagugagggaucaagaagggagaaugaacuacuacuggacacuaguagagccgggagacaaaauaacauucgaagcaacuggaaaucuagugguaccgagauaugcauucacaauggaaagaaaugcuggaucugguauuaucauuucagauacaccaguccacgauugcaauacaacuugucagacacccgagggugcuauaaacaccagccucccauuucagaauauacauccgaucacaauuggaaaauguccaaaguauguaaaaagcacaaaauugagacuggccacaggauugaggaaugucccgucuauucaaucuagaggccuauucggggccauugccggcuucauugaagggggguggacagggaugguagauggaugguacgguuaucaccaucaaaaugagcaggggucaggauaugcagccgaccugaagagcacacaaaaugccauugacaagauuacuaacaaaguaaauucuguuauugaaaagaugaauacacaguucacagcaguggguaaagaguucaaccaccuggaaaaaagaauagagaauuuaaauaaaaaaguugaugaugguuuccuggacauuuggacuuacaaugccgaacuguugguucuauuggaaaaugaaagaacuuuggacuaccacgauucaaaugugaagaacuuguaugaaaagguaagaaaccaguuaaaaaacaaugccaaggaaauuggaaacggcugcuuugaauuuuaccacaaaugcgauaacacgugcauggaaagugucaaaaaugggacuuaugacuacccaaaauacucagaggaagcaaaauuaaacagagaaaaaauagaugggguaaaacuggaaucaacaaggauuuaccagauuuuggcgaucuauucaacugucgccaguucauugguacugguagucucccugggggcaaucagcuucuggaugugcucuaaugggucucuacaguguagaauauguauuuaa

SEQ ID NO: 43912 - RNA, 1701 nt, Artificial Sequence; identical to SEQ ID NO: 43002
  derived and/or modified CDS sequence (wt) from hemagglutinin__InfluenzaA__AHV83773

SEQ ID NO: 43913 - RNA, 1701 nt, Artificial Sequence
  derived and/or modified CDS sequence (wt) from hemagglutinin__InfluenzaA__AHV83774
augaaggcaauacuaguaguucugcuauacacauuugcaaccgcaaaugcagacacauuauguauagguuaucaugcgaacaauucaacagacacuguagacacaguacuagaaaagaauguaacaguaacacacucuguuaaccuucuagaagacaagcauaacgggaaacuaugcaaacuaagagggguagccccauugcauuuggguaaauguaacauugcuggcuggauccugggaaauccagagugugaaucacucuccacagcaaguucaugguccuacauuguggaaacaucuaguucagacaauggaacguguuacccaggagauuucaucaauuaugaggagcuaagagagcaauugagcucagugucaucauuugaaagauuugagauauuccccaagacaaguucauggcccaaucaugacucgaacaaagguguaacggcagcauguccucacgcuggagcaaaaagcuucuacaaaaauuuaauauggcuaguuaaaaaaggaaauucauacccaaagcucagccaauccuacauuaaugauaaagggaaagaaguccucgugcuguggggcauucaccauccaucuacuacugcugaccaacaaagucucuaucagaaugcagaugcauauguuuucguggggacaucaagauacagcaagaaguucaagccggaaauagcaauaagacccaaagugagggaucaagaagggagaaugaacuauuacuggacacuaguagagccgggagacaaaauaacauucgaagcaacuggaaaucuagugguaccgagauaugcauucacaauggaaagaaaugcuggaucugguauuaucauuucagauacaccaguccacgauugcaauacaacuugucagacacccgagggugcuauaaacaccagccucccauuucagaauauacauccgaucacaauuggaaaauguccaaaguauguaaaaagcacaaaauugagacuggccacaggauugaggaaugucccaucuauucaaucuagaggccuauucggggccauugccggcuucauugaagggggguggacagggaugguagauggaugguacgguuaucaccaucaaaaugagcaggggucaggauaugcagccgaccugaagagcacacaaaaugccauugacaaaauuacuaacaaaguaaauucuguuauugaaaagaugaauacacaguucacagcaguggguaaagaguucaaccacuuggaaaaaagaauagagaauuuaaauaaaaaaguugaugaugguuuccuggacauuuggacuuacaaugccgaacugcugguucuauuggaaaaugaaagaacuuuggacuaccacgauucaaaugugaagaacuuguaugaaaagguaagaaaccaguuaaaaaacaaugccaaggaaauuggaaacggcugcuuugaauuuuaccacaaaugcgauaacacgugcauggaaagugucaaaaaugggacuuaugacuacccaaaauacucagaggaagcaaaauuaaacagagaaaaaauagaugggguaaagcuggaaucaacaaggauuuaccagauuuuggcgaucuauucaacugucgccaguucauugguacugguagucucccugggggcaaucagcuucuggaugugcucuaaugggucucuacaguguagaauauguauuuaa

SEQ ID NO: 43914 - RNA, 1701 nt, Artificial Sequence
  derived and/or modified CDS sequence (wt) from hemagglutinin__InfluenzaA__AHV83775
augaaggcaauacuaguaguucugcuauauacauuugcaaccgcaaaugcagacacuuuauguauagguuaucaugcgaacaauucaacagacacuguagacacaguacuagaaaagaauguaacaguaacacacucuguuaaccuucuagaagacaagcauaacgguaaacuaugcaaacuaagagggguagccccauugcauuuggguaaauguaacauugcuggcuggauccugggaaauccagagugugaaucacucuccacagcaaguucaugguccuacauuguggaaacaucuaguucagacaauggaacguguuacccaggagauuucaucaauuaugaggagcuaagagagcaauugagcucagugucaucauuugaaagguuugagauauuccccaagacaaguucauggcccaaucaugacucgaacaaagguguaacggcagcauguccucacgcuggagcaaaaagcuucuacaaaaauuuaauauggcuaguuaaaaaaggaaauucauacccaaagcucagucaauccuacauuaaugauaaagggaaagaaguccucgugcuguggggcauucaccauccaucuacuacugcugaccaacaaagucucuaucagaaugcagaugcauauguuuuuguggggacaucaagauacagcaagaaguucaagccggaaauagcaauaagacccaaagugagggaucaagaagggagaaugaacuauuacuggacacuaguagagccgggagacaaaauaacauucgaagcaacuggaaaucuagugguaccgagauaugcauucacaauggaaagaaaugcuggaucugguauuaucauuucagauacaccaguccacgauugcaauacaacuugucagacacccgagggugcuauaaacaccagccucccauuucagaacauacauccgaucacaauuggaaaauguccaaaguauguaaaaagcacaaaauugagacuggcaacaggauugaggaauaucccgucuauucaaucuagaggccuauucggggccauugccggcuucauugaagggggguggacagggaugguagauggaugguacgguuaucaccaucaaaaugagcaggggucaggauaugcagccgaccugaagagcacacaaaaugccauugacaagauuacuaauaaaguaaacucuguuauugaaaagaugaauacacaguucacagcaguggguaaagaguucaaccaccuggaaaaaagaauugagaauuuaaauaaaaaaguugaugaugguuuccuggacauuuggacuuacaaugccgaacuguugguucuauuggaaaaugaaagaacuuuggacuaccacgauucaaaugugaagaacuuguaugaaaagguaagaaaccaguuaaaaaacaaugccaaggaaauuggaaacggcugcuuugaauuuuaccacaaaugcgauaacacgugcauggaaagugucaaaaaugggacuuaugacuacccaaaauacucagaggaagcaaaauuaaacagagaaaaaauagaugggguaaagcuggaaucaacaaggauuuaccagauuuuggcgaucuauucaacugucgccaguucauugguacugguagucucccugggggcaaucagcuucuggaugugcucuaaugggucucuacaguguagaauauguauuuaa

SEQ ID NO: 43915 - RNA, 1701 nt, Artificial Sequence
  derived and/or modified CDS sequence (wt) from hemagglutinin__InfluenzaA__AHV83776
augaaggcaauacuaguaguucugcuauauacauuugcaaccgcaaaugcagacacauuauguauagguuaucaugcgaacaauucaacagacacuguagacacaguacuagaaaagaauguaacaguaacacacucuguuaaccuucuagaagacaagcauaacgggaaacuaugcaaacuaagagggguagccccauugcauuuggguaaauguaacauugcuggcuggauccugggaaauccagagugugaaucacucuccacagcaaguucaugguccuacauuguggaaacaucuaguucagacaauggaacguguuacccaggagauuucaucaauuaugaggagcuaagagagcaauugagcucagugucaucauuugaaagguuugagauauuccccaagacaaguucauggcccaaucaugacucgaacaaagguguaacggcagcauguccucacgcuggagcaaaaagcuucuacaaaaauuuaauauggcuaguuaaaaaaggaaauucauacccaaagcucagccaauccuacauuaaugauaaagggaaagaaguccucgugcuguggggcauucaccauccaucuacuacugcugaccaacaaagucucuaucagaaugcagaugcauauguuuuuguggggacaucaagauacagcaagaaguucaagccggaaauagcaauaagacccaaagugagggaucaagaagggagaaugaacuauuacuggacacuaguagagccgggagacaaaauaacauucgaagcaacuggaaaucuagugguaccgagauaugcauucacaauggaaagaaaugcuggaucugguauuaucauuucagauacaccaguccacgauugcaauacaacuugucagacacccgagggugcuauaaacaccagccucccauuucagaauauacauccgaucacaauuggaaaaugcccaaaguauguaaaaagcacaaaauugagacuggccacaggauugaggaaugucccgucuauucaaucuagaggccuauucggggccauugccggcuucauugaagggggguggacagggaugguagauggaugguacgguuaucaccaucaaaaugagcaggggucaggauaugcagccgaccugaagagcacacaaaaugccauugacaagauuacuaacaaaguaaauucuguuauugaaaagaugaauacacaauucacagcaguggguaaagaguucaaccaccuggaaaaaagaauagagaauuuaaauaaaaaaguugaugaugguuuccuggacauuuggacuuacaaugccgaacuguugguucuauuggaaaaugaaagaacuuuggacuaccacgauucaaaugugaagaacuuguaugaaaagguaagaaaccaguuaaaaaacaaugccaaggaaauuggaaacggcugcuuugaauuuuaccacaaaugcgauaacacgugcauggaaagugucaaaaaugggacuuaugacuacccaaaauacucagaggaagcaaaauuaaacagagaaaaaauagaugggguaaagcuggaaucaacaaggauuuaccagauuuuggcgaucuauucaacugucgccaguucauugguacugguagucucccugggggcaaucagcuucuggaugugcucuaaugggucucuacaguguagaauauguauuuaa

SEQ ID NO: 43916 - RNA, 1701 nt, Artificial Sequence
  derived and/or modified CDS sequence (wt) from hemagglutinin__InfluenzaA__AHV83777
augaaggcaauacuaguaguucugcuauauacauuugcaaccgcaaaugcagacacuuuauguauagguuaucaugcgaacaauucaacagacacuguagacacaguacuagaaaagaauguaacaguaacacacucuguuaaccuucuagaagacaagcauaacgguaaacuaugcaaacuaagagggguagccccauugcauuuggguaaauguaacauugcuggcuggauccugggaaauccagagugugaaucacucuccacagcaaguucaugguccuacauuguggaaacaucuaguucagacaauggaacguguuacccaggagauuucaucaauuaugaggagcuaagagagcaauugagcucagugucaucauuugaaagguuugagauauuccccaagacaaguucauggcccaaucaugacucgaacaaagguguaacggcagcauguccucacgcuggagcaaaaagcuucuacaaaaauuuaauauggcuaguuaaaaaaggaaauucauacccaaagcucagucaauccuacauuaaugauaaagggaaagaaguccucgugcuguggggcauucaccauccaucuacuacugcugaccaacaaagucucuaucagaaugcagaugcauauguuuuuguggggacaucaagauacagcaagaaguucaagccggaaauagcaauaagacccaaagugagggaucaagaagggagaaugaacuauuacuggacacuaguagagccgggagacaaaauaacauucgaagcaacuggaaaucuagugguaccgagauaugcauucacaauggaaagaaaugcuggaucugguauuaucauuucagauacaccaguccacgauugcaauacaacuugucagacacccgagggugcuauaaacaccagccucccauuucagaauauacauccgaucacaauuggaaaauguccaaaguauguaaaaagcacaaaauugagacuggcaacaggauugaggaauaucccgucuauucaaucuagaggccuauucggggccauugccggcuucauugaagggggguggacagggaugguagauggaugguacgguuaucaccaucaaaaugagcaggggucaggauaugcagccgaccugaaaagcacacaaaaugccauugacaagauuacuaacaaaguaaacucuguuauugaaaagaugaauacacaguucacagcaguggguaaagaguucaaccaccuggaaaaaagaauagagaauuuaaauaaaaaaguugaugaugguuuccuggacauuuggacuuacaaugccgaacuguugguucuauuggaaaaugaaagaacuuuggacuaccacgauucaaaugugaagaacuuguaugaaaagguaagaaaccaguuaaaaaacaaugccaaggaaauuggaaacggcugcuuugaauuuuaccacaaaugcgauaacacgugcauggaaagugucaaaaaugggacuuaugacuacccaaaauacucagaggaagcaaaauuaaacagagaaaaaauagaugggguaaagcuggaaucaacaaggauuuaccagauuuuggcgaucuauucaacugucgccaguucauugguacugguagucucccugggggcaaucugcuucuggaugugcucuaaugggucucuacaguguagaauauguauuuaa

SEQ ID NO: 43917 - RNA, 1701 nt, Artificial Sequence
  derived and/or modified CDS sequence (wt) from hemagglutinin__InfluenzaA__AHV83778
augaaggcaauacuaguaguucugcuauauacauuuacaaccgcaaaugcagacacauuauguauagguuaucaugcgaacaauucaacagacacuguagacacaguacuagaaaagaauguaacaguaacacacucuguuaaccuucuagaagacaagcauaacgggaaacuaugcaaacuaagagggguagccccauugcauuuggguaaauguaacauugcuggcuggauccugggaaauccagagugugaaucacucuccacagcaaguucaugguccuacauuguggaaacaucuaguucagacaauggaacguguuacccaggagauuucaucaauuaugaggagcuaagagagcaauugagcucagugucaucauuugaaagguuugagauauuccccaagacaaguucauggcccaaucaugacucgaacaaagguguaacggcagcauguccucacgcuggagcaaaaagcuucuacaaaaauuuaauauggcuaguuaaaaaaggaaauucauacccaaagcucagccaauccuacauuaaugauaaagggaaagaaguccuugugcuguggggcauucaccauccaucuacuacugcugaccaacaaagucucuaucagaaugcagaugcauauguuuuuguggggacaucaagauacagcaagaaguucaagccggaaauagcaauaagacccaaagugagggaucaagaagggagaaugaacuauuacuggacacuaguagagccgggagacaaaauaacauucgaagcaacuggaaaucuagugguaccgagauaugcauucacaauggaaagaaaugcuggaucugguauuaucauuucagauacaccagucuacgauugcaauacaacuugucagacacccgagggugcuauaaacaccagccucccauuucagaauauacauccgaucacaauuggaaaauguccaaaguauguaaaaagcacaaaauugagacuggccacaggauugaggaaugucccgucuauucaaucuagaggccuauucggggccauugccggcuucauugaagggggguggacagggaugguagauggaugguacgguuaucaccaucaaaaugagcaggggucaggauaugcagccgaccugaagagcacacaaaaugccauugacaagauuacuaacaaaguaaauucuguuauugaaaagaugaauacacaguucacagcaguggguaaagaguucaaccaccuggaaaaaagaauagagaauuuaaauaaaaaaguugaugaugguuuccuggacauuuggacuuacaaugccgaacuguugguucuauuggaaaaugaaagaacuuuggacuaccacgauucaaaugugaagaacuuguaugaaaagguaagaaaccaguuaaaaaacaaugccaaggaaauuggaaacggcugcuuugaauuuuaccacaaaugcgauaacacgugcauggaaagugucaaaaaugggacuuaugacuacccaaaauacucagaggaagcaaaauugaacagagaaaaaauagaugggguaaagcuggaaucaacaaggauuuaccagauuuuggcgaucuauucaacugucgccaguucguugguacugguagucucccugggggcaaucagcuucuggaugugcucuaaugggucucuacaguguagaauauguauuuaa

SEQ ID NO: 43918 - RNA, 1701 nt, Artificial Sequence
  derived and/or modified CDS sequence (wt) from hemagglutinin__InfluenzaA__AHV83779
augaaggcaauacuaguaguucugcuauauacauuugcaaccacaaaugcagacacauuauguauagguuaucaugcgaacaauucaacagacacuguagacacaguacuagaaaagaauguaacaguaacacacucuguuaaccuucuagaagacaagcauaacgggaaacuaugcaaacuaagagggguagccccauugcauuuggguaaauguaacauugcuggcuggauccugggaaauccagagugugaaucacucuccacagcaaguucaugguccuacauuguggaaacaucuaguucagacaauggaacguguuacccaggagauuucaucaauuaugaggagcuaagagagcaauugagcucagugucaucauuugaaagguuugagauauuccccaagacaaguucauggcccaaucaugacucgaacaaagguguaacggcagcauguccucacgcuggagcaaaaagcuucuacaaaaauuuaauauggcuaguuaaaaaaggaaauucauacccaaagcucagccaauccuacauuaaugauaaagggaaagaaguccucgugcuguggggcauucaccauccgucuacuacugcugaucaacaaagucucuaucagaaugcagaugcauauguuuuuguggggacaucaagauacagcaagaaguucaagccggaaauagcaauaagacccaaagugagggaucaagaagggagaaugaacuauuacuggacacuaguagagccgggagacaaaauaacauucgaagcaacuggaaaucuagugguaccgagauaugcauucacaauggaaagaaaugcuggaucugguauuaucauuucagauacaccaguccacgauugcaauacaacuugucagacacccgagggugcuauaaacaccagccucccauuucagaauauacauccgaucacaauuggaaaauguccaaaguauguaaaaagcacgaaauugagacuggccacaggauuaaggaaugucccgucuauucaaucuagaggccuauucggggccauugccggcuucauugaagggggguggacagggaugguagauggaugguacgguuaucaccaucaaaaugagcaggggucaggauaugcagccgaccugaagagcacacaaaaugccauugacaagauuacuaacaaaguaaauucuguuauugaaaagaugaauacacaguucacagcaguggguaaagaguucaaccaccuggaaaaaagaauagagaauuuaaauaaaaaaguugaugaugguuuccuggacauuuggacuuacaaugccgaacuguugguucuauuggaaaaugaaagaacuuuggacuaccacgauucaaaugugaagaacuuguaugaaaagguaagaaaccaguuaaaaaacaaugcaaaggaaacuggaaacggcugcuuugaauuuuaccacaaaugcgauaacacgugcauggaaagugucaaaaaugggacuuaugacuacccaaaauacucagaggaagcaaaauuaaacagagaaaaaauagaugggguaaagcuggaaucaacaaggauuuaccagauuuuggcgaucuauucaacugucgccaguucauugguacugguagucucccugggggcaaucagcuucuggaugugcucuaaugggucucuacaguguagaauauguauuuaa

SEQ ID NO: 43919 - RNA, 1701 nt, Artificial Sequence
  derived and/or modified CDS sequence (wt) from hemagglutinin__InfluenzaA__AHV83780
augaaggcaauacuaguaguucugcuauauacauuugcaaccgcaaaugcagacacauuauguauagguuaucaugcgaacaauucaacagacacuguagacacaguacuagaaaagaauguaacaguaacacacucuguuaaccuucuagaagacaagcauaacgggaaacuaugcaaacuaagagggguagccccauugcauuuggguaaauguaacauugcuggcuggauccugggaaauccagagugugaaucacucuccacagcaaguucaugguccuacauuguggaaacaucuaguucagacaauggaacguguuacccaggagauuucaucaauuaugaggagcuaagagagcaauugagcucagugucaucauuugaaagguuugagauauuccccaagacaaguucauggcccaaucaugacucgaacaaagguguaacggcagcauguccucacgcuggagcaaaaagcuucuacaaaaauuuaauauggcuaguuaaaaaaggaaauucauacccaaagcuccgccaauccuacauuaaugauaaagggaaagaaguccucgugcuguggggcauucaccacccaucuacuacuacugaccaacaaagucucuaucagaaugcagaugcauauguuuuugugggaacaucaagauacagcaagaaguucaagccggaaauagcaauaagacccaaagugagggaucaagaagggagaaugaacuauuacuggacacuaguagagccgggagacaaaauaacauucgaagcaacuggaaaucuagugguaccgagauaugcauucacaauggaaagaaaugcuggaucugguauuaucauuucagauacaccaguccacgauugcaauacaacuugucagacacccgagggugcuauaaacaccagccucccauuucagaauauacauccgaucacaauuggaaaauguccaaaguauguaaaaagcacaaaauugagacuggccacaggauugaggaaugucccgucuauucaaucuagaggccuauucggggccauugccggcuucauugaaggaggguggacagggaugguagauggaugguacgguuaucaccaucaaaaugagcaggggucaggauaugcagccgaccugaagagcacacaaaaugccauugacaagauuacuaacaaaguaaauucuguuauugaaaagaugaauacacaguucacagcaguggguaaagaguucaaccaccuggaaaaaagaauagagaauuuaaauaaaaaaguugaugaugguuuccuggacauuuggacuuacaaugccgaacuguugguucuauuggaaaaugaaagaacuuuggacuaccacgauucaaaugugaagaacuuguaugaaaagguaagaaaccaguuaaaaaacaaugccaaggaaauuggaaacggcugcuuugaauuuuaccacaaaugcgauaacacgugcauggaaagugucaaaaaugggacuuaugacuacccaaaauacucagaggaagcaaaauuaaacagagaaaaaauagaugggguaaagcuggaaucaacaaggauuuaccagauuuuggcgaucuauucaacugucgccaguucauugguacugguagucucccugggggcaaucagcuucuggaugugcucuaaugggucucuacaguguagaauauguauuuaa

SEQ ID NO: 43920 - RNA, 1701 nt, Artificial Sequence
  derived and/or modified CDS sequence (wt) from hemagglutinin__InfluenzaA__AHV83781
augaaggcaauacuaguaguucugcuauacacauuugcaaccgcaaaugcagacacauuauguauagguuaucaugcgaacaauucaacagacacuguagacacaguacuagaaaagaauguaacaguaacacacucuguuaaccuucuagaagacaagcauaacgggaaacuaugcaaacuaagagggguagccccauugcauuuggguaaauguaacauugcuggcuggauccugggaaauccagagugugaaucacucuccacagcaaguucaugguccuacauuguggaaacaucuaguucagacaauggaacguguuacccaggagauuucaucaauuaugaggagcuaagagagcaauugagcucagugucaucauuugaaagauuugagauauuccccaagacaaguucauggcccaaucaugacucgaacaaagguguaacggcagcauguccucacgcuggagcaaaaagcuucuacaaaaauuuaauauggcuaguuaaaaaaggaaauucauacccaaagcucagccaauccuacauuaaugauaaagggaaagaaguccucgugcuguggggcauucaccauccaucuacuacugcugaccaacaaagucucuaucagaaugcagaugcauauguuuuuguggggacaucaagauacagcaagaaguucaagccggaaauagcaauaagacccaaagugagggaucaagaagggagaaugaacuauuacuggacacuaguagagccgggagacaaaauaacauucgaagcaacuggaaaucuagugguaccgagauaugcauucacaauggaaagaaaugcuggaucugguauuaucauuucagauacaccaguccacgauugcaauacaacuugucagacacccgagggugcuauaaacaccagccucccauuucagaauauacauccgaucacaauuggaaaauguccaaaguauguaaaaagcacaaaauugagacuggccacaggauugaggaaugucccaucuauucaaucuagaggccuauucggggccauugccggcuucauugaagggggguggacagggaugguagauggaugguacgguuaucaccaucaaaaugagcaggggucaggauaugcagccgaccugaagagcacacaaaaugccauugacaaaauuacuaacaaaguaaauucuguuauugaaaagaugaauacacaguucacagcaguggguaaagaguucaaccacuuggaaaaaagaauagagaauuuaaauaaaaaaguugaugaugguuuccuggacauuuggacuuacaaugccgaacugcugguucuauuggaaaaugaaagaacuuuggacuaccacgauucaaaugugaagaacuuguaugaaaagguaagaaaccaguuaaaaaacaaugccaaggaaauuggaaacggcugcuuugaauuuuaccacaaaugcgauaacacgugcauggaaagugucaaaaaugggacuuaugacuacccuaaauacucagaggaagcaaaauuaaacagagaaaaaauagaugggguaaaacuggaaucaacaaggauuuaccagauuuuggcgaucuauucaacugucgccaguucauugguacugguagucucccugggggcaaucagcuucuggaugugcucuaaugggucucuacaguguagaauauguauuuaa

SEQ ID NO: 43921 - RNA, 1701 nt, Artificial Sequence
  derived and/or modified CDS sequence (wt) from hemagglutinin__InfluenzaA__AHV83782
augaaggcaauacuaguaguucugcuauauacacuugcaaccgcaaaugcagacacauuauguauagguuaucaugcgaacaauucaacagacacuguagacacaguacuagaaaagaauguaacaguaacacacucuguuaaccuucuagaagacaagcauaacgggaaacuaugcaaacuaagagggguagccccauugcauuuggguaaauguaacauugcuggcuggauccugggaaauccagagugugaaucacucuccacggcaaguucaugguccuacauuguggaaacaucuaguucagacaauggaacguguuacccaggagauuucaucaauuaugaggagcuaagagagcaauugagcucagugucaucauuugaaagguuugagauauuccccaagacaaguucauggcccaaucaugacucgaacaaagguguaacggcagcauguccucacgcuggagcaaaaagcuucuacaaaaauuuaauauggcuaguuaaaaaaggaaauucauacccaaagcucagccaauccuacauuaaugauaaagggaaagaaguccucgugcuguggggcauucaccacccaucuacuacugcugaccaacaaagucucuaucagaaugcagaugcauauguuuuuguggggacaucaagauacagcaagaaguucaagccggaaauagcaauaagacccaaagugagggaucaagaagggagaaugaacuacuacuggacacuaguagagccgggagacaaaauaacauucgaagcaacuggaaaucuaguggcaccgagauaugcauucacaauggaaagaaaugcuggaucugguauuaucauuucagauacaccaguccacgauugcaauacaacuugucagacacccgagggugcuauaaacaccagccucccauuucagaauauacauccgaucacaauuggaaaauguccaaaguauguaaaaagcacaaaauugagacuggccacaggauugaggaaugucccgucuauucaaucuagaggccuauucggggccauugccggcuucauugaagggggguggacagggaugguagauggaugguacgguuaucaccaucaaaaugagcaggggucaggauaugcagccgaccugaagagcacacaaaaugccauugacaagauuacuaacaaaguaaauucuguuauugaaaagaugaauacacaguucacagcaguggguaaagaguucaaccaccuggaaaaaagaauagagaauuuaaauaaaaaaguugaugaugguuuccuggacauuuggacuuacaaugccgaacuguugguucuauuggaaaaugaaagaacuuuggacuaccacgauucaaaugugaagaacuuguaugaaaagguaagaaaccaguuaaaaaacaaugccaaggaaauuggaaacggcugcuuugaauuuuaccacaaaugcgauaacacgugcauggaaagugucaaaaaugggacuuaugacuacccaaaauacucagaggaagcaaaauuaaacagagaaaaaauagaugggguaaaacuggaaucaacaaggauuuaccagauuuuggcgaucuauucaacugucgccaguucauugguacugguagucucccugggggcaaucagcuucuggaugugcucuaaugggucucuacaguguagaauauguauuuaa

SEQ ID NO: 43922 - RNA, 1701 nt, Artificial Sequence
  derived and/or modified CDS sequence (wt) from hemagglutinin__InfluenzaA__AHV83783
augaaggcaauacuaguaguucugcuauauacauuugcaaccgcaaaugcagacacauuauguauagguuaucaugcgaacaauucaacagacacuguagacacaguacuagaaaagaauauaacaguaacacacucuguuaaccuucuagaagacaagcauaacgggaaacuaugcaaacuaagagggguagccccauugcauuuggguaaauguaacauugcuggcuggauccugggaaauccagagugugaaucacucuccacagcaaguucaugguccuacauuguggaaacaucuaguucagacaauggaacguguuacccaggagauuucaucaauuaugaggagcuaagagagcaauugagcucagugucaucauuugaaagguuugagauauuccccaagacaaguucauggcccaaucaugacucgaacaaagguguaacggcagcauguccucacgcuggagcaaaaggcuucuacaaaaauuuaauauggcuaguuaaaaaaggaaauucauacccaaagcuccgccaauccuacauuaaugauaaagggaaagaaguccucgugcuguggggcauucaccacccaucuacuacuacugaccaacaaagucucuaucagaaugcagaugcauauguuuuuguggggacaucaagauacagcaagaaguucaagccggaaauagcaauaagacccaaagugagggaucaagaagggagaaugaacuauuacuggacacuaguagagccgggagacaaaauaacauucgaagcaacuggaaaucuagugguaccgagauaugcauucacaauggaaagaaaugcuggaucugguauuaucauuucagauacaccaguccacgauugcaauacaacuugucagacacccgagggugcuauaaacaccagccucccauuucagaauauacauccgaucacaauuggaaaauguccaaaguauguaaaaagcacaaaauugagacuggccacaggauugaggaaugucccgucuauucaaucuagaggccuauucggggccauugccggcuucauugaaggaggguggacagggaugguagauggaugguacgguuaucaccaucaaaaugagcaggggucaggauaugcagccgaccugaagagcacacaaaaugccauugacaagauuacuaacaaaguaaauucuguuauugaaaagaugaauacacaguucacagcaguggguaaagaguucaaccaccuggaaaaaagaauagagaauuuaaauaaaaaaguugaugaugguuuccuggacauuuggacuuacaaugccgaacuguugguucuauuggaaaaugaaagaacuuuggacuaccacgauucaaaugugaagaacuuguaugaaaagguaagaaaccaguuaaaaaacaaugccaaggaaauuggaaacggcugcuuugaauuuuaccacaaaugcgauaacacgugcauggaaagugucaaaaaugggacuuaugacuacccaaaauacucagaggaagcaaaauuaaacagagaaaaaauagaugggguaaagcuggaaucaacaaggauuuaccagauuuuggcgaucuauucaacugucgccaguucauugguacugguagucucccugggggcaaucagcuucuggaugugcucuaaugggucucuacaguguagaauauguauuuaa

SEQ ID NO: 43923 - RNA, 1701 nt, Artificial Sequence
  derived and/or modified CDS sequence (wt) from hemagglutinin__InfluenzaA__AHV83784
augaaggcaauacuaguaguucugcuauauacauuugcaaccgcaaaugcagacacauuauguauagguuaucaugcgaacaauucaacagacacuguagacacaguacuagaaaagaauguaacaguaacacacucuguuaaccuucuagaagacaagcauaacgggaaacuaugcaaacuaagagggguagccccauugcauuuggguaaauguaacauugcuggcuggauccugggaaauccagagugugaaucacucuccacagcaaguucaugguccuacauuguggaaacaucuaguucagacaauggaacguguuacccaggagauuucaucaauuaugaggagcuaagagagcaauugagcucagugucaucauuugaaagguuugagauauuccccaagacaaguucauggcccaaucaugacucgaacaaagguguaacggcagcauguccucacgcuggagcaaaaagcuucuacaaaaauuuaauauggcuaguuaaaaaaggaaauucauacccaaagcucagccaauccuacauuaaugauaaagggaaagaaguccucgugcuguggggcauucaccacccaucuacuacugcugaccaacaaagucucuaucagaaugcagaugcauauguuuuuguggggacaucaagauacagcaagaaguucaagccggaaauagcaauaagacccaaagugagggaucaagaagggagaaugaacuacuacuggacacuaguagagccgggagacaaaauaacauucgaagcaacuggaaaucuagugguaccgagauaugcauucacaauggaaagaaaugcuggaucugguauuaucauuucagauacaccaguccacgauugcaauacaacuugucagacacccgagggugcuauaaacaccagccucccauuucagaauauacauccgaucacaauuggaaaauguccaaaguauguaaaaagcacaaaauugagacuggccacaggauugagaaaugucccgucuauucaaucuagaggccuauucggggccauugccggcuucauugaagggggguggacagggaugguagauggaugguacgguuaucaccaucaaaaugagcaggggucaggauaugcagccgaccugaagagcacacaaaaugccauugacaagauuacuaacaaaguaaauucuguuauugaaaagaugaauacacaguucacagcaguggguaaagaguuuaaccaccuggaaaaaagaauagagaauuuaaauaaaaaaguugaugaugguuuccuggacauuuggacuuacaaugccgaacuguugguucuauuggaaaaugaaagaacuuuggacuaccacgauucaaaugugaagaacuuguaugaaaagguaagaaaccaguuaaaaaacaaugccaaggaaauuggaaacggcugcuuugaauuuuaccacaaaugcgauaacacgugcauggaaagugucaaaaaugggacuuaugacuacccaaaauacucagaggaggcaaaauuaaacagagaaaaaauagaugggguaaaacuggaaucaacaaggauuuaccagauuuuggcgaucuauucaacugucgccaguucauugguacugguagucucccugggggcaaucagcuucuggaugugcucuaaugggucucuacaguguagaauauguauuuaa

SEQ ID NO: 43924 - RNA, 1701 nt, Artificial Sequence
  derived and/or modified CDS sequence (wt) from hemagglutinin__InfluenzaA__AHV83785
augaaggcaauacuaguaguucugcuauauacauuugcaaccgcaaaugcagacacauuauguauagguuaucaugcgaacaauucaacagacacuguagacacaguacuagaaaagaauguaacaguaacacacucuguuaaccuucuagaagacaagcauaacgggaaacuaugcaaacuaagagggguagccccauugcauuuggguaaauguaacauugcuggcuggauccugggaaauccagagugugaaucacucuccacagcaaguucaugguccuacauuguggaaacaucuaguucagacaauggaacguguuacccaggagauuucaucaauuaugaggagcuaagagagcaauugagcucagugucaucauuugaaagguuugagauauuccccaagacaaguucauggcccaaucaugacucgaacaaagguguaacggcagcauguccucacgcuggagcaaaaagcuucuacaaaaauuuaauauggcuaguuaaaaaaggaaauucauacccaaagcucagccaauccuacauuaaugauaaagggaaagaaguccucgugcuguggggcauucaccacccaucuacuacugcugaccaacaaagucucuaucagaaugcagaugcauauguuuuuguggggacaucaagauacagcaagaaguucaagccggaaauagcaauaagacccaaagugagggaucaagaagggagaaugaacuauuacuggacacuaguagagccgggagacaaaauaacauucgaagcaacuggaaaucuagugguaccgagauaugcauucacaauggaaagaaaugcuggaucugguauuaucauuucagauacaccaguccacgauugcaauacaacuugucagacacccgagggugcuauaaacaccagccucccauuucagaauauacauccgaucacaauuggaaaauguccaaaguauguaaaaagcacaaaauugagacuggccacaggauugaggaaugucccgucuauucaaucuagaggccuauucggggccauugccggcuucauugaaggaggguggacagggaugguagauggaugguacgguuaucaccaucaaaaugagcaggggucaggauaugcagccgaccugaagagcacacaaaaugccauugacaagauuacuaacaaaguaaauucuguuauugaaaagaugaauacacaguucacagcaguggguaaagaguucaaccaccuggaaaaaagaauagagaauuuaaauaaaaaaguugaugaugguuuccuggacauuuggacuuacaaugccgaacuguugguucuauuggaaaaugaaagaacuuuggacuaccacgauucaaaugugaagaacuuguaugaaaagguaagaaaccaguuaaaaaacaaugccaaggaaauuggaaacggcugcuuugaauuuuaccacaaaugcgauaacacgugcauggaaagugucaaaaaugggacuuaugacuacccaaaauacucagaggaagcaaaauuaaacagagaaaaaauagaugggguaaagcuggaaucaacaaggauuuaccagauuuuggcaaucuauucaacugucgccaguucauugguacugguagucucccugggggcaaucagcuucuggaugugcucuaaugggucucuacaguguagaauauguauuuaa

SEQ ID NO: 43925 - RNA, 1701 nt, Artificial Sequence; identical to SEQ ID NO: 43913
  derived and/or modified CDS sequence (wt) from hemagglutinin__InfluenzaA__AHV83787

SEQ ID NO: 43926 - RNA, 1701 nt, Artificial Sequence
  derived and/or modified CDS sequence (wt) from hemagglutinin__InfluenzaA__AHV83788
augaaggcaauacuaguaguucugcuauauacauuugcaaccgcaaaugcagacacauuauguauagguuaucaugcgaacaauucaacagacacuguagacacaguacuagaaaagaauguaacaguaacacacucuguuaaccuucuagaagacaagcauaacgggaaacuaugcaaacuaagagggguauccccauugcauuuggguaaauguaacauugcuggcuggauccugggaaacccagagugugaaucacucuccacagcaaguucaugguccuacauuguggaaacaucuaguucagacaauggaacguguuacccaggagauuucgucaauuaugaggagcuaagagagcaauugagcucagugucaucauuugaaagguuugagauauuccccaagacaaguucauggcccaaucaugacucgaacaaagguguaacggcagcauguccucacgcuggagcaaaaagcuucuacaaaaauuuaauauggcuaguuaaaaaaggaaauucauacccaaagcucagccaauccuacauuaaugauaaagggaaagaaguccucgugcuguggggcauucaccacccaucuacuacugcugaccaacaaagucucuaucagaaugcagaugcauauguuuuuguggggacaucaagauacagcaagaaguucaagccggaaauagcaauaagacccaaagugagggaucaagaagggagaaugaacuauuacuggacacuaguagagccgggagacaaaauaacauucgaagcaacuggaaaucuagugguaccgagauaugcauucacaauggaaagaaaugcuggaucugguauuaucauuucagauacaccaguccacgauugcaauacaacuugucagacacccgagggugcuauaaacaccagccucccauuucagaauauacauccgaucacaauuggaaaauguccaaaguauguaaaaagcacaaaauugagacuggccacaggauugaggaaugucccgucuauucaaucuagaggccuauucggggccauugccggcuucauugaagggggguggacagggaugguagauggaugguaugguuaucaccaucaaaaugagcaggggucaggauaugcagccgaccuaaagagcacacaaaaugccauugacaagauuacuaacaaaguaaauucuguuauugaaaagaugaauacacaguucacagcaguggguaaagaguucaaccaccuggaaaaaagaauagagaauuuaaauaaaaaaguugaugaugguuuccuggacauuuggacuuacaaugccgaacuguugguucuauuggaaaaugaaagaacuuuggacuaucacgauucaaaugugaagaacuuguaugaaaagguaagaaaccaguuaaaaaacaaugccaaggaaauuggaaacggcugcuuugaauuuuaccacaaaugcgauaacacgugcauggaaagugucaaaaaugggacuuaugacuacccaaaauacucagaggaagcaaaauuaaacagagaaaaaauagaugggguaaagcuggaaucaacaaggauuuaccagauuuuggcgaucuauucaacugucgccaguucauugguacugguagucucccugggggcaaucagcuucuggaugugcucuaaugggucucuacaguguagaauauguauuuaa

SEQ ID NO: 43927 - RNA, 1701 nt, Artificial Sequence
  derived and/or modified CDS sequence (wt) from hemagglutinin__InfluenzaA__AHV83789
augaaggcaauacuaguaguucugcuauauacauuugcaaccgcaaaugcagacacuuuauguauagguuaucaugcgaacaauucaacagacacuguagacacaguacuagaaaagaauguaacaguaacacacucuguuaaccuucuagaagacaagcauaacgguaaacuaugcaaacuaagagggguagccccauugcauuuggguaaauguaacauugcuggcuggauccugggaaauccagagugugaaucacucuccacagcaaguucaugguccuacauuguggaaacaucuaguucagacaauggaacguguuacccaggagauuucaucaauuaugaggagcuaagagagcaauugagcucagugucaucauuugaaagguuugagauauuccccaagacaaguucauggcccaaucaugacucgaacaaagguguaacggcagcauguccucacgcuggagcaaaaagcuucuacaaaaauuuaauauggcuaguuaaaaaaggaaauucauacccaaagcucagucaauccuacauuaaugauaaagggaaagaaguccucgugcuguggggcauucaccauccaucuacuacugcugaccaacaaagucucuaucagaaugcagaugcauauguuuuuguggggacaucaagauacagcaagaaguucaagccggaaauagcaauaagacccaaagugagggaucaagaagggagaaugaacuauuacuggacacuaguagagccgggagacaaaauaacauucgaagcaacuggaaaucuagugguaccgagauaugcauucacaauggaaagaaaugcuggaucugguauuaucauuucagauacaccaguccacgauugcaauacaacuugucagacacccgagggugcuauaaacaccagccucccauuucagaauauacauccgaucacaauuggaaaauguccaaaguauguaaaaagcacaaaauugagacuggcaacaggauugaggaauaucccgucuauucaaucuagaggccuauucggggccauugccggcuucauugaagggggguggacagggaugguagauggaugguacgguuaucaccaucaaaaugagcaggggucaggauaugcagccgaccugaagagcacacaaaaugccauugacaagauuacuaacaaaguaaacucuguuauugaaaagaugaauacacaguucacagcgguggguaaagaguucaaccaccuggaaaaaagaauugagaauuuaaauaaaaaaguugaugaugguuuccuggacauuuggacuuacaaugccgaacuguugguucuauuggaaaaugaaagaacuuuggacuaccacgauucaaaugugaagaacuuguaugaaaagguaagaaaccaguuaaaaaacaaugccaaggaaauuggaaacggcugcuuugaauuuuaccacaaaugcgauaacacgugcauggaaagugucaaaaaugggacuuaugacuacccaaaauacucagaggaagcaaaauuaaacagagaaaaaauagaugggguaaagcuggaaucaacaaggauuuaccagauuuuggcgaucuauucaacugucgccaguucauugguacugguagucucccugggggcaaucagcuucuggaugugcucuaaugggucucuacaguguagaauauguauuuaa

SEQ ID NO: 43928 - RNA, 1701 nt, Artificial Sequence
  derived and/or modified CDS sequence (wt) from hemagglutinin__InfluenzaA__AHV83790
augaaggcaauacuaguaguucugcuauauacauuugcaaccgcaaaugcagacacauuauguauagguuaucaugcgaacaauucaacagacacuguagacacaguacuagaaaagaauguaacaguaacacacucuguuaaccuucuagaagacaagcauaacgggaaacuaugcaaacuaagagggguagccccauugcauuuggguaaauguaacauugcuggcuggauccugggaaauccagagugugaaucacucuccacagcaaguucaugguccuacauuguggaaacaucuaguucagacaauggaacguguuacccaggagauuucaucaauuaugaggagcuaagagagcaauugagcucagugucaucauuugaaagguuugagauauuccccaagacaaguucauggcccaaucaugacucgaacaaagguguaacggcagcauguccucacgcuggagcaaaaagcuucuacaaaaauuuaauauggcuaguuaaaaaaggaaauucauacccaaagcucagccaauccuacauuaaugauaaagggaaagaaguccucgugcuguggggcauucaccauccaucuacuacugcugaccaacaaagucucuaucagaaugcagaugcauauguuuuuguggggacaucaagauacagcaagaaguucaagccggaaauagcaauaagacccaaagugagggaucaagaagggagaaugaacuauuacuggacacuaguagagccgggagacaaaauaacauucgaagcaacuggaaaucuagugguaccgagauaugcauucacaauggaaagaaaugcuggaucugguauuaucauuucagauacaccaguccacgauugcaauacaacuugucagacacccgagggugcuauaaacaccagccucccauuucagaauauacauccgaucacaauuggaaaauguccaaaguauguaaaaagcacaaaauugagacuggccacaggauugaggaaugucccgucuauucaaucuagaggccuauucggggccauugccggcuucauugaagggggguggacagggaugguagauggaugguacgguuaucaccaucaaaaugagcaggggucaggauaugcagccgaccugaagagcacacaaaaugccauugacaagauuacuaacaaaguaaauucuguuauugaaaagaugaauacacaauucacagcaguggguaaagaguucaaccaccuggaaaaaagaauagagaauuuaaauaaaaaaguugaugaugguuuccuggacauuuggacuuacaaugccgaacuguugguucuauuggaaaaugaaagaacuuuggacuaccacgauucaaaugugaagaacuuguaugaaaagguaagaaaccaguuaaaaaacaaugccaaggaaauuggaaacggcugcuuugaauuuuaccacaaaugcgauaacacgugcauggaaagugucaaaaaugggacuuaugacuacccaaaauacucagaggaagcaaaauuaaacagagaaaaaauagaugggguaaagcuggaaucaacaaggauuuaccagauuuuggcgaucuauucaacugucgccaguucauugguacugguagucucccugggggcaaucaguuucuggaugugcucuaaugggucucuacaguguagaauauguauuuaa

SEQ ID NO: 43929 - RNA, 1701 nt, Artificial Sequence; identical to SEQ ID NO: 43034
  derived and/or modified CDS sequence (wt) from hemagglutinin__InfluenzaA__AHV83791

SEQ ID NO: 43930 - RNA, 1701 nt, Artificial Sequence; identical to SEQ ID NO: 43034
  derived and/or modified CDS sequence (wt) from hemagglutinin__InfluenzaA__AHV83792

SEQ ID NO: 43931 - RNA, 1701 nt, Artificial Sequence
  derived and/or modified CDS sequence (wt) from hemagglutinin__InfluenzaA__AHV83793
augaaggcaauacuaguaguucugcuauauacauuugcaaccgcaaaugcagacacauuauguauagguuaucaugcgaauaauucaacagacacuguagacacaguacuagaaaagaauguaacaguaacacacucuguuaaccuucuagaagacaagcauaacgggaaacuaugcaaacuaagagggguagccccauugcauuuggguaaauguaacauugcuggcuggauccugggaaauccagagugugaaucacucuccacagcaaguucaugguccuacauuguggaaacaucuaguucagacaauggaacguguuacccaggagauuucaucaauuaugaggagcuaagagagcaauugagcucagugucaucauuugaaaaguuugagauauuccccaagacaaguucauggcccaaucaugacucgaacaaagguguaacggcagcauguccucacgcuggagcaaaaagcuucuacaaaaauuuaauauggcuaguuaaaaaaggaaauucauacccaaagcucagccaaucauacauuaaugauaaagggaaagaaauccucgugcuguggggcauucaccauccaucuacuacugcugaccaacaaagucucuaucagaaugcagaugcauauguuuuuguggggacaucaagauacagcaagaaguucaagccggaaauagcaauaagacccaaagugagggaucaagaagggagaaugaacuauuacuggacacuaguagagccgggagacaaaauaacauucgaagcaacuggaaaucuagugguaccgagauaugcauucacaauggaaagaaaugcuggaucugguauuaucauuucagauacaccaguccacgauugcaauacaacuugucagacacccgagggugcuauaaacaccagccucccauuucagaauauacauccgaucacaauuggaaaauguccaaaguauguaaaaagcacaaaauugagacuggccacaggauugagaaaugucccgucuauucaaucuagaggccuauucggggccauugccgguuucauugaagggggguggacagggaugguagauggaugguacgguuaucaccaucaaaaugagcaggggucaggauaugcagccgaccagaagagcacacaaaaugccauugacaagauuacuaacaaaguaaacucuguuauugaaaagaugaauacacaguucacagcaguggguaaagaguucaaccaccuggaaaaaagaauagagaauuuaaauaaaaaaguugaugaugguuuccuggacauuuggacuuacaaugccgaacuguugguucuauuggaaaaugaaagaacuuuggacuaccacgauucaaaugugaagaacuuguaugaaaagguaagaaaccaguuaaaaaacaaugccaaggaaauuggaaacggcugcuuugaauuuuaccacaaaugcgauaacacgugcauggaaagugucaaaaaugggacuuaugacuacccaaaauacucagaggaagcaaaauuaaacagagaaaaaauagaugggguaaagcuggaaucaacaaggauuuaccagauuuuggcgaucuauucaacugucgccaguucauugguacugguagucucccugggggcaaucagcuucuggaugugcucuaaugggucucuacaguguagaauauguauuuaa

SEQ ID NO: 43932 - RNA, 1701 nt, Artificial Sequence
  derived and/or modified CDS sequence (wt) from hemagglutinin__InfluenzaA__AHV83794
augaaggcaauacuaguaguucugcuauauacauuugcaaccgcaaaugcagacacauuauguauagguuaucaugcgaacaauucaacagacacuguagacacaguacuagaaaagaauguaacaguaacacacucuguuaaccuucuagaagacaagcauaacgggaaacuaugcaaacuaagagggguagccccauugcauuuggguaaauguaacauugcuggcuggauccugggaaauccagagugugaaucacucuccacagcaaguucaugguccuacauuguggaaacaucuaguucagacaauggaacguguuacccaggagauuucaucaauuaugaggagcuaagagagcaauugagcucagugucaucauuugaaagguuugagauauuccccaagacaaguucauggcccaaucaugacucgaacaaagguguaacggcagcauguccucacgcuggagcaaaaagcuucuacaaaaauuuaauauggcuaguuaaaaaaggaaauucauacccaaagcucagccaauccuacauuaaugauaaagggaaagaaguccucgugcuguggggcauucaccauccaucuacuacugcugaccaacaaagucucuaucagaaugcagaugcauauguuuuuguggggacaucaagauacagcaagaaguucaagccggaaauagcaauaagacccaaagugagggaucaagaagggagaaugaacuauuacuggacacuaguagagccgggagacaaaauaacauucgaagcaacuggaaaucuagugguaccgagauaugcauucacaauggaaagaaaugcuggaucugguauuaucauuucagauacaccaguccacgauugcaauacaacuugucagacacccgagggugcuauaaacaccagccucccauuucagaauauacauccgaucacaauuggaaaauguccaaaguauguaaaaagcacaaaauugagacuggccacaggauugaggaaugucccgucuauucaaucuagaggccuauucggggccauugccggcuucauugaagggggguggacagggaugguagauggaugguacgguuaucaccaucaaaaugagcaggggucaggauaugcagccgaccagaagagcacacaaaaugccauugacaagauuacuaacaaaguaaacucuguuauugaaaagaugaauacacaguucacagcaguggguaaagaguucaaccaccuggaaaaaagaauagagaauuuaaauaaaaaaguugaugaugguuuccuggacauuuggacuuacaaugccgaacuguugguucuauuggaaaaugaaagaacuuuggacuaccacgauucaaaugugaagaacuuguaugaaaagguaagaaaccaguuaaaaaacaaugccaaggaaauuggaaacggcugcuuugaauuuuaccacaaaugcgauaacacgugcauggaaagugucaaaaaugggacuuaugacuacccaaaauacucagaggaagcaaaauuaaacagagaaaaaauagaugggguaaagcuggaaucaacaaggauuuaccagauuuuggcgaucuauucaacugucgccaguucauugguacugguagucucccugggggcaaucagcuucuggaugugcucuaaugggucucuacaguguagaauauguauuuaa

SEQ ID NO: 43933 - RNA, 1701 nt, Artificial Sequence
  derived and/or modified CDS sequence (wt) from hemagglutinin__InfluenzaA__AHV83795
augaaggcaauacuaguaguucugcuauauacauuugcaaccgcaaaugcagacacauuauguauagguuaucaugcgaacaauucaacagacacuguagacacaguacuagaaaagaauguaacaguaacacacucuguuaaccuucuagaagacaagcauaacgggaaacuaugcaaacuaagaggggucgccccauugcauuuggguaaauguaacauugcuggcuggauccugggaaauccagagugugaaucacucuccgcagcaaguucaugguccuacauuguggaaacaucuaguucagacaauggaacguguuacccaggagauuucaucaauuaugaggagcuaagagagcaauugagcucagugucaucauuugaaagguuugagauauuccccaagacaaguucauggcccaaucaugacucgaacaaagguguaacggcagcauguccucacgcuggagcaaaaagcuucuacaaaaauuuaauauggcuaguuaaaaaaggaaauucauacccaaagcucagccaauccuacauuaaugauaaagggaaagaaguccucgugcuguggggcauucaccauccaucuacuacugcugaccaacaaagucucuaucagaaugcagauacauauguuuuuguggggacaucaagauacagcaagaaguucaagccggaaauagcaauaagacccaaagugagggaucaagaagggagaaugaacuauuacuggacacuaguagagccgggagacaaaauaacauucgaagcaacuggaaaucuagugguaccgagauaugcauucacaauggaaagaaaugcuggaucugguauuaucauuucagauacaccaguccacgauugcaauacaacuugucagacacccgagggugcuauaaacaccagccucccauuucagaauauacauccgaucacaauuggaaaauguccaaaguauguaaaaagcacaaaauugagacuggccacaggauugaggaaugucccgucuauucaaucuagaggccuauucggggccauugccggcuucauugaagggggguggacagggaugguagauggaugguacgguuaucaccaucaaaaugagcaggggucaggauaugcagccgaccagaagagcacacaaaaugccauugacaagauuacuaacaaaguaaauucuguuauugaaaagaugaauacacaguucacagcaguggguaaagaguucaaccaccuggaaaaaagaauagagaauuuaaauaaaaaaguugaugaugguuuccuggacauuuggacuuacaaugccgaacuguugguucuauuggaaaaugaaagaacuuuggacuaccacgauucaaaugugaagaacuuguaugaaaagguaagaaaccaguuaaaaaacaaugccaaggaaauuggaaauggcugcuuugaauuuuaccacaaaugcgauaacacgugcauggaaagugucaaaaaugggacuuaugacuacccaaaauacucagaggaagcaaaauuaaacagagaaaaaauagaugggguaaagcuggaaucaacaaagauuuaccagauuuuggcgaucuauucaacugucgccaguucauugguacugguagucucccugggggcaaucagcuucuggaugugcucuaaugggucucuacaguguagaauauguauuuaa

SEQ ID NO: 43934 - RNA, 1701 nt, Artificial Sequence
  derived and/or modified CDS sequence (wt) from hemagglutinin__InfluenzaA__AHV83796
augaaggcaauacuaguaguucugcuauauacauucgcaaccgcaaaugcagacacauuauguauagguuaucaugcaaacaauucaacagacacuguagacacaguacuagaaaagaauguaacaguaacacacucuguuaaccuucuagaagacaagcauaacgggaaacuaugcaaacuaagagggguagccccauugcauuuggguaaauguaacauugcuggcuggauccugggaaauccagagugugaaucacucuccacagcaaguucaugguccuacauuguggaaacaucuaguucagacaauggaacguguuacccaggagauuucaucaauuaugaggagcuaagagagcaauugagcucagugucaucauuugaaagguuugagauauuccccaagacaaguucauggcccaaucaugacucgaacaaagguguaacggcagcauguccucacgcuggagcaaaaagcuucuacaaaaauuuaauauggcuaguuaaaaaaggaaauucauacccaaagcucagccaauccuacauuaaugauaaagggaaagaaguccucgugcuguggggcauucaccauccaucuacuacugcugaccaacaaagucucuaucagaaugcagaugcauauguuuuuguggggacaucaagauacagcaagaaguucaagccggaaauagcaauaagacccaaagugagggaucaagaagggagaaugaacuauuacuggacacuaguagagccgggagacaaaauaacauucgaagcaacuggaaaucuagugguaccgagauaugcauucacaauggaaagaaaugcuggaucugguauuaucauuucagauacaccaguccacgauugcaauacaacuugucagacacccgagggugcuauaaacaccagccucccauuucagaauauacauccgaucacaauuggaaaauguccaaaguauguaaaaagcacaaaauugagacuggccacaggauugaggaaugucccgucuauucaaucuagaggccuauucggggccauugccggcuucauugaagggggguggacagggaugguagauggaugguacgguuaucaccaucaaaaugagcaggggucaggauaugcagccgaccagaagagcacacaaaaugccauugacaagauuacuaacaaaguaaacucuguuauugaaaagaugaauacacaguucacagcaguggguaaagaguucaaccaccuggaaaaaagaauagagaauuuaaauaaaaaaguugaugaugguuuccuggacauuuggacuuacaaugccgaacuguugguucuauuggaaaaugaaagaacuuuggacuaccacgauucaaaugugaagaacuuguaugaaaagguaagaaaccaguuaaaaaacaaugccaaggaaauuggaaacggcugcuuugaauuuuaccacaaaugcgauaacacgugcauggaaagugucaaaaaugggacuuaugacuacccaaaauacucagaggaagcaaaauuaaacagagaaaaaauagaugggguaaagcuggaaucaacaaggauuuaccagauuuuggcgaucuauucaacugucgccaguucauugguacugguagucucccugggggcaaucagcuucuggaugugcucuaaugggucucuacaguguagaauauguauuuaa

SEQ ID NO: 43935 - RNA, 1701 nt, Artificial Sequence; identical to SEQ ID NO: 43020
  derived and/or modified CDS sequence (wt) from hemagglutinin__InfluenzaA__AHV83798

SEQ ID NO: 43936 - RNA, 1701 nt, Artificial Sequence; identical to SEQ ID NO: 43911
  derived and/or modified CDS sequence (wt) from hemagglutinin__InfluenzaA__AHV83799

SEQ ID NO: 43937 - RNA, 1701 nt, Artificial Sequence
  derived and/or modified CDS sequence (wt) from hemagglutinin__InfluenzaA__AHV83800
augaaggcaauacuaguaguucugcuauauacauuugcaaccgcaaaugcagacacauuauguauagguuaucaugcgaacaauucaacagacacuguagacacaguacuagaaaagaauguaacaguaacacacucuguuaaccuucuagaagacaagcauaacgggaaacuaugcaaacuaagagggguagccccauugcauuuggguaaauguaacauugcuggcuggauccugggaaauccagagugugaaucacucuccacagcaaguucaugguccuacauuguggaaacaucuaguucagacaauggaacguguuacccaggagauuucaucaauuaugaggagcuaagagagcaauugagcucagugucaucauuugaaagguuugagauauuccccaagacaaguucauggcccaaucaugacucgaacaaagguguaacggcagcauguccucacgcuggagcaaaaagcuucuacaaaaauuuaauauggcuaguuaaaaaaggaaauucauacccaaagcucagccaauccuacauuaaugauaaagggaaagaaguccucgugcuguggggcauucaccacccaucuacuacugcugaccaacaaagucucuaucagaaugcagaugcauauguuuuuguugggacaucaagauacagcaagaaguucaagccggaaauagcaauaagacccaaagugagggaucaagaagggagaaugaacuauuacuggacacuaguagagccgggagacaaaauaacauucgaagcaacuggaaaucuagugguaccgagauaugcauucacaauggaaagaaaugcuggaucugguauuaucauuucagauacaccaguccacgauugcaauacaacuugucagacacccgagggugcuauaaacaccagccucccauuucagaauauacauccgaucacaauuggaaaauguccaaaguauguaaaaagcacaaaauugagacuggccacaggauugaggaaugucccgucuauucaaucuagaggccuauucggggccauugccggcuucauugaaggaggguggacagggaugguagauggaugguacgguuaucaccaucaaaaugagcaggggucaggauaugcagccgaccugaagagcacacaaaaugccauugacaagauuacuaacaaaguaaauucuguuauugaaaagaugaauacacaguucacagcaguggguaaagaguucaaccaccuggaaaaaagaauagagaauuuaaauaaaaaaguugaugaugguuuccuggacauuuggacuuacaaugccgaacuguugguucuauuggaaaaugaaaaaacuuuggacuaccacgauucaaaugugaagaacuuguaugaaaagguaagaaaccaguuaaaaaacaaugccaaggaaauuggaaacggcugcuuugaauuuuaccacaaaugcgauaacacgugcauggaaagugucaaaaaugggacuuaugacuacccaaaauacucagaggaagcaaaauuaaacagagaaaaaauagaugggguaaagcuggaaucaacaaggauuuaccagauuuuggcgaucuauucaacugucgccaguucauugguacugguagucucccugggggcaaucagcuucuggaugugcucuaaugggucucuacaguguagaauauguauuuaa

SEQ ID NO: 43938 - RNA, 1701 nt, Artificial Sequence
  derived and/or modified CDS sequence (wt) from hemagglutinin__InfluenzaA__AHV83801
augaaggcaauacuaguaguucugcuauauacauuugcaaccgcaaaugcagacacauuauguauagguuaucaugcgaacaauucaacagacacuguagacacaguacuagaaaagaauguaacaguaacacacucuguuaaccuucuagaagacaagcauaacgggaaacuaugcaaacuaagaggggucgccccauugcauuuggguaaauguaacauugcuggcuggauccugggaaauccagagugugaaucacucuccacagcaaguucaugguccuacauuguggaaacaucuaguucagacaauggaacguguuacccaggagauuucaucaauuaugaggagcuaagagagcaauugagcucagugucaucauuugaaagguuugagauauuccccaagacaaguucauggcccaaucaugacucgaacaaagguguaacggcagcauguccucacgcuggagcaaaaagcuucuacaaaaauuuaauauggcuaguuaaaaaaggaaauucauacccaaagcucagccaauccuacauuaaugauaaagggaaagaaguccucgugcuguggggcauucaccauccaucuacuacugcugaccaacaaagucucuaucagaaugcagaugcauauguuuuuguggggacaucaagauacagcaagaaguucaagccggaaauagcaauaagacccaaagugagggaucaagaagggagaaugaacuauuacuggacacuaguagagccgggagacaaaauaacauucgaagcaacuggaaaucuagugguaccgagauaugcauucacaauggaaagaaaugcuggaucugguauuaucauuucagauacaccaguccacgauugcaauacaacuugucagacacccgagggugcuauaaacaccagccucccauuucagaauauacauccgaucacaauuggaaaauguccaaaguauguaaaaagcacaaaauugagacuggccacaggauugaggaaugucccgucuauucaaucuagaggccuauucggggccauugccggcuucauugaagggggguggacagggaugguagauggaugguacgguuaucaccaucaaaaugagcaggggucaggauaugcagccgaccagaagagcacacaaaaugccauugacaagauuacuaacaaaguaaauucuguuauugaaaagaugaauacacaguucacagcaguggguaaagaguucaaccaccuggaaaaaagaauagagaauuuaaauaaaaaaguugaugaugguuuccuggacauuuggacuuacaaugccgaacuguugguucuauuggaaaaugaaagaacuuuggacuaccacgauucaaaugugaagaacuuguaugaaaagguaagaaaccaguuaaaaaacaaugccaaggaaauuggaaauggcugcuuugaauuuuaccacaaaugcgauaacacgugcauggaaagugucaaaaaugggacuuaugacuacccaaaauacucagaggaagcaaaauuaaacagagaaaaaauagaugggguaaagcuggaaucaacaaagauuuaccagauuuuggcgaucuauucaacugucgccaguucauugguacugguagucucccugggggcaaucagcuucuggaugugcucuaaugggucucuacaguguagaauauguauuuaa

SEQ ID NO: 43939 - RNA, 1701 nt, Artificial Sequence
  derived and/or modified CDS sequence (wt) from hemagglutinin__InfluenzaA__AHV83802
augaaggcaauacuaguaguucugcuauauacauuugcaaccgcaaaugcagacacauuauguauagguuaucaugcaaacaauucaacagacacuguagacacaguacuagaaaagaauguaacaguaacacacucuguuaaccuucuagaagacaagcauaacgggaaacuaugcaaacuaagagggguagccccauugcauuuggguaaauguaacauugcuggcuggauccugggaaauccagagugugaaucacucuccacagcaaguucaugguccuacauuguggaaacaucuaguucagacaauggaacguguuacccaggagauuucaucaauuaugaggagcuaagagagcaauugagcucagugucaucauuugaaagguuugagauauuccccaagacaaguucauggcccaaucaugacucgaacaaagguguaacggcagcauguccucacgcuggagcaaaaagcuucuacaaaaauuuaauauggcuaguuaaaaaaggaaauucauacccaaagcucagccaauccuacauuaaugauaaagggaaagaaguccucgugcuguggggcauucaccauccaucuacuacugcugaccaacaaggucucuaucagaauguagaugcauauguuuuuguggggacaucaagauacagcaagaaguucaagccggaaauagcaauaagacccaaagugagggaucaagaagggagaaugaacuauuacuggacacuaguagagccgggagacaaaauaacauucgaagcaacuggaaaucuagugguaccgagauaugcauucacaauggaaagaaaugcuggaucugguauuaucauuucagauacaccaguccacgauugcaauacaacuugucagacacccgagggugcuauaaacaccagccucccauuucagaauauacauccgaucacaauugggaaauguccaaaguauguaaaaagcacaaaauugagacuggccacaggauugaggaaugucccgucuauucaaucuagaggccuauucggggccauugccggcuucauugaagggggguggacagggaugguagauggaugguacgguuaucaccaucaaaaugagcaggggucaggauaugcagccgaccugaagagcacacaaaaugccauugacaagauuacuaacaaaguaaauucuguuauugaaaagaugaauacacaguucacagcaguggguaaagaguucaaccaccuggaaaaaagaauagagaauuuaaauaaaaaaguugaugaugguuuccuggacauuuggacuuacaaugccgaacuguugguucuauuggaaaaugaaagaacuuuggacuaccacgauucaaaugugaagaacuuguaugaaaagguaagaaaccaguuaaaaaacaaugccaaggaaauuggaaacggcugcuuugaauuuuaccacaaaugcgauaacacgugcauggaaagugucaaaaaugggacuuaugacuacccaaaauacucagaggaagcaaaauuaaacagagaaaaaauagaugggguaaagcuggaaucaacaaggauuuaccagauuuuggcgaucuauucaacugucgccaguucauugguacugguagucucccugggggcaaucagcuucuggaugugcucuaaugggucucuacaguguagaauauguauuuaa

SEQ ID NO: 43940 - RNA, 1701 nt, Artificial Sequence
  derived and/or modified CDS sequence (wt) from hemagglutinin__InfluenzaA__AHV83803
augaaggcaauacuaguaguucugcuauauacauuugcaaccgcaaaugcagacacauuauguauagguuaucaugcgaacaauucaacagacacuguagacacaguacuagaaaagaauguaacaguaacacacucuguuaaccuucuagaagacaagcauaacgggaaacuaugcaaacuaagagggguagccccauugcauuuggguaaauguaacauugcuggcuggauccugggaaauccagagugugaaucacucuccacagcaaguucaugguccuacauuguggaaacaucuaguucagacaauggaacguguuacccaggagauuucaucaauuaugaggagcuaagagagcaauugagcucagugucaucauuugaaagguuugagauauuccccaagacaaguucauggcccaaucaugacucgaacaaagguguaacggcagcauguccucacgcuggagcaaaaagcuucuacaaaaauuuaauauggcuaguuaaaaaaggaaauucauacccaaagcucagccaauccuacauuaaugauaaagggaaagaaguccucgugcuguggggcauucaccauccaucuacgacugcugaccaacaaagucucuaucagaaugcagaugcauauguuuuuguggggacaucaagauacagcaagaaguucaagccggaaauagcaauaagacccaaagugagggaucaagaagggagaaugaacuauuacuggacacuaguagagccgggagacaaaauaacauucgaagcaacuggaaaucuagugguaccgagauaugcauucacaauggaaagaaaugcuggaucugguauuaucauuucagauacaccaguccacgauugcaauacaacuugucagacacccgagggugcuauaaacaccagccucccauuucagaauauacauccgaucacaauuggaaaauguccaaaguauguaaaaagcacaaaauugagacuggccacaggauugaggaaugucccgucuauucaaucuagaggccuauucggggccauugccggcuucauugaagggggguggacagggaugguagauggaugguacgguuaucaccaucaaaaugagcaggggucaggauaugcagccgaccugaagagcacacaaaaugccauugacaagauuacuaacaaaguaaauucuguuauugaaaagaugaauacacaguucacagcaguggguaaagaguucaaccaccuggaaaaaagaauagagaauuuaaauaaaaaaguugaugaugguuuccuggacauuuggacuuacaaugccgaacuguugguucuauuggaaaaugaaagaacuuuggacuaccacgauucaaaugugaagaacuuguaugaaaagguaagaaaccaguuaaaaaacaaugccaaggaaauuggaaacggcugcuuugaauuuuaccacaaaugcgauaacacgugcauggaaagugucaaaaaugggacuuaugacuacccaaaauacucagaggaagcaaaauuaaacagagaaaaaauagaugggguaaagcuggaaucaacaaggauuuaccagauuuuggcgaucuauucaacugucgccaguucauugguacugguagucucccugggggcaaucagcuucuggaugugcucuaaugggucucuacaguguagaauauguauuuaa

SEQ ID NO: 43941 - RNA, 1701 nt, Artificial Sequence; identical to SEQ ID NO: 43005
  derived and/or modified CDS sequence (wt) from hemagglutinin__InfluenzaA__AHV83804

SEQ ID NO: 43942 - RNA, 1701 nt, Artificial Sequence
  derived and/or modified CDS sequence (wt) from hemagglutinin__InfluenzaA__AHV83805
augaaggcaauacuaguaguucugcuauauacauuugcaaccgcaaaugcagacacauuauguauagguuaucaugcgaacaauucaacagacacuguagacacaguacuagaaaagaauguaacaguaacacacucuguuaaccuucuagaagacaagcauaacgggaaacuaugcaaacuaagagggguagccccauugcauuuggguaaauguaacauugcuggcuggauccugggaaauccagagugugaaucacucuccacagcaaguucaugguccuacauuguggaaacaucuaguucagacaauggaacguguuacccaggagauuucaucaauuaugaggagcuaagagagcaauugagcucagugucaucauuugaaagguuugagauauuccccaagacaaguucauggcccaaucaugacucgaacaaagguguaacggcagcauguccucacgcuggagcaaaaagcuucuacaaaaauuuaauauggcuaguuaaaaaaggaaauucauacccaaagcucagccaauccuacauuaaugauaaagggaaagaaguccucgugcuguggggcauucaccacccaucuacuacugcugaccaacaaagucucuaucagaaugcagaugcauauguuuuuguggggacaucaagauacagcaagaaguucaagccggaaauagcaauaagacccaaagugagggaucaagaagggagaaugaacuauuacuggacacuaguagagccgggagacaaaauaacauucgaagcaacuggaaaucuagugguaccgagauaugcauucacaauggaaagaaaugcuggaucugguauuaucauuucagauacaccaguccacgauugcaauacaacuugucagacacccgagggugcuauaaacaccagccucccauuucagaauauacauccgaucacaauuggaaaauguccaaaguauguaaaaagcacaaaauugagacuggccacaggauugaggaaugucccgucuauucaaucuagaggccuauucggggccauugccggcuucauugaaggaggguggacagggaugguagauggaugguacgguuaucaccaucaaaaugagcaggggucaggauaugcagccgaccugaagagcacacaaaaugccauugacaagauuacuaacaaaguaaauucuguuauugaaaagaugaauacacaguucacagcagugggcaaagaguucaaccaccuggaaaaaagaauagagaauuuaaauaaaaaaguugaugaugguuuccuggacauuuggacuuacaaugccgaacuguugguucuauuggaaaaugaaagaacuuuggacuaccacgauucaaaugugaagaacuuguaugaaaagguaagaaaccaguuaaaaaacaaugccaaggaaauuggaaacggcugcuuugaauuuuaccacaaaugcgauaacacgugcauggaaagugucaaaaaugggacuuaugacuacccaaaauacucagaggaagcaaaauuaaacagagaaaaaauagaugggguaaagcuggaaucaacaaggauuuaccagauuuuggcgaucuauucaacugucgccaguucauugguacugguagucucccugggggcaaucagcuucuggaugugcucuaaugggucucuacaguguagaauauguauuuaa

SEQ ID NO: 43943 - RNA, 1701 nt, Artificial Sequence; identical to SEQ ID NO: 43932
  derived and/or modified CDS sequence (wt) from hemagglutinin__InfluenzaA__AHV83806

SEQ ID NO: 43944 - RNA, 1701 nt, Artificial Sequence
  derived and/or modified CDS sequence (wt) from hemagglutinin__InfluenzaA__AHV83807
augaaggcaauacuaguaguucugcuauacacauuugcaaccgcaaaugcagacacauuauguauagguuaucaugcgaacaauucaacagacacuguagacacaguacuagaaaaggauguaacaguaacacacucuguuaaccuucuagaagacaagcauaacgggaaacuaugcaaacuaagagggguagccccauugcauuuggguaaauguaacauugcuggcuggauccugggaaauccagagugugaaucacucuccacagcaaguucaugguccuacauuguggaaacaucuaguucagacaauggaacguguuacccaggagauuucaucaauuaugaggagcuaagagagcaauugagcucagugucaucauuugaaagauuugagauauuccccaagacaaguucauggcccaaucaugacucgaacaaagguguaacggcagcauguccucacgcuggagcaaaaagcuucuacaaaaauuuaauauggcuaguuaaaaaaggaaauucauacccaaagcucagccaauccuacauuaaugauaaagggaaagaaguccucgugcuguggggcauucaccauccaucuacuacugcugaccaacaaagucucuaucagaaugcagaugcauauguuuuuguggggacaucaagauacagcaagaaguucaagccggaaauagcaauaagacccaaagugagggaucaagaagggagaaugaacuauuacuggacacuaguagagccgggagacaaaauaacauucgaagcaacuggaaaucuagugguaccgagauaugcauucacaauggaaagaaaugcuggaucugguauuaucauuucagacacaccaguccacgauugcaauacaacuugucagacacccgagggugcuauaaacaccagccucccauuucagaauauacauccgaucacaauuggaaaauguccaaaguauguaaaaagcacaaaauugagacuggccacaggauugaggaaugucccaucuauucaaucuagaggccuauucggggccauugccggcuucauugaagggggguggacagggaugguagauggaugguacgguuaucaccaucaaaaugagcaggggucaggauaugcagccgaccugaagagcacacaaaaugccauugacaaaauuacuaacaaaguaaauucuguuauugaaaagaugaauacacaguucacagcaguggguaaagaguucaaccacuuggaaaaaagaauagagaauuuaaauaaaaaaguugaugaugguuuccuggacauuuggacuuacaaugccgaacugcugguucuauuggaaaaugaaagaacuuuggacuaccacgauucaaaugugaagaacuuguaugaaaagguaagaaaccaguuaaaaaacaaugccaaggaaauuggaaacggcugcuuugaauuuuaccacaaaugcgauaacacgugcauggaaagugucaaaaaugggacuuaugacuacccaaaauacucagaggaagcaaaauuaaacagagaaaaaauagaugggguaaagcuggaaucaacaaggauuuaccagauuuuggcgaucuauucaacugucgccaguucauugguacugguagucucccugggggcaaucagcuucuggaugugcucuaaugggucucuacaguguagaauauguauuuaa

SEQ ID NO: 43945 - RNA, 1701 nt, Artificial Sequence
  derived and/or modified CDS sequence (wt) from hemagglutinin__InfluenzaA__AHV83808
augaaggcaauacuaguaguucugcuauauacauuugcaaccgcaaaugcagacacauuauguauagguuaucaugcaaacaauucaacagacacuguagacacaguacuagaaaagaauguaacaguaacacacucuguuaaccuucuagaagacaagcauaacgggaaacuaugcaaacuaagagggguagccccauugcauuuggguaaauguaacauugcuggcuggauccugggaaauccagagugugaaucacucuccacagcaaguucaugguccuacauuguggaaacaucuaguucagacaauggaacguguuacccaggagauuucaucaauuaugaggagcuaagagagcaauugagcucagugucaucauuugaaagguuugagauauuccccaaaacaaguucauggcccaaucaugacucgaacaaagguguaacggcagcauguccucacgcuggagcaaaaagcuucuacaaaaauuuaauauggcuaguuaaaaaaggaaauucauacccaaagcucagccaauccuacauuaaugauaaagggaaagaaguccucgugcuguggggcauucaccauccaucuacuacugcugaccaacaaagucucuaucagaaugcagaagcauauguuuuuguggggacaucaagauacagcaagaaguucaagccggaaauagcaauaagacccaaagugagggaucaagaagggagaaugaacuauuacuggacacuaguagagccgggagacaaaauaacauucgaagcaacuggaaaucuagugguaccgagauaugcauucacaauggaaagaaaugcuggaucugguauuaucauuucagauacaccaguccacgauugcaauacaacuugucagacacccgagggugcuauaaacaccagccucccauuucagaauauacauccgaucacaauuggaaaauguccaaaguauguaaaaagcacaaaauugagacuggccacaggauugaggaaugucccgucuauucaaucuagaggccuauucggggccauugccggcuucauugaagggggguggacagggaugguagauggaugguacgguuaucaccaucaaaaugagcaggggucaggauaugcagccgaccugaagagcacacaaaaugccauugacaagauuacuaacaaaguaaacucuguuauugaaaagaugaauacacaguucacagcaguggguaaagaguucaaccaccuggaaaaaagaauagagaauuuaaauaaaaaaguugaugaugguuuccuggacauuuggacuuacaaugccgaacuguugguucuauuggaaaaugaaagaacuuuggacuaccaugauucaaaugugaagaacuuguaugaaaagguaagaaaccaguuaaaaaacaaugccaaggaaauuggaaacggcugcuuugaauuuuaccacaaaugcgauaacaugugcauggaaagugucaaaaaugggacuuaugacuacccaaaauacucagaggaagcaaaauuaaacagagaaaaaauagaugggguaaagcuggaaucaacaaggauuuaccagauuuuggcgaucuauucaacugucgccaguucauuggugcugguagucucccugggggcaaucagcuucuggaugugcucuaaugggucucuacaguguagaauauguauuuaa

SEQ ID NO: 43946 - RNA, 1701 nt, Artificial Sequence
  derived and/or modified CDS sequence (wt) from hemagglutinin__InfluenzaA__AHV83809
augaaggcaauacuaguaguucugcuauacacauuugcaaccgcaaaugcagacacauuauguauagguuaucaugcgaacaauucaacagacacuguagacacaguacuagaaaagaauguaacaguaacacacucuguuaaccuucuagaagacaagcauaacgggaaacuaugcaaacuaagagggguagccccauugcauuuggguaaauguaacauugcuggcuggauccugggaaauccagagugugaaucacucuccacagcaaguucaugguccuacauuguggaaacaucuaguucagacaauggaacguguuacccaggagauuucaucaauuaugaggagcuaagagagcaauugagcucagugucaucauuugaaagauuugagauauuccccaagacaaguucauggcccaaucaugacucgaacaaagguguaacggcagcauguccucacgcuggagcaaaaagcuucuacaaaaauuuaauauggcuaguuaaaaaaggaaauucauacccaaagcucagccaauccuacauuaaugauaaagggaaagaaguccucgugcuguggggcauucaccauccaucuacuacugcugaccaacaaagucucuaucagaaugcagaugcauauguuuuuguggggacaucaagauacagcaagaaguucaagccggaaauagcaauaagacccaaagugagggaucaagaagggagaaugaacuauuacuggacacuaguagagccgggagacaaaauaacauucgaagcaacuggaaaucuagugguaccgagauaugcauucacaauggaaagaaaugcuggaucugguauuauuauuucagauacaccaguccacgauugcaauacaacuugucagacacccgagggugcuauaaacaccagccucccauuucagaauauacauccgaucacaauuggaaaauguccaaaguauguaaaaagcacaaaauugagacuggccacaggauugaggaaugucccaucuauucaaucuagaggccuauucggggccauugccggcuucauugaagggggguggacagggaugguagauggaugguacgguuaucaccaucaaaaugagcaggggucaggauaugcagccgaccugaagagcacacaaaaugccauugacaaaauuacuaacaaaguaaauucuguuauugaaaagaugaauacacaguucacagcaguggguaaagaguucaaccacuuggaaaaaagaauagagaauuuaaauaaaaaaguugaugaugguuuccuggacauuuggacuuacaaugccgaacugcugguucuauuggaaaaugaaagaacuuuggacuaccacgauucaaaugugaagaacuuguaugaaaagguaagaaaccaguuaaaaaacaaugccaaggaaauuggaaacggcugcuuugaauuuuaccacaaaugcgauaacacgugcauggaaagugucaaaaaugggacuuaugacuacccaaaauacucagaggaagcaaaauuaaacagagaaaaaauagaugggguaaagcuggaaucaacaaggauuuaccagauuuuggcgaucuauucaacugucgccaguucauugguacuaguagucucccugggggcaaucagcuucuggaugugcucuaaugggucucuacaguguagaauauguauuuaa

SEQ ID NO: 43947 - RNA, 1701 nt, Artificial Sequence
  derived and/or modified CDS sequence (wt) from hemagglutinin__InfluenzaA__AHV83810
augaaggcaauacuaguaguucugcuauauacauuugcaaccacaaaugcagacacauuauguauagguuaucaugcgaacaauucaacagacacuguagacacaguacuagaaaagaauguaacaguaacacacucuguuaaccuucuagaagacaagcauaacgggaaacuaugcaaacuaagagggguagccccauugcauuuggguaaauguaacauugcuggcuggauccugggaaauccagagugugaaucacucuccacagcaaguucaugguccuacauuguggaaacaucuaguucagacaauggaacguguuacccaggagauuucaucaauuaugaggagcuaagagagcaauugagcucagugucaucauuugaaagguuugagauauuccccaagacaaguucauggcccaaucaugacucgaacaaagguguaacggcagcauguccucacgcuggagcaaaaagcuucuacaaaaauuuaauauggcuaguuaaaaaaggaaauucauacccaaagcucagccaauccuacauuaaugauaaagggaaagaaguccucgugcuguggggcauucaccauccaucuacuacugcugaccaacaaagucucuaucagaaugcagaugcauauguuuuuguggggacaucaagauacagcaagaaguucaagccggaaauagcaauaagacccaaagugagggaucaagaagggagaaugaacuauuacuggacacuaguagagccgggagacaaaauaacauucgaagcaacuggaaaucuagugguaccgagauaugcauucacaauggaaagaaaugcuggaucugguaucaucauuucagauacaccaguccacgauugcaauacaacuugucagacacccgagggugcuauaaacaccagccucccauuucagaauauacauccgaucacaauuggaaaauguccaaaguauguaaaaagcacaaaauugagacuggccacaggauugaggaaugucccgucuauucaaucuagaggccuauucggggccauugccggcuucauugaagggggguggacagggaugguagauggaugguacgguuaucaccaucaaaaugagcaggggucaggauaugcagccgaccugaagagcacacaaaaugccauugacaagauuacuaacaaaguaaauucuguuauugaaaagaugaauacacaguucacagcaguggguaaagaguucaaccaccuggaaaaaagaauagagaauuuaaauaaaaagguugaugaugguuuccuggacauuuggacuuacaaugccgaacuguugguucuauuggaaaaugaaagaacuuuggacuaccacgauucaaaugugaagaacuuguaugaaaagguaagaaaccaguuaaaaaacaaugcaaaggaaauuggaaacggcugcuuugaauuuuaccacaaaugcgauaacacgugcauggaaagugucaaaaaugggacuuaugacuacccaaaauacucagaggaagcaaaauuaaacagagaaaaaauagaugggguaaagcuggaaucaacaaggauuuaccagauuuuggcgaucuauucaacugucgccaguucauugguacugguagucucccugggggcaaucagcuucuggaugugcucuaaugggucucuacaguguagaauauguauuuaa

SEQ ID NO: 43948 - RNA, 1701 nt, Artificial Sequence
  derived and/or modified CDS sequence (wt) from hemagglutinin__InfluenzaA__AHV83812
augaaggcaauacuaguaguucugcuauauacauuuacaaccgcaaaugcagacacauuauguauagguuaucaugcgaacaauucaacagacacuguagacacaguacuagaaaagaauguaacaguaacacacucuguuaaccuucuagaagacaagcauaacgggaaacuaugcaaacuaagagggguagccccauugcauuuggguaaauguaacauugcuggcuggauccugggaaauccagagugugaaucacucuccacagcaaguucaugguccuacauuguggaaacaucuaguucagacaauggaacguguuacccaggagauuucaucaauuaugaggagcuaagagagcaauugagcucagugucaucauuugaaagguuugagauauuucccaagacaaguucauggcccaaucaugacucgaacaaagguguaacggcagcauguccucacgcuggagcaaaaagcuucuacaaaaauuuaauauggcuaguuaaaaaagggaauucauacccaaagcucagccaauccuacauuaaugauaaagggaaagaaguccucgugcuguggggcauucaccauccaucuacuacugcugaccaacaaagucucuaucagaaugcagaugcauauguuuuuguggggacaucaagauacagcaagaaguucaagccggaaauagcaauaagacccaaagugagggaucaagaagggagaaugaacuauuacuggacacuaguagagccgggagacaaaauaacauucgaagcaacuggaaaucuagugguaccgagauaugcauucacaauggaaagaaaugcuggaucugguauuauuauuucagauacaccaguccacgauugcaauacaacuugucagacacccgagggugcuauaaacaccagccucccauuucagaauauacauccgaucacaauuggaaaauguccaaaguauguaaaaagcacaaaauugagacuggccacaggauugaggaaugucccgucuauucaaucuagaggccuauucggggccauugccggcuucauugaagggggguggacagggaugguagauggaugguacgguuaucaccaucaaaaugagcaggggucaggauaugcagccgaccugaagagcacacaaaaugccauugacaagauuacuaacaaaguaaauucuguuauugaaaagaugaauacacaguucacagcaguggguaaagaguucaaccaccuggaaaaaagaauagagaauuuaaauaaaaaaguugaugaugguuuccuggacauuuggacuuacaaugccgaacuguugguucuauuggaaaaugaaagaacuuuggacuaccacgauucaaaugugaagaacuuguaugaaaagguaagaaaccaguuaaaaaacaaugccaaggaaauuggaaacggcugcuuugaauuuuaccacaaaugcgauaacacgugcauggaaagugucaaaaaugggacuuaugaauacccaaaauacucagaggaagcaaaauuaaacagagaaaaaauagaugguguaaagcuggaaucaacaaagauuuaccagauuuuggcgaucuauucaacugucgccaguucauugguacugguagucucccugggggcaaucagcuucuggaugugcucuaaugggucucuacaguguagaauauguauuuaa

SEQ ID NO: 43949 - RNA, 1701 nt, Artificial Sequence
  derived and/or modified CDS sequence (wt) from hemagglutinin__InfluenzaA__AHV83813
augaaggcaauacuaguaguucugcuauauacauuugcaaccgcaaaugcagacacauuauguauagguuaucaugcgaacaauucaacagacacuguagacacaguacuagaaaagaauguaacaguaacacacucuguuaaccuucuagaagacaagcauaacgggaaacuaugcaaacuaagagggguagccccauugcauuuggguaaauguaacauugcuggcuggauccugggaaauccagagugugaaucacucuccacagcaaguucaugguccuacauuguggaaacaucuaguucagacaauggaacguguuacccaggagauuucaucaauuaugaggagcuaagagagcaauugagcucagugucaucauuugaaagguuugagauauuccccaagacaaguucauggcccaaucaugacucgaacaaagguguaacggcagcauguccucacgcuggagcaaaaagcuucuacaaaaauuuaauauggcuaguuaaaaaaggaaauucauacccaaagcucagccaauccuacauuaaugauaaagggaaagaaguccucgugcuguggggcauucaccacccaucuacuacugcugaccaacaaagucucuaucagaaugcagaugcauauguuuuuguggggacaucaagauacagcaagaaguucaagccggaaauagcaauaagacccaaagugagggaucaagaagggagaaugaacuauuacuggacacuaguagagccgggagacaaaauaacauucgaagcaacuggaaaucuagugguaccgagauaugcauucacaauggaaagaaaugcuggaucugguauuaucauuucagauacaccaguccacgauugcaauacaacuugucagacaccagagggugcuauaaacaccagccucccauuucagaauauacauccgaucacaauuggaaaauguccaaaguauguaaaaagcacaaaauugagacuggccacaggauugaggaaugucccgucuauucaaucuagaggccuauucggggccauugccggcuucauugaaggaggguggacagggaugguagauggaugguacgguuaucaccaucaaaacgagcaggggucaggauaugcagccgaccugaagagcacacaaaaugccauugacaagauuacuaacaaaguaaauucuguuauugaaaagaugaauacacaguucacagcaguggguaaagaguucaaccaccuggaaaaaagaauagagaauuuaaauaaaaaaguugaugaugguuuccuggacauuuggacuuacaaugccgaacuguugguucuauuggaaaaugaaagaacuuuggacuaccacgauucaaaugugaagaacuuguaugaaaagguaagaaaccaguuaaaaaacaaugccaaggaaauuggaaacggcugcuuugaauuuuaccacaaaugcgauaacacgugcauggaaagugucaaaaaugggacuuaugacuacccgaaauacucagaggaagcaaaauuaaacagagaaaaaauagaugggguaaagcuggaaucaacaaggauuuaccagauuuuggcgaucuauucaacugucgccaguucauugguacugguagucucccugggggcaaucagcuucuggaugugcucuaaugggucucuacaguguagaauauguauuuaa

SEQ ID NO: 43950 - RNA, 1701 nt, Artificial Sequence
  derived and/or modified CDS sequence (wt) from hemagglutinin__InfluenzaA__AHV83814
augaaggcaauacuaguaguucugcuauauacauuugcaaccgcaaaugcagacacauuauguauagguuaucaugcgaacaauucaacagacacuguagacacaguacuagaaaagaauguaacaguaacacacucuguuaaccuucuagaagacaagcauaacgggaaacuaugcaaacuaagagggguagccccauugcauuuggguaaauguaacauugcuggcuggauccugggaaauccagagugugaaucacucuccacagcaaguucaugguccuacauuguggaaacaucuaguucagacaauggaacguguuacccaggagauuucaucaauuaugaggagcuaagagagcaauugagcucagugucaucauuugaaagguuugagauauuccccaagacaaguucauggcccaaucaugacucgaacaaagguguaacggcagcauguccucacgcuggagcaaaaagcuucuacaaaaauuuaauauggcuaguuaaaaaaggaaauucauacccaaagcucagccaauccuacauuaaugauaaagggaaagaaguccucgugcuguggggcauucaccacccaucuacuacugcugaccaacaaagucucuaucagaaugcagaugcauauguuuuuguggggacaucaagauacagcaagaaguucaagccggaaauagcaauaagacccaaagugagggaucaagaagggagaaugaacuauuacuggacacuaguagagccgggagacaaaauaacauucgaagcaacuggaaaucuagugguaccgagauaugcauucacaauggaaagaaaugcuggaucugguauuaucauuucagauacaccaguccacgauugcaauacaacuugucagacacccgagggugcuauaaacaccagccucccauuucagaauauacauccgaucacaauuggaaaauguccaaaguauguaaaaagcacaaaauugagacuggccacaggauugaggaaugucccgucuauucaaucuagaggccuauucggggccauugccggcuucauugaaggaggguggacagggaugguagauggaugguacgguuaucaccaucaaaaugagcaggggucaggauaugcagccgaccugaagagcacacaaaaugccauugacaagauuacuaacaaaguaaauucuguuauugaaaagaugaauacacaguucacagcaguggguaaagaguucaaccaccuggaaaaaagaauagagaauuuaaauaaaaaaguugaugaugguuuccuggacauuuggacuuacaaugccgaacuguugguucuauuggaaaaugaaagaaauuuggacuaccacgauucaaaugugaagaacuuguaugaaaagguaagaaaccaguuaaaaaccaaugccaaggaaauuggaaacggcugcuuugaauuuuaccacaaaugcgauaacacgugcauggaaagugucaaaaaugggacuuaugacuacccaaaauacucagaggaagcaaaauuaaacagagaaaaaauagaugggguaaagcuggaaucaacaaggauuuaccagauuuuggcgaucuauucaacugucgccaguucauugguacugguagucucccugggggcaaucagcuucuggaugugcucuaaugggucucuacaguguagaauauguauuuaa

SEQ ID NO: 43951 - RNA, 1701 nt, Artificial Sequence
  derived and/or modified CDS sequence (wt) from hemagglutinin__InfluenzaA__AHV83815
augaaggcaauacuaguaguucugcuauauacauuugcaaccacaaaugcagacacauuauguauagguuaucaugcgaacaauucaacagacacuguagacacaguacuagaaaagaauguaacaguaacacacucuguuaaccuucuagaagacaagcauaacgggaaacuaugcaaacuaagagggguagccccauugcauuuggguaaauguaacauugcuggcuggauccugggaaauccagagugugaaucacucuccacagcaaguucaugguccuacauuguggaaacaucuaguucagacaauggaacguguuacccaggagauuucaucaauuaugaggagcuaagagagcaauugagcucagugucaucauuugaaagguuugagauauuccccaagacaaguucauggcccaaucaugacucgaacaaagguguaacggcagcauguccucacgcuggagcaaaaagcuucuacaaaaauuuaauauggcuaguuaaaaaaggaaauucauacccaaagcucagccaauccuacauuaaugauaaagggaaagaaguccucgugcuguggggcauucaccauccaucuacuacugcugaccaacaaagucucuaucagaaugcagaugcauauguuuuuguggggacaucaagauacagcaagaaguucaagccggaaauagcaauaagacccaaagugagggaucaagaagggagaaugaacuauuacuggacacuaguagagccgggagacaaaauaacauucgaagcaacuggaaaucuagugguaccgagauaugcauucacaauggaaagaaaugcuggaucugguauuaucauuucagauacaccaguccacgauugcaauacaacuugucagacacccgagggugcuauaaacaccagccucccauuucagaauauacauccgaucacaauuggaaaauguccaaaguauguaaaaagcacaaaauugagacuggccacaggauugaggaaugucccgucuauucaaucuagaggccuauucggggccauugccggcuucauugaagggggguggacagggaugguagauggaugguacgguuaucaccaucaaaaugagcaggggucaggauaugcagccgaccugaagagcacacaaaaugccauugacaagauuacuaacaaaguaaauucuguuauugaaaagaugaauacacaguucacagcaguggguaaagaguucaaccaccuggaaaaaagaauagagaauuuaaauaaaaaaguugaugaugguuuccuggacauuuggacuuacaaugccgaacuguugguucuauuggaaaaugaaagaacuuuggacuaccacgauucaaaugugaagaacuuguaugaaaagguaagaaaccaguuaaaaaacaaugcaaaggaaauuggaaacggcugcuuugaauuuuaccacaaaugcgauaacacgugcauggaaagugucaaaaaugggacuuaugacuacccaaaauacucagaggaagcaaaauuaaacagagaaaaaauagaugggguaaagcuggaaucaacaaggauuuaccaaauuuuggcgaucuauucaacugucgccaguucauugguacugguagucucccugggggcaaucagcuucuggaugugcucuaaugggucucuacaguguagaauauguauuuaa

SEQ ID NO: 43952 - RNA, 1701 nt, Artificial Sequence
  derived and/or modified CDS sequence (wt) from hemagglutinin__InfluenzaA__AHV83816
augaaggcaauacuaguaguucugcuauauacauuugcaaccgcaaaugcagacacauuauguauagguuaucaugcgaacaauucaacagacacuguagacacaguacuagaaaagaauguaacaguaacacacucuguuaaccuucuagaagacaagcauaacgggaaacuaugcaaacuaagagggguagccccauugcauuuggguaaauguaacauugcuggcuggauccugggaaauccagagugugaaucacucuccacagcaaguucaugguccuacauuguggaaacaucuaguucagacaauggaacguguuacccaggagauuucaucaauuaugaggagcuaagagagcaauugagcucagugucaucauuugaaagguuugagauauuccccaagacaaguucauggcccaaucaugacucgaacaaagguguaacggcagcauguccucacgcuggagcaaaaagcuucuacaaaaauuuaauauggcuaguuaaaaaaggaaauucauacccaaagcucagccaauccuacauuaaugauaaagggaaagaaguccucgugcuguggggcauucaccacccaucuacuacugcugaccaacaaagucucuaucagaaugcagaugcauauguuuuuguggggacaucaagauacagcaagaaguucaagccggaaauagcaauaagacccaaagugagggaucaagaagggagaaugaacuauuacuggacacuaguagagccgggagacaaaauaacauucgaagcaacuggaaaucuaguaguaccgagauaugcauucacaauggaaagaaaugcuggaucugguauuaucauuucagauacaccaguccacgauugcaauacaacuugucagacacccgagggugcuauaaacaccagccucccauuucagaauauacauccgaucacaauuggaaaauguccaaaguauguaaaaagcacaaaauugagacuggccacaggauugaggaaugucccgucuauucaaucuagaggccuauucggggccauugccggcuucauugaaggaggguggacagggaugguagauggaugguacgguuaucaccaucaaaaugagcaggggucaggauaugcagccgaccugaagagcacacaaaaugccauugacaagauuacuaacaaaguaaauucuguuauugaaaagaugaauacacaguucacagcaguggguaaagaguucaaccaccuggaaaaaagaauagagaauuuaaauaaaaaaguugaugaugguuuccuggacauuuggacuuacaaugccgaacuguugguucuauuggaaaaugaaagaacuuuggacuaccacgauucaaaugugaaaaacuuguaugaaaagguaagaaaccaguuaaaaaacaaugccaaggaaauuggaaacggcugcuuugaauuuuaccacaaaugcgauaacacgugcauggaaagugucaaaaaugggacuuaugacuacccaaaauacucagaggaagcaaaauuaaacagagaaaaaauagaugggguaaagcuggaaucaacaaggauuuaccagauuuuggcgaucuauucaacugucgccaguucauugguacugguagucucccugggggcaaucagcuucuggaugugcucuaaugggucucuacaguguagaauauguauuuaa

SEQ ID NO: 43953 - RNA, 1701 nt, Artificial Sequence
  derived and/or modified CDS sequence (wt) from hemagglutinin__InfluenzaA__AHV83817
augaaggcaauacuaguaguucugcuauauacauuugcaaccgcaaaugcagacacauuauguauagguuaucaugcgaacaauucaacagacacuguagacacaguacuagaaaagaauguaacaguaacacacucuguuaaccuucuagaagacaagcauaacgggaaacuaugcaaacuaagagggguagccccauugcauuuggguaaauguaacauugcuggcuggauccugggaaauccagagugugaaucacucuccacagcaaguucaugguccuacauuguggaaacaucuaguucagacaauggaacguguuacccaggagauuucaucaauuaugaggagcuaagagagcaauugagcucagugucaucauuugaaagguuugagauauuccccaagacaaguucauggcccaaucaugacucgaacaaagguguaacggcagcauguccucacgcuggagcaaaaagcuucuacaaaaauuuaguauggcuaguuaaaaaaggaaauucauacccaaagcucagccaauccuacauuaaugauaaagggaaagaaguccucgugcuguggggcauucaccacccaucuacuacugcugaccaacaaagucucuaucagaaugcagaugcauauguuuuuguggggacaucaagauacagcaagaaguucaagccggaaauagcaauaagacccaaagugagggaucaagaagggagaaugaacuauuacuggacacuaguagagccaggagacaaaauaacauucgaagcaacuggaaaucuagugguaccgagauaugcauucacaauggaaagaaaugcuggaucugguauuaucauuucagauacaccaguccacgauugcaauacaacuugucagacacccgagggugcuauaaacaccagccucccauuucagaauauacauccgaucacaauuggaaaauguccaaaguauguaaaaagcacaaaauugagacuggccacaggauugaggaaugucccgucuauucaaucuagaggccuauucggggccauugccggcuucauugaaggaggguggacagggaugguagauggaugguacgguuaucaccaucaaaaugagcaggggucaggauaugcagccgaccugaagagcacacaaaaugccauugacaagauuacuaacaaaguaaauucuguuauugaaaagaugaauacacaguucacagcaguggguaaagaguucaaccaccuggaaaaaagaauagagaauuuaaauaaaaaaguugaugaugguuuccuggacauuuggacuuacaaugccgaacuguugguucuauuggaaaaugaaagaacuuuggacuaccacgauucaaaugugaagaacuuguaugaaaagguaagaaaccaguuaaaaaacaaugccaaggaaauuggaaacggcugcuuugaauuuuaccacaaaugcgauaacacgugcauggaaagugucaaaaaugggacuuaugacuacccaaaauacucagaggaagcaaaauuaaacagagaaaaaauagaugggguaaagcuggaaucaacaaggauuuaccagauuuuggcgaucuauucaacugucgccaguucauugguacugguagucucccugggggcaaucagcuucuggaugugcucuaaugggucucuacaguguagaauauguauuuaa

SEQ ID NO: 43954 - RNA, 1701 nt, Artificial Sequence
  derived and/or modified CDS sequence (wt) from hemagglutinin__InfluenzaA__AHV83818
augaaggcaauacuaguaguucugcuauauacauuugcaaccgcaaaugcagacacauuauguauagguuaucaugcgaacaauucaacagacacuguagacacaguacuagaaaagaauguaacaguaacacacucuguuaaccuucuagaagacaagcauaacgggaaacuaugcaaacuaagagggguagccccauugcauuuggguaaauguaacauugcuggcuggauccugggaaauccagagugugaaucacucuccacagcaaguucaugguccuacauuguggaaacaucuaguucagacaauggaacguguuacccaggagauuucaucaauuaugaggagcuaagagagcaauugagcucagugucaucauuugaaagguuugagauauuccccaagacaaguucauggcccaaucaugacucgaacaaagguguaacggcagcauguccucacgcuggagcaaaaagcuucuacaaaaauuuaauauggcuaguuaaaaaaggaaauucauacccaaagcucagccaauccuacauuaaugauaaagggaaagaaguccucgugcuguggggcauucaccauccaucuacuacugcugaccaacaaagucucuaucagaaugcagaugcauauguuuuuguggggacaucaagauacagcaagaaguucaagccggaaauagcaauaagacccaaagugagggaucaagaagggagaaugaacuauuacuggacacuaguagagccgggagacaaaauaacauucgaagcaacuggaaaucuagugguaccgagauaugcauucacaauggaaagaaaugcuggaucugguauuaucauuucagauacaccaguccacgauugcaauacaacuugucagacacccgagggugcuauaaacaccagccucccauuucagaauauacauccgaucacaauuggaaaauguccaaaguauguaaaaagcacaaaauugagacuggccacaggauugaggaaugucccgucuauucaaucuagaggccuauucggggccauugccggcuucauugaagggggguggacagggaugguagauggaugguacgguuaccaccaucaaaaugagcaggggucaggauaugcagccgaccagaagagcacacaaaaugccauugacaagauuacuaacaaaguaaauucuguuauugaaaagaugaauacacaguucacagcaguggguaaagaguucaaccaccuggaaaaaagaauagagaauuuaaauaaaaaaguugaugaugguuuccuggacauuuggacuuacaaugccgaacuguugguucuauuggaaaaugaaagaacuuuggacuaccacgauucaaaugugaagaacuuguaugaaaagguaagaaaccaguuaaaaaacaaugccaaggaaauuggaaauggcugcuuugaauuuuaccacaaaugcgauaacacgugcauggaaagugucaaaaaugggacuuaugacuacccaaaauacucagaggaagcaaaauuaaacagagaaaaaauagaugggguaaagcuggaaucaacaaggauuuaccagauuuuggcgaucuauucaacugucgccaguucauugguacugguagucucccugggggcaaucagcuucuggaugugcucuaaugggucucuacaguguagaauauguauuuaa

SEQ ID NO: 43955 - RNA, 1701 nt, Artificial Sequence
  derived and/or modified CDS sequence (wt) from hemagglutinin__InfluenzaA__AHV83819
augaaggcaauacuaguaguucugcuauauacauuugcaaccgcaaaugcagacacuuuauguauagguuaucaugcgaacaauucaacagacacuguagacacaguacuagaaaagaauguaacaguaacacacucuguuaaccuucuagaagacaagcauaacgguaaacuaugcaaacuaagagggguagccccauugcauuuggguaaauguaacauugcuggcuggauccugggaaauccagagugugaaucacucuccacagcaaguucaugguccuacauuguggaaacaucuaguucagacaauggaacguguuacccaggagauuucaucaauuaugaggagcuaagagagcaauugagcucagugucaucauuugaaagguuugagauauuccccaagacaaguucauggcccaaucaugacucgaacaaagguguaacggcagcauguccucacgcuggagcaaaaagcuucuacaaaaauuuaauauggcuaguuaaaaaaggaaauucauacccaaagcucagucaauccuacauuaaugauaaagggaaagaaguccucgugcuguggggcauucaccauccaucuacuacugcugaccaacaaagucucuaucagaaugcagaugcauauguuuuuguggggacaucaagauacagcaagaaguucaagccggaaauagcaauaagacccaaagugagggaucaagaagggagaaugaacuauuacuggacacuaguagagccgggagacaaaauaacauucgaagcaacuggaaaucuagugguaccgagauaugcauucacaauggaaagaaaugcuggaucugguauuaucauuucagauacaccaguccacgauugcaauacaacuugucagacacccgagggugcuauaaacaccagccucccauuucagaauauacauccgaucacaauuggaaaauguccaaaguaugugaaaagcacaaaauugagacuggcaacaggauugaggaauaucccgucuauucaaucuagaggccuauucggggccauugccggcuucauugaagggggguggacagggaugguagauggaugguacgguuaucaccaucaaaaugagcaggggucaggauaugcagccgaccugaagagcacacaaaaugccauugacaagauuacuaacaaaguaaacucuguuauugaaaagaugaauacacaguucacagcaguggguaaagaguucaaccaccuggaaaaaagaauagagaauuuaaauaaaaaaguugaugaugguuuccuggacauuuggacuuacaaugccgaacuguugguucuauuggaaaaugaaagaacuuuggacuaccacgauucaaaugugaagaacuuguaugaaaagguaagaaaccaguuaaaaaacaaugccaaggaaauuggaaacggcugcuuugaauuuuaccacaaaugcgauaacacgugcauggaaagugucaaaaaugggacuuaugacuacccaaaauacucagaggaagcaaaauuaaacagagaaaaaauagaugggguaaagcuggaaucaacaaggauuuaccagauuuuggcgaucuauucaacugucgccaguucauugguacugguagucucccugggggcaaucagcuucuggaugugcucuaaugggucucuacaguguagaauauguauuuaa

SEQ ID NO: 43956 - RNA, 1701 nt, Artificial Sequence
  derived and/or modified CDS sequence (wt) from hemagglutinin__InfluenzaA__AHV83821
augaaggcaauacuaguaguucugcuauauacauuugcaaccgcaaaugcagacacauuauguauagguuaucaugcgaacaauucaacagacacuguagacacaguacuagaaaagaauguaacaguaacacacucuguuaaccuucuagaagacaagcauaacgggaaacuaugcaaacuaagagggguauccccauugcauuuggguaaauguaacauugcuggcuggauccugggaaauccagagugugaaucacucuccacagcaaguucaugguccuacauuguggaaacaucuaguucagacaauggaacguguuacccaggagauuucgucaauuaugaggagcuaagagagcaauugagcucagugucaucauuugaaagguuugagauauuccccaagacaaguucauggcccaaucaugacucgaacaaagguguaacggcagcauguccucacgcuggagcaaaaagcuucuacaaaaauuuaauauggcuaguuaaaaaaggaaauucauacccaaagcucagccaauccuacauuaaugauaaagggaaagaaguccucgugcuguggggcauucaccacccaucuacuacugcugaccaacaaagucucuaucagaaugcagaugcauauguuuuuguggggacaucaagauacagcaagaaguucaagccggaaauagcaauaagacccaaagugagggaucaagaagggagaaugaacuauuacuggacacuaguagagccgggagacaaaauaacauucgaagcaacuggaaaucuagugguaccgagauaugcauucacaauggaaagaaaugcuggaucugguauuaucauuucagauacaccaguccacaauugcaauacaacuugucagacacccgagggugcuauaaacaccagccucccauuucagaauauacauccgaucacaauuggaaaauguccaaaguauguaaaaagcacaaaauugagacuggccacaggauugaggaaugucccgucuauucaaucuagaggccuauucggggccauugccggcuucauugaagggggguggacagggaugguagauggaugguacgguuaucaccaucaaaaugagcaggggucaggauaugcagccgaccugaagagcacacaaaaugccauugacaagauuacuaacaaaguaaauucuguuauugaaaagaugaauacacaguucacagcaguggguaaagaguucaaccaccuggaaaaaagaauagagaauuuaaauaaaaaaguugaugaugguuuccuggacauuuggacuuacaaugccgaacuguugguucuauuggaaaaugaaagaacuuuggacuaucacgauucaaaugugaagaacuuguaugaaaagguaagaaaccaguuaaaaaacaaugccaaggaaauuggaaacggcugcuuugaauuuuaccacaaaugcgauaacacgugcauggaaagugucaaaaaugggacuuaugacuacccaaaauacucagaggaagcaaaauuaaacagagaaaaaauagaugggguaaagcuggaaucaacaaggauuuaccagauuuuggcgaucuauucaacugucgccaguucauugguacugguagucucccugggggcaaucagcuucuggaugugcucuaaugggucucuacaguguagaauauguauuuaa

SEQ ID NO: 43957 - RNA, 1701 nt, Artificial Sequence
  derived and/or modified CDS sequence (wt) from hemagglutinin__InfluenzaA__AHV83822
augaaggcaauacuaguaguucugcuauauacauuugcaaccgcaaaugcagacacauuauguauagguuaucaugcgaacaauucaacagacacuguagacacaguacuagaaaagaauguaacaguaacacacucuguuaaccuucuagaagacaagcauaacgggaaacuaugcaaacuaagagggguauccccauugcauuuggguaaauguaacauugcuggcuggauccugggaaauccagagugugaaucacucuccacagcaaguucaugguccuacauuguggaaacaucuaguucagacaauggaacguguuacccaggagauuucgucaauuaugaggagcuaagagagcaauugagcucagugucaucauuugaaagguuugagauauuccccaagacaaguucauggcccaaucaugacucgaacaaagguguaacggcagcauguccucacgcuggagcaaaaagcuucuacaaaaauuuaauauggcuaguuaaaaaaggaaauucauacccaaagcucagccaauccuacauuaaugauaaagggaaagaaguccucgugcuguggggcauucaccacccaucuacuacugcugaccaacaaagucucuaucagaaugcagaugcauauguuuuuguggggacaucaagauacagcaagaaguucaagccggaaauagcaauaagacccaaagugagggaucaagaagggagaaugaacuauuacuggacacuaguagagccgggagacaaaauaacauucgaagcaacuggaaaucuagugguaccgagauaugcauucacaauggaaagaaaugcuggaucugguauuaucauuucagauacaccaguccacgauugcaauacaacuugucagacacccgagggugcuauaaacaccagccucccauuucagaauauacauccgaucacaauuggaaaauguccaaaguauguaaaaagcacaaaauugagacuggccacaggauugaggaaugucccgucuauucaaucuagaggccuauucggggccauugccggcuucauugaagggggguggacagggaugguagauggaugguacgguuaucaccaucaaaaugagcaggggucaggauaugcugccgaccugaagagcacacaaaaugccauugacaagauuacuaacaaaguaaauucuauuauugaaaagaugaauacacaguucacagcaguggguaaagaguucaaccaccuggaaaaaagaauagagaauuuaaauaaaaaaguugaugaugguuuccuggacauuuggacuuacaaugccgaacuguugguucuauuggaaaaugaaagaacuuuggacuaucacgauucaaaugugaagaacuuguaugaaaagguaagaaaccaguuaaaaaacaaugccaaggaaauuggaaacggcugcuuugaauuuuaccacaaaugcgauaacacgugcauggaaagugucaaaaaugggacuuaugacuacccaaaauacucagaggaagcaaaauuaaacagagaaaaaauagaugggguaaagcuggaaucaacaaggauuuaccagauuuuggcgaucuauucaacugucgccaguucauugguacugguagucucccugggggcaaucagcuucuggaugugcucuaaugggucucuacaguguagaauauguauuuaa

SEQ ID NO: 43958 - RNA, 1701 nt, Artificial Sequence
  derived and/or modified CDS sequence (wt) from hemagglutinin__InfluenzaA__AHV83823
augaaggcaauacuaguaguucugcuauauacauuugcaaccgcaaaugcagacacauuauguauagguuaucaugcgaacaauucaacagacacuguagacacaguacuagaaaagaauguaacaguaacacacucuguuaaccuucuagaagacaagcauaacgggaaacuaugcaaacuaagagggguagccccauugcauuuggguaaauguaacauugcuggcuggauccugggaaauccagagugugaaucacucuccacagcaaguucaugguccuacauuguggaaacaucuaguucagacaauggaacguguuacccaggagauuucaucaauuaugaggagcuaagagagcaauugagcucagugucaucauuugaaagguuugagauauuccccaagacaaguucauggcccaaucaugacucgaacaaagguguaacggcagcauguccucacgcuggagcaaaaagcuucuacaaaaauuuaauauggcuaguuaaaaaaggaaauucauacccaaagaucagccaauccuacauuaaugauaaagggaaagaaguccucgugcuguggggcauucaccacccaucuacuacugcugaccaacaaagucucuaucagaaugcagaugcauauguuuuuguggggacaucaagauacagcaagaaguucaagccggaaauagcaauaagacccaaagugagggaucaagaagggagaaugaacuacuacuggacacuaguagagccgggagacaaaauaacauucgaagcaacuggaaaucuagugguaccgagauaugcauucacaauggaaagaaauacuggaucugguauuaucauuucagauacaccaguccacgauugcaauacaacuugucagacacccgagggugcuauaaacaccagccucccauuucagaauauacauccgaucacaauuggaaaauguccaaaguauguaaaaagcacaaaauugagacuggccacaggauugaggaaugucccgucuauucaaucuagaggccuauucggggccauugccggcuucauugaagggggguggacagggaugguagauggaugguacgguuaucaccaucaaaaugagcaggggucaggauaugcagccgaccugaagagcacacaaaaugccauugacaagauuacuaacaaaguaaauucuguuauugaaaagaugaauacacaguucacagcaguagguaaagaguucaaccaccuggaaaaaagaauagagaauuuaaauaaaaaaguugaugaugguuuccuggacauuuggacuuacaaugccgaacuguugguucuauuggaaaaugaaagaacuuuggacuaccacgauucaaaugugaagaacuuguaugaaaagguaagaaaccaguuaaaaaacaaugccaaggaaauuggaaacggcugcuuugaauuuuaccacaaaugcgauaacacgugcauggaaagugucaaaaaugggacuuaugacuacccaaaauacucagaggaggcaaaauuaaacagagaaaaaauagaugggguaaaacuggaaucaacaaggauuuaccagauuuuggcgaucuauucaacugucgccaguucauugguacugguagucucccugggggcaaucagcuucuggaugugcucuaaugggucucuacaguguagaauauguauuuaa

SEQ ID NO: 43959 - RNA, 1701 nt, Artificial Sequence
  derived and/or modified CDS sequence (wt) from hemagglutinin__InfluenzaA__AHV83824
augaaggcaauacuaguaguucugcuauauacauuugcaaccgcaaaugcagacacauuauguauagguuaucaugcgaacaauucaacagacacuguagacacaguacuagaaaagaauguaacaguaacacacucuguuaaccuucuagaagacaagcauaacgggaaacuaugcaaacuaagagggguagccccauugcauuuggguaaauguaacauugcuggcuggauccugggaaauccagagugugaaucacucuccacagcaaguucaugguccuacauuguggaaacaucuaguucagacaauggaacguguuacccaggagauuucaucaauuaugaggagcuaagagagcaauugagcucagugucaucauuugaaagguuugagauauuccccaagacaaguucauggcccaaucaugacucgaacaaagguguaacggcagcauguccucacgcuggagcaaaaagcuucuacaaaaauuuaauauggcuaguuaaaaaaggaaauucauacccaaagcuccgccaauccuacauuaaugauaaagggaaagaaguccucgugcuguggggcauucaccacccaucuacuacuacugaccaacaaagucucuaucagaaugcagaugcauauguuuuuguggggacaucaagauacagcaagaaguucaagccggaaauagcaauaagacccaaagugagagaucaagaagggagaaugaacuauuacuggacacuaguagagccgggagacaaaauaacauucgaagcaacuggaaaucuagugguaccgagauaugcauucacaauggaaagaaaugcuggaucugguauuaucauuucagauacaccaguccacgauugcaauacaacuugucagacacccgagggugcuauaaacaccagccucccauuucagaauauacauccgaucacaauuggaaaauguccaaaguauguaaaaagcacaaaauugagacuggccacaggauugaggaaugucccgucuauucaaucuagaggccuauucggggccauugccggcuucauugaaggaggguggacagggaugguagauggaugguacgguuaucaccaucaaaaugagcaggggucaggauaugcagccgaccugaagagcacacaaaaugccauugacaagauuacuaacaaaguaaauucuguuauugaaaagaugaauacacaguucacagcaguggguaaagaguucaaccaccuggaaaaaagaauagagaauuuaaauaaaaaaguugaugaugguuuccuggacauuuggacuuacaaugccgaacuguugguucuauuggaaaaugaaagaaauuuggacuaccacgauucaaaugugaagaacuuguaugaaaagguaagaaaccaguuaaaaaacaaugccaaggaaauuggaaacggcugcuuugaauuuuaccacaaaugcgauaacacgugcauggaaagugucaaaaaugggacuuaugacuacccaaaauacucagaggaagcaaaauuaaacagagaaaaaauagaugggguaaagcuggaaucaacaaggauuuaccagauuuuggcgaucuauucaacugucgccaguucauugguacugguagucucccugggggcaaucagcuucuggaugugcucuaaugggucucuacaguguagaauauguauuuaa

SEQ ID NO: 43960 - RNA, 1701 nt, Artificial Sequence
  derived and/or modified CDS sequence (wt) from hemagglutinin__InfluenzaA__AHV83825
augaaggcaauacuaguaguucugcuauauacauuugcaaccgcaaaugcagacacauuauguauagguuaucaugcgaacaauucaacagacacuguagacacaguacuagaaaagaauguaacaguaacacacucuguuaaccuucuagaagacaagcauaacgggaaacuaugcaaacuaagagggguagccccauugcauuuggguaaauguaacauugcuggcuggauccugggaaauccagagugugaaucacucuccacagcaaguucaugguccuacauuguggaaacaucuaguucagacaauggaacguguuacccaggagauuucaucaauuaugaggagcuaagagagcaauugagcucagugucaucauuugaaagguuugagauauuccccaagacaaguucauggcccaaucaugacucgaacaaagguguaacggcagcauguccucacgcuggagcaaaaagcuucuacaaaaauuuaauauggcuaguuaaaaaaggaaauucauacccaaagcucagccaauccuacauuaaugauaaagggaaagaaguccucgugcuguggggcauucaccauccaucuacuacugcugaccaacaaagucucuaucagaaugcagaugcauauguuuuuguggggacaucaagauacagcaagaaguucaagccggaaauagcaauaagacccaaagugagggaucaagaagggagaaugaacuauuacuggacacuaguagagccgggagacaaaauaacauucgaagcaacuggaaaucuagugguaccgagauaugcauucacaauggaaagaaaugcuggaucugguauuaucauuucagauacaccaguccacgauugcaauacaacuugucagacacccgagggugcuauaaacaccagccucccauuucagaauauacauccgaucacaauuggaaaauguccaaaguauguaaaaagcacaaaauugagacuggccacaggauugaggaaugucccgucuauucaaucuagaggccuauucggggccauugccggcuucauugaagggggguggacagggaugguagauggaugguacgguuaucaccaucaaaaugagcaggggucaggauaugcagccgaccagaagagcacacaaaaugccauugacaagauuacuaacaaaguaaauucuguuauugaaaagaugaauacacaguucacagcaguggguaaagaguucaaccaccuggaaaaaagaauagagaauuuaaauaaaaaaguugaugaugguuuccuggacauuuggacuuacaaugccgaacuguugguucuauuggaaaaugaaagaacuuuggacuaccacgauucaaaugugaagaacuuguaugaaaagguaagaaaccaguuaaaaaacaaugccaaggaaauuggaaacggcugcuuugaauuuuaccacaaaugcgauaacacgugcauggaaagugucaaaaaugggacuuaugacuacccaaaauacucagaggaagcaaaauuaaacagagaaaaaauagaugggguaaagcuggaaucaacaaggauuuaccagauuuuggcgaucuauucaacugucgccaguucauugguacugguagucucccugggggcaaucagcuucuggaugugcucuaaugggucucuacaguguagaauauguauuuaa

SEQ ID NO: 43961 - RNA, 1701 nt, Artificial Sequence
  derived and/or modified CDS sequence (wt) from hemagglutinin__InfluenzaA__AHV83826
augaaggcaauacuaguaguucugcuauauacauuugcaaccgcaaaugcagacacauuauguauagguuaucaugcgaacaauucaacagacacuguagacacaguacuagaaaagaauguaacaguaacacacucuguuaaccuucuagaagacaagcauaacgggaaacuaugcaaacuaagagggguagccccauugcauuuggguaaauguaacauugcuggcuggauccugggaaauccagagugugaaucacucuccacagcaaguucaugguccuacauuguggaaacaucuaguucagacaauggaacguguuacccaggagauuucaucaauuaugaggagcuaagagagcaauugagcucagugucaucauuugaaagguuugagauauuccccaagacaaguucauggcccaaucaugacucgaacaaagguguaacggcagcauguccucacgcuggagcaaaaagcuucuacaaaaauuuaauauggcuaguuaaaaaaggaaauucauacccaaagcucagccaauccuacuuuaaugauaaagggaaagaaguccucgugcuguggggcauucaccacccaucuacuacugcugaccaacaaagucucuaucagaaugcagaugcauauguuuuuguggggacaucaagauacagcaagaaguucaagccggaaauagcaauaagacccaaagugagggaucaagaagggagaaugaacuauuacuggacacuaguagagccgggagacaaaauaacauucgaagcaacuggaaaucuagugguaccgagauaugcauucacaauggaaagaaaugcuggaucugguauuaucauuucagauacaccaguccacgauugcaauacaacuugucagacacccgagggugcuauaaacaccagccucccauuucagaauauacauccgaucacaauuggaaaauguccaaaguauguaaaaagcacaaaauugagacuggccacaggauugaggaaugucccgucuauucaaucuagaggccuauucggggccauugccggcuucauugaaggaggguggacagggaugguagauggaugguacgguuaucaccaucaaaacgagcaggggucaggauaugcagccgaccugaagagcacacaaaaugccauugacaagauuacuaacaaaguaaauucuguuauugaaaagaugaauacacaguucacagcaguggguaaagaguucaaccaccuggaaaaaagaauagagaauuuaaauaaaaaaguugaugaugguuuccuggacauuuggacuuacaaugccgaacuguugguucuauuggaaaaugaaagaacuuuggacuaccacgauucaaaugugaagaacuuguaugaaaagguaagaaaccaguuaaaaaacaaugccaaggaaauuggaaacggcugcuuugaauuuuaccacaaaugcgauaacacgugcauggaaagugucaaaaaugggacuuaugacuacccaaaauacucagaggaagcaaaauuaaacagagaaaaaauagaugggguaaagcuggaaucaacaaggauuuaccagauuuuggcgaucuauucaacugccgccaguucauugguacugguagucucccugggggcaaucagcuucuggaugugcucuaaugggucucuacaguguagaauauguauuuaa

SEQ ID NO: 43962 - RNA, 1701 nt, Artificial Sequence
  derived and/or modified CDS sequence (wt) from hemagglutinin__InfluenzaA__AHV83827
augaaggcaauacuaguaguucugcuauauacauuugcaaccgcaaaugcagacacauuauguauagguuaucaugcgaacaauucaacagacacuguagacacaguacuagaaaagaauguaacaguaacacacucuguuaaccuucuagaagacaagcauaacgggaaacuaugcaaacuaagagggguagccccauugcauuuggguaaauguaacauugcuggcuggauccugggaaauccagagugugaaucacucuccacagcaaguucaugguccuacauuguggaaacauccaguucagacaauggaacguguuacccaggagauuucaucaauuaugaggagcuaagagagcaauugagcucagugucaucauuugaaagguuugagauauuccccaagacaaguucauggcccaaucaugacucgaacaaagguguaacggcagcauguccucacgcuggagcaaaaagcuucuacaaaaauuuaauauggcuaguuaaaaaaggaaauucauacccaaagcucagccaauccuacauuaaugauaaagggaaagaaguccucgugcuguggggcauucaccacccaucuaccacugcugaccaacaaagucucuaucagaaugcagaugcauauguuuuuguggggacaucaagauacagcaagaaguucaagccggaaauagcaauaagacccaaagugagggaucaagaagggagaaugaacuauuacuggacacuaguagagccgggagacaaaauaacauucgaagcaacuggaaaucuagugguaccgagauaugcauucacaauggaaagaaaugcuggaucugguauuaucauuucagauacaccaguccacgauugcaauacaacuugucagacacccgagggugcuauaaacaccagccucccauuucagaauauacauccgaucacaauuggaaaauguccaaaguauguaaaaagcacaaaauugagacuggccacaggauugaggaaugucccgucuauucaaucuagaggccuauucggggccauugccggcuucauugaaggaggguggacagggaugguagauggaugguacgguuaucaccaucaaaacgagcaggggucaggauaugcagccgaccugaagagcacacaaaaugccauugacaagauuacuaacaaaguaaauucuguuauugaaaagaugaauacgcaguucacagcaguggguaaagaguucaaccaccuggaaaaaagaauagagaauuuaaauaaaaaaguugaugaugguuuccuggacauuuggacuuacaaugccgaacuguugguucuauuggaaaaugaaagaacuuuggacuaccacgauucaaaugugaagaacuuguaugaaaagguaagaaaccaguuaaaaaacaaugccaaggaaauuggaaacggcugcuuugaauuuuaccacaaaugcgauaacacgugcauggaaagugucaaaaaugggacuuaugacuacccaaaauacucagaggaagcaaaauuaaacagagaaaaaauagaugggguaaaacuggaaucaacaaggauuuaccagauuuuggcgaucuauucaacugucgccaguucauugguacugguagucucccugggggcaaucagcuucuggaugugcucuaaugggucucuacaguguagaauauguauuuaa

SEQ ID NO: 43963 - RNA, 1701 nt, Artificial Sequence
  derived and/or modified CDS sequence (wt) from hemagglutinin__InfluenzaA__AHV83828
augaaggcaauacuaguaguucugcuauauacauuugcaaccgcaaaugcagacacauuauguauagguuaucaugcgaacaauucaacagacacuguagacacaguacuagaaaagaauguaacaguaacacacucuguuaaccuucuagaagacaagcauaacgggaaacuaugcaaacuaagagggguagccccauugcauuuggguaaauguaacauugcuggcuggauccugggaaauccagagugugaaucacucuccacagcaaguucaugguccuacauuguggaaacaucuaguucagacaauggaacguguuacccaggagauuucaucaauuaugaggagcuaagagagcaauugagcucagugucaucauuugaaagguuugagauauuccccaagacaaguucauggcccaaucaugacucgaacaaagguguaacggcagcauguccucacgcuggagcaaaaagcuucuacaaaaauuuaauauggcuaguuaaaaaaggaaauucauacccaaagcucagccaauccuacauuaaugauaaagggaaagaaguccucgugcuguggggcauucaccacccaucuacuacugcugaccaacaaagucucuaucagaaugcagaugcauauguuuuuguggggacaucaagauacagcaagaaguucaagccugaaauagcaauaagacccaaagugagggaucaagaagggagaaugaacuauuacuggacacuaguagagccgggagacaaaauaacauucgaagcaacuggaaaucuagugguaccgagauaugcauucacaauggaaagaaaugcuggaucugguauuaucauuucagauacaccaguccacgauugcaauacaacuugucagacacccgagggugcuauaaacaccagccucccauuucagaauauacauccgaucacaauuggaaaauguccaaaguauguaaaaagcacaaaauugagacuggccacaggauugaggaaugucccgucuauucaaucuagaggccuauucggggccauugccggcuucauugaaggaggguggacagggaugguagauggaugguacgguuaucaccaucaaaaugagcaggggucaggauaugcagccgaccugaagagcacacaaaaugccauugacaagauuacuaacaaaguaaauucuguuauugaaaagaugaauacacaguucacagcaguggguaaagaguucaaccaccuggaaaaaagaauagagaauuuaaauaaaaaaguugaugaugguuuccuggacauuuggacuuacaaugccgaacuguugguucuauuggaaaaugaaagaacuuuggacuaccacgauucaaaugugaagaacuuguaugaaaagguaagaaaccaguuaaaaaacaaugccaaggaaauuggaaacggcugcuuugaauuuuaccacaaaugcgauaacacgugcauggaaagugucaaaaaugggacuuaugacuacccaaaauacucagaggaagcaaaauuaaacagagaaaaaauagaugggguaaagcuggaaucaacaaggauuuaccagauuuuggcgaucuauucaacugucgccaguucuuugguacugguagucucccugggggcaaucagcuucuggaugugcucuaaugggucucuacaguguagaauauguauuuaa

SEQ ID NO: 43964 - RNA, 1701 nt, Artificial Sequence
  derived and/or modified CDS sequence (wt) from hemagglutinin__InfluenzaA__AHV83829
auggaggcaauacuaguaguucugcuauauacauuugcaaccgcaaaugcagacacauuauguauagguuaucaugcgaacaauucaacagacacuguagacacaguacuagaaaagaauguaacaguaacacacucuguuaaccuucuagaagacaagcauaacgggaaacuaugcaaacuaagagggguagccccauugcauuuggguaaauguaacauugcuggcuggauccugggaaauccagagugugaaucacucuccacagcaaguucaugguccuacauuguggaaacaucuaguucagacaauggaacguguuacccaggagauuucaucaauuaugaggagcuaagagagcaauugagcucagugucaucauuugaaagguuugagauauuccccaagacaaguucauggcccaaucaugacucgaacaaagguguaacggcagcauguccucacgcuggagcaaaaagcuucuacaaaaauuuaauauggcuaguuaaaaaaggaaauucauacccaaagaucagccaauccuacauuaaugauaaagggaaagaaguccucgugcuguggggcauucaccacccaucuacuacugcugaccaacaaagucucuaucagaaugcagaugcauauguuuuuguggggacaucaagauacagcaagaaguucaagccggaaauagcaauaagacccaaagugagggaucaagaagggagaaugaacuacuacuggacacuaguagagccgggagacaaaauaacauucgaagcaacuggaaaucuagugguaccgagauaugcauucacaauggaaagaaaugcuggaucugguauuaucauuucagauacaccaguccacgauugcaauacaacuugucagacacccgagggugcuauaaacaccagccucccauuucagaauauacauccgaucacaauuggaaaauguccaaaguauguaaaaagcacaaaauugagacuggccacaggauugaggaaugucccgucuauucaaucuagaggccuauucggggccauugccggcuucauugaagggggguggacagggaugguagauggaugguacgguuaucaccaucaaaaugagcaggggucaggauaugcagccgaccugaagagcacacaaaaugccauugacaagauuacuaacaaaguaaauucuguuauugaaaagaugaauacacaguucacagcaguggguaaagaguucaaccaccuggaaaaaagaauagagaauuuaaauaaaaaaguugaugaugguuuccuggacauuuggacuuacaaugccgaacuguugguucuauuggaaaaugaaagaacuuuggacuaccacgauucaaaugugaagaacuuguaugaaaagguaagaaaccaguuaaaaaacaaugccaaggaaauuggaaacggcugcuuugaauuuuaccacaaaugcgauaacacgugcauggaaagugucaaaaaugggacuuaugacuacccaaaauacucagaggaggcaaaauuaaacagagaaaaaauagaugggguaaaacuggaaucaacaaggauuuaccagauuuuggcgaucuauucaacugucgccaguucauugguacugguagucucccugggggcaaucagcuucuggaugugcucuaaugggucucuacaguguagaauauguauuuaa

SEQ ID NO: 43965 - RNA, 1701 nt, Artificial Sequence
  derived and/or modified CDS sequence (wt) from hemagglutinin__InfluenzaA__AHV83830
augaaggcaauacuaguaguucugcuauauacauuugcaaccgcaaaugcagacacauuauguauagguuaucaugcgaacaauucaacagacacuguagacacaguacuagaaaagaauguaacaguaacacacucuguuaaccuucuagaagacaagcauaacgggaaacuaugcaaacuaagagggguagccccauugcauuuggguaaauguaacauugcuggcuggauccugggaaauccagagugugaaucacucuccacagcaaguucaugguccuacauuguggaaacaucuaguucagacaauggaacguguuacccaggagauuucaucaauuaugaggagcuaagagagcaauugagcucagugucaucauuugaaagguuugagauauuccccaagacaaguucauggcccaaucaugacucgaacaaagguguaacggcagcauguccucacgcuggagcaaaaagcuucuacaaaaauuuaauauggcuaguuaaaaaaggaaauucauacccaaagcucagccaauccuacauuaaugauaaagggaaagaaguccucgugcuguggggcauucaccacccaucuacuacugcugaccaacaaagucucuaucagaaugcagaugcauauguuuuuguggggacaucaagauacagcaagaaguucaagccggaaauagcaauaagacccaaagugagggaucaagaagggagaaugaacuacuacuggacacuaguagagccgggagacaaaauaacauucgaagcaacuggaaaucuagugguaccgagauaugcauucacaauggaaagaaaugcuggaucugguauuaucauuucagauacaccaguccacgauugcaauacaacuugucagacacccgagggugcuauaaacaccagccucccauuucagaauauacauccgaucacaauuggaaaauguccaaaguauguaaaaagcacaaaauugagacuggccacaggauugaggaaugucccgucuauucaaucuagaggccuauucggggccauugccggcuucauugaagggggguggacagggaugguagauggaugguacgguuaucaccaucaaaaugagcaggggucaggauaugcagccgaucugaagagcacacaaaaugccauugacaagauuacuaacaaaguaaauucuguuauugaaaagaugaauacacaguucacagcaguggguaaagaguucaaccaccuggaaaaaagaauagagaauuuaaauaaaaaaguugaugaugguuuccuggacauuuggacuuacaaugccgaacuguugguucuauuggaaaaugaaagaacuuuggacuaccacgauucaaaugugaagaacuuguaugaaaagguaagaaaccaguuaaaaaacaaugccaaggaaauuggaaacggcugcuuugaauuuuaccacaaaugcgauaacacgugcauggaaagugucaaaaaugggacuuaugacuacccaaaauacucagaggaggcaaaauuaaacagagaaaaaauagaugggguaaaacuggaaucaacaaggauuuaccagauuuuggcgaucuauucaacugucgccaguucauugguacugguagucucccugggggcaaucagcuucuggaugugcucuaaugggucucuacaguguagaauauguauuuaa

SEQ ID NO: 43966 - RNA, 1701 nt, Artificial Sequence
  derived and/or modified CDS sequence (wt) from hemagglutinin__InfluenzaA__AHV83831
augaaggcaauacuaguaguucugcuauauacauuugcaaccgcaaaugcagacacauuauguauagguuaucaugcgaacaauucaacagacacuguagacacaguacuagaaaagaauguaacaguaacacacucuguuaaccuucuagaagacaagcauaacgggaaacuaugcaaacugagagggguagccccauugcauuuggguaaauguaacauugcuggcuggauccugggaaauccagagugugaaucacucuccacagcaaguucaugguccuacauuguggaaacaucuaguucagacaauggaacguguuacccaggagauuucaucaauuaugaggagcuaagagagcaauugagcucagugucaucauuugaaagguuugagauauuccccaagacaaguucauggcccaaucaugacucgaacaaagguguaacggcagcauguccucacgcuggagcaaaaagcuucuacaaaaauuuaauauggcuaguuaaaaaaggaaauucauacccaaagcucagccaauccuacauuaaugauaaagggaaagaaguccucgugcuguggggcauucaccacccaucuacuauugcugaccaacaaagucucuaucagaaugcagaugcauauguuuuuguggggacaucaagauacagcaagaaguucaagccggaaauagcaauaagacccaaagugagggaucaagaagggagaaugaacuacuacuggacacuaguagagccgggagacaaaauaacauucgaagcaacuggaaaucuagugguaccgagauaugcauucacaauggaaagaaaugcuggaucugguauuaucguuucagauacaccaguccacgauugcaauacaacuugucagacacccgagggugcuauaaacaccagccucccauuucagaauauacauccgaucacaauuggaaaauguccaaaguauguaaaaagcacaaaauugagacuggccacaggauugaggaaugucccgucuauucaaucuagaggccuauucggggccauugccggcuucauugaagggggguggacagggaugguagauggaugguacgguuaucaccaucaaaaugagcaggggucaggauaugcagccgaccuaaagagcacacaaaaugccauugacaagauuacuaacaaaguaaauucuguuauugaaaagaugaauacacaguucacagcaguggguaaagaguucaaccaccuggaaaaaagaauagagaauuuaaauaaaaaaguugaugaugguuuccuggacauuuggacuuacaaugccgaacuguugguucuauuggaaaaugaaagaacuuuggacuaccacgauucaaaugugaagaacuuguaugaaaagguaagaaaccaguuaaaaaacaaugccaaggaaauuggaaacggcugcuuugaauuuuaccacaaaugcgauaacacgugcauggaaagugucaaaaaugggacuuaugacuacccaaaauacucagaggaagcaaaauuaaacagagaaaaaauagaugggguaaaacuggaaucaacaaggauuuaccagauuuuggcgaucuauucaacugucgccaguucauugguacugguagucucccugggggcaaucagcuucuggaugugcucuaaugggucucuacaguguagaauauguauuuaa

SEQ ID NO: 43967 - RNA, 1701 nt, Artificial Sequence
  derived and/or modified CDS sequence (wt) from hemagglutinin__InfluenzaA__AHV83832
augaaggcaauacuaguaguucugcuauauacacuugcaaccgcaaaugcagacacauuauguauagguuaucaugcgaacaauucaacagacacuguagacacaguacuagaaaagaauguaacaguaacacacucuguuaaccuucuagaagacaagcauaacgggaaacuaugcaaacuaagagggguagccccauugcauuuggguaaauguaacauugcuggcuggauccugggaaauccagagugugaaucacucuccacggcaaguucaugguccuacauuguggaaacaucuaguucagacaauggaacguguuacccaggagauuucaucaauuaugaggagcuaagagagcaauugagcucagugucaucauuugaaagguuugagauauuccccaagacaaguucauggcccaaucaugacucgaacaaagguguaacggcagcauguccucacgcuggagcaaaaagcuucuacaaaaauuuaauauggcuaguuaaaaaaggaaauucauacccaaagcucagccaauccuacauuaaugauaaagggaaagaaguccucgugcuguggggcauucaccacccaucuacuacugcugaccaacaaagucucuaucagaaugcagaugcauauguuuuuguggggacaucaagauacagcaagaaguucaagccggaaauagcaauaagacccaaagugagggaucaagaagggagaaugaacuacuacuggacacuaguagagccgggagacaaaauaacauucgaagcaacuggaaaucuagugguaccgagauaugcauucacaauggaaagaaaugcuggaucugguauuaucauuucagauacaccaguccacgauugcaauacaacuugucagacacccgagggugcuauaaacaccagccucccauuucagaauauacauccgaucacaauuggaaaauguccaaaguauguaaaaagcacaaaauugagacuggccacaggauugaggaaugucccgucuauucaaucuagaggccuauucggggccauugccggcuucauugaagggggguggacagggaugguagauggaugguacgguuaucaccaucaaaaugagcaggggucaggauaugcagccgaccugaagagcacacaaaaugccauugacaagauuacuaacaaaguaaauucuguuauugaaaagaugaauacacaguucacagcaguggguaaagaguucaaccaccuggaaaaaagaauagagaauuuaaauaaaaaaguugaugaugguuuucuggacauuuggacuuacaaugccgaacuguugguucuauuggaaaaugaaagaacuuuggacuaccacgauucaaaugugaagaacuuguaugaaaagguaagaaaccaguuaaaaaacaaugccaaggaaauuggaaacggcugcuuugaauuuuaccacaaaugcgauaacacgugcauggaaagugucaaaaaugggacuuaugacuacccaaaauacucagaggaagcaaaauuaaacagagaaaaaauagaugggguaaaacuggaaucaacaaggauuuaccagauuuuggcgaucuauucaacugucgccaguucauugguacugguagucucccugggggcaaucagcuucuggaugugcucuaaugggucucuacaguguagaauauguauuuaa

SEQ ID NO: 43968 - RNA, 1701 nt, Artificial Sequence
  derived and/or modified CDS sequence (wt) from hemagglutinin__InfluenzaA__AHV83833
augaaggcaauacuaguaguucugcuauacacauuugcaaccgcaaaugcagacacauuauguauagguuaucaugcgaacaauucaacagacacuguagacacaguacuagaaaagaauguaacaguaacacacucuguuaaccuucuagaagacaagcauaacgggaaacuaugcaaacuaagagggguagccccauugcauuuggguaaauguaacauugcuggcuggauccugggaaauccagagugugaaucacucuccacagcaaguucaugguccuacauuguggaaacaucuaguucagacaauggaacguguuacccaggagauuucaucaauuaugaggagcuaagagagcaauugagcucagugucaucauuugaaagauuugagauauuccccaagacaaguucauggcccaaucaugacucgaacaaagguguaacggcagcauguccucacgcuggagcaaaaagcuucuacaaaaauuuaauauggcuaguuaaaaaaggaaauucauacccaaagcucagccaauccuacauuaaugauaaagggaaagaaguccucgugcuguggggcauucaccauccaucuacuacugcugaccaacaaagucucuaucagaaugcagaugcauauguuuuuguggggacaucaagauacagcaagaaguucaagccggaaauagcaauaagacccaaagugagggaucaagaagggagaaugaacuauuacuggacacuaguagagccgggagacaaaauaacauucgaagcaacuggaaaucuagugguaccgagauaugcauucacaauggaaagaaaugcuggaucugguauuaucauuucagauacaccaguccacgauugcaauacaacuugucagacacccgagggugcuauaaacaccagccucccauuucagaauauacauccgaucacaauuggaaaauguccaaaguauguaaaaagcacaaaauugagacuggccacaggauugaggaaugucccaucuauucaaucuagaggccuauucggggccauugccggcuucauugaagggggguggacagggaugguagauggaugguacgguuaucaccaucaaaaugagcaggggucaggauaugcagccgaccugaagagcacacaaaaugccauugacaaaauuacuaacaaaguaaauucuguuauugaaaagaugaauacacaguucacagcaguggguaaagaguucaaccacuuggaaaaaagaauagagaauuuaaauaaaaaaguugaugaugguuuccuggacauuuggacuuacaaugccgaacugcugguucuauuggaaaaugaaagaacuuuggacuaccacgauucgaaugugaagaacuuguaugaaaagguaagaaaccaguuaaaaaacaaugccaaggaaauuggaaacggcugcuuugaauuuuaccacaaaugcgauaacacgugcauggaaagugucaaaaaugggacuuaugacuacccaaaauacucagaggaagcaaaauuaaacagagaaaaaauagaugggguaaagcuggaaucaacaaggauuuaccagauuuuggcgaucuauucaacugucgccaguucauugguacugguagucucccugggggcaaucagcuucuggaugugcucuaaugggucucuacaguguagaauauguauuuaa

SEQ ID NO: 43969 - RNA, 1701 nt, Artificial Sequence; identical to SEQ ID NO: 43033
  derived and/or modified CDS sequence (wt) from hemagglutinin__InfluenzaA__AHV83834

SEQ ID NO: 43970 - RNA, 1701 nt, Artificial Sequence
  derived and/or modified CDS sequence (wt) from hemagglutinin__InfluenzaA__AHV83836
augaaggcaauacuaguaguucugcuauauacauuugcaaccgcaaaugcagacacauuauguauagguuaucaugcgaacaauucaacagacacuguagacacaguacuagaaaagaauguaacaguaacacacucuguuaaccuucuagaagacaagcauaacgggaaacuaugcaaacuaagagggguagccccauugcauuuggguaaauguaacauugcuggcuggauccugggaaauccagagugugaaucacucuccacagcaaguucaugguccuacauuguggaaacaucuaguucagacaauggaacguguuacccaggagauuucaucaauuaugaggagcuaagagagcaauugagcucagugucaucauuugaaagguuugagauauuccccaagacaaguucauggcccaaucaugacucgaacaaagguguaacggcagcauguccucacgcuggagcaaaaagcuucuacaaaaauuuaauauggcuaguuaaaaaagaaaauucauacccaaagcuccgccaauccuacauuaaugauaaagggaaagaaguccucgugcuguggggcauucaccacccaucuacuacuacugaccaacaaagucucuaucagaaugcagaugcauauguuuuuguggggacaucaagauacagcaagaaguucaagccggaaauagcaauaagacccaaagugagggaucaagaagggagaaugaacuauuacuggacacuaguagagccgggagacaaaauaacauucgaagcaacuggaaaucuagugguaccgagauaugcauucacaauggaaagaaaugcuggaucugguauuaucauuucagauacaccaguccacgauugcaauacaacuugucagacacccgagggugcuauaaacaccagccucccauuucagaauauacauccgaucacaauuggaaaauguccaaaguauguaaaaagcacaaaauugagacuggccacaggauugaggaaugucccgucuauucaaucuagaggccuauucggggccauugccggcuucauugaaggaggguggacagggaugguagauggaugguacgguuaucaccaucaaaaugagcaggggucaggauaugcagccgaccugaagagcacacaaaaugccauugacaagauuacuaacaaaguaaauucuguuauugaaaagaugaauacacaguucacagcaguggguaaagaguucaaccaccuggaaaaaagaauagagaauuuaaauaaaaaaguugaugaugguuuccuggacauuuggacuuacaaugccgaacuguugguucuauuggaaaaugaaagaacuuuggacuaccacgauucaaaugugaagaacuuguaugaaaagguaagaaaccaguuaaaaaacaaugccaaggaaauuggaaacggcugcuuugaauuuuaccacaaaugcgauaacacgugcauggaaagugucaaaaaugggacuuaugacuacccaaaauacucagaggaagcaaaauuaaacagagaaaaaauagaugggguaaagcuggaaucaacaaggauuuaccagauuuuggcgaucuauucaacugucgccaguucauugguacugguagucucccugggggcaaucagcuucuggaugugcucuaaugggucucuacaguguagaauauguauuuaa

SEQ ID NO: 43971 - RNA, 1701 nt, Artificial Sequence
  derived and/or modified CDS sequence (wt) from hemagglutinin__InfluenzaA__AHV83837
augaaggcaauacuaguaguucugcuauauacauuugcaaccgcaaaugcagacacauuauguauagguuaucaugcgaacaauucaacagacacuguagacacaguacuagaaaagaauguaacaguaacacacucuguuaaccuucuagaagacaagcauaacgggaaacuaugcaaacuaagagggguagccccauugcauuuggguaaauguaacauugcuggcuggauccugggaaauccagagugugaaucacucuccacagcaaguucaugguccuacauuguggaaacaucuaguucagacaauggaacguguuacccaggagauuucaucaauuaugaggagcuaagagagcaauugagcucagugucaucauuugaaagguuugagauauuccccaagacaaguucauggcccaaucaugacucgaacaaagguguaacggcagcauguccucacgcuggagcaaaaagcuucuacaaaaauuuaauauggcuaguuaaaaaaggaaauucauacccaaagcuccgccaauccuacauuaaugauaaagggaaagaaguccucgugcuguggggcauucaccacccaucuacuacuacugaccaacaaagucucuaucagaaugcagaugcauauguuuuuguggggacaucaagauacagcaagaaguucaagccggaaauagcaauaagacccaaagugagggaucaagaagggagaaugaacuauuacuggacacuaguagagccgggagacaaaauaacauucgaagcaacuggaaaucuagugguaccgagauaugcauucacaauggaaagaaaugcuggaucugguauuaucauuucagauacaccaguccacgauugcaauacaacuugucagacacccgagggugcuauaaacaccagccucccauuucagaauauacauccgaucacaauuggaaaauguccaaaguauguaaaaagcacaaaauugagacuggccacaggauugaggaaugucccgucuauucaaucuagaggccuauucggggccauugccggcuucauugaaggaggguggacagggaugguagauggaugguacgguuaucaccaucaaaaugagcaggggucaggauaugcagccgaccugaagagcacacaaaaugccauugacaagauuacuaacaaaguaaauucuguuauugaaaagaugaauacacaguucacagcaguggguaaagaguucaaccaccuggaaaaaagaauagagaauuuaaauaaaaaaguugaugaugguuuccuggacauuuggacuuacaaugccgaacuguugguucuauuggaaaaugaaagaacuuuggacuaccacgauucaaaugugaagaacuuguaugaaaagguaagaaaccaguuaaaaaacaaugccaaggaaauuggaaacggcugcuuugaauuuuaccacaaaugcgauaacacgugcauggaaagugucaaaaaugggacuuaugacuacccaaaauacucagaggaagcaaaauuaaacagagaaaaaauagaugggguaaagcuggaaucaacaaggauuuaccagauuuuggcgaucuauucaacugucgccaguucauugguacugguagucucccugggggcaaucagcuucuggaugugcucuaaugggucucuacaguguagaauauguauuuaa

SEQ ID NO: 43972 - RNA, 1701 nt, Artificial Sequence
  derived and/or modified CDS sequence (wt) from hemagglutinin__InfluenzaA__AHV83838
augaaggcaauacuaguaguucugcuauauacauuugcaaccgcaaaugcagacacauuauguauagguuaucaugcgaacaauucaacagacacuguagacacaguacuagaaaagaauguaacaguaacacacucuguuaaccuucuagaagacaagcauaacgggaaacuaugcaaacuaagagggguagccccauugcauuuggguaaauguaacauugcuggcuggauccugggaaauccagagugugaaucacucuccacagcaaguucaugguccuacauuguggaaacaucuaguucagacaauggaacguguuacccaggagauuucaucaauuaugaggagcuaagagagcaauugagcucagugucaucauuugaaagguuugagauauuccccaagacaaguucauggcccaaucaugacucgaacaaagguguaacggcagcauguccucacgcuggagcaaaaagcuucuacaaaaauuuaauauggcuaguuaaaaaaggaaauucauacccaaagcucagccaauccuacauuaaugauaaagggaaagaaguccucgugcuguggggcauucaccacccaucuacuacugcugaccaacaaagucucuaucagaaugcagaugcauauguuuuuguggggacaucaagauacagcaagaaguucaagccggaaauagcaauaagacccaaagugagggaucaagaagggagaaugaacuacuacuggacacuaguagagccgggagacaaaauaacauucgaagcaacuggaaaucuagugguaccgagauaugcauucacaauggaaagaaaugcuggaucugguauuaucauuucagauacaccaguccacgauugcaauacaacuugucagacacccgagggugcuauaaacaccagccucccauuucagaauauacauccgaucacaauuggaaaauguccaaaguauguaaaaagcacaaaauugagacuggccacaggauugaggaaugucccgucuauucaaucuagaggccuauucggggcaauugccggcuucauugaagggggguggacagggaugguagauggaugguacgguuaucaccaucaaaaugagcaggggucaggauaugcagccgaccugaagagcacacaaaaugccauugacaagauuacuaacaaaguaaauucuguuauugaaaagaugaauacacaguucacagcaguggguaaagaguucaaccaccuggaaaaaagaauagagaauuuaaauaaaaaaguugaugaugguuuccuggacauuuggacuuacaaugccgaacuguugguucuauuggaaaaugaaagaacuuuggacuaccacgauucaaaugugaagaacuuguaugaaaagguaagaaaccaguuaaaaaacaaugccaaggaaauuggaaacggcugcuuugaauuuuaccacaaaugcgauaacacgugcauggaaagugucaaaaaugggacuuaugacuacccaaaauacucagaggaggcaaaauuaaacagagaaaaaauagaugggguaaaacuggaaucaacaaggauuuaccagauuuuggcgaucuauucaacugucgccaguucauugguacugguagucucccugggggcaaucagcuucuggaugugcucuaaugggucucuacaguguagaauauguauuuaa

SEQ ID NO: 43973 - RNA, 1701 nt, Artificial Sequence
  derived and/or modified CDS sequence (wt) from hemagglutinin__InfluenzaA__AHV83839
augaaggcaauacuaguaguucugcuauauacacuugcaaccgcaaaugcagacacauuauguauagguuaucaugcgaacaauucaacagacacuguagacacaguacuagaaaagaauguaacaguaacacacucuguuaaccuucuagaagacaagcauaacgggaaacuaugcaaacuaagagggguagccccauugcauuuggguaaauguaacauugcuggcuggauccugggaaauccagagugugaaucacucuccacggcaaguucaugguccuacauuguggaaacaucuaguucagacaauggaacguguuacccaggagauuucaucaauuaugaggagcuaagagagcaauugagcucagugucaucauuugaaagguuugagauauuccccaagacaaguucauggcccaaucacgacucgaacaaagguguaacggcagcauguccucacgcuggagcaaaaagcuucuacaaaaauuuaauauggcuaguuaaaaaaggaaauucauacccaaagcucagccaauccuacauuaaugauaaagggaaagaaguccucgugcuguggggcauucaccacccaucuacuacugcugaccaacaaagucucuaucagaaugcagaugcauauguuuuuguggggacaucaagauacagcaagaaguucaagccggaaauagcaauaagacccaaagugagggaucaagaagggagaaugaacuacuacuggacacuaguagagccgggagacaaaauaacauucgaagcaacuggaaaucuagugguaccgagauaugcauucacaauggaaagaaaugcuggaucugguauuaucauuucagauacaccaguccacgauugcaauacaacuugucagacacccgagggugcuauaaacaccagccucccauuucagaauauacauccgaucacaauuggaaaauguccaaaguauguaaaaagcacaaaauugagacuggccacaggauugaggaaugucccgucuauucaaucuagaggccuauucggggccauugccggcuucauugaagggggguggacagggaugguagauggaugguacgguuaucaccaucaaaaugagcaggggucaggauaugcagccgaccuuaagagcacacaaaaugccauugacaagauuacuaacaaaguaaauucuguuauugaaaagaugaauacacaguucacagcaguggguaaagaguucaaccaccuggaaaaaagaauagagaauuuaaauaaaaaaguugaugaugguuuccuggacauuuggacuuacaaugccgaacuguugguucuauuggaaaaugaaagaacuuuggacuaccacgauucaaaugugaagaacuuguaugaaaagguaagaaaccaguuaaaaaacaaugccaaggaaauuggaaacggcugcuuugaauuuuaccacaaaugcgauaacacgugcauggaaagugucaaaaaugggacuuaugacuacccaaaauacucagaggaagcaaaauuaaacagagaaaaaauagaugggguaaaacuggaaucaacaaggauuuaccagauuuuggcgaucuauucaacugucgccaguucauugguacugguagucucccugggggcaaucagcuucuggaugugcucuaaugggucucuacaguguagaauauguauuuaa

SEQ ID NO: 43974 - RNA, 1701 nt, Artificial Sequence; identical to SEQ ID NO: 43947
  derived and/or modified CDS sequence (wt) from hemagglutinin__InfluenzaA__AHV83840

SEQ ID NO: 43975 - RNA, 1701 nt, Artificial Sequence
  derived and/or modified CDS sequence (wt) from hemagglutinin__InfluenzaA__AHV83841
augaaggcaauacuaguaguucugcuauauacauuugcaaccgcaaaugcagacacauuauguauagguuaucaugcgaacaauucaacagacacuguagacacaguacuagaaaagaauguaacaguaacacacucuguuaaccuucuagaagacaagcauaacgggaaacuaugcaaacuaagagggguagccccauugcauuuggguaaauguaacauugcuggcuggauccugggaaauccagagugugaaucacucuccacagcaaguucaugguccuacauuguggaaacaucuaguucagacaauggaacguguuacccaggagauuucaucaauuaugaggagcuaagagagcaauugagcucagugucaucauuugaaagguuugagauauuccccaagacaaguucauggcccaaucaugacucgaacaaagguguaacggcagcauguccucacgcuggagcaaaaagcuucuacaaaaauuuaauauggcuaguuaaaaaaggaaauucauacccaaagcuccgccaauccuacauuaaugauaaagggaaagaaguccucgugcuguggggcauucaccacccaucuacuacuacugaccaacaaagucucuaucagaaugcagaugcauauguuuuuguggggacaucaagauacagcaagaaguucaagccggaaauagcaauaagacccaaagugagggaucaagaagggagaaugaacuauuacuggacacuaguagagccgggagacaaaauaacauucgaagcaacuggaaaucuagugguaccgagauaugcauucacaauggaaagaaaugcuggaucugguauuaucauuucagauacaccaguccacaauugcaauacaacuugucagacacccgagggugcuauaaacaccagccucccauuucagaauauacauccgaucacaauuggaaaauguccaaaguauguaaaaagcacaaaauugagacuggccacaggauugaggaaugucccgucuauucaaucuagaggccuauucggggccauugccggcuucauugaaggaggguggacagggaugguagauggaugguacgguuaucaccaucaaaaugagcaggggucaggauaugcagccgaccugaagagcacacaaaaugccauugacaagauuacuaacaaaguaaauucuguuauugaaaagaugaauacacaguucacagcaguggguaaagaguucaaccaccuggaaaaaagaauagagaauuuaaauaaaaaaguugaugaugguuuccuggacauuuggacuuacaaugccgaacuguugguucuauuggaaaaugaaagaacuuuggacuaccacgauucaaaugugaagaacuuguaugaaaagguaagaaaccaguuaaaaaacaaugccaaggaaauuggaaacggcugcuuugaauuuuaccacaaaugcgauaacacgugcauggaaagugucaaaaaugggacuuaugacuacccaaaauacucagaggaagcaaaauuaaacagagaaaaaauagaugggguaaagcuggaaucaacaaggauuuaccagauuuuggcgaucuauucaacugucgccaguucauugguacugguagucucccugggggcaaucagcuucuggaugugcucuaaugggucucuacaguguagaauauguauuuaa

SEQ ID NO: 43976 - RNA, 1701 nt, Artificial Sequence; identical to SEQ ID NO: 43965
  derived and/or modified CDS sequence (wt) from hemagglutinin__InfluenzaA__AHV83842

SEQ ID NO: 43977 - RNA, 1701 nt, Artificial Sequence; identical to SEQ ID NO: 43965
  derived and/or modified CDS sequence (wt) from hemagglutinin__InfluenzaA__AHV83843

SEQ ID NO: 43978 - RNA, 1701 nt, Artificial Sequence; identical to SEQ ID NO: 43952
  derived and/or modified CDS sequence (wt) from hemagglutinin__InfluenzaA__AHV83844

SEQ ID NO: 43979 - RNA, 1701 nt, Artificial Sequence
  derived and/or modified CDS sequence (wt) from hemagglutinin__InfluenzaA__AHV83845
augaaggcaauacuaguaguucugcuauauacauuugcaaccgcaaaugcagacacauuauguauagguuaucaugcaaacaauucaacagacacuguagacacaguacuagaaaagaauguaacaguaacacacucuguuaaccuucuagaagacaagcauaacgggaaacuaugcaaacuaagagggguagccccauugcauuuggguaaauguaacauugcuggcuggauccugggaaauccagagugugaaucacucuccacagcaaguucaugguccuacauuguggaaacaucuaguucagacaauggaacguguuacccaggagauuucaucaauuaugaggagcuaagagagcaauugagcucagugucaucauuugaaagguuugagauauuccccaaaacaaguucauggcccaaucaugacucgaacaaagguguaacggcagcauguccucacgcuggagcaaaaagcuucuacaaaaauuuaauauggcuaguuaaaaaaggaaauucauacccaaagcucagccaauccuacauuaaugauaaagggaaagaaguccucgugcuguggggcauucaccauccaccuacuacugcugaccaacaaagucucuaucagaaugcagaugcauauguuuuuguggggacaucaagauacagcaagaaguucaagccggaaauagcaauaagacccaaagugagggaucaagaagggagaaugaacuauuacuggacacuaguagagccgggagacaaaauaacauucgaagcaacuggaaaucuagugguaccgagauaugcauucacaauggaaagaaaugcuggaucugguauuaucauuucagauacaccaguccacgauugcaauacaacuugucagacacccgagggugcuauaaacaccagccucccauuucagaauauacauccgaucacaauuggaaaauguccaaaguauguaaaaagcacaaaauugagacuggccacaggauugaggaaugucccgucuauucaaucuagaggccuauucggggccauugccggcuucauugaagggggguggacagggaugguagauggaugguacgguuaucaccaucaaaaugagcaggggucaggauaugcagccgaccugaagagcacacaaaaugccauugacaagauuacuaacaaaguaaacucuguuauugaaaagaugaauacacaguucacagcaguggguaaagaguucaaccaccuggaaaaaagaauagagaauuuaaauaaaaaaguugaugaugguuuccuggacauuuggacuuacaaugccgaacuguugguucuauuggaaaaugaaagaacuuuggacuaccacgauucaaaugugaagaacuuguaugaaaagguaagaaaccaguuaaaaaacaaugccaaggaaauuggaaacggcugcuuugaauuuuaccacaaaugcgauaacacgugcauggaaagugucaaaaaugggacuuaugacuacccaaaauacucagaggaagcaaaauuaaacagagaaaaaauagaugggguaaagcuggaaucaacaaggauuuaccagauuuuggcgaucuauucaacugccgccaguucauugguacugguagucucccugggggcaaucagcuucuggaugugcucuaaugggucucuacaguguagaauauguauuuaa

SEQ ID NO: 43980 - RNA, 1701 nt, Artificial Sequence; identical to SEQ ID NO: 43913
  derived and/or modified CDS sequence (wt) from hemagglutinin__InfluenzaA__AHV83846

SEQ ID NO: 43981 - RNA, 1701 nt, Artificial Sequence
  derived and/or modified CDS sequence (wt) from hemagglutinin__InfluenzaA__AHV83847
augaaggcaauacuaguaguucugcuauauacauuugcaaccgcaaaugcagacacauuauguauagguuaucaugcgaacaauucaacagacacuguagacacaguacuagaaaagaauguaacaguaacacacucuguuaaccuucuagaagacaagcauaacgggaaacuaugcaaacuaagagggguagccccauugcauuuggguaaauguaacauugcuggcuggauccugggaaauccagagugugaaucacucuccacagcaaguucaugguccuacauuguggaaacaucuaguucagacaauggaacguguuacccaggagauuucaucaauuaugaggagcuaagagagcaauugagcucagugucaucauuugaaagguuugagauauuccccaagacaaguucauggcccaaucaugacucgaacaaagguguaacggcagcauguccucacgcuggagcaaaaagcuucuacaaaaauuuaauauggcuaguuaaaaaaggaaauucauacccaaagcucagccaauccuacauuaaugauaaagggaaagaaguccucgugcuguggggcauucaccauccaucuacuacugcugaccaacaaagucucuaucagaaugcagaugcauauguuuuuguggggacaucaagauacagcaagaaguucaagccggaaauagcaauaagacccaaagugagggaucaagaagggagaaugaacuauuacuggacacuaguagagccgggagacaaaauaacauucgaagcaacuggaaaucuagugguaccgagauaugcauucacaauggaaagaaaugcuggaucugguauuaucauuucagauacaccaguccacgauugcaauacaacuugucagacacccgagggugcuauaaacaccagccucccauuucagaauauacauccgaucacaauuggaaaauguccaaaguauguaaaaagcacaaaauugagacuggccacaggauugaggaaugucccgucuauucaaucuagaggccuauucggggccauugccggcuucauugaagggggguggacagggaugguagauggaugguacgguuaucaccaucaaaaugagcaggggucaggauaugcagccgaccugaagagcacacaaaaugccauugacaagauuacuaacaaaguaaauucuguuauugaaaagaugaauacacaguucacagcaguggguaaagaguucaaccaccuggaaaaaagaauagagaauuuaaauaaaaaaguugaugaugguuuccuggacauuuggacuuacaaugccgaacuguugguucuauuggaaaaugaaagaacuuuggacuaccacgauucaaaugugaagaacuuguaugaaaagguaagaaaccaguuaaaaaacaaugccaaggaaauuggaaacggcugcuuugaauuuuaccacaaaugcgauaacacgugcauggaaagugucaaaaaugggacuuaugacuacccaaaauacucagaggaagcaaaauuaaacagagaaaaaauagaugggguaaagcuggaaucaacaaggauuuaccagauuuuggcgaucuauucaacugucgccaguucauuaguacugguagucucccugggggcaaucagcuucuggaugugcucuaaugggucucuacaguguagaauauguauuuaa

SEQ ID NO: 43982 - RNA, 1701 nt, Artificial Sequence
  derived and/or modified CDS sequence (wt) from hemagglutinin__InfluenzaA__AHV83848
augaaggcaauacuaguaguucugcuauauacauuugcaaccgcaaaugcagacacauuauguauagguuaucaugcgaacaauucaacagacacuguagacacaguacuagaaaagaauguaacaguaacacacucuguuaaccuucuagaagacaagcauaacgggaaacuaugcaaacuaagagggguagccccauugcauuuggguaaauguaacauugcuggcuggauccugggaaauccagagugugaaucacucuccacagcaaguucaugguccuacauuguggaaacaucuaguucagacaauggaacguguuacccaggagauuucaucaauuaugaggagcuaagagagcaauugagcucagugucaucauuugaaagguuugagauauuccccaagacaaguucauggcccaaucaugacucgaacaaagguguaacggcagcauguccucacgcuggagcaaaaagcuucuacaaaaauuuaauauggcuaguuaaaaaaggaaauucauacccaaagcucagccaauccuacauuaaugauaaagggaaagaaguccucgugcuguggggcauucaccacccaucuacuacugcugaccaacaaagucucuaucagaaugcagaugcauauguuuuuguggggacaucaagauacagcaagaaguucaagccggaaauagcaauaagacccaaagugagggaucaagaagggagaaugaacuauuacuggacacuaguagagccgggagacaaaauaacauucgaagcaacuggaaaucuagugguaccgagauaugcauucacaauggaaagaaaugcuggaucugguauuaucauuucagauacaccaguccacgauugcaauacaacuugucagacacccgagggugcuauaaacaccagccucccauuucagaauauacauccgaucacaauuggaaaauguccaaaguauguaaaaagcacaaaauugagacuggccacaggauugaggaaugucccguccauucaaucuagaggccuauucggggccauugccggcuucauugaaggaggguggacagggaugguagauggaugguacgguuaucaccaucaaaaugagcaggggucaggauaugcagccgaccugaagagcacacaaaaugccauugacaagauuacuaacaaaguaaauucuguuauugaaaagaugaauacacaguucacagcaguggguaaagaguucaaccaccuggaaaaaagaauagagaauuuaaauaaaaaaguugaugaugguuuccuggacauuuggacuuacaaugccgaacuguugguucuauuggaaaaugaaagaacuuuggacuaccacgauucaaaugugaagaacuuguaugaaaagguaagaaaccaguuaaaaaacaaugccaaggaaauuggaaacggcugcuuugaauuuuaccacaaaugcgauaacacgugcauggaaagugucaaaaaugggacuuaugacuacccaaaauacucagaggaagcaaaauuaaacagagaaaaaauagaugggguaaagcuggaaucaacaaggauuuaccagauuuuggcgaucuauucaacugucgccaguucauugguacugguagucucccugggggcaaucagcuucuggaugugcucuaaugggucucuacaguguagaauauguauuuaa

SEQ ID NO: 43983 - RNA, 1701 nt, Artificial Sequence
  derived and/or modified CDS sequence (wt) from hemagglutinin__InfluenzaA__AHV83849
augaaggcaauacuaguaguucugcuauauacauuugcaaccgcaaaugcagacacauuauguauagguuaucaugcgaacaauucaacagacacuguagacacaguacuagaaaagaauguaacaguaacacacucuguuaaccuucuagaagacaagcauaacgggaaacuaugcaaacuaagagggguagccccauugcauuuggguaaauguaacauugcuggcuggauccugggaaauccagagugugaaucacucuccacagcaaguucaugguccuacauuguggaaacaucuaguucagacaauggaacguguuacccaggagauuucaucaauuaugaggagcuaagagagcaauugagcucagugucaucauuugaaagguuugagauauuccccaagacaaguucauggcccaaucaugacucgaacaaagguguaacggcagcauguccucacgcuggagcaaaaagcuucuacaaaaauuuaauauggcuaguuaaaaaaggaaauucauacccaaagcucagccaauccuacauuaaugauaaagggaaagaaguccucgugcuguggggcauucaccacccaucuacuacugcugaccaacaaagucucuaucagaaugcagaugcauauguuuuuguggggacaucaagauacagcaagaaguucaagccggaaauagcaauaagacccaaagugagggaucaagaagggagaaugaacuauuacuggacacuaguagagccgggagacaaaauaacauucgaagcaacuggaaaucuagugguaccgagauaugcauucacaauggaaagaaaugcuggaucugguauuaucauuucagauacaccaguccacgauugcaauacaacuugucagacacccgagggugcuauaaacaccagccucccauuucagaauauacauccgaucacaauuggaaaauguccaaaguauguaaaaagcacaaaauugagacuggccacaggauugaggaaugucccgucuauucaaucuagaggccuauucggggccauugccggcuucauugaaggaggguggacagggaugguagauggaugguacgguuaucaccaucaaaaugagcaggggucaggauaugcagccgaccugaagagcacacaaaaugccauugacaagauuacuaacaaaguaaauucuguuauugaaaagaugaauacacaguucacagcaguggguaaagaguucaaccaccuggaaaaaagaauagagaauuuaaauaaaaaaguugaugaugguuuccuggacauuuggacuuacaaugccgaacuguugguucuauuggaaaaugaaagaacuuuggacuaccacgauucaaaugugaaaaacuuguaugaaaagguaagaaaccaguuaaaaaccaaugccaaggaaauuggaaacggcugcuuugaauuuuaccacaaaugcgauaacacgugcauggaaagugucaaaaaugggacuuaugacuacccaaaauacucagaggaagcaaaauuaaacagagaaaaaauagaugggguaaagcuggaaucaacaaggauuuaccagauuuuggcgaucuauucaacugucgccaguucauugguacugguagucucccugggggcaaucagcuucuggaugugcucuaaugggucucuacaguguagaauauguauuuaa

SEQ ID NO: 43984 - RNA, 1701 nt, Artificial Sequence
  derived and/or modified CDS sequence (wt) from hemagglutinin__InfluenzaA__AHV83850
augaaggcaauacuaguaguucugcuauauacauuugcaaccacaaaugcagacacauuauguauagguuaucaugcgaacaauucaacagacacuguagacacaguacuagaaaagaauguaacaguaacacacucuguuaaccuucuagaagacaagcauaacgggaaacuaugcaaacuaagagggguagccccauugcauuuggguaaauguaacauugcuggcuggauccugggaaauccagagugugaaucacucuccaaagcaaguucaugguccuacauuguggaaacaucuaguucagacaauggaacguguuacccaggagauuucaucaauuaugaggagcuaagagagcaauugagcucagugucaucauuugaaagguuugagauauuccccaagacaaguucauggcccaaucaugacucgaacaaagguguaacggcagcauguccucacgcuggagcaaaaagcuucuacaaaaauuuaauauggcuaguuaaaaaaggaaauucauacccaaagcucagccaauccuacauuaaugauaaagggaaagaaguccucgugcuguggggcauucaccauccaucuacuacugcugaccaacaaagucucuaucagaaugcagaugcauauguuuuuguggggacaucaagauacagcaagaaguucaagccggaaauagcaauaagacccaaagugagggaucaagaagggagaaugaacuauuacuggacacuaguagagccgggagacaaaauaacauucgaagcaacuggaaaucuagugguaccgagauaugcauucacaauggaaagaaaugcuggaucugguaucaucauuucagauacaccaguccacgauugcaauacaacuugucagacacccgagggugcuauaaacaccagccucccauuucagaauauacauccgaucacaauuggaaaauguccaaaguauguaaaaagcacaaaauugagacuggccacaggauugaggaaugucccgucuauucaaucuagaggccuauucggggccauugccggcuucauugaagggggguggacagggaugguagauggaugguacgguuaucaccaucaaaaugagcaggggucaggauaugcagccgaccugaagagcacacaaaaugccauugacaagauuacuaacaaaguaaauucuguuauugaaaagaugaauacacaguucacagcaguggguaaagaguucaaccaccuggaaaaaagaauagagaauuuaaauaaaaaaguugaugaugguuuccuggacauuuggacuuacaaugccgaacuguugguucuauuggaaaaugaaagaacuuuggacuaccacgauucaaaugugaagaacuuguaugaaaagguaagaaaccaguuaaaaaacaaugcaaaggaaauuggaaacggcugcuuugaauuuuaccacaaaugcgauaacacgugcauggaaagugucaaaaaugggacuuaugacuacccaaaauacucagaggaagcaaaauuaaacagagaaaaaauagaugggguaaagcuggaaucaacaaggauuuaccagauuuuggcgaucuauucaacugucgccaguucauugguacugguagucucccugggggcaaucagcuucuggaugugcucuaaugggucucuacaguguagaauauguauuuaa

SEQ ID NO: 43985 - RNA, 1701 nt, Artificial Sequence
  derived and/or modified CDS sequence (wt) from hemagglutinin__InfluenzaA__AHV83851
augaaggcaauacuaguaguucugcuauauacauuugcaaccgcaaaugcagacacauuauguauagguuaucaugcgaacaauucaacagacacuguagacacaguacuagaaaagaauguaacaguaacacacucuguuaaccuucuagaagacaagcauaacgggaaacuaugcaaacuaagagggguagccccauugcauuuggguaaauguaacauugcuggcuggauccugggaaauccagagugugaaucacucuccacagcaaguucaugguccuacauuguggaaacaucuaguucagacaauggaacguguuacccaggagauuucaucaauuaugaggagcuaagagagcaauugagcucagugucaucauuugaaagguuugagauauuccccaagacaaguucauggcccaaucaugacucgaacaaagguguaacggcagcauguccucacgcuggagcaaaaagcuucuacaaaaauuuaauauggcuaguuaaaaaaggaaauucauacccaaagcucagccaauccuacauuaaugauaaagggaaagagguccucgugcuguggggcauccaccauccaucuacuacugcugaccaacaaagucucuaucagaaugcagaugcauauguuuuuguggggacaucaagauacagcaaaaaguucaagccggaaauagcaauaagacccaaagugagggaucaagaagggagaaugaacuauuacuggacacuaguagagccgggagacaaaauaacauucgaagcaacuggaaaucuagugguaccgagauaugcauucacuauggaaagaaaugcuggaucugguauuaucauuucagauacaccaguccacgauugcaauacaacuugucagacacccgagggugcuauaaacaccagccucccauuucagaauauacauccgaucacaauuggaaaauguccaaaguauguaaaaagcacaaaauugagacuggccacaggauugaggaaugucccgucuauucaaucuagaggccuauucggggccauugccggcuucauugaagggggguggacagggaugguagauggaugguacgguuaucaccaucaaaaugagcaggggucaggauaugcagccgaccugaagagcacacaaaaugccaucgacaagauuacuaacaaaguaaauucuguuauugaaaagaugaauacacaguucacagcaguggguaaagaguucaaccaccuggaaaaaagaauagagaauuuaaauaaaaaaguugaugaugguuuccuggacauuuggacuuacaaugccgaacuguugguucuauuggaaaaugaaagaacuuuggacuaccacgauucaaaugugaagaacuuguaugaaaagguaagaaaccaguuaaaaaacaaugccaaggaaauuggaaacggcugcuuugaauuuuaccacaaaugcgauaacacgugcauggaaagugucaaaaaugggacuuaugacuacccaaaauacucagaggaagcaaaauuaaacagagaaaaaauagaugggguaaagcuggaaucaacaaggauuuaccagauuuuggcgaucuauucaacugucgccaguucauugguacugguagucucccugggggcaaucagcuucuggaugugcucuaaugggucucuacaauguagaauauguauuuaa

SEQ ID NO: 43986 - RNA, 1701 nt, Artificial Sequence; identical to SEQ ID NO: 43026
  derived and/or modified CDS sequence (wt) from hemagglutinin__InfluenzaA__AHV83852

SEQ ID NO: 43987 - RNA, 1701 nt, Artificial Sequence
  derived and/or modified CDS sequence (wt) from hemagglutinin__InfluenzaA__AHV83853
augaaggcaauacuaguaguucugcuauauacauuugcaaccgcaaaugcagacacauuauguauagguuaccaugcgaacaauucaacagacacuguagacacaguacuagaaaagaauguaacaguaacacacucuguuaaucuucuagaagacaagcauaacgggaaacuaugcaaacuaagagggguagccccauugcauuuggguaaauguaacauugcuggcuggauccugggaaauccagagugugaaacacucuccacagcaagcucaugguccuacauuguggaaacaucuaguucagacaauggaacguguuacccaggagauuucaucgauuaugaggagcuaagagagcaauugagcucagugucaucauuugaaagguuugagauauuccccaagacaaguucauggcccaaucaugacucgaacaaagguguaacggcagcauguccucaugcuggagcaaaaggcuucuacaaaaauuuaauauggcuaguuaaaaaaggaaauucauacccaaagcucagcaaauccuacauuaaugauaaagggaaagaaguccucgugcuauggggcauucaccauccaucuacuacugcugaccaacaaagucucuaucagaaugcagauacauauguuuuuguggggacaucaagauacagcaagaaguucaagccggaaauagcaauaagacccaaagugagggaucaagaagggagaaugaacuauuacuggacacuaguagagccgggagacaaaauaacauucgaagcaacuggaaaucuagugguaccgagauaugcauucgcaauggaaagagaugcuggaucugguauuaucauuucagauacaccaguccacgauugcaauacaacuugucagacacccaagggugcuauaaacaccagccucccauuucagaauauacauccgaucacaauuggaaaauguccaaaauauguaaaaagcacaaaauugagacuggccacaggauugaggaaugucccgucuauucaaucuagaggccuauuuggggccauugccggcuucauugaagggggguggacagggaugguagauggaugguacgguuaucaccaucaaaaugagcaggggucaggauaugcagccgaccugaagagcacacagaaugccauugacaagauuacuaacaaaguaaauucuguuauugaaaaaaugaauacacaguucacagcaguagguaaagaguucaaccaccuggaaaaaagaauagagaauuuaaauaaaaaaguugaugauggguuccuggacauuuggacuuacaaugccgaacuguugguucuauuggaaaaugaaagaacuuuggacuaccacgauucaaaugugaagaacuuauaugaaaagguaagaacccaguuaaaaaacaaugccaaggaaauuggaaauggcugcuuugaauuuuaccacaaaugcgauaacacguguauggaaagugucaaaaaugggacuuaugacuacccaaaauacucagaggaagcaaaauuaaacagagaagaaauagaugggguaaagcuggaaucaacaaggauuuaccagauuuuggcgaucuauucaacugccgccaguucauugguacugguagucucccugggggcaaucaguuuuuggaugugcucuaaugggucucuacaguguagaauauguauuuaa

SEQ ID NO: 43988 - RNA, 1701 nt, Artificial Sequence
  derived and/or modified CDS sequence (wt) from hemagglutinin__InfluenzaA__AHV83855
augaaggcaauacuaguaguccugcuauauacauuugcaaccgcaaaugcagacacuuuauguauagguuaucaugcgaacaauucaacagacacuguagacacaguacuagaaaagaauguaacaguaacacacucuguuaaccuucuagaagacaagcauaacgguaaacuaugcaaacuaagagggguagccccauugcauuuggguaaauguaacauugcuggcuggauccugggaaauccagagugugaaucacucuccacagcaaguucaugguccuacauuguggaaacaucuaguucagacaauggaacguguuacccaggagauuucaucaauuaugaggagcuaagagagcaauugagcucagugucaucauuugaaagguuugagauauuccccaagacaaguucauggcccaaucaugacucgaacaaagguguaacggcagcauguccucacgcuggagcaaaaagcuucuacaaaaauuuaauauggcuaguuaaaaaaggaaauucauacccaaagcucagucaauccuacauuaaugauaaagggaaagaaguccucgugcuguggggcauucaccauccaucuacuacugcugaccaacaaagucucuaucagaaugcagaugcauauguuuuuguggggacaucaagauacagcaagaaguucaagccggaaauagcaauaagacccaaagugagggaucaagaagggagaaugaacuauuacuggacacuaguagagccaggagacaaaauaacauucgaagcaacuggaaaucuagugguaccgagauaugcauucacaauggaaagaaaugcuggaucugguauuaucauuucagauacaccaguccacgauugcaauacaacuugucagacacccgagggugcuauaaacaccagccucccauuucagaauauacauccgaucacaauuggaaaauguccaaaguauguaaaaagcacaaaauugagacuggcaacaggauugaggaauaucccgucuauucaaucuagaggccuauucggggccauugccggcuucauugaagggggguggacagggaugguagauggaugguacgguuaucaccaucaaaaugagcaggggucaggauaugcagccgaccugaagagcacacaaaaugccauugacaagauuacuaacaaaguaaacucuguuauugaaaagaugaauacacaguucacagcaguggguaaagaguucaaccaccuggaaaaaagaauagagaauuuaaauaaaaaaguugaugaugguuuccuggacauuuggacuuacaaugccgaacuguugguucuauuggaaaaugaaagaacuuuggacuaccacgauucaaaugugaagaacuuguaugaaaagguaagaaaccaguuaaaaaacaaugccaaggaaauuggaaacggcugcuuugaauuuuaccacaaaugcgauaacacgugcauggaaagugucaaaaaugggacuuaugacuacccaaaauacucagaggaagcaaaauuaaacagagaaaaaauagaugggguaaagcuggaaucaacaaggauuuaccagauuuuggcgaucuauucaacugucgccaguucauugguacugguagucucccugggggcaaucagcuucuggaugugcucuaaugggucucuacaguguagaauauguauuuaa

SEQ ID NO: 43989 - RNA, 1701 nt, Artificial Sequence
  derived and/or modified CDS sequence (wt) from hemagglutinin__InfluenzaA__AHV83856
augaaggcaauacuaguaguucugcuauauacauuugcaaccgcaaaugcagacacauuauguauagguuaucaugcgaacaauucaacagacacuguagacacaguacuagaaaagaauguaacaguaacacacucuguuaaccuucuagaagacaagcauaacgggaaacuaugcaaacuaagagggguagccccauugcauuuggguaaauguaacauugcuggcuggauccugggaaauccagagugugaaucacuuuccacagcaaguucaugguccuacauuguggaaacaucuaguucagacaauggaacguguuacccaggagauuucaucaauuaugaggagcuaagagagcaauugagcucagugucaucauuugaaagguuugagauauuccccaagacaaguucauggcccaaucaugacucgaacaaagguguaacggcagcauguccucacgcuggagcaaaaagcuucuacaaaaauuuaauauggcuaguuaaaaaaggaaauucauacccaaagcucagccaauccuacauuaaugauaaagggaaagaaguccucgugcuguggggcauucaccauccaucuacuacugcugaccaacaaagucucuaucagaaugcagaugcauauguuuuuguggggacaucaagauacagcaagaaguucaagccggaaauagcaauaagacccaaagugagggaucaagaagggagaaugaacuauuacuggacacuaguagagccgggagacaaaauaacauucgaagcaacuggaaaucuagugguaccgagauaugcauucacaauggaaagaaaugcuggaucugguauuaucauuucagauacaccaguccacgauugcaauacaacuugucagacacccgagggugcuauaaacaccagccucccauuucagaauauacauccgaucacaauuggaaaauguccaaaguauguaaaaagcacaaaauugagacuggccacaggauugaggaaugucccgucuauucaaucuagaggccuauucggggccauugccggcuucauugaagggggguggacagggaugguagauggaugguacgguuaucaccaucaaaaugagcaggggucaggauaugcagccgaccugaagagcacacaaaaugccauugacaagauuacuaacaaaguaaacucuguuauugaaaagaugaauacacaguucacagcaguggguaaagaguucaaccaccuggaaaaaagaauagagaauuuaaauaaaaaaguugaugaugguuuccuggacauuuggacuuacaaugccgaacuguugguucuauuggaaaaugaaagaacuuuggacuaccacgauucaaaugugaagaacuuguaugaaaagguaagaaaccaguuaaaaaacaaugccaaggaaauuggaaacggcugcuuugaauuuuaccacaaaugcgauaacacgugcauggaaauugucaaaaaugggacuuaugacuacccaaaauacucagaggaagcaaaauuaaauagagaaaaaauagaugggguaaagcuggaaucaacaaggauuuaccagauuuuggcgaucuauucaacugucgccaguucauugguacugguagucucccugggggcaaucagcuucuggaugugcucuaaugggucucuacaguguagaauauguauuuaa

SEQ ID NO: 43990 - RNA, 1701 nt, Artificial Sequence
  derived and/or modified CDS sequence (wt) from hemagglutinin__InfluenzaA__AHV83857
augaaggcaauacuaguaguucugcuauauacauuugcaaccgcaaaugcagacacuuuauguauagguuaucaugcgaacaauucaacagacacuguagacacaguacuagaaaagaauguaacaguaacacacucuguuaaccuucuagaagacaagcauaacgguaaacuaugcaaacuaagagggguagccccauugcauuuggguaaauguaacauugcuggcuggauccugggaaauccagagugugaaucacucuccacagcaaguucaugguccuacauuguggaaacaucuaguucagacaauggaacguguuacccaggagauuucaucaauuaugaggagcuaagagagcaauugagcucagugucaucauuugaaagguuugagauauuccccaagacaaguucauggcccaaucaugacucgaacaaagguguaacggcagcauguccucacgcuggagcaaaaagcuucuacaaaaauuuaauauggcuaguuaaaaaaggaaauucauacccaaagcucagucaauccuacauuaaugauaaagggaaagaaguccucgugcuguggggcauucaccauccaucuacuacugcugaccaacaaagucucuaucagaaugcagaugcauauguuuuuguggggacaucaagauacagcaagaaguucaagccggaaauagcaauaagacccaaagugagggaucaagaagggagaaugaacuauuacuggacacuaguagagccgggagacaaaauaacauucgaagcaacuggaaaucuagugguaccgagauaugcauucacaauggaaagaaaugcuggaucugguauuaucauuucagauacaccaguccacgauugcaauacaacuugucagacacccgagggugcuauaaacaccagccucccauuucagaauauacauccgaucacaauuggaaaauguccaaaguauguaaaaagcacaaaauugagacuggcaacaggauugaggaauaucccgucuauucaaucuagaggccuauucggggccauugccggcuucauugaagggggguggacagggaugguagauggaugguacgguuaucaccaucaaaaugagcaggggucaggauaugcagccgaccugaagagcacacaaaaugccauugacaagauuacuaacaaaguaaacucuguuauugaaaagaugaauacacaguucacagcaguggguaaagaguucaaccaccuggaaaaaagaauagagaauuuaaauaaaaaaguugaugaugguuuccuggacauuuggacuuacaaugccgaacuguugguucuauuggaaaaugaaagaacuuuggacuaccacgauucaaaugugaagaacuuguaugaaaagguaagaaaccaguuaaaaaacaaugccaaggaaauuggaaacggcugcuuugaauuuuaccacaaaugcgauaacacgugcauggaaagugucaaaaaugggacuuaugacuacccaaaauacucagaggaagcaaaauuaaacagagaaaaaauagaugggguaaagcuggaaucaacaaggauuuaccagauuuuggcgaucuauucaacugucgccaguucauugguacugguagucucccugggggcaaucagcuucuggaugugcucuaaugggucucuacaguguagaauauguauuuaa

SEQ ID NO: 43991 - RNA, 1701 nt, Artificial Sequence
  derived and/or modified CDS sequence (wt) from hemagglutinin__InfluenzaA__AHV83858
augaaggcaauacuaguaguucugcuauauacauuugcaaccgcaaauacagacacauuauguauagguuaucaugcgaacaauucaacagacacuguagacacaguacuagaaaagaauguaacaguaacacacucuguuaaccuucuagaagacaagcauaacgggaaacuaugcaaacuaagagggguagccccauugcauuuggguaaauguaacauugcuggcuggauccugggaaauccagagugugaaucacucuccacagcaaguucaugguccuacauuguggaaacaucuaguucagacaauggaacguguuacccaggagauuucaucaauuaugaggagcuaagagagcaauugagcucagugucaucauuugaaagguuugagauauuccccaagacaaguucauggcccaaucaugacucgaacaaagguguaacggcagcauguccucacgcuggagcaaaaagcuucuacaaaaauuuaauauggcuaguuaaaaaaggaaauucauacccaaagcucagccaauccuacauuaaugauaaagggaaagaaguccucgugcuguggggcauucaccauccaucuacuacugcugaccaacaaagucucuaucagaaugcagaugcauauguuuuuguggggacaucaagauacagcaagaaguucaagccggaaauagcaauaagacccaaagugagggaucaagaagggagaaugaacuauuacuggacacuaguagagccgggagacaaaauaacauucgaagcaacuggaaaucuagugguaccgagauaugcauucacaauggaaagaaaugcuggaucugguauuaucauuucagauacaccaguccacgauugcaauacaacuugucagacacccgagggugcuauaaacaccagccucccauuucagaauauacauccgaucacaauuggaaaauguccaaaguauguaaaaagcacaaaauugagacuggccacaggauugaggaaugucccgucuauucaaucuagaggccuauucggggccauugccggcuucauugaagggggguggacagggaugguagauggaugguacgguuaucaccaucaaaaugagcaggggucaggauaugcagccgaccagaagagcacacaaaaugccauugacaagauuacuaacaaaguaaacucuguuauugaaaagaugaauacacaguucacagcaguggguaaagaguucaaccaccuggaaaaaagaauagagaauuuaaauaaaaaaguugaugaugguuuccuggacauuuggacuuacaaugccgaacuguugguucuauuggaaaaugaaagaacuuuggacuaccacgauucaaaugugaagaacuuguaugaaaagguaagaaaccaguuaaaaaacaaugccaaggaaauuggaaacggcugcuuugaauuuuaccacaaaugcgauaacacgugcauggaaagugucaaaaaugggacuuaugacuacccaaaauacucagaggaagcaaaauuaaacagagaaaaaauagaugggguaaagcuggaaucaacaaggauuuaccagauuuuggcgaucuauucaacugucgccaguucauugguacugguagucucccugggggcaaucagcuucuggaugugcucuaaugggucucuacaguguagaauauguauuuaa

SEQ ID NO: 43992 - RNA, 1701 nt, Artificial Sequence; identical to SEQ ID NO: 43034
  derived and/or modified CDS sequence (wt) from hemagglutinin__InfluenzaA__AHV83859

SEQ ID NO: 43993 - RNA, 1701 nt, Artificial Sequence
  derived and/or modified CDS sequence (wt) from hemagglutinin__InfluenzaA__AHV83861
augaaggcaauacuaguaguucugcuauauacauuuacaaccgcaaaugcagacacauuauguauagguuaucaugcgaacaauucaacagacacuguagacacaguacuagaaaagaauguaacaguaacacacucuguuaaccuucuagaagacaagcauaacgggaaacuaugcaaacuaagagggguagccccauugcauuuggguaaauguaacauugcuggcuggauccugggaaauccagagugugaaucgcucuccacagcaaguucaugguccuacauuguggaaacaucuaguucagacaauggaacguguuacccaggagauuucaucaauuaugaggagcuaagagagcaauugagcucagugucaucauuugaaagguuugagauauuccccaagacaaguucauggcccaaucaugacucgaacaaagguguaacggcagcauguccucacgcuggagcaaaaagcuucuacaaaaauuuaauauggcuaguuaaaaaaggaaauucauacccaaagcucagccaauccuacauuaaugauaaagggaaagaaguccucgugcuguggggcauucaccauccaucuacuacugcugaccaacaaagucucuaucagaaugcagaugcauauguuuuuguggggacaucaagauacagcaagaaguucaagccggaaauagcaauaagacccaaagugagggaucaagaagggagaaugaacuauuacuggacacuaguagagccgggagacaaaauaacauucgaagcaacuggaaaucuagugguaccgagauaugcauucacaauggaaagaaaugcuggaucugguauuaucauuucagauacaccaguccacgauugcaauacaacuugucagacacccgagggugcuauaaacaccagccucccauuucagaauauacauccgaucacaauuggaaaauguccaaaguauguaaaaagcacaaaauugagacuggccacaggauugaggaaugucccgucuauucaaucuagaggccuauucggggccauugccggcuucauugaagggggguggacagggaugguagauggaugguacgguuaucaccaucaaaaugagcaggggucaggauaugcagccgaccugaagagcacacaaaaugccauugacaagauuacuaacaaaguaaauucuguuauugaaaagaugaauacacaguucacagcaguggguaaagaguucaaccaccuggaaaaaagaauagagaauuuaaauaaaaaaguugaugaugguuuccuggacauuuggacuuacaaugccgaacuguugguucuauuggaaaaugaaagaacuuuggacuaccacgauucaaaugugaagaacuuguaugaaaagguaagaaaccaguuaaaaaacaaugccaaggaaauuggaaacggcugcuuugaauuuuaccacaaaugcgauaacacgugcauggaaagugucaaaaaugggacuuaugacuacccaaaauacucagaggaagcaaaauuaaacagagaaaaaauagaugggguaaagcuggaaucaacaaggauuuaccagauuuuggcgaucuauucaacugucgccaguucauugguacugguagucucccugggggcaaucagcuucuggaugugcucuaaugggucucuacaguguagaauauguauuuaa

SEQ ID NO: 43994 - RNA, 1701 nt, Artificial Sequence; identical to SEQ ID NO: 43993
  derived and/or modified CDS sequence (wt) from hemagglutinin__InfluenzaA__AHV83862

SEQ ID NO: 43995 - RNA, 1701 nt, Artificial Sequence; identical to SEQ ID NO: 43913
  derived and/or modified CDS sequence (wt) from hemagglutinin__InfluenzaA__AHV83863

SEQ ID NO: 43996 - RNA, 1701 nt, Artificial Sequence
  derived and/or modified CDS sequence (wt) from hemagglutinin__InfluenzaA__AHV83864
augaaggcaauacuaguaguucugcuauauacauuugcaaccgcaaaugcagacacauuauguauagguuaucaugcgaacaauucaacagacacuguagacacaguacuagaaaagaauguaacaguaacacacucuguuaaccuucuagaagacaagcauaacgggaaacuaugcaaacuaagagggguagccccauugcauuuggguaaauguaacauugcuggcuggauccugggaaauccagagugugaaucacucuccacagcaaguucaugguccuacauuguggaaacaucuaguucagacaauggaacguguuacccaggagauuucaucaauuaugaggagcuaagagagcaauugagcucagugucaucauuugaaagguuugagauauuccccaagacaaguucauggcccaaucaugacucgaacaaagguguaacggcagcauguccucacgcuggagcaaaaagcuucuacaaaaauuuaauauggcuaguuaaaaaaggaaauucauacccaaagcucagccaauccuacauuaaugauaaagggaaagaaguccucgugcuguggggcauucaccacccaucuacuacugcugaccaacaaagucucuaucagaaugcagaugcauauguuuuuguggggacaucaagauacagcaagaaguucaagccggaaauagcaauaagacccaaagugagggaucaagaagggagaaugaacuauuacuggacacuaguagagccgggagacaaaauaacauucgaagcaacuggaaaucuagugguaccgagauaugcauucacaauggaaagaaaugcuggaucugguauuaucauuucagauacaccaguccacgauugcaauacaacuugucagacacccgagggugcuauaaacaccagccucccauuucagaauauacauccgaucacaauuggaaaauguccaaaguauguaaaaagcacaaaauugagacuggccacaggauugaggaaugucccgucuauucaaucuagaggccuauucggggccauugccggcuucauugaaggaggguggacagggaugguagauggaugguacgguuaucaccaucaaaacgagcaggggucaggauaugcagccgaccugaagagcacacaaaaugccauugacaagauuacuaacaaaguaaauucuguuauugaaaagaugaauacacaguucacagcaguggguaaagaguucaaccaccuggaaaaaagaauagagaauuuaaauaaaaaaguugaugaugguuuccuggacauuuggacuuacaaugccgaacuguugguucuauuggaaaaugaaagaacuuuggacuaccacgauucaaaugugaagaacuuguaugaaaagguaagaaaccaguuaaaaaacaaugccaaggaaauuggaaacggcugcuuugaauuuuaccacaaaugcgauaacacgugcauggaaagugucaaaaaugggacuuaugacuacccaaaauacucugaggaagcaaaauuaaacagagaaaaaauagaugggguaaagcuggaaucaacaaggauuuaccagauuuuggcgaucuauucaacugucgccaguucauugguacugguagucucccugggggcaaucagcuucuggaugugcucuaaugggucucuacaguguagaauauguauuuaa

SEQ ID NO: 43997 - RNA, 1701 nt, Artificial Sequence
  derived and/or modified CDS sequence (wt) from hemagglutinin__InfluenzaA__AHV83866
augaaggcaauacuaguaguucugcuauauacauuugcaaccgcaaaugcagacacauuauguauagguuaucaugcgaacaauucaacagacacuguagacacaguacuagaaaagaauguaacaguaacacacucuguuaaccuucuagaagacaagcauaacgggaaacuaugcaaacuaagagggguggccccauugcauuuggguaaauguaacauugcuggcuggauccugggaaauccagagugugaaucacucuccacagcaaguucaugguccuacauuguggaaacaucuaguucagacaauggaacguguuacccaggagauuucaucaauuaugaggagcuaagagagcaauugagcucagugucaucauuugaaagguuugagauauuccccaagacaaguucauggcccaaucaugacucgaacaaagguguaacggcagcauguccucacgcuggagcaaaaagcuucuacaaaaauuuaauauggcuaguuaaaaaaggaaauucauacccaaagcucagccaauccuacauuaaugauaaagggaaagaaguccucgugcuguggggcauucaccauccaucuacuacugcugaccaacaaagucucuaucagaaugcagaugcauauguuuuuguggggacaucaagauacagcaagaaguucaagccggaaauagcaauaagacccaaagugagggaucaagaagggagaaugaacuauuacuggacacuaguagagccgggagacaaaauaacauucgaagcaacuggaaaucuagugguaccgagauaugcauucacaauggaaagaaaugcuggaucugguauuaucauuucagauacaccaauccacgauugcaauacaacuugucagacacccgagggugcuauaaacaccagccucccauuucagaauauacauccgaucacaauuggaaaauguccaaaguauguaaaaagcacaaaauugagacuggccacaggauugaggaaugucccgucuauucaaucuagaggccuauucggggccauugccggcuucauugaagggggguggacagggaugguagauggaugguacgguuaucaccaucaaaaugagcaggggucaggauacgcagccgaccugaagagcacacaaaaugccauugacaagauuacuaacaaaguaaauucuguuauugaaaagaugaauacacaguucacagcaguggguaaagaguucaaccaccuggaaaaaagaauagagaauuuaaauaaaaaaguugaugaugguuuccuggacauuuggacuuacaaugccgaacuguugguucuauuggaaaaugaaagaacuuuggacuaccacgauucaaaugugaagaacuuguaugaaaagguaagaaaccaguuaaaaaacaaugccaaggaaauuggaaacggcugcuuugaauuuuaccacaaaugcgaugacacgugcauggaaagugucaaaaaugggacuuaugacuacccaaaauacucagaagaagcaaaauuaaacagagaaaaaauagaugggguaaagcuggaaucaacaaggauuuaccagauuuuggcgaucuauucaacugucgccaguucauugguacugguagucucccugggggcaaucagcuucuggaugugcucuaaugggucucuacaguguagaauauguauuuaa

SEQ ID NO: 43998 - RNA, 1701 nt, Artificial Sequence
  derived and/or modified CDS sequence (wt) from hemagglutinin__InfluenzaA__AHV83867
augaaggcaauacuaguaguucugcuauauacauuugcaaccgcaaaugcagacacauuauguauagguuaucaugcgaacaauucaacagacacuguagacacaguacuagaaaagaauguaacaguaacacacucuguuaaccuucuagaagacaagcauaacgggaaacuaugcaaacuaagagggguggccccauugcauuuggguaaauguaacauugcuggcuggauccugggaaauccagagugugaaucacucuccacagcaaguucaugguccuacauuguggaaacaucuaguucagacaauggaacguguuacccaggagauuucaucaauuaugaggagcuaagagagcaauugagcucagugucaucauuugaaagguuugagauauuccccaagacaaguucauggcccaaucaugacucgaacaaagguguaacggcagcauguccucacgcuggagcaaaaagcuucuacaaaaauuuaauauggcuaguuaaaaaaggaaauucauacccaaagcucagccaauccuacauuaaugauaaagggaaagaaguccucgugcuguggggcauucaccauccaucuacuacugcugaccaacaaagucucuaucagaaugcagaugcauauguuuuuguggggacaucaagauacagcaagaaguucaagccggaaauagcaauaagacccaaagugagggaucaagaagggagaaugaacuauuacuggacacuaguagagccgggagacaaaauaacauucgaagcaacuggaaaucuagugguaccgagauaugcauucacaauggaaagaaaugcuggaucugguauuaucauuucagauacaccaguccacgauugcaauacaacuugucagacacccgagggugcuauaaacaccagccucccauuucagaauauacauccgaucacaauuggaaaauguccaaaguauguaaaaagcacaaaauugagacuggccacaggauugaggaaugucccgucuauucaaucuagaggccuauucggggccauugccggcuucauugaagggggguggacagggaugguagauggaugguacgguuaucaccaucaaaaugagcaggggucaggauacgcagccgaccugaagagcacacaaaaugccauugacaagauuacuaacaaaguaaauucuguuauugaaaagaugaauacacaguucacagcaguggguaaagaguucaaccaccuggaaaaaagaauagagaauuuaaauaaaaaaguugaugaugguuuccuggacauuuggacuuacaaugccgaacuguugguucuauuggaaaaugaaagaacuuuggacuaccacgauucaaaugugaagaacuuguaugaaaagguaagaaaccaguuaaaaaacaaugccaaggaaauuggaaacggcugcuuugaauuuuaccacaaaugcgaugacacgugcauggaaagugucaaaaaugggacuuaugacuacccaaaauacucagaagaagcaaaauuaaacagagaaaaaauagaugggguaaagcuggaaucaacaaggauuuaccagauuuuggcgaucuauucaacugucgccaguucauugguacugguagucucccugggggcaaucagcuucuggaugugcucuaaugggucucuacaguguagaauauguauuuaa

SEQ ID NO: 43999 - RNA, 1701 nt, Artificial Sequence
  derived and/or modified CDS sequence (wt) from hemagglutinin__InfluenzaA__AHV83868
augaaggcaauacuaguaguucugcuauauacauuugcaaccgcaaaugcagacacauuauguauagguuaucaugcgaacaauucgacagacacuguagacacaguacuagaaaagaauguaacaguaacacacucuguuaaccuucuagaagacaagcauaacgggaaacuaugcaaacuaagagggguagccccauugcauuuggguaaauguaacauugcuggcuggauccugggaaauccagagugugaaucacucuccacagcaaguucaugguccuacauuguggaaacaucuaguucagacaauggaacguguuacccaggagauuucaucaauuaugaggagcuaagagagcaauugagcucagugucaucauuugaaagguuugagauauuccccaagacaaguucauggcccaaucaugacucgaacaaagguguaacggcagcauguccucacgcuggagcaaaaagcuucuacaaaaauuuaauauggcuaguuaaaaaaggaaauucauacccaaagcucagccaauccuacauuaaugauaaagggaaagaaguccucgugcuguggggcauucaccacccaucuacuacugcugaccaacaaagucucuaucagaaugcagaugcauauguuuuuguggggacaucaagauacagcaagaaguucaagccggaaauagcaauaagacccaaagugagggaucaagaagggagaaugaacuauuacuggacacuaguagagccgggagacaaaauaacauucgaagcaacuggaaaucuagugguaccgagauaugcauucacaauggaaagaaaugcuggaucugguauuaucauuucagauacaccaguccacgauugcaauacaacuugucagacacccgagggugcuauaaacaccagccucccauuucagaauauacauccgaucacaauuggaaaauguccaaaguauguaaaaagcacaaaauugagacuggccacaggauugaggaaugucccgucuauucaaucuagaggccuauucggggccauugccggcuucauugaaggaggguggacagggaugguagauggaugguacgguuaucaccaucaaaacgagcaggggucaggauaugcagccgaccugaagagcacacaaaaugccauugacaagauuacuaacaaaguaaauucuguuauugaaaagaugaauacacaguucacagcaguggguaaagaguucaaccaccuggaaaaaagaauagagaauuuaaauaaaaaaguugaugaugguuuccuggacauuuggacuuacaaugccgaacuguugguucuauuggaaaaugaaagaacuuuggacuaccacgauucaaaugugaagaacuuguaugaaaagguaagaaaccaguuaaaaaacaaugccaaggaaauuggaaauggcugcuuugaauuuuaccacaaaugcgauaacacgugcauggaaagugucaaaaaugggacuuaugacuacccaaaauacucagaggaagcaaaauuaaacagagaaaaaauagaugggguaaagcuggaaucaacaaggauuuaccagauuuuggcgaucuauucaacugucgccaguucauugguacugguagucucccugggggcaaucagcuucuggaugugcucuaaugggucucuacaguguagaauauguauuuaa

SEQ ID NO: 44000 - RNA, 1701 nt, Artificial Sequence
  derived and/or modified CDS sequence (wt) from hemagglutinin__InfluenzaA__AHV83869
augaaggcaauacuaguaguucugcuauauacauuugcaaccgcaaaugcagacacauuauguauagguuaucaugcgaacaauucaacagacacuguagacacaguacuagaaaagaauguaacaguaacacacucuguuaaccuucuagaagacaagcauaacgggaaacuaugcaaacuaagagggguagccccauugcauuuggguaaauguaacauugcuggcuggauccugggaaauccagagugugaaucacucuccacagcaaguucaugguccuacauuguggaaacaucuaguucagacaauggaacguguuacccaggagauuucaucaauuaugaggagcuaagagagcaauugagcucagugucaucauuugaaagguuugagauauuccccaagacaaauucauggcccaaucaugacucgaacaaagguguaacggcagcauguccucacgcuggagcaaaaagcuucuacaaaaauuuaauauggcuaguuaaaaaaggaaauucauacccaaagcucagccaauccuacauuaaugauaaagggaaagaaguccucgugcuguggggcauucaccacccaucuacuacugcugaccaacaaagucucuaucagaaugcagaugcauauguuuuuguggggacaucaagauacagcaagaaguucaagccggaaauagcaauaagacccaaagugagggaucaagaagggagaaugaacuauuacuggacacuaguagagccgggagacaaaauaacauucgaagcaacuggaaaucuagugguaccgagauaugcauucacaauggaaagaaaugcuggaucugguauuaucauuucagauacaccaguccacgauugcaauacaacuugucagacacccgagggugcuauaaacaccagccucccauuucagaauauacauccgaucacaauuggaaaauguccaaaguauguaaaaagcacaaaauugagacuggccacaggauugaggaaugucccgucuauucaaucuagaggccuauucggggcuauugccggcuucauugaaggaggguggacagggaugguagauggaugguacgguuaucaccaucaaaaugagcaggggucaggauaugcagccgaccugaagagcacacaaaaugccauugacaagauuacuaacaaaguaaauucuguuauugaaaagaugaauacacaguucacagcaguggguaaagaguucaaccaccuggaaaaaagaauagagaauuuaaauaaaaaaguugaugaugguuuccuggacauuuggacuuacaaugccgaacuguugguucuauuggaaaaugaaagaacuuuggacuaccacgauucaaaugugaagaacuuguaugaaaagguaagaaaccaguuaaaaaacaaugccaaggaaauuggaaacggcugcuuugaauuuuaccacaaaugcgauaacacgugcauggaaagugucaaaaaugggacuuaugacuacccaaaauacucagaggaagcaaaauuaaacagagaaaaaauagaugggguaaagcuggaaucaacaaggauuuaccagauuuuggcgaucuauucaacugucgccaguucauugguacugguagucucccugggggcaaucagcuucuggaugugcucuaaugggucucuacaauguagaauauguauuuaa

SEQ ID NO: 44001 - RNA, 1701 nt, Artificial Sequence
  derived and/or modified CDS sequence (wt) from hemagglutinin__InfluenzaA__AHV83870
augaaggcaauacuaguaguucugcuauauacauuugcaaccgcaaaugcagacacauuauguauagguuaucaugcgaacaauucaacagacacuguagacacaguacuagaaaagaauguaacaguaacacacucuguuaaccuucuagaagacaagcauaacgggaaacuaugcaaacuaagagggguagccccauugcauuuggguaaauguaacauugcuggcuggauccugggaaauccagagugugaaucacucuccacagcaaguucaugguccuauauuguggaaacaucuaguucagacaauggaacguguuacccaggagauuucaucaauuaugaggagcuaagagagcaauugagcucaguaucaucauuugaaagguuugagauauuccccaagacaaguucauggcccaaucaugacucgaacaaagguguaacagcagcauguccucacgcuggagcaaaaagcuucuacaaaaauuuaauauggcuagucaaaaaaggaaauucauacccaaagcucagccaauccuacauuaaugauaaagggaaagaaguccucgugcuguggggcauucaccacccaucuacuacugcugaccaacaaagucucuaucagaaugcagaugcauauguuuuuguggggacaucaagauacagcaagaaguucaagccggaaauagcaauaagacccaaagugagggaucaagaagggagaaugaacuauuacuggacacuaguagagccgggagacaaaauaacauucgaagcaacuggaaaucuagugguaccgagauaugcauucacaauggaaagaaaugcuggaucugguauuaucauuucagauacaccaguccacgauugcaauacaacuugucagacacccgagggugcuauaaacaccagccucccauuucagaauauacauccgaucacaauuggaaaauguccaaaguauguaaaaagcacaaaauugagacuggccacaggauugaggaaugucccgucuauucaaucuagaggccuauucggggccauugccggcuucauugaagggggguggacagggaugguagauggaugguacgguuaucaccaucaaaaugagcaggggucaggauaugcagccgaccugaagagcacacaaaaugccauugacaagauuacuaacaaaguaaauucuguuauugaaaagaugaauacacaguucacagcaguggguaaagaguucaaccaccuggaaaaaagaauagagaauuuaaauaaaaaaguugaugaugguuuccuggacauuuggacuuacaaugccgaacuguugguucuauuggaaaaugaaagaacuuuggacuaccacgauucaaaugugaagaacuuguaugaaaagguaagaaaccaguuaaaaaacaaugccaaggaaauuggaaacggcugcuuugaauuuuaccacaaaugcgauaacacgugcauggaaagugucaaaaaugggacuuaugacuacccaaaauacucagaggaagcaaaauuaaacagagaaaaaauagaugggguaaagcuggaaucaacaaggauuuaccagauuuuggcgaucuauucaacugucgccaguucauugguacugguagucucccugggggcaaucagcuucuggaugugcucuaaugggucucuacaguguagaauauguauuuaa

SEQ ID NO: 44002 - RNA, 1701 nt, Artificial Sequence; identical to SEQ ID NO: 44001
  derived and/or modified CDS sequence (wt) from hemagglutinin__InfluenzaA__AHV83871

SEQ ID NO: 44003 - RNA, 1701 nt, Artificial Sequence
  derived and/or modified CDS sequence (wt) from hemagglutinin__InfluenzaA__AHV83872
augaaggcaauacuaguaguucugcuauauacauuugcaaccgcaaaugcagacacauuauguauagguuaucaugcgaacaauucaacagacacuguagacacaguacuagaaaagaauguaacaguaacacacucuguuaaccuucuagaagacaagcauaacgggaaacuaugcaaacuaagagggguagccccauugcauuuggguaaauguaacauugcuggcuggauccugggaaauccagagugugaaucacucuccacagcaaguucaugguccuacauuguggaaacaucuaguucagacaauggaacguguuacccaggagauuucaucaauuaugaggagcuaagagagcaauugagcucagugucaucauuugaaagguuugagauauuccccaagacaaguucauggcccaaucaugacucgaacaaagguguaacggcagcauguccucacgcuggagcaaaaagcuucuacaaaaauuuaauauggcuaguuaaaaaaggaaauucauacccaaagcucagccaauccuacauuaaugauaaagggaaagaaguccucgugcuguggggcauucaccacccaucuacuacugcugaccaacaaagucucuaucagaaugcagaugcauauguuuuuguggggacaucaagauacagcaagaaguucaagccggaaauagcaauaagacccaaagugagggaucaagaagggagaaugaacuauuacuggacacuaguagagccgggagacaaaauaacauucgaagcaacuggaaaucuagugguaccgagauaugcauucacaauggaaagaaaugcuggaucugguauuaucauuucagauacaccaguccacgauugcaauacaacuugucagacacccgagggugcuauaaacaccagccucccauuucagaauauacauccgaucacaauuggaaaauguccaaaguauguaaaaagcacaaaauugagacuggccacaggauugaggaaugucccgucuauucaaucuagaggccuauucggggccauugccggcuucauugaaggaggguggacagggaugguagauggaugguacgguuaucaccaucaaaacgagcaggggucaggauaugcagccgaccugaagagcacacaaaaugccauugacaagauuacuaacaaaguaaauucuguuauugaaaagaugaauacacaguucacagcaguggguaaagaguucaaccaccuggaaaaaagaauagagaauuuaaauaaaaaaguugaugaugguuuccuggacauuuggacuuacaaugccgaacuguugguucuauuggaaaaugaaagaacuuuggacuaccacgauucaaaugugaagaacuuguaugaaaagguaagaaaccaguuaaaaaacaaugccaaggaaauuggaaacggcugcuuugaauuuuaccacaaaugcgauaacacgugcauggaaagugucaaaaaugggacuuaugacuacccaaaauacucagaggaagcaaaauuaaacagagaaaaaauagaugggguaaagcuggaaucaacaaggauuuaccagauuuuggcgaucuauucaacugucgccaguucauugguacugguagucucccugggggcaaucagcuucuggaugugcucuaaugggucucuacaguguagaauauguauuuaa

SEQ ID NO: 44004 - RNA, 1701 nt, Artificial Sequence
  derived and/or modified CDS sequence (wt) from hemagglutinin__InfluenzaA__AHV83873
augaaggcaauacuaguaguucugcuauauacauuugcaaccacaaaugcagacacauuauguauagguuaucaugcgaacaauucaacagacacuguagacacaguacuagaaaagaauguaacaguaacacacucuguuaaccuucuagaagacaagcauaacgggaaacuaugcaaacuaagagggguagccccauugcauuuggguaaauguaacauugcuggcuggauccugggaaauccagagugugaaucacucuccacagcaaguucaugguccuacauuguggaaacaucuaguucagacaauggaacguguuacccaggagauuucaucaauuaugaggagcuaagagagcaauugagcucagugucaucauuugaaagguuugagauauuccccaagacaaguucauggcccaaucaugacucgaacaaagguguaacggcagcauguccucacgcuggagcaaaaagcuucuacaaaaauuuaauauggcuaguuaaaaaaggaaauucauacccaaagcucagccaauccuacauuaaugauaaagggaaagaaguccuugugcuguggggcauucaccauccaucuacuguugcugaccaacaaagucucuaucagaaugcagaugcauauguuuuuguggggacaucaagauacagcaagaaguucaagccggaaauagcaauaagacccaaagugagggaucaagaagggagaaugaacuauuacuggacacuaguagagccgggagacaaaauaacauucgaagcaacuggaaaucuagugguaccgagauaugcauucacaauggaaagaaaugcuggaucugguauuaucauuucagauacaccaguccacgauugcaauacaacuugucagacacccgagggugcuauaaacaccagccucccauuucagaauauacauccgaucacaauuggaaaauguccaaaguauguaaaaagcacaaaauugagacuggccacaggauugaggaaugucccgucuauucaaucuagaggccuauucggggccauugccggcuucauugaagggggguggacagggaugguagauggaugguacgguuaucaccaucaaaaugagcaggggucaggauaugcagccgaccugaagagcacacaaaaugccauugacaagauuacuaacaaaguaaauucuguuauugaaaagaugaauacacaguucacagcaguggguaaagaguucaaccaccuggaaaaaagaauagagaauuuaaauaaaaaaguugaugaugguuuccuggacauuuggacuuacaaugccgaacuguugguucuauuggaaaaugaaagaacuuuggacuaccacgauucaaaugugaagaacuuguaugaaaagguaagaaaccaguuaaaaaacaaugcaaaggaaauuggaaacggcugcuuugaauuuuaccacaaaugcgauaacacgugcauggaaagugucaaaaaugggacuuaugacuacccaaaauacucagaggaagcaaaauuaaacagagaaaaaauagaugggguaaagcuggaaucaacaaggauuuaccagauuuuggcgaucuauucaacugucgccaguucauugguacugguagucucccugggggcaaucaguuucuggaugugcucuaaugggucucuacaguguagaauauguauuuaa

SEQ ID NO: 44005 - RNA, 1701 nt, Artificial Sequence
  derived and/or modified CDS sequence (wt) from hemagglutinin__InfluenzaA__AHV83874
augaaggcaauacuaguaguucugcuauauacauuugcaaccgcaaaugcagacacauuauguauagguuaucaugcgaacaauucaacagacacuguagacacaguacuagaaaagaauguaacaguaacacacucuguuaaccuucuagaagacaagcauaacgggaaacuaugcaaacuaagagggguagccccauugcauuuggguaaauguaacauugcuggcuggauccugggaaauccagagugugaaucacucuccacagcaaguucaugguccuacauuguggaaacaucuaguucagacaauggaacguguuacccaggagauuucaucaauuaugaggagcuaagagagcaauugagcucaguaucaucauuugaaagguuugagauauuccccaagacaaguucauggcccaaucaugacucgaacaaagguguaacggcagcauguccucacgcuggagcaaaaagcuucuacaaaaauuuaauauggcuaguuaaaaaaggaaauucauacccaaagcucagccaauccuacauuaaugauaaagggaaagaaguccucgugcuguggggcauucaccacccaucuacuacugcugaccaacaaagucucuaucagaaugcagaugcauauguuuuuguggggacaucaagauacagcaagaaguucaagccggaaauagcaauaagacccaaagugagggaucaagaagggagaaugaacuauuacuggacacuaguagagccgggagacaaaauaacauucgaagcaacuggaaaucuagugguaccgagauaugcauucacaauggaaagaaaugcuggaucugguauuaucauuucagauacaccaguccacgauugcaauacaacuugucagacacccgagggugcuauaaacaccagccucccauuucagaauauacauccgaucacaauuggaaaauguccaaaguauguaaaaagcacaaaauugagacuggccacaggauugaggaaugucccgucuauucaaucuagaggccuauucggggccauugccggcuucauugaagggggguggacagggaugguagauggaugguacgguuaucaccaucaaaaugagcaggggucaggauaugcagccgaccugaagagcacacaaaaugccauugacaagauuacuaacaaaguaaauucuguuauugaaaagaugaauacacaguucacagcaguggguaaagaguucaaccaccuggaaaaaagaauagagaauuuaaauaaaaaaguugaugaugguuuccuggacauuuggacuuacaaugccgaacuguugguucuauuggaaaaugaaagaacuuuggacuaccacgauucaaaugugaagaacuuguaugaaaagguaagaaaccaguuaaaaaacaaugccaaggaaauuggaaacggcugcuuugaauuuuaccacaaaugcgauaacacgugcauggaaagugucaaaaaugggacuuaugacuacccaaaauacucagaggaagcaaaauuaaacagagaaaaaauagaugggguaaagcuggaaucaacaaggauuuaccagauuuuggcgaucuauucaacugucgccaguucauugguacugguagucucccugggggcaaucagcuucuggaugugcucuaaugggucucuacaguguagaauauguauuuaa

SEQ ID NO: 44006 - RNA, 1701 nt, Artificial Sequence; identical to SEQ ID NO: 43913
  derived and/or modified CDS sequence (wt) from hemagglutinin__InfluenzaA__AHV83875

SEQ ID NO: 44007 - RNA, 1701 nt, Artificial Sequence; identical to SEQ ID NO: 43005
  derived and/or modified CDS sequence (wt) from hemagglutinin__InfluenzaA__AHV83876

SEQ ID NO: 44008 - RNA, 1701 nt, Artificial Sequence
  derived and/or modified CDS sequence (wt) from hemagglutinin__InfluenzaA__AHV83877
augaaggcaauacuaguaguucugcuauauacauuugcaaccgcaaaugcagacacauuauguauagguuaucaugcgaacaauucaacagacacuguagacacaguacuagaaaagaauguaacaguaacacacuccguuaaccuucuagaagacaagcauaacgggaaacuaugcaaacuaagagggguagccccauugcauuuggguaaauguaacauugcuggcuggauccugggaaauccagagugugaaucacucuccacagcaaguucaugguccuacauuguggaaacaucuaguucagacaauggaacguguuacccaggagauuucaucaauuaugaggagcuaagagagcaauuaagcucagugucaucauuuaaaagguuugagauauuccccaagacaaguucauggcccaaucaugacucgaacaaagguguaacggcagcauguccucacgcuggagcaaaaagcuucuacaaaaauuuaauauggcuaguuaaaaaaggaaauucauacccaaagcucagccaauccuacauuaaugauaaagggaaagaaguccucgugcuguggggcauucaccauccaucuacuacugcugaccaacaaagucucuaucagaaugcagaugcauauguuuuuguggggacaucaagauacagcaagaaguucaagccggaaauagcaauaagacccaaagugagggaucaagaagggagaaugaacuauuacuggacacuaguagagccgggagacaaaauaacauucgaagcaacuggaaaucuagugguaccgagauaugcauucacaauggaaagaaaugcuggaucugguauuaucauuucagauacaccaguccacgauugcaauacaacuugucagacacccgagggugcuauaaacaccagccucccauuucagaauauacauccgaucacaauuggaaaauguccaaaguauguaaaaagcacaaaauugagacuggccacaggauugaggaaugucccgucuauucaaucuagaggccuauucggggccauugccggcuucauugaagggggguggacagggaugguagauggaugguacgguuaucaccaucaaaaugagcaggggucaggauaugcagccgaccugaagagcacacaaaaugccauugacaagauuacuaacaaaguaaauucuguuauugaaaagaugaauacacaguucacagcaguggguaaagaguucaaccaccuggaaaaaagaauagagaauuuaaauaaaaaaguugaugaugguuuccuggacauuuggacuuacaaugccgaacuguugguucuauuggaaaaugaaagaacuuuggacuaccacgauucaaaugugaagaacuuguaugaaaagguaagaaaccaguuaaaaaacaaugccaaggaaauuggaaacggcugcuuugaauuuuaccacaaaugcgauaacacgugcauggaaagugucaaaaaugggacuuaugacuacccaaaauacucagaggaagcaaaauuaaacagagaaaaaauagaugggguaaagcuggaaucaacaaggauuuaccagauuuuggcgaucuauucaacugucgccaguucauugguacugguagucucccugggggcaaucagcuucuggaugugcucuaaugggucucuacaguguagaauauguauuuaa

SEQ ID NO: 44009 - RNA, 1701 nt, Artificial Sequence
  derived and/or modified CDS sequence (wt) from hemagglutinin__InfluenzaA__AHV83878
augaaggcaauacuaguaguucugcuauauacauuugcaaccgcaaaugcagacacauuauguauagguuaucaugcgaacaauucaacagacacuguagacacaguacuagaaaagaauguaacaguaacacacucuguuaaccuucuagaagacaagcauaacgggaaacuaugcaaacuaagagggguagccccauugcauuuggguaaauguaacauugcuggcuggauccugggaaauccagagugugaaucacucuccacagcaaguucaugguccuacauuguggaaacaucuaguucagacaauggaacguguuacccaggagauuucaucaauuaugaggagcuaagagagcaauugagcucagugucaucauuugaaagguuugagauauuccccaagacaaguucauggcccaaucaugacucgaacaaagguguaacggcagcauguccucacgcuggagcaaaaagcuucuacaaaaauuuaauauggcuaguuaaaaaaggaaauucauacccaaagcuccgccaauccuacauuaaugacaaagggaaagaaguccucgugcuguggggcauucaccacccaucuacuacuacugaccaacaaagucucuaucagaaugcagaugcauauguuuuuguggggacaucaagauacagcaagaaguucaagccggaaauagcaauaagacccaaagugagggaucaagaagggagaaugaacuauuacuggacacuaguagagccgggagacaaaauaacauucgaagcaacuggaaaucuagugguaccgagauaugcauucacaauggaaagaaaugcuggaucugguauuaucauuucagauacaccaguccacgauugcaauacaacuugucagacacccgagggugcuauaaacaccagccucccauuucagaauauacauccgaucacaauuggaaaauguccaaaguauguaaaaagcacaaaauugagacuggccacaggauugaggaaugucccgucuauucaaucuagaggccuauucggggccauugccggcuucauugaaggaggguggacagggaugguagauggaugguacgguuaucaccaucaaaaugagcaggggucaggauaugcagccgaccugaagagcacacaaaaugccauugacaagauuacuaacaaaguaaauucuguuauugaaaagaugaauacacaguucacagcaguggguaaagaguucaaccaccuggaaaaaagaauagagaauuuaaauaaaaaaguugaugaugguuuccuggacauuuggacuuacaaugccgaacuguugguucuauuggaaaaugaaagaacuuuggacuaccacgauucaaaugugaaaaacuuguaugaaaagguaagaaaccaguuaaaaaacaaugccaaggaaauuggaaacggcugcuuugaauuuuaccacaaaugcgauaacacgugcauggaaagugucaaaaaugggacuuaugacuacccaaaauacucagaggaagcaaaauuaaacagagaaaaaauagaugggguaaagcuggaaucaacaaggauuuaccagauuuuggcgaucuauucaacugucgccaguucauugguacugguagucucccugggggcaaucagcuucuggaugugcucuaaugggucucuacaguguagaauauguauuuaa

SEQ ID NO: 44010 - RNA, 1701 nt, Artificial Sequence; identical to SEQ ID NO: 44009
  derived and/or modified CDS sequence (wt) from hemagglutinin__InfluenzaA__AHV83879

SEQ ID NO: 44011 - RNA, 1701 nt, Artificial Sequence
  derived and/or modified CDS sequence (wt) from hemagglutinin__InfluenzaA__AHV83881
augaaggcaacacuaguaguucugcuauauacauuugccaccgcaaaugcagacacauuauguauagguuaucaugcgaacaauucaacagacacuguagacacaguacuagaaaagaauguaacaguaacacacucuguuaaccuucuagaagacaagcauaacgggaaacuaugcaaacuaagagggguagccccauugcauuuggguaaauguaacauugcuggcuggauccugggaaauccagagugugaaucacucuccacagcaaguucaugguccuacauuguggaaacaucuaguucagacaauggaacguguuacccaggagauuucaucaauuaugaggagcuaagagagcaauugagcucagugucaucauuugaaagguuugagauauuccccaagacaaguucauggcccaaucaugacucgaacaaagguguaacggcagcauguccucacgcuggagcaaaaagcuucuacaaaaauuuaauauggcuaguuaaaaaaggaaauucauacccaaagcucagccaauccuacauuaaugauaaagggaaagaaguccucgugcuguggggcauucaccauccaucuacuacugcugaccaacaaagucucuaucagaaugcagaugcauauguuuuuguggggacaucaagauacagcaagaaguucaagccggaaauagcaauaagacccaaagugagggaucaagaagggagaaugaacuauuacuggacacuaguagagccgggagacaaaauaacauucgaagcaacuggaaaucuagugguaccgagauaugcauucacaauggaaagaaaugcuggaucugguauuaucauuucagauacaccaguccacgauugcaauacaacuugucagacacccgagggugcuauaaacaccagccucccauuucagaauauacauccgaucacaauuggaaaauguccaaaguauguaaaaagcacaaaauugagacuggccacaggauugaggaaugucccgucuauucaaucuagaggccuauucggggccauugccggcuucauugaagggggguggacagggaugguagauggaugguacgguuaucaccaucaaaaugagcaggggucaggauaugcagccgaccugaagagcacacaaaaugccauugacaagauuacuaacaaaguaaacucuguuauugaaaagaugaauacacaguucacagcaguggguaaagaguucaaccaccuggaaaaaagaauagagaauuuaaauaaaaagguugaugaugguuuccuggacauuuggacuuacaaugccgaacuguugguucuauuggaaaaugaaagaacuuuggacuaccacgauucaaaugugaagaacuuguaugaaaagguaagaaaccaguuaaaaaacaaugccaaggaaauuggaaacggcugcuuugaauuuuaccacaaaugcgauaacacgugcauggaaagugucaaaaaugggacuuaugacuacccaaaauacucagaggaagcaaaauuaaacagagaaaaaauagaugggguaaagcuggaaucaacaaggauuuaccagauuuuggcgaucuauucaacugucgccaguucauugguacugguagucucccugggggcaaucagcuucuggaugugcucuaaugggucucuacaguguagaauauguauuuaa

SEQ ID NO: 44012 - RNA, 1701 nt, Artificial Sequence; identical to SEQ ID NO: 43033
  derived and/or modified CDS sequence (wt) from hemagglutinin__InfluenzaA__AHV83882

SEQ ID NO: 44013 - RNA, 1701 nt, Artificial Sequence; identical to SEQ ID NO: 43015
  derived and/or modified CDS sequence (wt) from hemagglutinin__InfluenzaA__AHV83883

SEQ ID NO: 44014 - RNA, 1701 nt, Artificial Sequence; identical to SEQ ID NO: 43002
  derived and/or modified CDS sequence (wt) from hemagglutinin__InfluenzaA__AHV83884

SEQ ID NO: 44015 - RNA, 1701 nt, Artificial Sequence
  derived and/or modified CDS sequence (wt) from hemagglutinin__InfluenzaA__AHV83885
augaaggcaauacuaguaguucugcuauauacauuugcaaccgcaaaugcagacacauuauguauagguuaucaugcgaacaauucaacagacacuguagacacaguacuagaaaagaauguaacaguaacacacucuguuaaccuucuagaagacaagcauaacgggaaacuaugcaaacuaagagggguagccccauugcauuuggguaaauguaacauugcuggcuggauccugggaaauccugagugugaaucacucuccacagcaaguucaugguccuacauuguggaaacaucuaguucagacaauggaacguguuacccaggagauuucaucaauuaugaggagcuaagagagcaauugagcucagugucaucauuugaaagguuugagauauuccccaagacaaguucauggcccaaucaugacucgaacaaagguguaacggcagcauguccucacgcuggagcaaaaagcuucuacaaaaauuuaauauggcuaguuaaaaaaggaaauucauacccaaagcucagccaauccuacauuaaugauaaagggaaagaaguccucgugcuguggggcauucaccacccaucuacuacugcugaccaacaaagucucuaucagaaugcagaugcauauguuuuuguggggacaucaagauacagcaagaaguucaagccggaaauagcaauaagacccaaagugagggaucaagaagggagaaugaacuauuacuggacacuaguagagccgggagacaaaauaacauucgaagcaacuggaaaucuagugguaccgagauaugcauucacaauggaaagaaaugcuggaucugguauuaucauuucagauacaccagucuacgauugcaauacaacuugucagacacccgagggugcuauaaacaccagccucccauuucagaauauacauccgaucacaauuggaaaauguccaaaguauguaaaaagcacaaaauugagacuggccacaggauugaggaaugucccgucuauucaaucuagaggccuauucggggccauugccggcuucauugaaggaggguggacagggaugguagauggaugguacgguuaucaccaucaaaacgagcaggggucaggauaugcagccgaccugaagagcacacaaaaugccauugacaagauuacuaacaaaguaaauucuguuauugaaaagaugaauacacaguucacagcaguggguaaagaguucaaccaccuggaaaaaagaauagagaauuuaaauaaaaaaguugaugaugguuuccuggacauuuggacuuacaaugccgaacuguugguucuauuggaaaaugaaagaacuuuggacuaccacgauucaaaugugaagaacuuguaugaaaagguaagaaaccaguuaaaaaacaaugccaaggaaauuggaaauggcugcuuugaauuuuaccacaaaugcgauaacacgugcauggaaagugucaaaaaugggacuuaugacuacccaaaauacucagaggaagcaaaauuaaacagagaaaaaauagaugggguaaagcuggaaucaacaaggauuuaccagauuuuggcgaucuauucaacugucgccaguucauugguacugguagucucccugggggcaaucagcuucuggaugugcucuaaugggucucuacaguguagaauauguauuuaa

SEQ ID NO: 44016 - RNA, 1701 nt, Artificial Sequence; identical to SEQ ID NO: 43932
  derived and/or modified CDS sequence (wt) from hemagglutinin__InfluenzaA__AHV83887

SEQ ID NO: 44017 - RNA, 1701 nt, Artificial Sequence; identical to SEQ ID NO: 43002
  derived and/or modified CDS sequence (wt) from hemagglutinin__InfluenzaA__AHV83888

SEQ ID NO: 44018 - RNA, 1701 nt, Artificial Sequence
  derived and/or modified CDS sequence (wt) from hemagglutinin__InfluenzaA__AHV83889
augaaggcaauacuaguaguucugcuacauacacuugcaaccgcaaaugcagacacauuauguauagguuaucaugcgaacaauucaacagacacuguagacacaguacuagaaaagaauguaacaguaacacacucuguuaaccuucuagaagacaagcauaacgggaaacuaugcaaacuaagagggguagccccauugcauuuggguaaauguaacauugcuggcuggauccugggaaauccagagugugaaucacucuccacggcaaguucaugguccuacauuguggaaacaucuaguucagacaauggaacguguuacccaggagauuucaucaauuaugaggagcuaagagagcaauugagcucagugucaucauuugaaagguuugagauauuccccaagacaaguucauggcccaaucaugacucgaacaaagguguaacggcagcauguccucacgcuggagcaaaaagcuucuacaaaaauuuaauauggcuaguuaaaaaaggaaauucauacccaaagcucagccaauccuacauuaaugauaaagggaaagaaguccucgugcuguggggcauucaccacccaucuacuacugcugaccaacaaagucucuaucagaaugcagaugcauauguuuuuguggggacaucaagauacagcaagaaguucaagccggaaauagcaauaagacccaaagugagggaucaagaagggagaaugaacuacuacuggacacuaguagagccgggagacaaaauaacauucgaagcaacuggaaaucuagugguaccgagauaugcauucacaauggaaagaaaugcuggaucugguauuaucauuucagauacaccaguccacgauugcaauacaacuugucagacacccgagggugcuauaaacaccagccucccauuucagaauauacauccgaucacaauuggaaaauguccaaaguauguaaaaagcacaaaauugagacuggccacaggauugaggaaugucccgucuauucaaucuagaggccuauucggggccauugccggcuucauugaagggggguggacagggaugguagauggaugguacgguuaucaccaucaaaaugagcaggggucaggauaugcagccgaccugaagagcacacaaaaugccauugacaagauuacuaacaaaguaaauucuguuauugaaaagaugaauacacaguucacagcaguggguaaagaguucaaccaccuggaaaaaagaauagagaauuuaaauaaaaaaguugaugaugguuuccuggacauuuggacuuacaaugccgaacuguugguucuauuggaaaaugaaagaacuuuggacuaccacgauucaaaugugaagaacuuguaugaaaagguaagaaaccaguuaaaaaacaaugccaaggaaauuggaaacggcugcuuugaauuuuaccacaaaugcgauaacacgugcauggaaagugucaaaaaugggacuuaugacuacccaaaauacucagaggaagcaaaauuaaacagagaaaaaauagaugggguaaaacuggaaucaacaaggauuuaccagauuuuggcgaucuauucaacugucgccaguucauugguacugguagucucccugggggcaaucagcuucuggaugugcucuaaugggucucuacaguguagaauauguauuuaa

SEQ ID NO: 44019 - RNA, 1701 nt, Artificial Sequence; identical to SEQ ID NO: 43032
  derived and/or modified CDS sequence (wt) from hemagglutinin__InfluenzaA__AHV83890

SEQ ID NO: 44020 - RNA, 1701 nt, Artificial Sequence
  derived and/or modified CDS sequence (wt) from hemagglutinin__InfluenzaA__AHV83891
augaaggcaauacuaguaguucugcuauacacauuugcaaccgcaaaugcagacacauuauguauagguuaucaugcgaacaauucaacagacacuguagacacaguacuagaaaagaauguaacaguaacacacucuguuaaccuucuagaagacaagcauaacgggaaacuaugcaaacuaagagggguagccccauugcauuuggguaaauguaacauugcuggcuggauccugggaaauccagagugugaaucacucuccacagcaaguucaugguccuacauuguggaaacaucuaguucagacaauggaacguguuacccaggagauuucaucaauuaugaggagcuaagagagcaauugagcucagugucaucauuugaaagauuugagauauuccccaagacaaguucauggcccaaucaugacucgaacaaagguguaacggcagcauguccucacgcuggagcaaaaagcuucuacaaaaauuuaauauggcuaguuaaaaaaggaaauucauacccaaagcucagccaauccuacauuaaugauaaagggaaagaaguccucgugcuguggggcauucaccauccaucuacuacugcugaccaacaaagucucuaucagaaugcagaugcauauguuuuuguggggacaucaagauacagcaagaaguucaagccggaaauagcaauaagacccaaagugagggaucaagaagggagaaugaacuauuacuggacacuaguagagccgggagacaaaauaacauucgaagcaacuggaaaucuagugguaccaagauaugcauucacaauggaaagaaaugcuggaucugguauuaucauuucagauacaccaguccacgauugcaauacaacuugucagacacccgagggugcuauaaacaccagccucccauuucagaauauacauccgaucacaauuggaaaauguccaaaguauguaaaaagcacaaaauugagacuggccacaggauugaggaaugucccaucuauucaaucuagaggccuauucggggccauugccggcuucauugaagggggguggacagggaugguagauggaugguacgguuaucaccaucaaaaugagcaggggucaggauaugcagccgaccugaagagcacacaaaaugccauugacaaaauuacuaacaaaguaaauucuguuauugaaaagaugaauacacaguucacagcaguggguaaagaguucaaccacuuggaaaaaagaauagagaauuuaaauaaaaaaguugaugaugguuuccuggacauuuggacuuacaaugccgaacugcugguucuauuggaaaaugaaagaacuuuggacuaccacgauucaaaugugaagaacuuguaugaaaagguaagaaaccaguuaaaaaacaaugccaaggaaauuggaaacggcugcuuugaauuuuaccacaaaugcgauaacacgugcauggaaagugucaaaaaugggacuuaugacuacccaaaauacucagaggaagcaaaauuaaacagagaaaaaauagaugggguaaagcuggaaucaacaaggauuuaccagauuuuggcgaucuauucaacugucgccaguucauugguacugguagucucccugggggcaaucagcuucuggaugugcucuaaugggucucuacaguguagaauauguauuuaa

SEQ ID NO: 44021 - RNA, 1701 nt, Artificial Sequence
  derived and/or modified CDS sequence (wt) from hemagglutinin__InfluenzaA__AHV83893
augaaggcaauacuaguaguucugcuauacacauuugcaaccgcaaaugcagacacauuauguauagguuaucaugcgaacaauucaacagacacuguagacacaguacuagaaaagaauguaacaguaacacacucuguuaaccuucuagaagacaagcauaacgggaaacuaugcaaacuaagagggguagccccauugcauuuggguaaauguaacauugcuggcuggauccugggaaauccagagugugaaucacucuccacagcaaguucaugguccuacauuguggaaacaucuaguucagacaauggaacguguuacccaggagauuucaucaauuaugaggagcuaagagagcaauugagcucagugucaucauuugaaagauuugagauauuccccaagacaaguucauggcccaaucaugacucgaacaaagguguaacggcagcauguccucacgcuggagcaaaaagcuucuacaaaaauuuaauauggcuaguuaaaaaaggaaauucauacccaaagcucagccaauccuacauuaaugauaaagggaaagaaguccucgugcuguggggcauucaccauccaucuacuacugcugaccaacaaagucucuaucagaaugcagaugcauauguuuuuguggggacaucaagauacagcaagaaguucaagccggaaauagcaauaagacccaaagugagggaucaagaagggagaaugaacuauuacuggacacuaguagagccgggagacaaaauaacauucgaagcaacuggaaaucuagugguaccaagauaugcauucacaauggaaagaaaugcuggaucugguauuaucauuucagauacaccaguccacgauugcaauacaacuugucagacacccgagggugcuauaaacaccagccucccauuucagaauauacauccgaucacaauuggaaaauguccaaaguauguaaaaagcacaaaauugagacuggccacaggauugaggaaugucccaucuauucaaucuagaggccuauucggggccauugccggcuucauugaagggggguggacagggaugguagauggaugguacgguuaucaccaucaaaaugagcaagggucaggauaugcagccgaccugaagagcacacaaaaugccauugacaaaauuacuaacaaaguaaauucuguuauugaaaagaugaauacacaguucacagcaguggguaaagaguucaaccacuuggaaaaaagaauagagaauuuaaauaaaaaaguugaugaugguuuccuggacauuuggacuuacaaugccgaacugcugguucuauuggaaaaugaaagaacuuuggacuaccacgauucaaaugugaagaacuuguaugaaaagguaagaaaccaguuaaaaaacaaugccaaggaaauuggaaacggcugcuuugaauuuuaccacaaaugcgauaacacgugcauggaaagugucaaaaaugggacuuaugacuacccaaaauacucagaggaagcaaaauuaaacagagaaaaaauagaugggguaaagcuggaaucaacaaggauuuaccagauuuuggcgaucuauucaacugucgccaguucauugguacugguagucucccugggggcaaucagcuucuggaugugcucuaaugggucucuacaguguagaauauguauuuaa

SEQ ID NO: 44022 - RNA, 1701 nt, Artificial Sequence; identical to SEQ ID NO: 44020
  derived and/or modified CDS sequence (wt) from hemagglutinin__InfluenzaA__AHV83894

SEQ ID NO: 44023 - RNA, 1701 nt, Artificial Sequence
  derived and/or modified CDS sequence (wt) from hemagglutinin__InfluenzaA__AHV83895
augaaggcaauacuaguaguucugcuauacacauuugcaaccgcaaaugcagacacauuauguauagguuaucaugcgaacaauucaacagacacuguagacacaguacuagaaaagaauguaacaguaacacacucuguuaaccuucuagaagacaagcauaacgggaaacuaugcaaacuaagagggguagccccauugcauuuggguaaauguaacauugcuggcuggauccugggaaauccagagugugaaucacucuccacagcaaguucaugguccuacauuguggaaacaucuaguucagacaauggaacguguuacccaggagauuucaucaauuaugaggagcuaagagagcaauugagcucagugucaucauuugaaagauuugagauauuccccaagacaaguucauggcccaaucaugacucgaacaaagguguaacggcagcauguccucacgcuggagcaaaaagcuucuacaaaaauuuaauauggcuaguuaaaaaaggaaauucauacccaaagcucagccaauccuacauuaaugauaaagggaaagaaguccucgugcuguggggcauucaccauccaucuacuacugcugaccaacaaagucucuaucagaaugcagaugcauauguuuuuguggggacaucaagauacagcaagaaguucaagccggaaauagcaauaagacccaaagugagggaucaagaagggagaaugaacuauuacuggacacuaguagagccgggagacaaaauaacauucgaagcaacuggaaaucuagugguaccaagauaugcauucacaauggaaagaaaugcuggaucugguauuaucauuucagauacaccaguccacgauugcaauacaacuugucagacacccgagggugcuauaaacaccagccucccauuucagaauauacauccgaucacaauuggaaaauguccaaaguauguaaaaagcacaaaauugagacuggccacaggauugaggaaugucccaucuauucaaucuagaggccuauucggggccauugccggcuucauugaagggggguggacagggaugguagauggaugguacgguuaucaccaucaaaaugagcaggggucaggauaugcagccgaccugaagagcacacaaaaugccauugacaaaauuacuaacaaaguaaauucuguuauugaaaagaugaauacacaguucacagcaguggguaaagaguucaaccacuuggaaaaaagaauagagaauuuaaauaaaaaaguugaugaugguuuccuggacauuuggacuuacaaugccgaacugcugguucuauuggaaaaugaaagaacuuuggacuaccacgauucaaaugugaagaacuuguaugaaaagguaagaaaccaguuaaaaaacaaugccaaggaaauuggaaacggcugcuuugaauuuuaccacaaaugcgauaacacgugcauggaaagugucaaaaaugggacuuaugacuacccaaaauacucagaggaaacaaaauuaaacagagaaaaaauagaugggguaaagcuggaaucaacaaggauuuaccagauuuuggcgaucuauucaacugucgccaguucauugguacugguagucucccugggggcaaucagcuucuggaugugcucuaaugggucucuacaguguagaauauguauuuaa

SEQ ID NO: 44024 - RNA, 1701 nt, Artificial Sequence; identical to SEQ ID NO: 44020
  derived and/or modified CDS sequence (wt) from hemagglutinin__InfluenzaA__AHV83896

SEQ ID NO: 44025 - RNA, 1701 nt, Artificial Sequence; identical to SEQ ID NO: 44020
  derived and/or modified CDS sequence (wt) from hemagglutinin__InfluenzaA__AHV83897

SEQ ID NO: 44026 - RNA, 1701 nt, Artificial Sequence
  derived and/or modified CDS sequence (wt) from hemagglutinin__InfluenzaA__AHV83898
augaaggcaauacuaguaguucugcuauacacauuugcaaccgcaaaugcagacacauuauguauagguuaucaugcgaacaauucaacagacacuguagacacaguacuagaaaagaauguaacaguaacacacucuguuaaccuucuagaagacaagcauaacgggaaacuaugcaaacuaagagggguagccccauugcauuuggguaaauguaacauugcuggcuggauccugggaaauccagagugugaaucacucuccacagcaaguucaugguccuacauuguggaaacaucuaguucagacaauggaacguguuacccaggagauuucaucaauuaugaggagcuaagagagcaauugagcucagugucaucauuugaaagauuugagauauuccccaagacaaguucauggcccaaucaugacucgaacaaagguguaacggcagcauguccucacgcuggagcaaaaagcuucuacaaaaauuuaauauggcuaguuaaaaaaggaaauucauacccaaagcucagccaauccuacauuaaugauaaagggaaagaaguccucgugcuguggggcauucaccauccaucuacuacugcugaccaacaaagucucuaucagaaugcagaugcauauguuuuuguggggacaucaagauacagcaagaaguucaagccggaaauagcaauaagacccaaagugagggaucaagaagggagaaugaacuauuacuggacacuaguagagccgggagacaaaauaacauucgaagcaacuggaaaucuagugguaccaagauaugcauucacaauggaaagaaaugcuggaucugguauuaucauuucagauacaccaguccacgauugcaauacaacuugucagacacccgagggugcuauaaacaccagccucccauuucagaauauacauccgaucacaauuggaaaauguccaaaguauguaaaaagcacaaaauugagacuggucacaggauugaggaaugucccaucuauucaaucuagaggccuauucggggccauugccggcuucauugaagggggguggacagggaugguagauggaugguacgguuaucaccaucaaaaugagcaggggucaggauaugcagccgaccugaagagcacacaaaaugccauugacaaaauuacuaacaaaguaaauucuguuauugaaaagaugaauacacaguucacagcaguggguaaagaguucaaccacuuggaaaaaagaauagagaauuuaaauaaaaaaguugaugaugguuuccuggacauuuggacuuacaaugccgaacugcugguucuauuggaaaaugaaagaacuuuggacuaccacgauucaaaugugaagaacuuguaugaaaagguaagaaaccaguuaaaaaacaaugccaaggaaauuggaaacggcugcuuugaauuuuaccacaaaugcgauaacacgugcauggaaagugucaaaaaugggacuuaugacuacccaaaauacucagaggaagcaaaauuaaacagagaaaaaauagaugggguaaagcuggaaucaacaaggauuuaccagauuuuggcgaucuauucaacugucgccaguucauugguacugguagucucccugggggcaaucagcuucuggaugugcucuaaugggucucuacaguguagaauauguauuuaa

SEQ ID NO: 44027 - RNA, 1701 nt, Artificial Sequence; identical to SEQ ID NO: 44020
  derived and/or modified CDS sequence (wt) from hemagglutinin__InfluenzaA__AHV83899

SEQ ID NO: 44028 - RNA, 1701 nt, Artificial Sequence; identical to SEQ ID NO: 44020
  derived and/or modified CDS sequence (wt) from hemagglutinin__InfluenzaA__AHV83900

SEQ ID NO: 44029 - RNA, 1701 nt, Artificial Sequence
  derived and/or modified CDS sequence (wt) from hemagglutinin__InfluenzaA__AHV83901
augaaggcaauacuaguaguucugcuauacacauuugcaaccgcaaaugcagacacauuauguauagguuaucaugcgaacaauucaacagacacuguagacacaguacuagaaaagaauguaacaguaacacacucuguuaaccuucuagaagacaagcacaacgggaaacuaugcaaacuaagagggguagccccauugcauuuggguaaauguaacauugcuggcuggauccugggaaauccagagugugaaucacucuccacagcaaguucaugguccuacauuguggaaacaucuaguucagacaauggaacguguuacccaggagauuucaucaauuaugaggagcuaagagagcaauugagcucagugucaucauuugaaagauuugagauauuccccaagacaaguucauggcccaaucaugacucgaacaaagguguaacggcagcauguccucacgcuggagcaaaaagcuucuacaaaaauuuaauauggcuaguuaaaaaaggaaauucauacccaaagcucagccaauccuacauuaaugauaaagggaaagaaguccucgugcuguggggcauucaccauccaucuacuacugcugaccaacaaagucucuaucagaaugcagaugcauauguuuuuguggggacaucaagauacagcaagaaguucaagccggaaauagcaauaagacccaaagugagggaucaagaagggagaaugaacuauuacuggacacuaguagagccgggagacaaaauaacauucgaagcaacuggaaaucuagugguaccgagauaugcauucacaauggaaagaaaugcuggaucugguauuaucauuucagauacaccaguccacgauugcaauacaacuugucagacacccgagggugcuauaaacaccagccucccauuucagaauauacauccgaucacaauuggaaaauguccaaaguauguaaaaagcacaaaauugagacuggccacaggauugaggaaugucccaucuauucaaucuagaggccuauucggggccauugccggcuucauugaagggggguggacagggaugguagauggaugguacgguuaucaccaucaaaaugagcaggggucaggauaugcagccgaccugaagagcacacaaaaugccauugacaaaauuacuaacaaaguaaauucuguuauugaaaagaugaauacacaguucacagcaguggguaaagaguucaaccacuuggaaaaaagaauagagaauuuaaauaaaaaaguugaugaugguuuccuggacauuuggacuuacaaugccgaacugcugguucuauuggaaaaugaaagaacuuuggacuaccacgauucaaaugugaagaacuuguaugaaaagguaagaaaccaguuaaaaaacaaugccaaggaaauuggaaacggcugcuuugaauuuuaccacaaaugcgauaacacgugcauggaaagugucaaaaaugggacuuaugacuacccaaaauacucagaggaagcaaaauuaaacagagaaaaaauagaugggguaaaacuggaaucaacaaggauuuaccagauuuuggcgaucuauucaacugucgccaguucauugguacugguagucucccugggggcaaucagcuucuggaugugcucuaaugggucucuacaguguagaauauguauuuaa

SEQ ID NO: 44030 - RNA, 1701 nt, Artificial Sequence; identical to SEQ ID NO: 43002
  derived and/or modified CDS sequence (wt) from hemagglutinin__InfluenzaA__AHV83902

SEQ ID NO: 44031 - RNA, 1701 nt, Artificial Sequence; identical to SEQ ID NO: 44029
  derived and/or modified CDS sequence (wt) from hemagglutinin__InfluenzaA__AHV83903

SEQ ID NO: 44032 - RNA, 1701 nt, Artificial Sequence
  derived and/or modified CDS sequence (wt) from hemagglutinin__InfluenzaA__AHV83904
augaaggcaauacuaguaguucugcuauauacauuugcaaccgcaaaugcagacacauuauguauagguuaucaugcgaacaauucaacagacacuguagacacaguacuagaaaagaauguaacaguaacacacucuguuaaccuucuagaagacaagcauaacgggaaauuaugcaaacuaagagggguagccccauugcauuuggguaaauguaacauugcuggcuggauccugggaaauccagagugugaaucacucuccacagcaaguucaugguccuacauuguggaaacaucuaguucagacaauggaacguguuacccaggagauuucaucaauuaugaagagcuaagagagcaauugagcucagugucaucauuugaaagguuugagauauuccccaagacaaguucauggcccaaucaugacucgaacaaagguguaacggcagcauguccucacgcuggagcaaaaagcuucuacaaaaauuuaauauggcuaguuaaaaaaggaaauucauacccaaagcucagccaauccuacauuaaugauaaagggaaagaaguccucgugcuguggggcauucaccacccaucuacuacugcugaccaacaaagucucuaucagaaugcagaugcauauguuuuuguggggacaucaagauacagcaagaaguucaagccagaaauagcaauaagacccaaagugagggaucaagaagggagaaugaacuacuacuggacacuaguagagccgggagacaaaauaacauucgaagcaacuggaaaucuagugguaccgagauaugcauucacaauggaaagaaaugcuggaucugguauuaucauuucagauacaccaguccacgauugcaauacaacuugucagacacccgagggugcuauaaacaccagccucccauuucagaauauacauccgaucacaauuggaaaauguccaaaguauguaaaaagcacaaaauugagacuggccacaggauugaggaaugucccgucuauucaaucuagaggccuauucggggccauugccggcuucauugaagggggguggacagggaugguagauggaugguacgguuaucaccaucaaaaugagcaggggucaggauaugcagccgaccugaagagcacacaaaaugccauugacaagauuacuaacaaaguaaauucuguuauugaaaagaugaauacacaguucacagcaguggguaaagaguucaaccaccuggaaaaaagaauagaaaauuuaaauaaaaaaguugaugaugguuuccuggacauuuggacuuacaaugccgaacuguugguucuauuggaaaaugaaagaacuuuggacuaccacgauucaaaugugaagaacuuguaugaaaagguaagaaaccaguuaaaaaacaaugccaaggaaauuggaaacggcugcuuugaauuuuaccacaaaugcgauaacacgugcauggaaagugucaaaaaugggacuuaugacuacccaaaauacucagaggaagcaaaauuaaacagagaaaaaauagaugggguaaaacuggaaucaacaaggauuuaccagauuuuggcgaucuauucaacugucgccaguucauugguacugguagucucccugggggcaaucagcuucuggaugugcucuaaugggucucuacaguguagaauauguauuuaa

SEQ ID NO: 44033 - RNA, 1701 nt, Artificial Sequence
  derived and/or modified CDS sequence (wt) from hemagglutinin__InfluenzaA__AHV83905
augaaggcaauacuaguaguucugcuauauacacuuacaaccgcaaaugcagacacauuauguauagguuaucaugcgaacaauucaacagacacuguagacacaguacuagaaaagaauguaacaguaacacacucuguuaaccuucuagaagacaagcauaacgggaaacuaugcaaacuaagagggguagccccauugcauuuggguaaauguaacauugcuggcuggauccugggaaauccagagugugaaucacucuccacggcaaguucaugguccuacauuguggaaacaucuaguucagacaauggaacguguuacccaggagauuucaucaauuaugaggagcuaagagagcaauugagcucagugucaucauuugaaagguuugagauauuccccaagacaaguucauggcccaaucaugacucgaacaaagguguaacggcagcauguccucacgcuggagcaaaaagcuucuacaaaaauuuaauauggcuaguuaaaaaaggaaauucauacccaaagcucagccaauccuacauuaaugauaaagggaaagaaguccucgugcuguggggcauucaccacccaucuacuacugcugaccaacaaagucucuaucagaaugcagaugcauauguuuuuguggggacaucaagauacagcaagaaguucaagccggaaauagcaauaagacccaaagugagggaucaagaagggagaaugaacuacuacuggacacuaguagagccgggagacaaaauaacauucgaagcaacuggaaaucuagugguaccgagauaugcauucacaauggaaagaaaugcuggaucugguauuaucauuucagauacaccaguccacgauugcaauacaacuugucagacacccgagggugcuauaaacaccagccucccauuucagaauauacauccgaucacaauuggaaaauguccaaaguauguaaaaagcacaaaauugagacuggccacaggauugagaaaugucccgucuauucaaucuagaggccuauucggggccauugccggcuucauugaagggggguggacagggaugguagauggaugguacgguuaucaccaucaaaaugagcaggggucaggauaugcagccgaccugaagagcacacaaaaugccauugacaagauuacuaacaaaguaaauucuguuauugaaaagaugaauacacaguucacagcaguggguaaagaguucaaccaccuggaaaaaagaauagagaauuuaaauaaaaaaguugaugaugguuuccuggacauuuggacuuacaaugccgaacuguugguucuauuggaaaaugaaagaacuuuggacuaccacgauucaaaugugaagaacuuguaugaaaagguaagaaaccaguuaaaaaacaaugccaaggaaauuggaaacggcugcuuugaauuuuaccacaaaugcgauaacacgugcauggaaagugucaaaaaugggacuuaugacuacccaaaauacucagaggaagcaaaauuaaacagagaaaaaauagaugggguaaaacuggaaucaacaaggauuuaccagauuuuggcgaucuauucaacugucgccaguucauugguacugguagucucccugggggcaaucagcuucuggaugugcucuaaugggucucuacaguguagaauauguauuuaa

SEQ ID NO: 44034 - RNA, 1701 nt, Artificial Sequence
  derived and/or modified CDS sequence (wt) from hemagglutinin__InfluenzaA__AHV83906
augaaggcaauacuaguaguucugcuauacacauuugcaaccgcaaaugcagacacauuauguauagguuaucaugcgaacaauucaacagacacuguagacacaguauuagaaaagaauguaacaguaacacacucuguuaaccuucuagaagacaagcacaacgggaaacuaugcaaacuaagagggguagccccauugcauuuggguaaauguaacauugcuggcuggauccugggaaauccagagugugaaucacucuccacagcaaguucaugguccuacauuguggaaacaucuaguucagacaauggaacguguuacccaggagauuucaucaauuaugaggagcuaagagagcaauugagcucagugucaucauuugaaagauuugagauauuccccaagacaaguucauggcccaaucaugacucgaacaaagguguaacggcagcauguccucacgcuggagcaaaaagcuucuacaaaaauuuaauauggcuaguuaaaaaaggaaauucauacccaaagcucagccaauccuacauuaaugauaaagggaaagaaguccucgugcuguggggcauucaccauccaucuacuacugcugaccaacaaagucucuaucagaaugcagaugcauauguuuuuguggggacaucaagauacagcaagaaguucaagccggaaauagcaauaagacccaaagugagggaucaagaagggagaaugaacuauuacuggacacuaguagagccgggagacaaaauaacauucgaagcaacuggaaaucuaguaguaccgagauaugcauucacaauggaaagaaaugcuggaucugguauuaucauuucagauacaccaguccacgauugcaauacaacuugucagacacccgagggugcuauaaacaccagccucccauuucagaauauacauccgaucacaauuggaaaauguccaaaguauguaaaaagcacaaaauugagacuggccacaggauugaggaaugucccaucuauucaaucuagaggccuauucggggccauugccgguuucauugaagggggguggacagggaugguagauggaugguacgguuaucaccaucaaaaugagcaggggucaggauaugcagccgaccugaagagcacacaaaaugccauugacaaaauuacuaacaaaguaaauucuguuauugaaaagaugaauacacaguucacagcaguggguaaagaguucaaccacuuggaaaaaagaauagagaauuuaaauaaaaaaguugaugaugguuuccuggacauuuggacuuacaaugccgaacugcugguucuauuggaaaaugaaagaacuuuggacuaccacgauucaaaugugaagaacuuguaugaaaagguaagaaaccaguuaaaaaacaaugccaaggaaauuggaaacggcugcuuugaauuuuaccacaaaugcgauaacacgugcauggaaagugucaaaaaugggacuuaugacuacccaaaauacucagaggaagcaaaauuaaacagagaaaaaauagaugggguaaaacuggaaucaacaaggauuuaccagauuuuggcgaucuauucaacugucgccaguucauugguacugguagucucccugggggcaaucagcuucuggaugugcucuaaugggucucuacaguguagaauauguauuuaa

SEQ ID NO: 44035 - RNA, 1701 nt, Artificial Sequence; identical to SEQ ID NO: 43913
  derived and/or modified CDS sequence (wt) from hemagglutinin__InfluenzaA__AHV83907

SEQ ID NO: 44036 - RNA, 1701 nt, Artificial Sequence
  derived and/or modified CDS sequence (wt) from hemagglutinin__InfluenzaA__AHV83908
augaaggcaauacuaguaguucugcuauacacauuugcaaccgcaaaugcagacacauuauguauagguuaucaugcgaacaauucaacagacacuguagacacaguacuagaaaagaauguaacaguaacacacucuguuaaccuucuagaagacaagcauaacgggaaacuaugcaaacuaagagggguagccccauugcauuuggguaaauguaacauugcuggcuggauccugggaaauccagagugugaaccacucuccacagcaaguucaugguccuacauuguggaaacaucuaguucagacaauggaacguguuacccaggagauuucaucaauuaugaggagcuaagagagcaauugagcucagugucaucauuugaaagauuugagauauuccccaagacaaguucauggcccaaucaugacucgaacaaagguguaacggcagcauguccucacgcuggagcaaaaagcuucuacaaaaauuuaauauggcuaguuaaaaaaggaaauucauacccaaagcucagccaauccuacauuaaugauaaagggaaaaaaguccucgugcuguggggcauucaccauccaucuacuacugcugaccaacaaagucucuaucagaaugcagaugcauauguuuuuguggggacaucaagauacagcaagaaguucaagccggaaauagcaauaagacccaaagugagggaucaagaagggagaaugaacuauuacuggacacuaguagagccgggagacaaaauaacauucgaagcaacuggaaaucuagugguaccgagauaugcauucacaauggaaagaaaugcuggaucugguauuaucauuucagauacaccaguccacgauugcaauacaacuugucagacacccgagggugcuauaaacaccagccucccauuucagaauauacauccgaucacaauuggaaaauguccaaaguauguaaaaagcacaaaauugagacuggccacaggguugaggaaugucccaucuauucaaucuagaggccuauucggggccauugccggcuucauugaagggggguggacagggaugguagauggaugguacgguuaucaccaucaaaaugagcaggggucaggauaugcagccgaccugaagagcacacaaaaugccauugacaaaauuacuaacaaaguaaauucuguuauugaaaagaugaauacacaguucacagcaguggguaaagaguucaaccacuuggaaaaaagaauagagaauuuaaauaaaaaaguugaugaugguuuccuggacauuuggacuuacaaugccgaacugcugguucuauuggaaaaugaaagaacuuuggacuaccacgauucaaaugugaagaacuuguaugaaaagguaagaaaccaguuaaaaaacaaugccaaggaaauuggaaacggcugcuuugaauuuuaccacaaaugcgauaacacgugcauggaaagugucaaaaaugggacuuaugacuacccaaaauacucagaggaagcaaaauuaaacagagaaaaaauagaugggguaaaacuggaaucaacaaggauuuaccagauuuuggcgaucuauucaacugucgccaguucauugguacugguagucucccugggggcaaucagcuucuggaugugcucuaaugggucucuacaguguagaauauguauuuaa

SEQ ID NO: 44037 - RNA, 1701 nt, Artificial Sequence
  derived and/or modified CDS sequence (wt) from hemagglutinin__InfluenzaA__AHV83911
augaaggcaauacuaguaguucugcuauacacauuugcaaccgcaaaugcagacacauuauguauagguuaucaugcgaacaauucaacagacacuguagacacaguacuagaaaagaauguaacaguaacacacucuguuaaccuucuagaagacaagcauaacgggaaacuaugcaaacuaagagggguagccccauugcacuuggguaaauguaacauugcuggcuggauccugggaaauccagagugugaaccacucuccacagcaaguucaugguccuacauuguggaaacaucuaguucagacaauggaacguguuacccaggagauuucaucaauuaugaggagcuaagagagcaauugagcucagugucaucauuugaaagauuugagauauuccccaagacaaguucauggcccaaucaugacucgaacaaagguguaacggcagcauguccucacgcuggagcaaaaagcuucuacaaaaauuuaauauggcuaguuaaaaaaggaaauucauacccaaagcucagccaauccuacauuaaugauaaagggaaagaaguccucgugcuguggggcauucaccauccaucuacuacugcugaccaacaaagucucuaucagaaugcagaugcauauguuuuuguggggacaucaagauacagcaagaaguucaagccggaaauagcaauaagacccaaagugagggaucaagaagggagaaugaacuauuacuggacacuaguagagccgggagacaaaauaacauucgaagcaacuggaaaucuagugguaccgagauaugcauucacaauggaaagaaaugcuggaucugguauuaucauuucagauacaccaguccacgauugcaauacaacuugucagacacccgagggugcuauaaacaccagccucccauuucagaacauacauccgaucacaauuggaaaauguccaaaguauguaaaaagcacaaaauugagacuggccacaggguugaggaaugucccaucuauucaaucuagaggccuauucggggccauugccggcuucauugaagggggguggacagggaugguagauggaugguacgguuaucaccaucaaaaugagcaggggucaggauaugcagccgaccugaagagcacacaaaaugccauugacaaaauuacuaacaaaguaaauucuguuauugaaaagaugaauacacaguucacagcaguggguaaagaguucaaccacuuggaaaaaagaauagagaauuuaaauaaaaaaguugaugaugguuuccuggacauuuggacuuacaaugccgaacugcugguucuauuggaaaaugaaagaacuuuggacuaccacgauucaaaugugaagaacuuguaugaaaagguaagaaaccaguuaaaaaacaaugccaaggaaauuggaaacggcugcuuugaauuuuaccacaaaugcgauaacacgugcauggaaagugucaaaaaugggacuuaugacuacccaaaauacucagaggaagcaaaauuaaacagagaaaaaauagaugggguaaaacuggaaucaacaaggauuuaccagauuuuggcgaucuauucaacugucgccaguucauugguacugguagucucccugggggcaaucagcuucuggaugugcucuaaugggucucuacaguguagaauauguauuuaa

SEQ ID NO: 44038 - RNA, 1701 nt, Artificial Sequence
  derived and/or modified CDS sequence (wt) from hemagglutinin__InfluenzaA__AHV83912
augaaggcaauacuaguaguucugcuauacacauuugcaaccgcaaaugcagacacauuauguauagguuaucaugcgaacaauucaacagacacuguagacacaguacuagaaaagaauguaacaguaacacacucuguuaaccuucuagaagacaagcacaacgggaaacuaugcaaacuaagagggguagccccauugcauuuggguaaauguaacauugcuggcuggauccugggaaauccagagugugaaucacucuccacagcaaguucaugguccuacauuguggaaacaucuaguucagacaauggaacguguuacccaggagauuucaucaauuaugaggagcuaagagagcaauugagcucagugucaucauuugaaagauuugagauauuccccaagacaaguucauggcccaaucaugacucgaacaaagguguaacggcagcaugcccucacgcuggagcaaaaagcuucuacaaaaauuuaauauggcuaguuaaaaaaggaaauucauacccaaagcucagccaauccuacauuaaugauaaagggaaagaaguccucgugcuguggggcauucaccauccaucuacuacugcugaccaacaaagucucuaucagaaugcagaugcauauguuuuuguggggacaucaagauacagcaagaaguucaagccggaaauagcaauaagacccaaagugagggaucaagaagggagaaugaacuauuacuggacacuaguagagccgggagacaaaauaacauucgaagcaacuggaaaucuagugguaccgagauaugcauucacaauggaaagaaaugcuggaucugguauuaucauuucagauacaccaguccacgauugcaauacaacuugucagacacccgagggugcuauaaacaccagccucccauuucagaauauacauccgaucacaauuggaaaauguccaaaguauguaaaaagcacaaaauugagacuggccacaggauugaggaaugucccaucuauucaaucuagaggccuauucggggccauugccggcuucauugaagggggguggacagggaugguagauggaugguacgguuaucaccaucaaaaugagcaggggucaggauaugcagccgaccugaagagcacacaaaaugccauugacaaaauuacuaacaaaguaaauucuguuauugaaaagaugaauacacaguucacagcaguggguaaagaguucaaccacuuggaaaaaagaauagagaauuuaaauaaaaaaguugaugaugguuuccuggacauuuggacuuacaaugccgaacugcugguucuauuggaaaaugaaagaacuuuggacuaccacgauucaaaugugaagaacuuguaugaaaagguaagaaaccaguuaaaaaacaaugccaaggaaauuggaaacggcugcuuugaauuuuaccacaaaugcgauaacacgugcauggaaagugucaaaaaugggacuuaugacuacccaaaauacucagaggaagcaaaauuaaacagagaaaaaauagaugggguaaaacuggaaucaacaaggauuuaccagauuuuggcgaucuauucaacugucgccaguucauugguacugguagucucccugggggcaaucagcuucuggaugugcucuaaugggucucuacaguguagaauauguauuuaa

SEQ ID NO: 44039 - RNA, 1701 nt, Artificial Sequence
  derived and/or modified CDS sequence (wt) from hemagglutinin__InfluenzaA__AHV83913
augaaggcaauacuaguaguucugcuauauacauuugcaaccgcaaaugcagacacauuauguauagguuaucaugcgaacaauucaacagacacuguagacacaguacuagaaaagaauguaacaguaacacacucuguuaaccuucuagaagacaagcauaacgggaaacuaugcaaacuaagagggguagccccauugcauuuggguaaauguaacauugcuggcuggauccugggaaauccagagugugaaucacucuccacagcaaguucaugguccuacauuguggaaacaucuaguucagacaauggaacguguuacccaggagauuucaucaauuaugaggagcuaagagagcaauugagcucagugucaucauuugaaagguuugagauauuccccaagacaaguucauggcccaaucaugacucgaacaaagguguaacggcagcauguccucacgcuggagcaaaaagcuucuacaaaaauuuaauauggcuaguuaaaaaaggaaauucauacccaaagcucagccaauccuacauuaaugauaaagggaaagaaguccucgugcuguggggcauucaccacccaucuacuacugcugaccaacaaagucucuaucagaaugcagaugcauauguuuuuguggggacaucaagauacagcaagaaguucaagccggaaauagcaauaagacccaaagugagggaucaagaagggagaaugaacuauuacuggacacuaguagagccgggagacaaaauaacauucgaagcaacuggaaaucuagugguaccgagauaugcauucacaauggaaagaaaugcuggaucugguauuaucauuucagauacaccaguccacgauugcaauacaacuugucagacacccgaaggugcuauaaacaccagccucccauuucagaauauacauccgaucacaauuggaaaauguccaaaguauguaaaaagcacaaaauugagacuggccacaggauugaggaaugucccgucuauucaaucuagaggccuauucggggccauugccggcuucauugaaggaggguggacagggaugguagauggaugguacgguuaucaccaucaaaaugagcaggggucaggauaugcagccgaccugaagagcacacaaaaugccauugacaagauuacuaacaaaguaaauucuguuauugaaaagaugaauacacaguucacagcagugggcaaagaguucaaccaccuggaaaaaagaauagagaauuuaaauaaaaaaguugaugaugguuuccuggacauuuggacuuacaaugccgaacuguugguucuauuggaaaaugaaagaacuuuggacuaccacgauucaaaugugaagaacuuguaugaaaagguaagaaaccaguuaaaaaacaaugccaaggaaauuggaaacggcugcuuugaauuuuaccacaaaugcgauaacacgugcauggaaagugucaaaaaugggacuuaugacuacccaaaauacucagaggaagcaaaauuaaacagagaaaaaauagaugggguaaagcuggaaucaacaaggauuuaccagauuuuggcgaucuauucaacugucgccaguucauugguacugguagucucccugggggcaaucagcuucuggaugugcucuaaugggucucuacaguguagaauauguauuuaa

SEQ ID NO: 44040 - RNA, 1701 nt, Artificial Sequence
  derived and/or modified CDS sequence (wt) from hemagglutinin__InfluenzaA__AHV83915
augaaggcaauacuaguaguucugcuauacacauuugcaaccgcaaaugcagacacauuauguauagguuaucaugcgaacaauucaacagacacuguagacacaguacuagaaaagaauguaacaguaacacacucuguuaaccuucuagaagacaagcacaacgggaaacuaugcaaacuaagagggguagccccauugcauuuggguaaauguaacauugcuggcuggauccugggaaauccagagugugaaucacucuccacagcaaguucaugguccuacauuguggaaacaucuaguucagacaauggaacguguuacccaggagauuucaucaauuaugaggagcuaagagagcaauugagcucagugucaucauuugaaagauuugagauauuccccaagacaaguucauggcccaaucaugacucaaacaaagguguaacggcagcauguccucacgcuggagcaaaaagcuucuacaaaaauuuaauauggcuaguuaaaaaaggaaauucauacccaaagcucagccaauccuacauuaaugauaaagggaaagaaguccucgugcuguggggcauucaccauccaucuacuacugcugaccaacaaagucucuaucagaaugcagaugcauauguuuuuguggggacaucaagauacagcaagaaguucaagccggaaauagcaauaagacccaaagugagggaucaagaagggagaaugaacuauuacuggacacuaguagagccgggagacaaaauaacauucgaagcaacuggaaaucuagugguaccgagauaugcauucacaauggaaagaaaugcuggaucugguauuaucauuucagauacaccaguccacgauugcaauacaacuugucagacacccgagggugcuauaaacaccagccucccauuucagaauauacauccgaucacaauuggaaaauguccaaaguauguaaaaagcacaaaauugagacuggccacaggauugaggaaugucccaucuauucaaucuagaggccuauucggggccauugccggcuucauugaagggggguggacagggaugguagauggaugguacgguuaucaccaucaaaaugagcaggggucaggauaugcagccgaccugaagagcacacaaaaugccauugacaaaauuacuaacaaaguaaauucuguuauugaaaagaugaauacacaguucacagcaguggguaaagaguucaaccacuuggaaaaaagaauagagaauuuaaauaaaaaaguugaugaugguuuccuggacauuuggacuuacaaugccgaacugcugguucuauuggaaaaugaaagaacuuuggacuaccacgauucaaaugugaagaacuuguaugaaaagguaagaaaccaguuaaaaaacaaugccaaggaaauuggaaacggcugcuuugaauuuuaccacaaaugcgauaacacgugcauggaaagugucaaaaaugggacuuaugacuacccaaaauacucagaggaagcaaaauuaaacagagaaaaaauagaugggguaaaacuggaaucaacaaggauuuaccagauuuuggcgaucuauucaacugucgccaguucauugguacugguagucucccugggggcaaucaguuucuggaugugcucuaaugggucucuacaguguagaauauguauuuaa

SEQ ID NO: 44041 - RNA, 1701 nt, Artificial Sequence; identical to SEQ ID NO: 43034
  derived and/or modified CDS sequence (wt) from hemagglutinin__InfluenzaA__AHV83916

SEQ ID NO: 44042 - RNA, 1701 nt, Artificial Sequence; identical to SEQ ID NO: 44037
  derived and/or modified CDS sequence (wt) from hemagglutinin__InfluenzaA__AHV83917

SEQ ID NO: 44043 - RNA, 1701 nt, Artificial Sequence; identical to SEQ ID NO: 43025
  derived and/or modified CDS sequence (wt) from hemagglutinin__InfluenzaA__AHV83919

SEQ ID NO: 44044 - RNA, 1701 nt, Artificial Sequence
  derived and/or modified CDS sequence (wt) from hemagglutinin__InfluenzaA__AHV83920
augaaggcaauacuaguaguucugcuauauacauuugcaaccgcaaaugcagacacauuauguauagguuaucaugcgaacaauucaacagacacuguagacacaguacuagaaaagaauguaacaguaacacacucuguuaaccuucuagaagacaagcauaacgggaaacuaugcaaacuaagagggguagccccauugcauuuggguaaauguaacauugcuggcuggauccugggaaauccagagugugaaucacucuccacagcaaguucaugguccuacauuguggaaacaucuaguucagacaauggaacguguuacccaggagauuucaucaauuaugaggagcuaagagagcaauugagcucagugucaucauuugaaagguuugagauauuccccaagacaaguucauggcccaaucaugacucgaacaaagguguaacggcagcauguccucacgcuggagcaaaaagcuucuacaaaaauuuaauauggcuaguuaaaaaaggaaauucauacccaaagcucagccaauccuacauuaaugauaaagggaaagaaguccucgugcuguggggcauucaccauccaucuacuacugcugaccaacaaagucucuaucagaaugcagaugcauauguuuuuguggggacaucaagauacagcaagaaguucaagccggaaauagcaauaagacccaaagugagggaucaagaagggagaaugaacuauuacuggacacuaguagagccgggagacaaaauaacauucgaagcaacuggaaaucuagugguaccaagauaugcauucacaauggaaagaaaugcuggaucugguauuaucauuucagauacaccaguccacgauugcaauacaacuugucagacacccgagggugcuauaaacaccagccucccauuucagaauauacauccgaucacaauuggaaaauguccaaaguauguaaaaagcacaaaauugagacuggccacaggauugaggaaugucccgucuauucaaucuagaggccuauucggggccauugccggcuucauugaagggggguggacagggaugguagauggaugguacgguuaucaccaucaaaaugagcaggggucaggauaugcagccgaccagaagagcacacaaaaugccauugacaagauuacuaacaaaguaaacucuguuauugaaaagaugaauacacaguucacagcaguggguaaagaguucaaccaccuggaaaaaagaauagagaauuuaaauaaaaaaguugaugaugguuuccuggacauuuggacuuacaaugccgaacuguugguucuauuggaaaaugaaagaacuuuggacuaccacgauucaaaugugaagaacuuguaugaaaagguaagaaaccaguuaaaaaacaaugccaaggaaauuggaaacggcugcuuugaauuuuaccacaaaugcgauaacacgugcauggaaagugucaaaaaugggacuuaugacuacccaaaauacucagaggaagcaaaauuaaacagagaaaaaauagaugggguaaagcuggaaucaacaaggauuuaccagauuuuggcgaucuauucaacugucgccaguucauugguacugguagucucccugggggcaaucagcuucuggaugugcucuaaugggucucuacaguguagaauauguauuuaa

SEQ ID NO: 44045 - RNA, 1701 nt, Artificial Sequence
  derived and/or modified CDS sequence (wt) from hemagglutinin__InfluenzaA__AHV83921
augaaggcaauacuaguaguucugcuauauacauuugcaaccacaaaugcagacacauuauguauagguuaucaugcgaacaauucaacagacacuguagacacaguacuagaaaagaauguaacaguaacacacucuguuaaccuucuagaagacaagcauaacgggaaacuaugcaaacuaagagggguagccccauugcauuuggguaaauguaacauugcuggcuggauccugggaaauccagagugugaaucacucuccacagcaaguucaugguccuacauuguggaaacaucuaguucagacaauggaacguguuacccaggagauuucaucaauuaugaggagcuaagagagcaauugagcucagugucaucauuugaaagguuugagauauuccccaagacaaguucauggcccaaucaugacucgaacaaagguguaacggcagcauguccucacgcuggagcaaaaagcuucuacaaaaauuuaauauggcuaguuaaaaaaggaaauucauacccaaagcucagccaauccuacauuaaugauaaagggaaagaaguccucgugcuguggggcauucaccauccaucuacuacugcugaccaacaaagucucuaucagaaugcagaugcauauguuuuuguggggacaucaagauacagcaagaaguucaagccggaaauagcaauaagacccaaagugagggaucaagaagggagaaugaacuauuacuggacacuaguagagccgggagacaaaauaacauucgaagcaacuggaaaucuagugguaccgagauaugcauucacaauggaaagaaaugcuggaucugguauuaucauuucagauacaccaguccacgauugcaauacaacuugucagacacccgagggugcuauaaacaccagccucccauuucagaauauacauccgaucacaauuggaaaauguccaaaguauguaaaaagcacaaaauugagacuggccacaggauugaggaaugucccgucuauucaaucuagaggccuauucggggccauugccggcuucauugaagggggguggacagggaugguagauggaugguacgguuaucaccaucaaaaugagcaggggucaggauaugcagccgaccugaagagcacacaaaaugccauugacaagauuacuaacaaaguaaauucuguuauugaaaaaaugaauacacaguucacagcaguggguaaagaguucaaccaccuggaaaaaagaauagagaauuuaaauaaaaaaguugaugaugguuuccuggacauuuggacuuacaaugccgaacuguugguucuauuggaaaaugaaagaacuuuggacuaccacgauucaaaugugaagaacuuguaugaaaagguaagaaaccaguuaaaaaacaaugcaaaggaaauuggaaacggcugcuuugaauuuuaccacaaaugcgauaacacgugcauggaaagugucaaaaaugggacuuaugacuacccaaaauacucagaggaagcaaaauuaaacagagaaaaaauagaugggguaaagcuggaaucaacaaggauuuaccagauuuuggcgaucuauucaacugucgccaguucauugguacugguagucucccugggggcaaucagcuucuggaugugcucuaaugggucucuacaguguagaauauguauuuaa

SEQ ID NO: 44046 - RNA, 1701 nt, Artificial Sequence
  derived and/or modified CDS sequence (wt) from hemagglutinin__InfluenzaA__AHV83922
augaaggcaauacuaguaguucugcuauauacauuugcaaccgcaaaugcagacacauuauguauagguuaucaugcgaacaauucaacagacacuguagacacaguacuagaaaagaauguaacaguaacacacucuguuaaccuucuagaagacaagcauaacgggaaacuaugcaaacuaagggggguagccccauugcauuuggguaaauguaacauugcuggcuggauccugggaaauccagagugugaaucacucuccacagcaaguucaugguccuacauuguggaaacaucuaguucagacaauggaacguguuacccaggagauuucaucaauuaugaggagcuaagagagcaauugagcucagugucaucauuugaaagguuugagauauuccccaagacaaguucauggcccaaucaugacucgaacaaagguguaacggcagcauguccucacgcuggagcaaaaagcuucuacaaaaauuuaauauggcuaguuaaaaaaggaaauucauacccaaagcucagccaauccuacauuaaugauaaagggaaagaaguccucgugcuguggggcauucaccacccaucuacuacugcugaccaacaaagucucuaucagaaugcagaugcauauguuuuuguggggacaucaagauacagcaagaaguucaagccggaaauagcaauaagacccaaagugagggaucaagaagggagaaugaacuacuacuggacacuaguagagccgggagacaaaauaacauucgaagcaacuggaaaucuagugguaccgagauaugcauucacaauggaaagaaaugcuggaucugguauuaucauuucagauacaccaguccacgauugcaauacaacuugucagacacccgagggugcuauaaacaccagccucccauuucagaauauacauccgaucacaauuggaaaauguccaaaguauguaaaaagcacaaaauugagacuggccacaggauugaggaaugucccgucuauucaaucuagaggccuauucggggccauugccggcuucauugaagggggguggacagggaugguagauggaugguacgguuaucaccaucaaaaugagcaggggucaggauaugcagccgaccugaagagcacacaaaaugccauugacaagauuacuaacaaaguaaauucuguuauugaaaagaugaauacacaguucacagcaguggguaaagaguucagccaccuggaaaaaagaauagagaauuuaaauaaaaaaguugaugaugguuuccuggacauuuggacuuacaaugccgaacuguugguucuauuggaaaaugaaagaacuuuggacuaccacgauucaaaugugaagaacuuguaugaaaagguaagaaaccaguuaaaaaacaaugccaaggaaauuggaaacggcugcuuugaauuuuaccacaaaugcgauaacacgugcauggaaagugucaaaaaugggacuuaugacuacccaaaauacucagaggaagcaaaauuaaacagagaaaaaauagaugggguaaaacuggaaucaacaaggauuuaccagauuuuggcgaucuauucaacugucgccaguucauugguacugguagucucccugggggcaaucagcuucuggaugugcucuaaugggucucuacaguguagaauauguauuuaa

SEQ ID NO: 44047 - RNA, 1701 nt, Artificial Sequence
  derived and/or modified CDS sequence (wt) from hemagglutinin__InfluenzaA__AHV83923
augaaggcaauacuaguaguucugcuauauacauuuacaaccgcaaaugcagacacauuauguauagguuaucaugcgaacaauucaacagacacuguagacacaguacuagaaaagaauguaacaguaacacacucuguuaaccuucuagaagacaagcauaacgggaaacuaugcaaacuaagagggguagccccauugcacuuggguaaauguaacauugcuggcuggauccugggaaauccagagugugaaucacucuccacagcaaguucaugguccuacauuguggaaacaucuaguucagacaauggaacguguuacccaggagauuucaucaauuaugaggagcuaagagagcaauugagcucagugucaucauuugaaagguuugagauauuucccaagacaaguucauggcccaaucaugacucgaacaaagguguaacggcagcauguccucacgcuggagcaaaaagcuucuacaaaaauuuaauauggcuaguuaaaaaagggaauucauacccaaagcucagccaauccuacauuaaugauaaagggaaagaaguccucgugcuguggggcauucaccauccaucuacuacugcugaccaacaaagucucuaucagaaugcagaugcauauguuuuuguggggacaucaagauacagcaagaaguucaagccggaaauagcaauaagacccaaagugagggaucaagaagggagaaugaacuauuacuggacacuaguagagccgggagacaaaauaacauucgaagcaacuggaaaucuagugguaccgagauaugcauucacaauggaaagaaaugcuggaucugguauuauuauuucagauacaccaguccacgauugcaauacaacuugucagacacccgagggugcuauaaacaccagccucccauuucagaauauacauccgaucacaauuggaaaauguccaaaguauguaaaaagcacaaaauugagacuggccacaggauugaggaaugucccgucuauucaaucuagaggccuauucggggccauugccggcuucauugaagggggguggacagggaugguagauggaugguacgguuaucaccaucaaaaugagcaggggucaggauaugcagccgaccugaagagcacacaaaaugccauugacaagauuacuaacaaaguaaauucuguuauugaaaagaugaauacacaguucacagcaguggguaaagaguucaaccaccuggaaaaaagaauagagaauuuaaauaaaaaaguugaugaugguuuccuggacauuuggacuuacaaugccgaacuguugguucuauuggaaaaugaaagaacuuuggacuaccacgauucaaaugugaagaacuuguaugaaaagguaagaaaccaguuaaaaaacaaugccaaggaaauuggaaacggcugcuuugaauuuuaccacaaaugcgauaacacgugcauggaaagugucaaaaaugggacuuaugaauacccaaaauacucagaggaagcaaaauuaaacagagaaaaaauagaugguguaaagcuggaaucaacaaagauuuaccagauuuuggcgaucuauucaacugucgccaguucauugguacugguagucucccugggggcaaucagcuucuggaugugcucuaaugggucucuacaguguagaauauguauuuaa

SEQ ID NO: 44048 - RNA, 1701 nt, Artificial Sequence; identical to SEQ ID NO: 43960
  derived and/or modified CDS sequence (wt) from hemagglutinin__InfluenzaA__AHV83924

SEQ ID NO: 44049 - RNA, 1701 nt, Artificial Sequence; identical to SEQ ID NO: 43948
  derived and/or modified CDS sequence (wt) from hemagglutinin__InfluenzaA__AHV83925

SEQ ID NO: 44050 - RNA, 1701 nt, Artificial Sequence
  derived and/or modified CDS sequence (wt) from hemagglutinin__InfluenzaA__AHV83926
augaaggcaauacuaguaguucugcuauauacauuugcaaccgcaaaugcagacacauuauguauagguuaucaugcgaacaauucaacagacacuguagacacaguacuagaaaagaauguaacaguaacacacucuguuaaccuucuagaagacaagcauaacgggaaacuaugcaaacuaagagggguggccccauugcauuuggguaaauguaacauugcuggcuggauccugggaaauccagagugugaaucacucuccacagcaaguucaugguccuacauuguggaaacaucuaguucagacaauggaacguguuacccaggagauuucaucaauuaugaggagcuaagagagcaauugagcucagugucaucauuugaaagguuugagauauuccccaagacaaguucauggcccaaucaugacucgaacaaagguguaacggcagcauguccucacgcuggagcaaaaagcuucuacaaaaauuuaauauggcuaguuaaaaaaggaaauucauacccaaagcucagccaauccuacauuaaugauaaagggaaagaaguccucgugcuguggggcauucaccauccaucuacuacugcugaccaacaaagucucuaucagaaugcagaugcauauguuuuuguggggacaucaagauacagcaagaaguucaagccggaaauagcaauaagacccaaagugagggaucaagaagggagaaugaacuauuacuggacacuaguagagccgggagacaaaauaacauucgaagcaacuggaaaucuagugguaccgagauaugcauucacaauggaaagaaaugcuggaucugguauuaucauuucagauacaccaguccacgauugcaauacaacuugucagacacccgagggugcuauaaacaccagccucccauuucagaauauacauccgaucacaauuggaaaauguccaaaguauguaaaaagcacaaaauugagacuggccacaggauugaggaaugucccgucuauucaaucuagaggccuauucggggccauugccggcuucauugaagggggguggacagggaugguagauggaugguacgguuaucaccaucaaaaugagcaggggucaggauaugcagccgaccagaagagcacacaaaaugccauugacaagauuacuaacaaaguaaauucuguuauugaaaagaugaauacacaguucacagcaguggguaaagaguucaaccaccuggaaaaaagaauagagaauuuaaauaaaaaaguugaugaugguuuccuggacauuuggacuuacaaugccgaacuguugguucuauuggaaaaugaaagaacuuuggacuaccacgauucaaaugugaagaacuuguaugaaaagguaagaaaccaguuaaaaaacaaugccaaggaaauuggaaacggcugcuuugaauuuuaccacaaaugcgauaacacgugcauggaaagugucaaaaaugggacuuaugacuacccaaaauacucagaggaagcaaaauuaaacagagaaaaaauagaugggguaaagcuggaaucaacaaggauuuaccagauuuuggcgaucuauucaacugucgccaguucauugguacugguagucucccugggggcaaucagcuucuggaugugcucuaaugggucucuacaguguagaauauguauuuaa

SEQ ID NO: 44051 - RNA, 1701 nt, Artificial Sequence
  derived and/or modified CDS sequence (wt) from hemagglutinin__InfluenzaA__AHV83927
augaaggcaauacuaguaguucugcuauacacauuugcaaccgcaaaugcagacacauuauguauagguuaucaugcgaacaauucaacagacacuguagacacaguacuagaaaagaauguaacaguaacacacucuguuaaccuucuagaagacaagcauaacgggaaacuaugcaaacuaagagggguagccccauugcauuuggguaaauguaacauugcuggcuggauccugggaaauccagagugugaaccacucuccacagcaaguucaugguccuacauuguggaaacaucuaguucagacaauggaacguguuacccaggagauuucaucaauuaugaggagcuaagagagcaauugagcucagugucaucauuugaaagauuugagauauuccccaagacaaguucauggcccaaucaugacucgaacaaagguguaacggcagcauguccucacgcuggagcaaaaagcuucuacaaaaauuuaauauggcuaguuaaaaaaggaaauucauacccaaagcucagccaauccuacauuaaugauaaagggaaagaaguccucgugcuguggggcauucaccauccaucuacuacugcugaccaacaaagucucuaucagaaugcagaugcauauguuuuuguggggacaucaagauacagcaagaaguucaagccggaaauagcaauaagacccaaagugagggaucaagaagggagaaugaacuauuacuggacacuaguagagccgggagacaaaauaacauucgaagcaacuggaaaucuagugguaccgagauaugcauucacaauggaaagaaaugcuggaucugguauuaucauuucagauacaccaguccacgauugcaauacaacuugucagacacccgagggugcuauaaacaccagccucccauuucagaauauacauccgaucacaauuggaaaauguccaaaguauguaaaaagcacaaaauugagacuggccacaggguugaggaaugucccaucuauucaaucuagaggccuauucggggccauugccggcuucauugaagggggguggacagggaugguagauggaugguacgguuaucaccaucaaaaugagcaggggucaggauaugcagccgaccugaagagcacacaaaaugccauugacaaaauuacuaacaaaguaaauucuguuauugaaaagaugaauacacaguucacagcaguggguaaagaguucaaccacuuggaaaaaagaauagagaauuuaaauaaaaaaguugaugaugguuuccuggacauuuggacuuacaaugccgaacugcugguucuauuggaaaaugaaagaacuuuggacuaccacgauucaaaugugaagaacuuguaugaaaagguaagaaaccaguuaaaaaacaaugccaaggaaauuggaaacggcugcuuugaauuuuaccacaaaugcgauaacacgugcauggaaagugucaaaaaugggacuuaugacuacccaaaauacucagaggaagcaaaauuaaacagagaaaaaauagaugggguaaaacuggaaucaacaaggauuuaccagauuuuggcgaucuauucaacugucgccaguucauugguacugguagucucccugggggcaaucagcuucuggaugugcucuaaugggucucuacaguguagaauauguauuuaa

SEQ ID NO: 44052 - RNA, 1701 nt, Artificial Sequence
  derived and/or modified CDS sequence (wt) from hemagglutinin__InfluenzaA__AHV83928
augaaggcaauacuaguaguucugcuauauacauuuacaaccgcaaaugcagacacauuauguauagguuaucaugcgaacaauucaacagacacuguagacacaguacuagaaaagaauguaacaguaacacacucuguuaaccuucuagaagacaagcauaacgggaaacuaugcaaacuaagagggguggccccauugcauuuggguaaauguaacauugcuggcuggauccugggaaauccagagugugaaucacucuccacagcaaguucaugguccuacauuguggaaacaucuaguucagacaauggaacguguuacccaggagauuucaucaauuaugaggagcuaagagagcaauugagcucagugucaucauuugaaagguuugagauauuccccaagacaaguucauggcccaaucaugacucgaacaaagguguaacggcagcauguccucacgcuggagcaaaaagcuucuacaaaaauuuaauauggcuaguuaaaaaaggaaauucauacccaaagcucagccaauccuacauuaaugauaaagggaaagaaguccucgugcuguggggcauucaccauccaucuacuacugcugaccaacaaagucucuaucagaaugcagaugcauauguuuuuguggggacaucaagauacagcaagaaguucaagccggaaauagcaauaagacccaaagugagggaucaagaagggagaaugaacuauuacuggacacuaguagagccgggagacaaaauaacauucgaagcaacuggaaaucuagugguaccgagauaugcauucacaauggaaagaaaugcuggaucugguauuaucauuucagauacaccaguccacgauugcaauacaacuugucagacacccgagggugcuauaaacaccagccucccauuucagaauauacauccgaucacaauuggaaaauguccaaaguauguaaaaagcacaaaauugagacuggccacaggauugaggaaugucccgucuauucaaucuagaggccuauucggggccauugccggcuucauugaagggggguggacagggaugguagauggaugguacgguuaucaccaucaaaaugagcaggggucaggauaugcagccgaccagaagagcacacaaaaugccauugacaagauuacuaacaaaguaaauucuguuauugaaaagaugaauacacaguucacagcaguggguaaagaguucaaccaccuggaaaaaagaauagagaauuuaaauaaaaaaguugaugaugguuuccuggacauuuggacuuacaaugccgaacuguugguucuauuggaaaaugaaagaacuuuggacuaccacgauucaaaugugaagaacuuguaugaaaagguaagaaaccaguuaaaaaacaaugccaaggaaauuggaaacggcugcuuugaauuuuaccacaaaugcgauaacacgugcauggaaagugucaaaaaugggacuuaugacuacccaaaauacucagaggaagcaaaauuaaacagagaaaaaauagaugggguaaagcuggaaucaacaaggauuuaccagauuuuggcgaucuauucaacugucgccaguucauugguacugguagucucccugggggcaaucagcuucuggaugugcucuaaugggucucuacaguguagaauauguauuuaa

SEQ ID NO: 44053 - RNA, 1701 nt, Artificial Sequence; identical to SEQ ID NO: 43960
  derived and/or modified CDS sequence (wt) from hemagglutinin__InfluenzaA__AHV83929

SEQ ID NO: 44054 - RNA, 1701 nt, Artificial Sequence
  derived and/or modified CDS sequence (wt) from hemagglutinin__InfluenzaA__AHV83930
augaaggcaauacuaguaauucugcuauauacauuugcaaccgcaaaugcagacacauuauguauagguuaucaugcgaacaauucaacagacacuguagacacaguacuagaaaagaauguaacaguaacacacucuguuaaccuucuagaagacaagcauaacgggaaacuaugcaaacuaagagggguagccccauugcauuuggguaaauguaacauugcuggcuggauccugggaaauccagagugugaaucacucuccacagcaaguucaugguccuacauuguggaaacaucuaguucagacaauggaacguguuacccaggagauuucaucaauuaugaggagcuaagagagcaauugagcucagugucaucauuugaaagguuugagauauuccccaagacaaguucauggcccaaucaugacucgaacaaagguguaacggcagcauguccucacgcuggagcaaaaagcuucuacaaaaauuuaauauggcuaguuaaaaaaggaaauucauacccaaagcucagccaauccuacauuaaugauaaagggaaagaaguccucgugcuguggggcauucaccacccaucuacuacugcugaccaacaaagucucuaucagaaugcagaugcauauguuuuuguggggacaucaagauacagcaagaaguucaagccggaaauagcaauaagacccaaagugagggaucaagaagggagaaugaacuacuacuggacacuaguagagccgggagacaaaauaacauucgaagcaacuggaaaucuagugguaccgagauaugcauucacaauggaaagaaaugcuggaucugguauuaucauuucagauacaccaguccacgauugcaauacaacuugucagacacccgagggugcuauaaacaccagccucccauuucagaauauacauccgaucacaauuggaaaauguccaaaguauguaaaaagcacaaaauugagacuggccacaggauugaggaaugucccgucuauucaaucuagaggccuauucggggccauugccggcuucauugaagggggguggacagggaugguagauggaugguacgguuaucaccaucaaaaugagcaggggucaggauaugcagccgaccugaagagcacacaaaaugccauugacaagauuacuaacaaaguaaauucuguuauugaaaagaugaauacacaguucacagcaguggguaaagaguucaaccaccuggaaaaaagaauagagaauuuaaauaaaaaaguugaugaugguuuccuggacauuuggacuuacaaugccgaacuguugguucuauuggaaaaugaaagaacuuuggacuaccacgauucaaaugugaagaacuuguaugaaaagguaagaaaccaguuaaaaaacaaugccaaggaaauuggaaacggcugcuuugaauuuuaccacaaaugcgauaacacgugcauggaaagugucaaaaaugggacuuaugacuacccaaaauacucagaggaggcaaaauuaaacagagaaaaaauagaugggguaaaacuggaaucaacaaggauuuaccagauuuuggcgaucuauucaacugucgccaguucauugguacugguagucucccugggggcaaucagcuucuggaugugcucuaaugggucucuacaguguagaauauguauuuaa

SEQ ID NO: 44055 - RNA, 1701 nt, Artificial Sequence; identical to SEQ ID NO: 43954
  derived and/or modified CDS sequence (wt) from hemagglutinin__InfluenzaA__AHV83931

SEQ ID NO: 44056 - RNA, 1701 nt, Artificial Sequence; identical to SEQ ID NO: 44003
  derived and/or modified CDS sequence (wt) from hemagglutinin__InfluenzaA__AHV83932

SEQ ID NO: 44057 - RNA, 1701 nt, Artificial Sequence
  derived and/or modified CDS sequence (wt) from hemagglutinin__InfluenzaA__AHV83933
augaaggcaauacuaguaguucugcuauauacauuugcaaccgcaaaugcagacacauuauguauagguuaucaugcgaacaauucaacagacacuguagacacaguacuagaaaagaauguaacaguaacacacucuguuaaccuucuagaagacaagcauaacgggaaacuaugcaaacuaagagggguaaccccauugcauuuggguaaauguaacauugcuggcuggauccugggaaauccagagugugaaucacucuccacagcaaguucaugguccuacauuguggaaacaucuaguucagacaauggaacguguuacccaggagauuucaucaauuaugaggagcuaagagagcaauugagcucagugucaucauuugaaagguuugagauauuccccaagacaaguucauggcccaaucaugacucgaacaaagguguaacggcagcauguccucacgcuggagcaaaaagcuucuacaaaaauuuaauauggcuaguuaaaaaaggaaauucauacccaaagcucagccaauccuacauuaaugauaaagggaaagaaguccucgugcuguggggcauucaccauccaucuacuacugcugaccaacaaagucucuaucagaaugcagaugcauauguuuuuguggggacaucaagauacagcaagaaguucaagccggaaauagcaauaagacccaaagugagggaucaagaagggagaaugaacuauuacuggacacuaguagagccgggagacaaaauaacauucgaagcaacuggaaaucuagugguaccgagauaugcauucacaauggaaagaaaugcuggaucugguauuaucauuucagauacaccaguccacgauugcaauacaacuugucagacacccgagggugcuauaaacaccagccucccauuucagaauauacauccgaucacaauuggaaaauguccaaaguauguaaaaagcacaaaauugagacuggccacaggauugaggaaugucccgucuauucaaucuagaggccuauucggggccauugccggcuucauugaagggggguggacagggaugguagauggaugguacgguuaccaccaucaaaaugagcaggggucaggauaugcagccgaccagaagagcacacaaaaugccauugacaagauuacuaacaaaguaaauucuguuauugaaaagaugaauacacaguucacagcaguggguaaagaguucaaccaccuggaaaaaagaauagagaauuuaaauaaaaaaguugaugaugguuuccuggacauuuggacuuacaaugccgaacuguugguucuauuggaaaaugaaagaacuuuggacuaccacgauucaaaugugaagaacuuguaugaaaagguaagaaaccaguuaaaaaacaaugccaaggaaauuggaaauggcugcuuugaauuuuaccacaaaugcgauaacacgugcauggaaagugucaaaaaugggacuuaugacuacccaaaauacucagaggaagcaaaauuaaacagagaaaaaauagaugggguaaagcuggaaucaacaaggauuuaccagauuuuggcgcucuauucaacugucgccaguucauugguacugguagucucccugggggcaaucagcuucuggaugugcucuaaugggucucuacaguguagaauauguauuuaa

SEQ ID NO: 44058 - RNA, 1701 nt, Artificial Sequence; identical to SEQ ID NO: 43015
  derived and/or modified CDS sequence (wt) from hemagglutinin__InfluenzaA__AHV83934

SEQ ID NO: 44059 - RNA, 1701 nt, Artificial Sequence; identical to SEQ ID NO: 43009
  derived and/or modified CDS sequence (wt) from hemagglutinin__InfluenzaA__AHV83935

SEQ ID NO: 44060 - RNA, 1701 nt, Artificial Sequence
  derived and/or modified CDS sequence (wt) from hemagglutinin__InfluenzaA__AHV83937
augaaggcaauacuaguaguucugcuauauacauuugcaaccgcaaaugcagacacauuauguauagguuaucaugcgaacaauucaacagacacuguagacacaguacuagaaaagaauguaacaguaacacacucuguuaaccuucuagaagacaagcauaacgggaaacuaugcaaacuaagagggguagccccauugcauuuggguaaauguaacauugcuggcuggauccugggaaauccagagugugaaucacucuccacagcaaguucaugguccuacauuguggaaacaucuaguucagacaauggaacguguuacccaggagauuucaucaauuaugaggagcuaagagagcaauugagcucagugucaucauuugaaagguuugagauauuccccaagacaaguucauggcccaaucaugacucgaacaaagguguaacggcagcauguccucacgcuggagcaaaaagcuucuacaaaaauuuaauauggcuaguuaaaaaaggaaauucauacccaaagcucagccaauccuacauuaaugauaaagggaaagaaguccucgugcuguggggcauucaccacccaucuacuacugcugaccaacaaagucucuaucagaaugcagaugcauauguuuuuguggggacaucaagauacagcaagaaguucaagccggaaauagcaauaagacccaaagugagggaucaagaagggagaaugaacuauuacuggacacuaguagagccgggagacaaaauaacauucgaagcaacuggaaaucuagugguaccgagauaugcauucacaauggaaagaaaugcuggaucugguauuaucauuucagauacaccaguccacgauugcaauacaacuugucagacacccgagggugcuauaaacaccagccucccauuucagaauauacauccgaucacaauuggaaaauguccaaaguauguaaaaagcacaaaauugagacuggccacaggauugaggaaugucccgucuauucaaucuagaggccuauucggggccauugccggcuucauugaaggaggguggacagggaugguagauggaugguacgguuaucaccaucaaaacgagcaggggucaggauaugcagccgaccugaagagcacacaaaaugccauugacaagauuacuaacaaaguaaauucuguuauugaaaagaugaauacacaguucacagcaguggguaaagaguucaaccaccuggaaaaaagaauagagaauuuaaauaaaaaaguugaugaugguuuccuggacauuuggacuuacaaugccgaacuguugguucuauuggaaaaugaaagaacuuuggacuaccacgauucaaaugugaagaacuuguaugaaaagguaagaaaccaguuaaaaaacaaugccaaggaaauuggaaauggcugcuuugaauuuuaccacaaaugcgauaacacgugcauggaaagugucaaaaaugggacuuaugacuacccaaaauacucagaggaagcaaaauuaaacagagaaaaaauagaugggguaaagcuggaaucaacaaggauuuaccagauuuuggcgaucuauucaacugucgccaguucauugguacugguagucucccugggggcaaucagcuucuggaugugcucuaaugggucucuacaguguagaauauguauuuaa

SEQ ID NO: 44061 - RNA, 1701 nt, Artificial Sequence
  derived and/or modified CDS sequence (wt) from hemagglutinin__InfluenzaA__AHV83938
augaaggcaauacuaguaguucugcuauauacauuugcaaccgcaaaugcagacacauuauguauagguuaucaugcgaacaauucaacagacacuguagacacaguacuagaaaagaauguaacaguaacacacucuguuaaccuucuagaagacaagcauaacgggaaacuaugcaaacuaagagggguagccccauugcauuuggguaaauguaacauugcuggcuggauccugggaaauccagagugugaaucacucuccacagcaaguucaugguccuacauuguggaaacaucuaguucagacaauggaacguguuacccaggagauuucaucaauuaugaggagcuaagagagcaauugagcucagugucaucauuugaaagguuugagauauuccccaagacaaguucauggcccaaucaugacucgaacaaagguguaacggcagcauguccucacgcuggagcaaaaagcuucuacaaaaauuuaauauggcuaguuaaaaaaggaaauucauauccaaagaucagccaauccuacauuaaugauaaagggaaagaaguccucgugcuguggggcauucaccauccaucuacuacugcugaccaacaaagucucuaucagaaugcagaugcauauguuuuuguggggacaucaagauacagcaagaaguucaagccggaaauagcaauaagacccaaagugagggaucaagaagggagaaugaacuauuacuggacacuaguagagccgggagacaaaauaacauucgaagcaacuggaaaucuagugguaccgagauaugcauucacaauggaaagaaaugcuggaucugguauuaucauuucagauacaccaguccacgauugcaauacaacuugucagacacccgagggugcuauaaacaccagccucccauuucagaauauacauccgaucacaauuggaaaauguccaaaguauguaaaaagcacaaaauugagacuggccacaggauugaggaaugucccgucuauucaaucuagaggccuauucggggccauugccggcuucauugaagggggguggacagggaugguagauggaugguacgguuaucaccaucaaaaugagcaggggucaggauaugcagccgaccagaagagcacacaaaaugccauugacaagauuacuaacaaaguaaauucuguuauugaaaagaugaauacacaguucacagcaguggguaaagaguucaaccaccuggaaaaaagaauagagaauuuaaauaaaaaaguugaugaugguuuccuggacauuuggacuuacaaugccgaacuguugguucuauuggaaaaugaaagaacuuuggacuaccacgauucaaaugugaagaacuuguaugaaaagguaagaaaccaguuaaaaaacaaugccaaggaaauuggaaacggcugcuuugaauuuuaccacaaaugcgauaacacgugcauggaaagugucaaaaaugggacuuaugacuacccaaaauacucagaggaagcaaaauuaaacagagaaaaaauagaugggguaaagcuggaaucaacaaggauuuaccagauuuuggcgaucuauucaacugucgccaguucauugguacugguagucucccugggggcaaucagcuucuggaugugcucuaaugggucucuacaguguagaauauguauuuaa

SEQ ID NO: 44062 - RNA, 1701 nt, Artificial Sequence; identical to SEQ ID NO: 44061
  derived and/or modified CDS sequence (wt) from hemagglutinin__InfluenzaA__AHV83939

SEQ ID NO: 44063 - RNA, 1701 nt, Artificial Sequence
  derived and/or modified CDS sequence (wt) from hemagglutinin__InfluenzaA__AHV83940
augaaggcaauacuaguaguucugcuauauacauuugcaaccgcaaaugcagacacauuauguauagguuaucaugcgaacaauucaacagacacuguagacacaguacuagaaaagaauguaacaguaacacacucuguuaaccuucuagaagacaagcauaacgggaaacuaugcaaacuaagagggguagccccauugcauuuggguaaauguaacauugcuggcuggauccugggaaauccagagugugaaucacucuccacagcaaguucaugguccuacauuguggaaacaucuaguucagacaauggaacguguuacccaggagauuucaucaauuaugaggagcuaagagagcaauugagcucagugucaucauuugaaagguuugagauauuccccaagacaaguucauggcccaaucaugacucgaacaaagguguaacggcagcauguccucacgcuggagcaaaaagcuucuacaaaaauuuaauauggcuaguuaaaaaaggaaauucauacccaaagcucagccaauccuacauuaaugauaaagggaaagaaguccuugugcuguggggcauucaccauccaucuacuacugcugaccaacaaagucucuaucagaaugcagaugcauauguuuuuguggggacaucaagauacagcaagaaguucaagccggaaauagcaauaagacccaaagugagggaucaagaagggagaaugaacuauuacuggacacuaguagagccgggagacaaaauaacauucgaagcaacuggaaaucuagugguaccgagauaugcauucacaauggaaagaaaugcuggaucugguauuaucauuucagauacaccaguccacgauugcaauacaacuugucagacacccgagggugcuauaaacaccagccucccauuucagaauauacauccgaucacaauuggaaaauguccaaaguauguaaaaagcacaaaauugagacuggccacaggauugaggaaugucccgucuauucaaucuagaggccuauucggggccauugccggcuucauugaagggggguggacagggaugguagauggaugguacgguuaucaccaucaaaaugagcaggggucaggauaugcagccgaccagaagagcacacaaaaugccauugacaagauuacuaacaaaguaaauucuguuauugaaaagaugaauacacaguucacagcaguggguaaagaguucaaccaccuggaaaaaagaauagagaauuuaaauaaaaaaguugaugaugguuucauggacauuuggacuuacaaugccgaacuguugguucuauuggaaaaugaaagaacuuuggacuaccacgauucaaaugugaagaacuuguaugaaaagguaagaaaccaguuaaaaaacaaugccaaggaaauuggaaauggcugcuuugaauuuuaccacaaaugcgauaacacgugcauggaaagugucaaaaaugggacuuaugacuacccaaaauacucagaggaagcaaaauuaaacagagaaaaaauagauaggguaaagcuggaaucaacaaggauuuaccagauuuuggcgaucuauucaacugucgccaguucauugguacugguagucucccugggggcaaucagcuucuggaugugcucuaaugggucucuacaguguagaauauguauuuaa

SEQ ID NO: 44064 - RNA, 1701 nt, Artificial Sequence; identical to SEQ ID NO: 43005
  derived and/or modified CDS sequence (wt) from hemagglutinin__InfluenzaA__AHV83941

SEQ ID NO: 44065 - RNA, 1701 nt, Artificial Sequence
  derived and/or modified CDS sequence (wt) from hemagglutinin__InfluenzaA__AHV83943
augaaggcaauacuaguaguucugcuauauacauuugcaaccgcaaaugcagacacauuauguauagguuaucaugcgaacaauucaacagacacuguagacacaguacuagaaaagaauguaacaguaacacacucuguuaaccuucuagaagacaagcauaacgggaaacuaugcaaacuaagagggguagccccauugcauuuggguaaauguaacauugcuggcuggauccugggaaauccagagugugaaucacucuccacagcaaguucaugguccuacauuguggaaacaucuaguucagacaauggaacguguuacccaggagauuucaucaauuaugaggagcuaagagagcaauugagcucagugucaucauuugaaagguuugagauauuccccaagacaaguucauggcccaaucaugacucgaacaaagguguaacggcagcauguccucacgcuggagcaaaaagcuucuacaaaaauuuaauauggcuaguuaaaaaaggaaauucauacccaaagcucagccaauccuacauuaaugauaaagggaaagaaguccucgugcuguggggcauucaccacccaucuacuacugcugaccaacaaagucucuaucagaaugcagaugcauauguuuuuguggggacaucaagauacagcaagaaguucaagccggaaauagcaauaagacccaaagugagggaucaagaagggagaaugaacuacuacuggacacuaguagagccgggagacaaaauaacauucgaagcaacuggaaaucuagugguaccgagauaugcauucacaauggaaagaaaugcuggaucugguauuaucauuucagauacaccaguccacgauugcaauacaacuugucagacacccgagggugcuauaaacaccagccucccauuucagaauauacauccgaucacaauuggaaaauguccaaaguauguaaaaagcacaaaauugagacuggccacaggauugaggaaugucccgucuauucaaucuagaggccuauucggggccauugccggcuucauugaagggggguggacagggaugguagauggaugguacgguuaucaccaucaaaaugagcaggggucaggauaugcagccgaccugaagagcacacaaaaugccauugacaagauuacuaacaaaguaaauucuguuauugaaaagaugaauacacaguucacagcaguggguaaagaguucaaccaccuggaaaaaagaauagagaauuuaaauaaaaaaguugaugaugguuuccuggacauuuggacuuacaaugccgaacuguugguucuauuggaaaaugaaagaacuuuggacuaccacgauucaaaugugaagaacuuguaugaaaagguaagaaaccaguuaaaaaacaaugccaaggaaauuggaaacggcugcuuugaauuuuaccacaaaugcgauaacaugugcauggaaagugucaaaaaugggacuuaugacuaccccaaauacucagaggaggcaaaauuaaacagagaaaaaauagaugggguaaaacuggaaucaacaaggauuuaccagauuuuggcgaucuauucaacugucgccaguucauugguacugguagucucccugggggcaaucagcuucuggaugugcucuaaugggucucuacaguguagaauauguauuuaa

SEQ ID NO: 44066 - RNA, 1701 nt, Artificial Sequence
  derived and/or modified CDS sequence (wt) from hemagglutinin__InfluenzaA__AHV83944
augaaggcaauacuaguaguucugcuauacacauuugcaaccgcaaaugcagacacauuauguauagguuaucaugcgaacaauucaacagacacuguagacacaguacuagaaaagaauguaacaguaacacacucuguuaaccuucuagaagacgagcauaacgggaaacuaugcaaacuaagagggguagccccauugcauuuggguaaauguaacauugcuggcuggauccugggaaauccagagugugaaucacucuccacagcaaguucaugguccuacauuguggaaacaucuaguucagacaauggaacguguuacccaggagauuucaucaauuaugaggagcuaagagagcaauugagcucagugucaucauuugaaagauuugagauauuccccaagacaaguucauggcccaaucaugacucgaacaaagguguaacggcagcauguccucacgcuggagcaaaaagcuucuacaaaaauuuaauauggcuaguuaaaaaaggaaauucauacccaaagcucagccaauccuacauuaaugauaaagggaaagaaguccucgugcuguggggcauucaccauccaucuacuacugcugaccaacaaagucucuaucagaaugcagaugcauauguuuuuguggggacaucaagauacagcaagaaguucaagccggaaauagcaauaagacccaaagugagggaucaagaagggagaaugaacuauuacuggacacuaguagagccgggagacaaaauaacauucgaagcaacuggaaaucuagugguaccgagauaugcauucacaauggaaagaaaugcuggaucugguauuaucauuucagauacaccaguccacgauugcaauacaacuugucagacacccgagggugcuauaaacaccagccucccauuucagaauauacauccgaucacaauuggaaaauguccaaaguauguaaaaagcacaaaauugagacuggccacaggauugaggaaugucccaucuauucaaucuagaggccuauucggggccauugccggcuucauugaagggggguggacagggaugguagauggaugguacgguuaucaccaucaaaaugagcaggggucaggauaugcagccgaccugaagagcacacaaaaugccauugacaaaauuacuaacaaaguaaauucuguuauugaaaagaugaauacacaguucacagcaguggguaaagaguucaaccacuuggaaaaaagaauagagaauuuaaauaaaaaaguugaugaugguuuccuggacauuuggacuuacaaugccgaacugcugguucuauuggaaaaugaaagaacuuuggacuaccacgauucaaaugugaagaacuuguaugaaaagguaagaaaccaguuaaaaaacaaugccaaggaaauuggaaacggcugcuuugaauuuuaccacaaaugcgauaacacgugcauggaaagugucaaaaaugggacuuaugacuacccaaaauacucagaggaagcaaaauuaaacagagaaaaaauagaugggguaaaacuggaaucaacaaggauuuaccagauuuuggcgaucuauucaacugucgccaguucauugguacugguagucucccugggggcaaucagcuucuggaugugcucuaaugggucucuacaguguagaauauguauuuaa

SEQ ID NO: 44067 - RNA, 1701 nt, Artificial Sequence
  derived and/or modified CDS sequence (wt) from hemagglutinin__InfluenzaA__AHV83945
augaaggcaauacuaguaguucugcuauauacauuugcaaccgcaaaugcagacacauuauguauagguuaucaugcgaacaauucaacagacacuguagacacaguacuagaaaagaauguaacaguaacacacucuguuaaccuucuagaagacaagcauaacgggaaacuaugcaaacuaagagggguagccccauugcauuuggguaaauguaacauugcuggcuggauccugggaaauccagagugugaaucacucuccacagcaaguucaugguccuacauuguggaaacaucuaguucagacaauggaacguguuacccaggagauuucaucaauuaugaggagcuaagagagcaauugagcucagugucaucauuugaaagguuugagauauuccccaagacaaguucauggcccaaucaugacucgaacaaagguguaacggcagcauguccucacgcuggagcaaaaagcuucuacaaaaauuuaauauggcuaguuaaaaaaggaaauucauacccaaagcucagccaauccuacauuaaugauaaagggaaagaaguccucgugcuguggggcauucaccacccaucuacuacuacugaccaacaaagucucuaucagaaugcagaugcauauguuuuuguggggacaucaagauacagcaagaaguucaagccggaaauagcaauaagacccaaagugagggaucaagaagggagaaugaacuauuacuggacacuaguagagccgggagacaaaauaacauucgaagcaacuggaaaucuagugguaccgagauaugcauucacaauggaaagaaaugcuggaucugguauuaucauuucagauacaccaguccacgauugcaauacaacuugucagacacccgagggugcuauaaacaccagccucccauuucagaauauacauccgaucacaauuggaaaauguccaaaguauguaaaaagcacaaaauugagacuggccacaggauugaggaaugucccgucuauucaaucuagaggccuauucggggccauugccggcuucauugaaggaggguggacaggaaugguagauggaugguacgguuaucaccaucaaaaugagcaggggucaggauaugcagccgaccugaagagcacacaaaaugccauugacaagauuacuaacaaaguaaauucuguuauugaaaagaugaauacacaguucacagcaguggguaaagaguucaaccaccuggaaaaaagaauagagaauuuaaauaaaaaaguugaugaugguuuccuggacauuuggacuuacaaugccgaacuguugguucuauuggaaaaugaaagaacuuuggacuaccacgauucaaaugugaagaacuuguaugaaaagguaagaaaccaguuaaaaaacaaugccaaggaaauuggaaacggcugcuuugaauuuuaccacaaaugcgauaacacgugcauggaaagugucaaaaaugggacuuaugacuacccaaaauacucagaggaagcaaaauuaaacagagaaaaaauagaugggguaaagcuggaaucaacaaggauuuaccagauuuuggcgaucuauucaacugucgccaguucauugguacugguagucucccugggggcaaucagcuucuggaugugcucuaaugggucucuacaguguagaauauguauuuaa

SEQ ID NO: 44068 - RNA, 1701 nt, Artificial Sequence
  derived and/or modified CDS sequence (wt) from hemagglutinin__InfluenzaA__AHV83947
augaaggcaauacuaguaguucugcuauauacauuugcaaccgcaaaugcagacacauuauguauagguuaucaugcgaacaauucaacagacacuguagacacaguacuagaaaagaauguaacaguaacacacucuguuaaccuucuagaagacaagcauaacgggaaacuaugcaaacuaagagggguagccccauugcauuuggguaaauguaacauugcuggcuggauccugggaaauccagagugugaaucacucuccacagcaaguucaugguccuacauuguggaaacaucuaguucagacaauggaacguguuacccaggagauuucaucaauuaugaggagcuaagagagcaauugagcucagugucaucauuugaaagguuugagauauuccccaagacaaguucauggcccaaucaugacucgaacaaagguguaacggcagcauguccucacgcuggagcaaaaagcuucuacaaaaauuuaauauggcuaguuaaaaaaggaaauucauacccaaagcucagccaauccuacauuaaugauaaagggaaagaaguccucgugcuguggggcauucaccauccaucuacuacugcugaccaacaaagucucuaucagaaugcagaugcauauguuuuuguggggacaucaagauacagcaagaaguucaagccggaaauagcaauaagacccaaagugagggaucaagaagggagaaugaacuauuacuggacacuaguagagccgggagacaaaauaacauucgaagcaacuggaaaucuagugguaccgagauaugcauucacagugaaaagaaaugcuggaucugguauuaucauuucagauacaccaguccacgauugcaauacaacuugucagacacccgagggugcuauaaacaccagccucccauuucagaauauacauccgaucacaauuggaaaauguccaaaguauguaaaaagcacaaaauugagacuggccacaggauugaggaaugucccgucuauucaaucuagaggccuauucggggccauugccggcuucauugaagggggguggacagggaugguagauggaugguacgguuaucaccaucaaaaugagcaggggucaggauaugcagccgaccagaagagcacacaaaaugccauugacaagauuacuaacaaaguaaacucuguuauugaaaagaugaauacacaguucacagcaguggguaaagaguucaaccaccuggaaaaaagaauagagaauuuaaauaaaaaaguugaugaugguuuccuggacauuuggacuuacaaugccgaacuguugguucuauuggaaaaugaaagaacuuuggacuaccacgauucaaaugugaagaacuuguaugaaaagguaagaaaccaguuaaaaaacaaugccaaggaaauuggaaacggcugcuuugaauuuuaccacaaaugcgauaacacgugcauggaaagugucaaaaaugggacuuaugacuacccaaaauacucagaggaagcaaaauuaaacagagaaaaaauagaugggguaaagcuggaaucaacaaggauuuaccagauuuuggcgaucuauucaacugucgccaguucauugguacugguagucucccugggggcaaucagcuucuggaugugcucuaaugggucucuacaguguagaauauguauuuaa

SEQ ID NO: 44069 - RNA, 1701 nt, Artificial Sequence; identical to SEQ ID NO: 43913
  derived and/or modified CDS sequence (wt) from hemagglutinin__InfluenzaA__AHV83948

SEQ ID NO: 44070 - RNA, 1701 nt, Artificial Sequence; identical to SEQ ID NO: 43002
  derived and/or modified CDS sequence (wt) from hemagglutinin__InfluenzaA__AHV83949

SEQ ID NO: 44071 - RNA, 1701 nt, Artificial Sequence; identical to SEQ ID NO: 43911
  derived and/or modified CDS sequence (wt) from hemagglutinin__InfluenzaA__AHV83950

SEQ ID NO: 44072 - RNA, 1701 nt, Artificial Sequence
  derived and/or modified CDS sequence (wt) from hemagglutinin__InfluenzaA__AHV83953
augaagacuaucauugcuuugagcuacauucuaugucugguuuucgcucaaaaacuuccuggaaaugacaauagcacggcaacgcugugccuugggcaccaugcaguaccaaacggaacgauagugaaaacaaucacgaaugaccgaauugaaguuacuaaugcuacugagcugguucagaauuccucaauaggugaaauaugcgacaguccucaucagauccuugauggagaaaacugcacacuaauagaugcucuauugggagacccucagugugauggcuuucaaaauaagaaaugggaccuuuuuguugaacgaaguaaagccuacagcaacuguuacccuuaugaugugccggauuaugccucccuuaggucacuaguugccucauccggcacacuggaguuuaacaaugaaagcuucaauugggcuggagucacucaaaacggaacaaguucugcuugcauaaggggaucuaauaguaguuucuuuaguagauuaaauugguugacccacuuaaacuucaaauacccagcauugaacgugacuaugccaaacaaugaacaauuugacaaauuguacauuugggggguucaccacccggguacggacaaggaccaaaucuuccuguaugcucaaucaucaggaagaaucacaguaucuaccaaaagaagccaacaagcuguaaucccgaauaucggaucuagacccagaauaaggaauaucccuagcagaauaagcaucuauuggacaauaguaaaaccgggagacauacuuuugauuaacagcacagggaaucuaauugcuccuagggguuacuucaaaauacgaagugggaaaagcucaauaaugagaucagaugcacccauuggcaaaugcaagucugaaugcaucacuccaaauggaagcauucccaaugacaaaccauuccaaaauguaaacaggaucacauacggggccugucccagauauguuaagcaaagcacucugaaauuggcaacaggaaugcgaaauguaccagagaaacaaacuagaggcauauuuggcgcaauagcggguuucauagaaaaugguugggagggaaugauggaugguugguacgguuucaggcaucaaaauucugagggaagaggacaagcagcagaucucaaaagcacucaagcagcaaucgaucaaaucaaugggaagcugaaucgauugaucgggaaaaccaacgagaaauuccaucagauugaaaaagaauucucagaaguagaagggagaauucaggaccuugagaaauauguugaggacacaaaaauagaucucuggucauacaacgcggagcuucuuguugcccuggagaaccaacauacaauugaucuaacugacucagaaaugaacaaacuguuugaaaaaacaaagaagcaacugagggaaaaugcugaggaucugggcaaugguuguuucaaaauauaccacaaaugugacaaugccugcauaggaucaaucagaaauggaacuuaugaccacgauguauacagggaugaagcauuaaacaaccgguuccaaaucaagggaguugagcugaagucaggguacaaagauuggauccuauggauuuccuuugccauaucauguuuuuugcuuuguguugcuuuguugggguucaucaugugggccugccaaaagggcaacauuaggugcaacauuugcauuuga

SEQ ID NO: 44073 - RNA, 1701 nt, Artificial Sequence
  derived and/or modified CDS sequence (wt) from hemagglutinin__InfluenzaA__AHV83954
augaagacuaucauugcuuugagcuacauucuaugucugguuuucgcucaaaaacuuccuggaaaugacaauagcacggcaacgcugugccuugggcaccaugcaguaccaaacggaacgauagugaaaacaaucacgaaugaccgaauugaaguuacuaaugcuacugagcugguucagaauuccucaauaggugaaauaugcgacaguccucaucagauccuugauggagaaaacugcacacuaauagaugcucuauugggagacccucagugugauggcuuucaaaauaagaaaugggaccuuuuuguugaacgaagcaaagccuacagcaacuguuacccuuaugaugugccggauuaugccucccuuaggucacuaguugccucauccggcacacuggaguuuaacaaugaaagcuucaauugggcuggagucacucaaaacggaacaaguucugcuugcauaaggggaucuaauaguaguuucuuuaguagauuaaauugguugacccacuuaaacuucaaauacccagcauugaacgugacuaugccaaacaaugaacaauuugacaaauuguacauuugggggguucaccacccggguacggacaaggaccaaaucuuccuguaugcucaaucaucaggaagaaucacaguaucuaccaaaagaagccaacaagcuguaaucccgaauaucggaucuagacccagaauaaggaauaucccuagcagaauaagcaucuauuggacaauaguaaaaccgggagacauacuuuugauuaacagcacagggaaucuaauugcuccuagggguuacuucaaaauacgaagugggaaaagcucaauaaugagaucagaugcacccauuggcaaaugcaagucugaaugcaucacuccaaauggaagcauucccaaugacaaaccauuccaaaauguaaacaggaucacauacggggccugucccagauauguuaagcaaagcacucugaaauuggcaacaggaaugcgaaauguaccagagaaacaaacuagaggcauauuuggcgcaauagcggguuucauagaaaaugguugggagggaaugguggaugguugguacgguuucaggcaccaaaauucugagggaagaggacaagcagcagaucucaaaagcacucaagcagcaaucgaucaaaucaaugggaagcugaaucgauugaucgggaaaaccaacgagaaauuccaccagauugaaaaagaauucucagaaguagaagggagaauucaggaccuugagaaauauguugaggacacaaaaauagaucucuggucauacaacgcggagcuucuuguugcccuggagaaccaacauacaauugaucuaacugacucagaaaugaacaaacuguuugaaaaaacaaagaagcaacugagggaaaaugcugaggauaugggcaaugguuguuucaaaauauaccacaaaugugacaaugccugcauaggaucaaucagaaauggaacuuaugaccacgauguauacagggaugaagcauuaaacaaccgguuccagaucaagggaguugagcugaagucaggguacaaagauuggauccuauggauuuccuuugccauaucauguuuuuugcuuuguguuguuuuguugggguucaucaugugggccugccaaaagggcaacauuaggugcaacauuugcauuuga

SEQ ID NO: 44074 - RNA, 1701 nt, Artificial Sequence
  derived and/or modified CDS sequence (wt) from hemagglutinin__InfluenzaA__AHV83956
augaagacuaucauugcuuugagcuacauucuaugucugguuuuugcucaaaaacuuccuggaaaugacaauagcacggcaacgcugugccuugggcaccaugcaguaccaaacggaacgauagugaaaacaaucacgaaugaccgaauugaaguuacuaaugcuacugagcugguucagaauuccucaauaggugaaauaugcgacaguccucaucagauccuugauggagaaaacugcacacuaauagaugcucuauugggagacccucagugugauggcuuucaaaauaagaaaugggaccuuuuuguugaacgaagcaaagccuacagcaacuguuacccuuaugaugugccggauuaugccucccuuaggucacuaguugccucauccggcacacuggaguuuaacaaugaaaacuucaauugggcuggagucacucaaaacggaacaaguucugcuugcauaaggggaucuaauaguaguuucuuuaguagauuaaauugguugacccacuuaaacuucaaauacccagcauugaacgugacuaugccaaacaaugaacaauuugacaaauuguacauuugggggguucaccacccggguacggacaaggaccaaaucuuccuguaugcucaaucaucaggaagaaucacaguaucuaccaaaagaagccaacaagcuguaaucccgaauaucggaucuagacccagaauaaggaauaucccuagcagaauaagcaucuauuggacaauaguaaaaccgggagacauacuuuugauuaacagcacagggaaucuaauugcuccuagggguuacuucaaaauacgaagugggaaaagcucaauaaugagaucagaugcccccauuggcaaaugcaagucugaaugcaucacuccaaauggaagcauucccaaugacaaaccauuccaaaauguaaacaggaucacauauggggccugucccagauauguuaagcaaagcacucugaaauuggcaacaggaaugcgaaauguacaggagaaacaaacuagaggcauauuuggcgcaauagcggguuucauagaaaaugguugggagggaaugaaggaugguugguacgguuucaggcaucaaaauucugagggaagaggacaagcagcagaucucaaaagcacucaagcagcaaucgaucaaaucaaugggaagcugaaucgauugauugggaaaaccaacgagaaauuccaucagauugaaaaagaauucucagaaguagaagggagaauucaggaccuugagaaauauguugaggacacaaaaauagaucucuggucauacaacgcggagcuucuuguugcccuggagaaccaacauacaauugaucuaacugacucagaaaugaacaaacuguuugaaaaaacaaaaaagcaacugagggaaaaugcugaggauaugggcaaugguuguuucaaaauauaccacaaaugugacaaugccugcauaggaucaaucagaaauggaacuuaugaccacgauguauacagggaugaagcauuaaacaaccgguuccagaucaagggaguugagcugaagucaggguacaaagauuggauccuauggauuuccuuugccauaucauguuuuuugcuuuguguugcuuuguugggguucaucaugugggccugccaaaagggcaacauuaggugcaacauuugcauuuga

SEQ ID NO: 44075 - RNA, 1701 nt, Artificial Sequence
  derived and/or modified CDS sequence (wt) from hemagglutinin__InfluenzaA__AHZ13523
augaagacuaucauugcuuugagcuacauuuucugucugguuuucgcccaaaaacuucccggaaaugacaacagcacagcaacgcugugccugggacaucaugcagugccaaacggaacgcuagugaaaacaaucacgaaugaucagauugaagugacuaaugcuacugagcugguucagaguuccucaacagguagaauaugcgacaguccucaccgaauccuugaugggaaaaacugcacacugauagaugcucuauugggagacccucauugugauggcuuccaaaaugagaaaugggaccuuuuuguugaacgcagcaaagcuuucagcaacuguuacccuuaugaugugccggauuaugccucccuuaggucacuaguugccucaucaggcacccuggaguuuaucaacgaaggcuucaauuggacuggagucacucagagugggggaagcuaugcuugcaaaaggggaucuguuaacaguuucuucaguagauugaauugguuguacaaaucagaaagcaaauauccagugcugaacgugacuaugccaaacaauggcaaauuugacaaauuguacauuugggggguucaccacccgagcacggacaaagaacaaaccaaccuauauguucgagcaucagggagagucacagucucuaccaagagaagccagcaaacuguaaucccgaauaucgggucuagacccuggguaaggggucugucuaguagaauaaguaucuauuggacaauaguaaaaccgggagacauacuguuaauuaauagcacugggaaccuaauugcuccucgggguuacuucaaaauacgcacugggaaaagcucaauaaugaggucagaugcaccuauuggcaccugcaguuaugaaugcaucacuccaaauggaagcauucccaaugacaaacccuuucaaaauguaaacaagaucacauauggggcaugucccagguauguuaagcaaaacacucugaaguuggcaacagggaugcggaauguaccagagaaacaaacuagaggcauauucggcgcaauagcagguuucauagaaaaugguugggagggaaugguagacgguugguacgguuucaggcaucaaaauucugagggcacaggacaagcagcagaucuuaaaagcacucaagcagcaaucgaccaaaucaacgggaaacugaauagguuaaucgagaaaacgaacgagaaauuccaucaaaucgaaaaggaauucucagaaguagaagggagaauucaggaccucgagaaauauguugaagacacuaaaauagaccucuggucuuacaacgcugagcuucuuguugcccuggagaaccaacauacaauugaucugacugacucagagaugaacaaauuguuugaaaaaacaaggaagcaacugagggaaaaugcugaggacaugggcaaugguugcuucaaaauauaccacaaaugugacaaugcuugcauagggucaaucagaaauggaacuuauaaccaugauguauacagagacgaagcauuaaacaaccgguuucagaucaaagguguugagcugaagucaggauacaaagacuggauccuauggauuuccuuugccauaucaugcuuuuugcuuuguguuguuuugcugggguucaucaugugggccugccaaaaaggcaacauuaggugcaacauuugcauuuga

SEQ ID NO: 44076 - RNA, 1698 nt, Artificial Sequence; identical to SEQ ID NO: 35628
  derived and/or modified CDS sequence (wt) from hemagglutinin__InfluenzaA__AHZ13582

SEQ ID NO: 44077 - RNA, 1701 nt, Artificial Sequence
  derived and/or modified CDS sequence (wt) from hemagglutinin__InfluenzaA__AHZ35584
augaagacuaucauugcuuugagcuacauucuaugucugauuuucgcucaagaaauuccuggaaaugacaacagcacggcaacgcugugccuugggcaccaugcagugccaaacggaacgauagugaaaacaaucacgaaugaccaaauugaaguuacuaaugcuacugagcugguucagaguuccucaacaggugaaauaugcaacaguccucaucagauccuugauggagaaaacugcacacuaauagaugcucuauugggagacccucagugugaugacuuccaaaacaagaaaugggaccuuuuuguugaacgaagcaaagcccacagcaacuguuacccuuaugaugugccggauuaugccucccuuaggucacuaguugccucauccggcacacuggaguuuaacaaugaaagcuucaauuggacuggagucacucaaaacggaacaagcucugcuugcauaaggagaucuaauaauaguuucuuuaguagauugaauugguugacccacuuaaacuucaaauacccagcauugaacgugacuaugccaaacaaugaacaauuugacaaauuguacauuugggggguucaccacccggguacagacaaggaccaaaucuuccuguaugcucaagcaucaggaagaaucacaguaucuaccaaaagaagccaacaggcuguaauuccgaauaucggaucuagacccagaguaaggaauaucccuagcagaguaagcaucuauuggacaauaguaaaaccgggagacauacuuuugauuaacagcacagggaaucuaauugcuccuagggguuacuucaaaauacgaagugggaaaagcucaauaaugagaucagaugcacccauuggcaaaugcaauucugcaugcaucacuccaaauggaagcauucccaaugacaaaccauuccaaaauguaaacaggaucacauacggggccugucccagauaugucaagcaaaacacucugaaauuggcaacaggaaugagaaauguaccagagaaacaaacuagagguauauuuggcgcaauagcggguuucauagaaaauggcugggagggaaugguggaugguugguacgguuucaggcaucaaaauucugagggaaggggacaggcagcagaucucaaaagcacucaagcagcaaucgaucaaaucaaugggaagcugaauagauugaucgggaaaaccaaugagaaauuccaucagauugaaaaagaauucucagaagucgaagggagaauucaagaccuugagaaauauguugaggacacuaaaauagaucucuggucauacaacgcggagcuucuuguugcccuggagaaccaacacacaauugaucugacugacucagaaaugaacaaacuguuugaaaaaacaaagaagcaacugagggaaaaugcugaggauaugggcaaugguuguuucaaaauauaccacaaaugugauaaugccugcauaggaucaaucagaaauggaacuuaugaccacgauguguacagagaugaagcauuaaacaaccgauuccagaucaagggaguugagcugaagucaggguacaaagauuggauccuauggauuuccuuugccauaucauguuuuuugcuuuguguugcuuuguugggguucaucaugugggccugccaaaaaggcaacauuaggugcaacauuugcauuuga

SEQ ID NO: 44078 - RNA, 1701 nt, Artificial Sequence
  derived and/or modified CDS sequence (wt) from hemagglutinin__InfluenzaA__AHZ35608
augaagacuaucauugcuuugagcuacauucuaugucugauuuucgcucaagaaauuccuggaaaugacaacagcacggcaacgcugugccuugggcaccaugcagugccaaacggaacaauagugaaaacaaucacgaaugaccaaauugaaguuacuaaugcuacugagcugguucagaguuccucaacaggugaaauaugcaacaguccucaucagauccuugauggagaaaacugcacacuaauagaugcucuauugggagacccucagugugaugacuuccaaaacaaggaaugggaccuuuuuguugaacgaagcaaagcccacagcaacuguuacccuuaugaugugccggauuaugccucccuuaggucacuaguugccucauccggcacacuggaguuuaacaaugaaagcuucaauuggacuggagucacucaaaacggaacaagcucugcuugcauaaggagaucuaauaauaguuucuuuaguagauugaauugguuaacccacuuaaacuucaaauacccagcauugaacgugacuaugccaaacaaugaacaauuugacaaauuguacauuugggggguucaccacccggguacggacaaggaccaaaucuuccuguaugcucaagcaucaggaagaaucacaguaucuaccaaaagaagccaacaggcuguaauuccgaauaucggaucuagacccagaguaaggaauauccccagcagaguaagcaucuauuggacaauaguaaaaccgggagacauacuuuugauuaacagcacagggaaucuaauugcuccuagggguuacuucaaaauacgaagugggaaaagcucaauaaugagaucagaugcacccauuggcaaaugcaauucugcaugcaucacuccaaauggaagcauucccaaugacaaaccauuccaaaauguaaacaggaucacauacgggaccugucccagauaugucaagcaaaacacucugaaauuggcaacaggaaugagaaauguaccagagaaacaaacuagagguauauuuggcgcaauagcggguuucauagaaaauggcugggagggaaugguggaugguugguacgguuucaggcaucaaaauucugagggaaggggacaggcagcagaucucaaaagcacucaagcagcaaucgaucaaaucaaugggaagcugaauagauugaucgggaaaaccaaugagaaauuccaucagauugaaaaagaauucucagaagucgaagggagaauucaggaccuugagaaauauguugaggacacuaaaauagaucucuggucauacaacgcggagcuucuuguugcccuggagaaccaacacacaauugaucugacugacucagaaaugaacaaacuguuugaaaaaacaaagaagcaacugagggaaaaugcugaggauaugggcaaugguuguuucaaaauauaccacaaaugugauaaugccugcauaggaucaaucagaaauggaacuuaugaccacgauguguacagagaugaagcauuaaacaaccgauuccagaucaagggaguugagcugaagucaggguacaaagauuggauccuauggauuuccuuugccauaucauguuuuuugcuuuguguugcuuuguugggguucaucaugugggccugccaaaaaggcaacauuaggugcaacauuugcauuuga

SEQ ID NO: 44079 - RNA, 1701 nt, Artificial Sequence
  derived and/or modified CDS sequence (wt) from hemagglutinin__InfluenzaA__AHZ35620
augaagacuaucauugcuuugagcuacauucuaugucugauuuucgcucaagaaauuccuggaaaugacaacagcacggcaacgcugugccuugggcaccaugcagugccaaacggaacgauagugaaaacaaucacgaaugaccaaauugaaguuacuaaugcuacugagcugguucagaguuccucaacaggugaaauaugcaacaguccucaucagauccuugauggagaaaacugcacacuaauagaugcucuauugggagacccucagugugaugacuuccaaaacaagaaaugggaccuuuuuguugaacgaagcaaagcccacagcaacuguuacccuuaugaugugccggauuaugccucccuuaggucacuaguugccucauccggcacacuggaguuuaacaaugaaagcuucaauuggacuggagucacucaaaacggaacaagcucugcuugcauaaggagaucuaauaauaguuucuuuaguagauugaauugguugacccacuuaaacuucaaauacccagcauugaacgugacuaugccaaacaaugaacaauuugacaaauuguacauuugggggguucaccacccggguacggacaaggaccaaaucuuccuguaugcucaagcaucaggaagaaucacaguaucuaccaaaagaagccaacaggcuguaauuccgaauaucggaucuagacccagaguaaggaauaucccuagcagaguaagcaucuauuggacaauaguaaaaccgggagacauacuuuugauuaacagcacagggaaucuaauugcuccuagggguuacuucaaaauacgaagugggaaaagcucaauaaugagaucagaugcacccauuggcaaaugcaauucugcaugcaucacuccaaauggaagcauucccaaugacaaaccauuccaaaauguaaacaggaucacauacggggccugucccagauaugucaagcaaaacacucugaaauuggcaacaggaaugagaaauguaccagagaaacaaacuagagguauauuuggcgcaauagcggguuucauagaaaauggcugggagggaaugguggaugguugguacgguuucaggcaucaaaauucugagggaaggggacaggcagcagaucucaaaagcacucaagcagcaaucgaucaaaucaaugggaagcugaauagauugaucgggaaaaccaaugagaaauuccaucagauugaaaaagaauucucagaagucgaagggagaauucaggaccuugagaaauauguugaggacacuaaaauagaucucuggucauacaacgcggagcuucuuguugcccuggagaaccaacacacaauugaucugacugacucagaaaugaacaaacuguuugaaaaaacaaagaagcaacugagggaaaaugcugaggauaugggcaaugguuguuucaaaauauaccacaaaugugauaaugccugcauaggaucaaucagaaauggaacuuaugaccacgauguguacagagaugaagcauuaaacaaccgauuccagaucaagggaguugagcugaagucaggguacaaagauuggauccuauggauuuccuuugccauaucauguuuuuugcuuuguguugcuuuguugggguucaucaugugggccugccaaaaaggcaacauuaggugcaacauuugcauuuga

SEQ ID NO: 44080 - RNA, 1701 nt, Artificial Sequence; identical to SEQ ID NO: 44077
  derived and/or modified CDS sequence (wt) from hemagglutinin__InfluenzaA__AHZ35632

SEQ ID NO: 44081 - RNA, 1701 nt, Artificial Sequence; identical to SEQ ID NO: 44077
  derived and/or modified CDS sequence (wt) from hemagglutinin__InfluenzaA__AHZ35644

SEQ ID NO: 44082 - RNA, 1701 nt, Artificial Sequence; identical to SEQ ID NO: 44079
  derived and/or modified CDS sequence (wt) from hemagglutinin__InfluenzaA__AHZ35656

SEQ ID NO: 44083 - RNA, 1701 nt, Artificial Sequence; identical to SEQ ID NO: 44077
  derived and/or modified CDS sequence (wt) from hemagglutinin__InfluenzaA__AHZ35668

SEQ ID NO: 44084 - RNA, 1701 nt, Artificial Sequence
  derived and/or modified CDS sequence (wt) from hemagglutinin__InfluenzaA__AHZ35680
augaagacuaucauugcuuugagcuacauucuaugucugauuuucgcucaagaaauuccuggaaaugacaacagcacggcaacgcugugccuugggcaccaugcagugccaaacggaacaauagugaaaacaaucacgaaugaccaaauugaaguuacuaaugcuacugagcugguucagaguuccucaacaggugaaauaugcaacaguccucaucagauccuugauggagaaaacugcacacuaauagaugcucuauugggagacccucagugugaugacuuccaaaacaaggaaugggaccuuuuuguugaacgaagcaaagcccacagcaacuguuacccuuaugaugugccggauuaugccucccuuaggucacuaguugccucauccggcacacuggaguuuaacaaugaaagcuucaauuggacuggagucacucaaaacggaacaagcucugcuugcauaaggagaucuaauaauaguuucuuuaguagauugaauugguugacccacuuaaacuucaaauacccagcauugaacgugacuaugccaaacaaugaacaauuugacaaauuguacauuugggggguucaccacccggguacggacaaggaccaaaucuuccuguaugcucaagcaucaggaagaaucacaguaucuaccaaaagaagccaacaggcuguaauuccgaauaucggaucuagacccagaguaaggaauauccccagcagaguaagcaucuauuggacaauaguaaaaccgggagacauacuuuugauuaacagcacagggaaucuaauugcuccuagggguuacuucaaaauacgaagugggaaaagcucaauaaugagaucagaugcacccauuggcaaaugcaauucugccugcaucacuccaaauggaagcauucccaaugacaaaccauuccaaaauguaaacaggaucacauacgggaccugucccagauaugucaagcaaaacacucugaaauuggcaacaggaaugagaaauguaccagagaaacaaacuagagguauauuuggcgcaauagcggguuucauagaaaauggcugggagggaaugguggaugguugguacgguuucaggcaucaaaauucugagggaaggggacaggcagcagaucucaaaagcacucaagcagcaaucgaucaaaucaaugggaagcugaauagauugaucgggaaaaccaaugagaaauuccaucagauugaaaaagaauucucagaagucgaagggagaauucaggaccuugagaaauauguugaggacacuaaaauagaucucuggucauacaacgcggagcuucuuguugcccuggagaaccaacacacaauugaucugacugacucagaaaugaacaaacuguuugaaaaaacaaagaagcaacugagggaaaaugcugaggauaugggcaaugguuguuucaaaauauaccacaaaugugauaaugccugcauaggaucaaucagaaauggaacuuaugaccacgauguguacagagaugaagcauuaaacaaccgauuccagaucaagggaguugagcugaagucaggguacaaagauuggauccuauggauuuccuuugccauaucauguuuuuugcuuuguguugcuuuguugggguucaucaugugggccugccaaaaaggcaacauuaggugcaacauuugcauuuga

SEQ ID NO: 44085 - RNA, 1701 nt, Artificial Sequence; identical to SEQ ID NO: 44079
  derived and/or modified CDS sequence (wt) from hemagglutinin__InfluenzaA__AHZ35692

SEQ ID NO: 44086 - RNA, 1701 nt, Artificial Sequence; identical to SEQ ID NO: 44077
  derived and/or modified CDS sequence (wt) from hemagglutinin__InfluenzaA__AHZ35716

SEQ ID NO: 44087 - RNA, 1701 nt, Artificial Sequence; identical to SEQ ID NO: 44084
  derived and/or modified CDS sequence (wt) from hemagglutinin__InfluenzaA__AHZ35728

SEQ ID NO: 44088 - RNA, 1701 nt, Artificial Sequence; identical to SEQ ID NO: 44077
  derived and/or modified CDS sequence (wt) from hemagglutinin__InfluenzaA__AHZ35740

SEQ ID NO: 44089 - RNA, 1701 nt, Artificial Sequence; identical to SEQ ID NO: 44079
  derived and/or modified CDS sequence (wt) from hemagglutinin__InfluenzaA__AHZ35752

SEQ ID NO: 44090 - RNA, 1701 nt, Artificial Sequence; identical to SEQ ID NO: 44077
  derived and/or modified CDS sequence (wt) from hemagglutinin__InfluenzaA__AHZ35764

SEQ ID NO: 44091 - RNA, 1701 nt, Artificial Sequence; identical to SEQ ID NO: 44077
  derived and/or modified CDS sequence (wt) from hemagglutinin__InfluenzaA__AHZ35776

SEQ ID NO: 44092 - RNA, 1701 nt, Artificial Sequence
  derived and/or modified CDS sequence (wt) from hemagglutinin__InfluenzaA__AHZ35823
augaaggcaauacuaguaguucugcuauauacauuugcaaucgcaaaugcagacacauuauguauagguuaucaugcgaacaauucaacagacacuguagacacaguacuagaaaagaauguaacaguaacacacucuguuaaccuucuagaagacaagcauaacgggaaacuaugcaaacuaagagggguagccccauugcauuuggguaaauguaacauugcuggcuggauccugggaaauccagagugugaaucacucuccacagcaagcucaugguccuacauuguggaaacaucuaguucagacaauggaacguguuacccaggagauuucaucaauuaugaggagcuaagagagcaauugagcucagugucaucauuugaaagguuugagauguuccccaagacaaguucauggcccaaucaugacucgaacaaagguguaacggcagcauguccucaugcuggagcaaaaagcuucuacaaaaauuuaauauggcuaguuaaaaaaggaaauucauacccaaagcucagcaaauccuacauuaaugauaaagggaaagaaguccucgugcuguggggcauucaccauccaucuacuacugcugaccaacaaagucucuaucagaaugcagaugcauauguuuuuguggggacaucaagauacagcaagaaguucaagccggaaauagcaauaagacccaaagugagggaucaagaagggagaaugaacuacuacuggacacuaguagagccgggagacaaaauaacauucgaagcaacuggaaaucuagugguaccgagauaugcauucgcaauggaaagaaaugcuggaucugguauuaucauuucagauacaccaguccacgauugcaauacaacuugucagacacccaagggugcuauaaacaccagccucccauuucagaauauacauccgaucacaauuggaaaauguccaaaauauguaaaaagcacaaaauugagacuggccacaggauugaggaaugucccgucuauucaaucuagaggccuauuuggggccauugccggcuucauugaagggggguggacagggaugguagauggaugguacgguuaucaccaucaaaaugagcaggggucaggauaugcagccgaccugaagagcacacagaaugccauugacaagauuacuaacaaaguaaauucuguuauugaaaagaugaauacacaguucacagcaguagguaaagaauucaaccaccuggaaaaaagaauagagaauuuaaauaaaaaaguugaugacgguuuccuggacauuuggacuuacaaugccgaacuguugguucuauuggaaaaugaaagaacuuuggacuaccacgauucaaaugugaagaacuuguaugaaaagguaaggaaccaguuaaaaaacaaugccaaggaaauuggaaacggcugcuuugaauuuuaccacaaaugcgauaacacgugcauggaaagugucaaaaaugggacuuaugacuacccaaaauacucagaggaagcaaaauuaaacagagaagaaauagaugggguaaagcuggaaucaacaaggauuuaccagauuuuggcgaucuauucaacugucgccaguucauugguacugguagucucccugggggcaaucaguuucuggaugugcucuaaugggucucuacaguguagaauauguauuuaa

SEQ ID NO: 44093 - RNA, 1701 nt, Artificial Sequence
  derived and/or modified CDS sequence (wt) from hemagglutinin__InfluenzaA__AHZ35834
augaaggcaauacuaguaguucugcuauauacauuugcaaucgcaaaugcagacacauuauguauagguuaucaugcgaacaauucaacagacacuguagacacaguacuagaaaagaauguaacaguaacacacucuguuaaccuucuagaagacaagcauaacgggaaacuaugcaaacuaagagggguagccccauugcauuuggguaaauguaacauugcuggcuggauccugggaaauccagagugugaaucacucuccacagcaagcucaugguccuacauuguggaaacaucuaguucagacaauggaacguguuacccaggagauuucaucaauuaugaggagcuaagagagcaauugagcucagugucaucauuugaaagguuugagauguuccccaagacaaguucauggcccaaucaugacucgaacaaagguguaacggcagcauguccucaugcuggagcaaaaagcuucuacaaaaauuuaauauggcuaguuaaaaaaggaaauucauacccaaagcucagcaaauccuacauuaaugauaaagggaaagaaguccucgugcuguggggcauucaccauccaucuacuacugcugaccaacaaagucucuaucagaaugcagaugcauauguuuuuguggggacaucaagauacagcaagaaguucaagccggaaauagcaauaagacccaaagugagggaucaagaagggagaaugaacuacuacuggacacuaguagagccgggagacaaaauaacauucgaagcaacuggaaaucuagugguaccgagauaugcauucgcaauggaaagaaaugcuggaucugguauuaucauuucagauacaccaguccacgauugcaauacaacuugucagacacccaagggugcuauaaacaccagccucccauuucagaauauacauccgaucacaauuggaaaauguccaaaauauguaaaaagcacaaaauugagacuggccacaggauugaggaaugucccgucuauucaaucuagaggccuauuuggggccauugccggcuucauugaagggggguggacagggaugguagauggaugguacgguuaucaccaucaaaaugagcaggggucaggauaugcagccgaccugaagagcacacagaaugccauugacaagauuacuaacaaaguaaauucuguuauugaaaagaugaauacacaguucacagcaguagguaaagaauucaaccaccuggaaaaaagaauagagaauuuaaauaaaaaaguugaugacgguuuccuggacauuuggacuuacaaugccgaacuguugguucuauuggaaaaugaaagaacuuuggacuaccacgauucaaaugugaagaacuuguaugaaaagguaagaaaccaguuaaaaaacaaugccaaggaaauuggaaacggcugcuuugaauuuuaccacaaaugcgauaacacgugcauggaaagugucaaaaaugggacuuaugacuacccaaaauacucagaggaagcaaaauuaaacagagaagaaauagaugggguaaagcuggaaucaacaaggauuuaccagauuuuggcgaucuauucaacugucgccaguucauugguacugguagucucccugggggcaaucaguuucuggaugugcucuaaugggucucuacaguguagaauauguauuuaa

SEQ ID NO: 44094 - RNA, 1701 nt, Artificial Sequence; identical to SEQ ID NO: 44093
  derived and/or modified CDS sequence (wt) from hemagglutinin__InfluenzaA__AHZ35845

SEQ ID NO: 44095 - RNA, 1701 nt, Artificial Sequence; identical to SEQ ID NO: 44093
  derived and/or modified CDS sequence (wt) from hemagglutinin__InfluenzaA__AHZ35856

SEQ ID NO: 44096 - RNA, 1701 nt, Artificial Sequence
  derived and/or modified CDS sequence (wt) from hemagglutinin__InfluenzaA__AHZ35867
augaagacuaacauugcuuugagcuacauucuaugucugguuuccgcucaaaaacuuccuggaaaugacaacagcacggcaacgcugugccuugggcaccaugcagugccaaacggaacgauagugaaaacaaucacgaaugaccaaauugaaguuacuaaugcuaccgagcugguucagaguuccucaacaggugaaauaugcaacaguccucaucagauccuugauggagaaaacugcacacuaauagaugcucuauugggagacccucagugugauggcuuccaaaacaagaaaugggaccuuuuuguugaacgaagcaaagcccacagcaacuguuacccuuaugaugugccggauuaugccucccuuaggucacuaguugccucauccggcacacuggaguuuaacaaugaaagcuucaauuggacuggagucacucaaaacggaacaagcucugcuugcauaaggagaucuaauaauaguuucuuuaguagauugaauugguugacccauuuaaacuucaaauacccagcauugaacgugacuaugccaaacaaugaacaauuugacaaauuguacauuugggggguucaccacccggguacggacaaggaccaaaucuuccuguaugcucaagcagcaggaagaaucacaguaucuaccaaaagaagccaacaagcuguaauuccgaauaucggaucuagacccagaguaaggaauaucccuagcagaguaagcaucuauuggacaauaguaaaaccgggagacauacuuuugauuaacagcacagggaaucuaauugcuccuagggguuacuucaaaauacgaagugggaaaagcucaauaaugagaucagaugcacccauuggcaaauguaauucugcaugcaucacuccaaauggaagcauucccaaugacaaaccauuccaaaauguaaacaggaucacauacggggccugucccagauauguuaagcaaaacacucugaaauuggcaacaggaaugagaaauguaccagagaaacaaacuagaggcauauuuggcgcaauagcugguuucauagaaaaugguugggagggaaugguggaugguugguacgguuucaggcaucaaaauucugagggaaggggacaagcagcagaucucaaaagcacucaagcagcaaucgaucaaaucaaugggaagcugaauagauugaucgggaaaaccaacgagaaauuccaucagauugaaaaagaauucucagaagucgaagggagaauucaggaccuugagaaauauguugaggacacuaaaauagaucucuggucauacaacgcggagcuucuuguuguccuggagaaccaacacacaauugaucuaacugacucagaaaugaacaaacuguuugaaaaaacaaagaagcaacugagggaaaaugcugaggauaugggcaaugguuguuucaaaauauaccacaaaugugacaaugccugcauaggaucaaucagaaauggaacuuaugaccacgauguguacagagaugaagcauuaaacaaccgauuccagaucaagggaguugagcugaagucaggguacaaagauuggauccuauggauuuccuuugccauaucauguuuuuugcuuuguguugcuuuguugggguucaucaugugggccugccaaaaaggcaacauuaggugcaacauuugcauuuga

SEQ ID NO: 44097 - RNA, 1701 nt, Artificial Sequence
  derived and/or modified CDS sequence (wt) from hemagglutinin__InfluenzaA__AHZ35879
augaagacuaacauugcuuugagcuacauucuaugucugguuuccgcucaaaaacuuccuggaaaugacaacagcacggcaacgcugugccuugggcaccaugcagugccaaacggaacgauagugaaaacaaucacgaaugaccaaauugaaguuacuaaugcuaccgagcugguucagaguuccucaacaggugaaauaugcaacaguccucaucagauccuugauggagaaaacugcacacuaauagaugcucuauugggagacccucagugugauggcuuccaaaacaagaaaugggaccuuuuuguugaacgaagcaaagcccacagcaacuguuacccuuaugaugugccggauuaugccucccuuaggucacuaguugccucauccggcacacuggaguuuaacaaugaaagcuucaauuggacuggagucacucaaaacggaacaagcucugcuugcauaaggagaucuaauaauaguuucuuuaguagauugaauugguugacccauuuaaacuucaaauacccagcauugaacgugacuaugccaaacaaugaacaauuugacaaauuguacauuugggggguucaccacccggguacggacaaggaccaaaucuuccuguaugcucaagcagcaggaagaaucacaguaucuaccaaaagaagccaacaagcuguaauuccgaauaucggaucuagacccagaguaaggaauaucccuagcagaguaagcaucuauuggacaauaguaaaaccgggagacauacuuuugauuaacagcacagggaaucuaauugcuccuagggguuacuucaaaauacgaagugggaaaagcucaauaaugagaucagaugcacccauuggcaaauguaauucugcaugcaucacuccaaauggaagcauucccaaugacaaaccauuccaaaauguaaacaggaucacauacggggccugucccagauauguuaagcaaaacacucugaaauuggcaacaggaaugagaaauguaccagagaaacaaacuagaggcauauuuggcgcaauagcugguuucauagaaaaugguugggagggaaugguggaugguugguacgguuucaggcaucaaaauucugagggaaggggacaagcagcagaucucaaaagcacucaagcagcaaucgaucaaaucaaugggaagcugaauagauugaucgggaaaaccaacgagaaauuccaucagauugaaaaagaauucucagaagucgaagggagaauucaggaccuugagaaauauguugaggacacuaaaauagaucucuggucauacaacgcggagcuucuuguugcccuggagaaccaacacacaauugaucuaacugacucagaaaugaacaaacuguuugaaaaaacaaagaagcaacugagggaaaaugcugaggauaugggcaaugguuguuucaaaauauaccacaaaugugacaaugccugcauaggaucaaucagaaauggaacuuaugaccacgauguguacagagaugaagcauuaaacaaccgauuccagaucaagggaguugagcugaagucaggguacaaagauuggauccuauggauuuccuuugccauaucauguuuuuugcuuuguguugcuuuguugggguucaucaugugggccugccaaaaaggcaacauuaggugcaacauuugcauuuga

SEQ ID NO: 44098 - RNA, 1701 nt, Artificial Sequence
  derived and/or modified CDS sequence (wt) from hemagglutinin__InfluenzaA__AHZ35891
augaaggcaauacuaguaguucugcuauauacauuugcaaucgcaaaugcagacacauuauguauagguuaucaugcgaacaauucaacagacacuguagacacaguacuagaaaagaauguaacaguaacacacucuguuaaccuucuagaagacaagcauaacgggaaacuaugcaaacuaagagggguagccccauugcauuuggguaaauguaacauugcuggcuggauccugggaaauccagagugugaaucacucuccacagcaagcucaugguccuacauuguggaaacaucuaguucagacaauggaacguguuacccaggagauuucaucaauuaugaggagcuaagagagcaauugagcucagugucaucauuugaaagguuugagauguuccccaagacaaguucauggcccaaucaugacucgaacaaagguguaacggcagcauguccucaugcuggggcaaaaagcuucuacaaaaauuuaauauggcuaguuaaaaaaggaaauucauacccaaagcucagcaaauccuacauuaaugauaaagggaaagaaguccucgugcuguggggcauucaccauccaucuacuacugcugaccaacaaagucucuaucagaaugcagaugcauauguuuuuguggggacaucaagauacagcaagaaguucaagccggaaauagcaauaagacccaaagugagggaucaagaagggagaaugaacuacuacuggacacuaguagagccgggagacaaaauaacauucgaagcaacuggaaaucuagugguaccgagauaugcauucgcaauggaaagaaaugcuggaucugguauuaucauuucagauacaccaguccacgauugcaauacaacuugucagacacccaagggugcuauaaacaccagccucccauuucagaauauacauccgaucacaauuggaaaauguccaaaauauguaaaaagcacaaaauugagacuggccacaggauugaggaaugucccgucuauucaaucuagaggccuauuuggggccauugccggcuucauugaagggggguggacagggaugguagauggaugguacgguuaucaccaucaaaaugagcaggggucaggauaugcagccgaccugaagagcacacagaaugccauugacaagauuacuaacaaaguaaauucuguuauugaaaagaugaauacacaguucacagcaguagguaaagaauucaaccaccuggaaaaaagaauagagaauuuaaauaaaaaaguugaugacgguuuccuggacauuuggacuuacaaugccgaacuguugguucuauuggaaaaugaaagaacuuuggacuaccacgauucaaaugugaagaacuuguaugaaaagguaagaaaccaguuaaaaaacaaugccaaggaaauuggaaacggcugcuuugaauuuuaccacaaaugcgauaacacgugcauggaaagugucaaaaaugggacuuaugacuacccaaaauacucagaggaagcaaaauuaaacagagaagaaauagaugggguaaagcuggaaucaacaaggauuuaccagauuuuggcgaucuauucaacugucgccaguucauugguacugguagucucccugggggcaaucaguuucuggaugugcucuaaugggucucuacaguguagaauauguauuuaa

SEQ ID NO: 44099 - RNA, 1701 nt, Artificial Sequence; identical to SEQ ID NO: 44093
  derived and/or modified CDS sequence (wt) from hemagglutinin__InfluenzaA__AHZ35902

SEQ ID NO: 44100 - RNA, 1710 nt, Artificial Sequence
  derived and/or modified CDS sequence (wt) from hemagglutinin__InfluenzaA__AHZ35913
augaaggcaauacuaguaguucugcuauauacauuugcaaucgcaaaugcagacacauuauguauagguuaucaugcgaacaauucaacagacacuguagacacaguacuagaaaagaauguaacaguaacacacucuguuaaccuucuagaagacaagcauaacgggaaacuaugcaaacuaagagggguagccccauugcauuuggguaaauguaacauugcuggcuggauccugggaaauccagagugugaaucacucuccacagcaagcucaugguccuacauuguggaaacaucuaguucagacaauggaacguguuacccaggagauuucaucaauuaugaggagcuaagagagcaauugagcucagugucaucauuugaaagguuugagauguuccccaagacaaguucauggcccaaucaugacucgaacaaagguguaacggcagcauguccucaugcuggagcaaaaagcuucuacaaaaauuuaauauggcuaguuaaaaaaggaaauucauacccaaagcucagcaaauccuacauuaaugauaaagggaaagaaguccucgugcuguggggcauucaccauccaucuacuacugcugaccaacaaagucucuaucagaaugcagaugcauauguuuuuguggggacaucaagauacagcaagaaguucaagccggaaauagcaauaagacccaaagugagggaucaagaagggagaaugaacuacuacuggacacuaguagagccgggagacaaaauaacauucgaagcaacuggaaaucuagugguaccgagauaugcauucgcaauggaaagaaaugcuggaucugguauuaucauuucagauacaccaguccacgauugcaauacaacuugucagacacccaagggugcuauaaacaccagccucaccagccucccauuucagaauauacauccgaucacaauuggaaaauguccaaaauauguaaaaagcacaaaauugagacuggccacaggauugaggaaugucccgucuauucaaucuagaggccuauuuggggccauugccggcuucauugaagggggguggacagggaugguagauggaugguacgguuaucaccaucaaaaugagcaggggucaggauaugcagccgaccugaagagcacacagaaugccauugacaagauuacuaacaaaguaaauucuguuauugaaaagaugaauacacaguucacagcaguagguaaagaauucaaccaccuggaaaaaagaauagagaauuuaaauaaaaaaguugaugacgguuuccuggacauuuggacuuacaaugccgaacuguugguucuauuggaaaaugaaagaacuuuggacuaccacgauucaaaugugaagaacuuguaugaaaggguaagaaaccaguuaaaaaacaaugccaaggaaauuggaaacggcugcuuugaauuuuaccacaaaugcgauaacacgugcauggaaagugucaaaaaugggacuuaugacuacccaaaauacucagaggaagcaaaauuaaacagagaagaaauagaugggguaaagcuggaaucaacaaggauuuaccagauuuuggcgaucuauucaacugucgccaguucauugguacugguagucucccugggggcaaucaguuucuggaugugcucuaaugggucucuacaguguagaauauguauuuaa

SEQ ID NO: 44101 - RNA, 1701 nt, Artificial Sequence
  derived and/or modified CDS sequence (wt) from hemagglutinin__InfluenzaA__AHZ35924
augaaggcaauacuaguaguucugcuauauacauuugcaaccgcaaaugcagacacauuauguauagguuaucaugcgaacaauucaacagacacuguagacacaguacuagaaaagaauguaacaguaacacacucuguuaaccuucuagaagacaagcauaacgggaaacuaugcaaacugagagggguagccccauugcauuuggguaaauguaacauugcuggcuggauccugggaaauccagagugugaaucacucuccacagcaagcucaugguccuacaucguggaaacaucuaguucagacaauggaacgugcuacccaggagauuucaucaauuaugaggagcuaagagagcaauugagcucagugucaucauuugaaagguuugagauauuccccaagacaaguucauggcccaaucaugacucgaacaaagguguaacggcagcauguccucaagcuggagcaaaaagcuucuacaaaaauuuaauauggcuaguuaaaaaaggaaauucauacccaaagcucagcaaauccuacauuaacgauaaagggaaagaaguccucgugcuauggggcauucaccauccaucuacuagugcugaccaacaaagucucuaucagaaugcagaugcauauguuuuuguggggacaucaaaauacagcaagaaguucaagccggaaauagcaguaagacccaaagugagggaucaagaagggagaaugaacuauuauuggacacuaguagagccgggagacaaaauaacauucgaagcaacuggaaaucuauugguaccgagauaugcauucgcaauggaaagaaaugcuggaucugguauuaucauuucagauacaccaguccacgauugcaauacaacuugucagacacccaagggugcuauaaacaccagccucccauuucagaauauacauccgaucacaauuggaaaaugucccaaauauguaaaaagcacaaaauugagacuggccacaggauugaggaaugucccguccacucaaucuagaggccuauuuggggccauugccgguuucauugaagggggguggacagggaugguagauggaugguacgguuaucaccaucaaaaugcgcaggggucaggauaugcagccgaccugaagagcacacagaaugccauugacaagauuacuaacaaaguaaauucuguuauugaaaagaugaauacacaguucacagcaguagguaaagaguucaaccaccuggaaaaaagaauagagaauuuaaauaaaaaaguugaugaugguuuccuggacauuuggacuuacaaugccgaacuguugguucuauuggaaaaugaaagaacuuuggacuaccacgauucaaaugugaaaaacuuauaugaaaagguaagaagccaguuaaaaaacaaugccaaggaaauuggaaacggcugcuuugaauuuuaccacaaaugcgauaacacgugcauggaaagugucaaaaaugggacuuaugacuauccaaaauacucagaggaagcaaaauuaaacagagaagaaauagaugggguaaagcuggaaucaacaaggauuuaccagauuuuggcgaucuauucaacugucgccaguucauugguacugguagucucccugggggcaaucaguuucuggaugugcucuaaugggucucuacaguguagaauauguauuuaa

SEQ ID NO: 44102 - RNA, 1701 nt, Artificial Sequence
  derived and/or modified CDS sequence (wt) from hemagglutinin__InfluenzaA__AHZ35935
augaaggcaauacuaguaguucugcuauauacauuugcaaucgcaaaugcagacacauuauguauagguuaucaugcgaacaauucaacagacacuguagacacaguacuagaaaagaauguaacaguaacacacucuguuaaccuucuagaagacaagcauaacgggaaacuaugcaaacuaagagggguagccccauugcauuuggguaaauguaacauugcuggcuggauccugggaaauccagaaugugaaucacucuccacagcaagcucaugguccuacauuguggaaacaucuaguucagacaauggaacguguuacccaggagauuucaucaauuaugaggagcuaagagagcaauugagcucagugucaucauuugaaagguuugagauguuccccaagacaaguucauggcccaaucaugacucgaacaaagguguaacggcagcauguccucaugcuggagcaaaaagcuucuacaaaaauuuaauauggcuaguuaaaaaaggaaauucauacccaaagcucagcaaauccuacauuaaugauaaagggaaagaaguccucgugcuguggggcauucaccauccaucuacuacugcugaccaacaaagucucuaucagaaugcagaugcauauguuuuuguggggacaucaagauacagcaagaaguucaagccagaaauagcaauaagacccaaagugagggaucaagaagggagaaugaacuauuacuggacacuaguagagccgggagacaaaauaacauucgaagcaacuggaaaucuagugguaccgagauaugcauucgcaauggaaagaaaugcuggaucugguauuaucauuucagauacaccuguccacgauugcaauacaacuugucagacacccaagggugcuauaaacaccagccucccauuucagaauauacauccgaucacaauuggaaaauguccaaaauauguaaaaagcacaaaauugagacuggccacaggauugaggaauaucccgucuauucaaucuagaggccuauuuggggccauugccggcuucauugaagggggguggacagggaugguagauggaugguacgguuaucaccaucaaaaugagcaggggucaggauaugcagccgaccugaagagcacacagaaugccauugacaagauuacuaacaaaguaaauucuguuauugaaaagaugaauacacaguucacagcaguagguaaagaguucaaccaccuggaaaaaagaauagagaauuuaaauaaaaaaguugaugacgguuuccuggacauuuggacuuacaaugccgaauuguugguucuauuggaaaaugaaagaacuuuggacuaccacgauucaaaugugaagaacuuguaugaaaagguaagaaaccaguuaaaaaacaaugccaaggaaauuggaaacggcugcuuugaauuuuaccacaaaugcgauaacacgugcauggaaagugucaaaaaugggacuuaugacuacccaaaauacucagaggaagcaaaauuaaacagagaagaaauagaugggguaaagcuggaaucaacaaggauuuaccagauuuuggcgaucuauucaacugucgccaguucauugguacugguagucucccugggggcaaucaguuucuggaugugcucuaaugggucucuacaguguagaauauguauuuaa

SEQ ID NO: 44103 - RNA, 1701 nt, Artificial Sequence
  derived and/or modified CDS sequence (wt) from hemagglutinin__InfluenzaA__AHZ35946
augaagacuaacauugcuuugagcuacauucuaugucugguuuccgcucaaaaacuuccuggaaaugacaacagcacggcaacgcugugccuugggcaccaugcagugccaaacggaacgauagugaaaacaaucacgaaugaccaaauugaaguuacuaaugcuaccgagcugguucagaguuccucaacaggugaaauaugcaacaguccucaucagauccuugauggagaaaacugcacacuaauagaugcucuauugggagacccucagugugauggcuuccaaaacaagaaaugggaccuuuuuguugaacgaagcaaagcccacagcaacuguuacccuuaugaugugccggauuaugccucccuuaggucacuaguugccucauccggcacacuggaguuuaacaaugaaagcuucaauuggacuggagucacucaaaacggaacaagcucugcuugcauaaggagaucuaauaauaguuucuuuaguagauugaauugguugacccauuuaaacuucaaauacccagcauugaacgugacuaugccaaacaaugaacaauuugacaaauuguacauuugggggguucaccacccggguacggacaaggaccaaaucuuccuguaugcucaagcagcaggaagaaucacaguaucuaccaaaagaagccaacaagcuguaauuccgaauaucggaucuagacccagaguaaggaauaucccuagcagaguaagcaucuauuggacaauaguaaaaccgggagacauacuuuugauuaacagcacagggaaucuaauugcuccuagggguuacuucaaaauacgaagugggaaaagcucaauaaugagaucagaugcacccauuggcaaauguaauucugcaugcaucacuccaaauggaagcauucccaaugacaaaccauuccaaaauguaaacaggaucacauacggggccugucccagauauguuaagcaaaacacucugaaauuggcaacaggaaugagaaauguaccagagaaacaaacuagaggcauauuuggcgcaauagcugguuucauagaaaaugguugggagggaaugguggaugguugguacgguuucaggcaucaaaauucugagggaaggggacaagcagcagaucucaaaagcacucaagcagcaaucgaucaaaucaaugggaagcugaauagauugaucgggaaaaccaacgagaaauuccaucagauugaaaaagaauucucagaagucgaagggagaauucaggaccuugagaaauauguugaggacacuaaaauagaucucuggucauacaacgcggagcuucuuguugcccuggagaaccaacacacaauugaucuaacugacucagaaaugaacaaacuguuugaaaaaacaaagaagcaacugagggaaaaugcugaggauaugggcaaugguuguuucaaaauauaccacaaaugugacaaugccugcauaggaucaaucagaaauggaacuuaugaccacgauguguacagagaugaagcauuaaacaacagauuccagaucaagggaguugagcugaagucaggguacaaagauuggauccuauggauuuccuuugccauaucauguuuuuugcuuuguguugcuuuguugggguucaucaugugggccugccaaaaaggcaacauuaggugcaacauuugcauuuga

SEQ ID NO: 44104 - RNA, 1701 nt, Artificial Sequence; identical to SEQ ID NO: 44093
  derived and/or modified CDS sequence (wt) from hemagglutinin__InfluenzaA__AHZ35958

SEQ ID NO: 44105 - RNA, 1701 nt, Artificial Sequence; identical to SEQ ID NO: 44093
  derived and/or modified CDS sequence (wt) from hemagglutinin__InfluenzaA__AHZ35980

SEQ ID NO: 44106 - RNA, 1701 nt, Artificial Sequence; identical to SEQ ID NO: 44093
  derived and/or modified CDS sequence (wt) from hemagglutinin__InfluenzaA__AHZ35991

SEQ ID NO: 44107 - RNA, 1701 nt, Artificial Sequence; identical to SEQ ID NO: 44093
  derived and/or modified CDS sequence (wt) from hemagglutinin__InfluenzaA__AHZ36002

SEQ ID NO: 44108 - RNA, 1701 nt, Artificial Sequence
  derived and/or modified CDS sequence (wt) from hemagglutinin__InfluenzaA__AHZ36013
augaaggcaauacuaguaguucugcuauauacauuugcaaucgcaaaugcagacacauuauguauagguuaucaugcgaacaauucaacagacacuguagacacaguacuagaaaagaauguaacaguaacacacucuguuaaccuucuagaagacaagcauaacaggaaacuaugcaaacuaagagggguagccccauugcauuuggguaaauguaacauugcuggcuggauccugggaaauccagagugugaaucacucuccacagcaagcucaugguccuacauuguggaaacaucuaguucagacaauggaacguguuacccaggagauuucaucaauuaugaggagcuaagagagcaauugagcucagugucaucauuugaaagguuugagauguuccccaagacaaguucauggcccaaucaugacucgaacaaagguguaacggcagcauguccucaugcuggagcaaaaagcuucuacaaaaauuuaauauggcuaguuaaaaaaggaaauucauacccaaagcucagcaaauccuacauuaaugauaaagggaaagaaguccucgugcuguggggcauucaccauccaucuacuacugcugaccaacaaagucucuaucagaaugcagaugcauauguuuuuguggggacaucaagauacagcaagaaguucaagccggaaauagcaauaagacccaaagugagggaucaagaagggagaaugaacuacuacuggacacuaguagagccgggagacaaaauaacauucgaagcaacuggaaaucuagugguaccgagauaugcauucgcaauggaaagaaaugcuggaucugguauuaucauuucagauacaccaguccacgauugcaauacaacuugucagacacccaagggugcuauaaacaccagccucccauuucagaauauacauccgaucacaauuggaaaauguccaaaauauguaaaaagcacaaaauugagacuggccacaggauugaggaaugucccgucuauucaaucuagaggccuauuuggggccauugccggcuucauugaagggggguggacagggaugguagauggaugguacgguuaucaccaucaaaaugagcaggggucaggauaugcagccgaccugaagagcacacagaaugccauugacaagauuacuaacaaaguaaauucuguuauugaaaagaugaauacacaguucacagcaguagguaaagaauucaaccaccuggaaaaaagaauagagaauuuaaauaaaaaaguugaugacgguuuccuggacauuuggacuuacaaugccgaacuguugguucuauuggaaaaugaaagaacuuuggacuaccacgauucaaaugugaagaacuuguaugaaaagguaagaaaccaguuaaaaaacaaugccaaggaaauuggaaacggcugcuuugaauuuuaccacaaaugcgauaacacgugcauggaaagugucaaaaaugggacuuaugacuacccaaaauacucagaggaagcaaaauuaaacagagaagaaauagaugggguaaagcuggaaucaacaaggauuuaccagauuuuggcgaucuauucaacugucgccaguucauugguacugguagucucccugggggcaaucaguuucuggaugugcucuaaugggucucuacaguguagaauauguauuuaa

SEQ ID NO: 44109 - RNA, 1701 nt, Artificial Sequence
  derived and/or modified CDS sequence (wt) from hemagglutinin__InfluenzaA__AHZ36024
augaaggcaauacuaguaguucugcuauauacauuugcaaccgcaaaugcagacacauuauguauaggguaucaugcgaacaauucaacagacacuguagacacaguacuagaaaagaauguaacaguaacacacucuguuaaccuucuagaagacaagcauaacgggaaacuaugcaaacuaagagggguagccccauugcauuuggguaaauguaacauugcuggcuggauccugggaaauccagagugugaaucacucuccacagcaagcucaugguccuacauuguggaaacaucuaguucagacaauggaacguguuacccaggagauuucaucaauuaugaggagcuaagagagcaauugagcucagugucaucauuugaaagguuugagauauuccccaagacaaguucauggcccaaucaugacucgaacaaagguguaacggcagcauguccucaugcuggagcaaaaagcuucuacaaaaauuuaauauggcuaguuaaaaaagggaauucauacccaaagcucagcaaauccuacauuaaugauaaagggaaagaaguccucgugcuguggggcauucaccauccaucuacuacugcugaccaacaaagucucuaucagaaugcagaugcauauguuuuuguggggacaucaagauacagcaagaaguucaagccggaaauagcaauaagacccaaagugagggaucaagaagggagaaugaacuauuacuggacacuaguagagccgggagacaaaauaacauucgaagcaacuggaaaucuagugguaccgagguaugcauucgcaauggaaagaaaugcuggaucugguauuaucauuucagauacaccaguccacgauugcaauacaacuugucagacacccaagggugcuauaaacaccagccucccauuucagaauauacauccgaucacaauuggaaaauguccaaaauauguaaaaagcacaaaauugagacuggccacaggauugagaaaugucccgucuauucaaucuagaggccuauuuggggccauugccgguuuuauugaagggggguggacagggaugguagauggaugguacgguuaucaccaucaaaaugagcaggggucaggauaugcagccgaccugaagagcacacagaaugccauugacaagauuacuaacaaaguaaauucuguuauugaaaagaugaauacacaauucacagcaguagguaaagaguucaaccaccuggaaaaaagaauagagaauuuaaauaaaaaaguugaugaugguuuccuggacauuuggacuuacaaugccgaacuguugguucuauuggaaaaugaaagaacuuuggacuaccaugauucaaaugugaagaacuuguaugaaaagguaagaaaccaguuaaaaaacaaugccaaggaaauuggaaacggcugcuuugaauuuuaccacaaaugcgauaacacgugcauggaaagugucaaaaaugggacuuaugacuacccaaaauacucagaggaagcaaaauuaaacagagaagaaauagaugggguaaagcuggaaucaacaaggacuuaccagauuuuggcgaucuauucaacugucgccaguucauugguacugguagucucccugggggcaaucaguuucuggaugugcucuaaugggucucuacaguguagaauauguauuuaa

SEQ ID NO: 44110 - RNA, 1701 nt, Artificial Sequence
  derived and/or modified CDS sequence (wt) from hemagglutinin__InfluenzaA__AHZ36035
augaagacuaucauugcuuugagcuacauucuaugucugguuuucgcucaaaaacucccuggaaaugacaacagcacggcaacgcugugccuugggcaccaugcagugccaaacggaacgauagugaaaacaaucacaaaugaccaaauugaaguuacuaaugcuacugagcugauucagaguuccucaacaggugaaauaugcaacaguccucaucagauccuugauggagaaaacugcacacuaauagaugcucuauugggagacccucagugugauggcuuccaaaacaagaaaugggaccuuuuuguugaacgaagcaaagcccacagcaacuguuacccuuaugaugugccggauuaugccucccuuaggucacuaguugccucaucuggcacacuggaguuuaacaaugaaagcuucaauuggacuggagucacucaaaacggaacaagcucugcuugcauaaggagaucuaauaauaguuucuuuaguagauugaauugguugacccauuuaaacuucaaauacccagcauugaacgugacuaugccaaacaaugaacaauuugacaaauuguacauuugggggguucaccacccggguacggacaaggaccaaaucuuccuguaugcucaagcagcaggaagaaucacaguaucuaccaaaagaagccaacaagcuguaauuccgaauaucggaucuagacccagaguaaggaauaucccuagcagaguaagcaucuauuggacaauaguaaaaccgggagacauacuuuugauuaacagcacagggaaucuaauugcuccuagggguuacuucaaaauacgaagugggaaaagcucaauaaugagaucagaugcacccauuggcaaauguaauucugcaugcaucacuccaaauggaagcauucccaaugacaaaccauuccaaaauguaaacaggaucacauacggggccugucccagauauguuaagcaaaacacucugaaauuggcaacaggaaugagaaauguaccagagaaacaaacuagaggcauauuuggcgcaauagcugguuucauagaaaaugguugggagggaaugguggaugguugguacgguuucaggcaucaaaauucugagggaaggggacaagcagcagaucucaaaagcacucaagcagcaaucgaucaaaucaaugggaagcugaauagauugaucgggaaaaccaacgagaaauuccaucagauugaaaaagaauucucagaagucgaagggagaauucaggaccuugagaaauauguugaggacacuaaaauagaucucuggucauacaacgcggagcuucuuguugcccuggagaaccaacacacaauugaucuaacugacucagaaaugaacaaacuguuugaaaaaacaaagaagcaacugagggaaaaugcugaggauaugggcaaugguuguuucaaaauauaccacaaaugugacaaugccugcauaggaucaaucagaaauggaacuuaugaccacgauguguacagagaugaagcauuaaacaaccgauuccagaucaagggaguugagcugaagucaggguacaaagauuggauccuauggauuuccuuugccauaucauguuuuuugcuuuguguugcuuuguugggguucaucaugugggccugccaaaaaggcaacauuaggugcaacauuugcauuuga

SEQ ID NO: 44111 - RNA, 1701 nt, Artificial Sequence
  derived and/or modified CDS sequence (wt) from hemagglutinin__InfluenzaA__AHZ36047
augaagacuaucauugcuuugagcuacauucuaugucugguuuucgcucaaaaacucccuggaaaugacaacagcacggcaacgcugugccuugggcaccaugcagugccaaacggaacgauagugaaaacaaucacaaaugaccaaauugaaguuacuaaugcuacugagcugguucagaguuccucaacaggugaaauaugcaacaguccucaucagauccuugauggagaaaacugcacacuaauagaugcucuauugggagacccucagugugauggcuuccaaaacaagaaaugggaccuuuuuguugaacgaagcaaagcccacagcaacuguuacccuuaugaugugccggauuaugccucccuuaggucacuaguugccucaucuggcacacuggaguuuaacaaugaaagcuucaauuggacuggagucacucaaaacggaacaagcucugcuugcauaaggagaucuaauaauaguuucuuuaguagauugaauugguugacccauuuaaacuucaaauacccagcauugaacgugacuaugccaaacaaugaacaauuugacaaauuguacauuugggggguucaccacccggguacggacaaggaccaaaucuuccuguaugcucaagcagcaggaagaaucacaguaucuaccaaaagaagccaacaagcuguaauuccgaauaucggaucuagacccagaguaaggaauaucccuagcagaguaagcaucuauuggacaauaguaaaaccgggagacauacuuuugauuaacagcacagggaaucuaauugcuccuagggguuacuucaaaauacgaagugggaaaagcucaauaaugagaucagaugcacccauuggcaaauguaauucugcaugcaucacuccaaauggaagcauucccaaugacaaaccauuccaaaauguaaacaggaucacauacggggccugucccagauauguuaagcaaaacacucugaaauuggcaacaggaaugagaaauguaccagagaaacaaacuagaggcauauuuggcgcaauagcugguuucauagaaaaugguugggagggaaugguggaugguugguacgguuucaggcaucaaaauucugagggaaggggacaagcagcagaucucaaaagcacucaagcagcaaucgaucaaaucaaugggaagcugaauagauugaucgggaaaaccaacgagaaauuccaucagauugaaaaagaauucucagaagucgaagggagaauucaggaccuugagaaauauguugaggacacuaaaauagaucucuggucauacaacgcggagcuucuuguugcccuggagaaccaacacacaauugaucuaacugacucagaaaugaacaaacuguuugaaaaaacaaagaagcaacugagggaaaaugcugaggauaugggcaaugguuguuucaaaauauaccacaaaugugacaaugccugcauaggaucaaucagaaauggaacuuaugaccacgauguguacagagaugaagcauuaaacaaccgauuccagaucaagggaguugagcugaagucaggguacaaagauuggauccuauggauuuccuuugccauaucauguuuuuugcuuuguguugcuuuguugggguucaucaugugggccugccaaaaaggcaacauuaggugcaacauuugcauuuga

SEQ ID NO: 44112 - RNA, 1701 nt, Artificial Sequence
  derived and/or modified CDS sequence (wt) from hemagglutinin__InfluenzaA__AHZ36059
augaaggcaauacuaguaguucugcuauauacauuugcaaucgcaaaugcagacacauuauguauagguuaucaugcgaacaauucaacagacacuguagacacaguacuagaaaagaauguaacaguaacacacucuguuaaccuucuagaagacaagcauaacgggaaacuaugcaaacuaagagggguagccccauugcauuuggguaaauguaacauugcuggcuggauccugggaaauccagagugugaaucacucuccacagcaagcucaugguccuacauuguggaaacaucuaguucagacaauggaacguguuacccaggagauuucaucaauuaugaggagcuaagagagcaauugagcucagugucaucauuugaaagguuugagauguuccccaagacaaguucauggcccaaucaugacucgaacaaagguguaacggcagcauguccucaugcuggagcaaaaagcuucuacaaaaauuuaauauggcuaguuaaaaaaggaaauucauacccaaagcucagcaaguccuacauuaaugauaaagggaaagaaguccucgugcuguggggcauucaccauccaucuacuacugcugaccaacaaagucucuaucagaaugcagaugcauauguuuuuguggggacaucaagauacagcaagaaguucaagccggaaauagcaauaagacccaaagugagggaucaagaagggagaaugaacuacuacuggacacuaguagagccgggagacaaaauaacauucgaagcaacuggaaaucuagugguaccgagauaugcauucgcaauggaaagaaaugcuggaucugguauuaucauuucagauacaccaguccacgauugcaauacaacuugucagacacccaagggugcuauaaacaccagccucccauuucagaauauacauccgaucacaauuggaaaauguccaaaauauguaaaaagcacaaaauugagacuggccacaggauugaggaaugucccgucuauucaaucuagaggccuauuuggggccauugccggcuucauugaagggggguggacagggaugguagauggaugguacgguuaucaccaucaaaaugagcaggggucaggauaugcagccgaccugaagagcacacagaaugccauugacaagauuacuaacaaaguaaauucuguuauugaaaagaugaauacacaguucacagcaguagguaaagaauucaaccaccuggaaaaaagaauagagaauuuaaauaaaaaaguugaugacgguuuccuggacauuuggacuuacaaugccgaacuguugguucuauuggaaaaugaaagaacuuuggacuaccacgauucaaaugugaagaacuuguaugaaaagguaagaaaccaguuaaaaaacaaugccaaggaaauuggaaacggcugcuuugaauuuuaccacaaaugcgauaacacgugcauggaaagugucaaaaaugggacuuaugacuacccaaaauacucagaggaagcaaaauuaaacagagaagaaauagaugggguaaagcuggaaucaacaaggauuuaccagauuuuggcgaucuauucaacugucgccaguucauugguacugguagucucccugggggcaaucaguuucuggaugugcucuaaugggucucuacaguguagaauauguauuuaa

SEQ ID NO: 44113 - RNA, 1701 nt, Artificial Sequence; identical to SEQ ID NO: 44109
  derived and/or modified CDS sequence (wt) from hemagglutinin__InfluenzaA__AHZ36070

SEQ ID NO: 44114 - RNA, 1701 nt, Artificial Sequence; identical to SEQ ID NO: 44108
  derived and/or modified CDS sequence (wt) from hemagglutinin__InfluenzaA__AHZ36081

SEQ ID NO: 44115 - RNA, 1701 nt, Artificial Sequence; identical to SEQ ID NO: 44109
  derived and/or modified CDS sequence (wt) from hemagglutinin__InfluenzaA__AHZ36092

SEQ ID NO: 44116 - RNA, 1701 nt, Artificial Sequence; identical to SEQ ID NO: 44093
  derived and/or modified CDS sequence (wt) from hemagglutinin__InfluenzaA__AHZ36103

SEQ ID NO: 44117 - RNA, 1701 nt, Artificial Sequence; identical to SEQ ID NO: 44109
  derived and/or modified CDS sequence (wt) from hemagglutinin__InfluenzaA__AHZ36114

SEQ ID NO: 44118 - RNA, 1701 nt, Artificial Sequence; identical to SEQ ID NO: 44093
  derived and/or modified CDS sequence (wt) from hemagglutinin__InfluenzaA__AHZ36125

SEQ ID NO: 44119 - RNA, 1701 nt, Artificial Sequence; identical to SEQ ID NO: 44093
  derived and/or modified CDS sequence (wt) from hemagglutinin__InfluenzaA__AHZ36136

SEQ ID NO: 44120 - RNA, 1701 nt, Artificial Sequence; identical to SEQ ID NO: 44111
  derived and/or modified CDS sequence (wt) from hemagglutinin__InfluenzaA__AHZ36147

SEQ ID NO: 44121 - RNA, 1701 nt, Artificial Sequence
  derived and/or modified CDS sequence (wt) from hemagglutinin__InfluenzaA__AHZ36158
augaaggcaauacuaguaguucugcuauauacauuugcaaucgcaaaugcagacacauuauguauagguuaucaugcgaacaauucaacagacacuguagacacaguacuagaaaagaauguaacaguaacacacucuguuaaccuucuagaagacaagcauaacgggaaacuaugcaaacuaagagggguagccccauugcauuuggguaaauguaacauugcuggcuggauccugggaaauccagagugugaaucacucuccacagcaagcucaugguccuacauuguggaaacaucuaguucagacaauggaacguguuacccaggagauuucaucaauuaugaggagcuaagagagcaauugagcucagugucaucauuugaaagguuugagauguuccccaagacaaguucauggcccaaucaugacucgaacaaagguguaacggcagcauguccucaugcuggagcaaaaagcuucuacaaaaauuuaauauggcuaguuaaaaaaggaaauucauacccaaagcucagcaaauccuacauuaaugauaaagggaaagaaguccucgugcuguggggcauucaccauccaucuacuacugcugaccaacaaagucucuaucagaaugcagaugcauauguuuuuguggggacaucaagauacagcaagaaguucaagccggaaauagcaacaagacccaaagugagggaucaagaagggagaaugaacuacuacuggacacuaguagagccgggagacaaaauaacauucgaagcaacuggaaaucuagugguaccgagauaugcauucgcaauggaaagaaaugcuggaucugguauuaucauuucagauacaccaguccacgauugcaauacaacuugucagacacccaagggugcuauaaacaccagccucccauuucagaauauacauccgaucacaauuggaaaauguccaaaauauguaaaaagcacaaaauugagacuggccacaggauugaggaaugucccgucuauucaaucuagaggccuauuuggggccauugccggcuucauugaagggggguggacagggaugguagauggaugguacgguuaucaccaucaaaaugagcaggggucaggauaugcagccgaccugaagagcacacagaaugccauugacaagauuacuaacaaaguaaauucuguuauugaaaagaugaauacacaguucacagcaguagguaaagaauucaaccaccuggaaaaaagaauagagaauuuaaauaaaaaaguugaugacgguuuccuggacauuuggacuuacaaugccgaacuguugguucuauuggaaaaugaaagaacuuuggacuaccacgauucaaaugugaagaacuuguaugaaaagguaagaaaccaguuaaaaaacaaugccaaggaaauuggaaacggcugcuuugaauuuuaccacaaaugcgauaacacgugcauggaaagugucaaaaaugggacuuaugacuacccaaaauacucagaggaagcaaaauuaaacagagaagaaauagaugggguaaagcuggaaucaacaaggauuuaccagauuuuggcgaucuauucaacugucgccaguucauugguacugguagucucccugggggcaaucaguuucuggaugugcucuaaugggucucuacaguguagaauauguauuuaa

SEQ ID NO: 44122 - RNA, 1701 nt, Artificial Sequence; identical to SEQ ID NO: 44093
  derived and/or modified CDS sequence (wt) from hemagglutinin__InfluenzaA__AHZ36169

SEQ ID NO: 44123 - RNA, 1701 nt, Artificial Sequence
  derived and/or modified CDS sequence (wt) from hemagglutinin__InfluenzaA__AHZ36180
augaaggcaauacuaguaguucugcuauauacauuugcaaucgcaaaugcagacacauuauguauagguuaucaugcgaacaauucaacagacacuguagacacaguacuagaaaagaauguaacaguaacacacucuguuaaccuucuagaagacaagcauaacgggaaacuaugcaaacuaagagggguagccccauugcauuuggguaaauguaacauugcuggcuggauccugggaaauccagagugugaaucacucuccacagcaagcucaugguccuacauuguggaaacaucuaguucagacaauggaacguguuacccaggagauuucaucaauuaugaggagcuaagagagcaauugagcucagugucaucauuugaaagguuugagauguuccccaagacaaguucauggcccaaucaugacucgaacaaagguguaacggcagcauguccucaugcuggagcaaaaagcuucuacaaaaauuuaauauggcuaguuaaaaaaggaaauucauacccaaagcucagcaaauccuacauuaaugauaaagggaaagaaguccucgugcuguggggcauucaccauccaucuacuacugcugaccaacaaagucucuaucagaaugcagaugcauauguuuuuguggggacaucaagauacagcaagaaguucaagccggaaauagcaauaagacccaaagugagggaucaagaagggagaaugaacuacuacuggacacuaguagagccgggagacaaaauaacauucgaagcaacuggaaaucuagugguaccgagauaugcauucgcaauggaaagaaaugcuggaucugguauuaucauuucagauacaccaauccacgauugcaauacaacuugucagacacccaagggugcuauaaacaccagccucccauuucagaauauacauccgaucacaauuggaaaauguccaaaauauguaaaaagcacaaaauugagacuggccacaggauugaggaaugucccgucuauucaaucuagaggccuauuuggggccauugccggcuucauugaagggggguggacagggaugguagauggaugguacgguuaucaccaucaaaaugagcaggggucaggauaugcagccgaccugaagagcacacagaaugccauugacaagauuacuaacaaaguaaauucuguuauugaaaagaugaauacacaguucacagcaguagguaaagaauucaaccaccuggaaaaaagaauagagaauuuaaauaaaaaaguugaugacgguuuccuggacauuuggacuuacaaugccgaacuguugguucuauuggaaaaugaaagaacuuuggacuaccacgauucaaaugugaagaacuuguaugaaaagguaagaaaccaguuaaaaaacaaugccaaggaaauuggaaacggcugcuuugaauuuuaccacaaaugcgauaacacgugcauggaaagugucaaaaaugggacuuaugacuacccaaaauacucagaggaagcaaaauuaaacagagaagaaauagaugggguaaagcuggaaucaacaaggauuuaccagauuuuggcgaucuauucaacugucgccaguucauugguacugguagucucccugggggcaaucaguuucuggaugugcucuaaugggucucuacaguguagaauauguauuuaa

SEQ ID NO: 44124 - RNA, 1701 nt, Artificial Sequence; identical to SEQ ID NO: 44097
  derived and/or modified CDS sequence (wt) from hemagglutinin__InfluenzaA__AHZ36191

SEQ ID NO: 44125 - RNA, 1701 nt, Artificial Sequence; identical to SEQ ID NO: 44111
  derived and/or modified CDS sequence (wt) from hemagglutinin__InfluenzaA__AHZ36203

SEQ ID NO: 44126 - RNA, 1701 nt, Artificial Sequence
  derived and/or modified CDS sequence (wt) from hemagglutinin__InfluenzaA__AHZ36215
augaaggcaauacuaguaguucugcuauauacauuugcaaucgcaaaugcagacacauuauguauagguuaucaugcgaacaauucaacagacacuguagacacaguacuagaaaagaauguaacaguaacacacucuguuaaccuucuagaagacaagcauaacgggaaacuaugcaaacuaagagggguagccccauugcauuuggguaaauguaacauugcuggcuggauccugggaaauccagagugugaaucacucuccacagcaagcucaugguccuacauuguggaaacaucuaguucagacaauggaacguguuacccaggagauuucaucaauuaugaggagcuaagagagcaauugagcucagugucaucauuugaaagguuugagauguuccccaagacaaguucauggcccaaucaugacucgaacaaagguguaacggcagcauguccucaugcuggagcaaaaagcuucuacaaaaauuuaauauggcuaguuaaaaaaggaaauucauacccaaagcuuagcaaauccuacauuaaugauaaagggaaagaaguccucgugcuguggggcauucaccauccaucuacuacugcugaccaacaaagucucuaucagaaugcagaugcauauguuuuuguggggacaucaagauacagcaagaaguucaagccggaaauagcaauaagacccaaagugagggaucaagaagggagaaugaacuacuacuggacacuaguagagccgggagacaaaauaacauucgaagcaacuggaaaucuagugguaccgagauaugcauucgcaauggaaagaaaugcuggaucugguauuaucauuucagauacaccaguccacgauugcaauacaacuugucagacacccaagggugcuauaaacaccagccucccauuucagaauauacauccgaucacaauuggaaaauguccaaaauauguaaaaagcacaaaauugagacuggccacaggauugaggaaugucccgucuauucaaucuagaggccuauuuggggccauugccggcuucauugaagggggguggacagggaugguagauggaugguacgguuaucaccaucaaaaugagcaggggucaggauaugcagccgaccugaagagcacacagaaugccauugacaagauuacuaacaaaguaaauucuguuauugaaaagaugaauacacaguucacagcaguagguaaagaauucaaccaccuggaaaaaagaauagagaauuuaaauaaaaaaguugaugacgguuuccuggacauuuggacuuacaaugccgaacuguugguucuauuggaaaaugaaagaacuuuggacuaccacgauucaaaugugaagaacuuguaugaaaagguaagaaaccaguuaaaaaacaaugccaaggaaauuggaaacggcugcuuugaauuuuaccacaaaugcgauaacacgugcauggaaagugucaaaaaugggacuuaugacuacccaaaauacucagaggaagcaaaauuaaacagagaagaaauagaugggguaaagcuggaaucaacaaggauuuaccagauuuuggcgaucuauucaacugucgccaguucauugguacugguagucucccugggggcaaucaguuucuggaugugcucuaaugggucucuacaguguagaauauguauuuaa

SEQ ID NO: 44127 - RNA, 1701 nt, Artificial Sequence; identical to SEQ ID NO: 44111
  derived and/or modified CDS sequence (wt) from hemagglutinin__InfluenzaA__AHZ36226

SEQ ID NO: 44128 - RNA, 1701 nt, Artificial Sequence; identical to SEQ ID NO: 44093
  derived and/or modified CDS sequence (wt) from hemagglutinin__InfluenzaA__AHZ36238

SEQ ID NO: 44129 - RNA, 1701 nt, Artificial Sequence; identical to SEQ ID NO: 44093
  derived and/or modified CDS sequence (wt) from hemagglutinin__InfluenzaA__AHZ36249

SEQ ID NO: 44130 - RNA, 1701 nt, Artificial Sequence
  derived and/or modified CDS sequence (wt) from hemagglutinin__InfluenzaA__AHZ36260
augaaggcaauacuaguaguucugcuauauacauuugcaaucgcaaaugcagacacauuauguauagguuaucaugcgaacaauucaacagacacuguagacacagugcuagaaaagaauguaacaguaacacacucuguuaaccuucuagaagacaagcauaacgggaaacuaugcaaacuaagagggguagccccauugcauuuggguaaauguaacauugcuggcuggauccugggaaauccagagugugaaucacucuccacagcaagcucaugguccuacauuguggaaacauuuaguucagacaauggaacguguuacccaggagauuucaucaauuaugaggagcuaagagagcaauugagcucagugucaucauuugaaagguuugagauguuccccaagacaaguucauggcccaaucaugacucgaacaaagguguaacggcagcauguccucaugcuggagcaaaaagcuucuacaaaaauuuaauauggcuaguuaaaaaaggaaauucauacccaaagcucagcaaauccuacauuaaugauaaagggaaagaaguccucgugcuguggggcauucaccauccaucuacuacugcugaccaacaaagucucuaucagaaugcagaugcauauguuuuuguggggacaucaagauacagcaagaaguucaagccggaaauagcaauaagacccaaagugagggaucaagaagggagaaugaacuacuacuggacacuaguagagccgggagacaaaauaacauucgaagcaacuggaaaucuagugguaccgagauaugcauucgcaauggaaagaaaugcuggaucugguauuaucauuucagauacaccaguccacgauugcaauacaacuugucagacacccaagggugcuauaaacaccagccucccauuucagaauauacauccgaucacaauuggaaaauguccaaaauauguaaaaagcacaaaauugagacuggccacaggauugaggaaugucccgucuauucaaucuagaggccuauuuggggccauugccggcuucauugaagggggguggacagggaugguagauggaugguacgguuaucaccaucaaaaugagcaggggucaggauaugcagccgaccugaagagcacacagaaugccauugacaagauuacuaacaaaguaaauucuguuauugaaaagaugaauacacaguucacagcaguagguaaagaauucaaccaccuggaaaaaagaauagagaauuuaaauaaaaaaguugaugacgguuuccuggacauuuggacuuacaaugccgaacuguugguucuauuggaaaaugaaagaacuuuggacuaccacgauucaaaugugaagaacuuguaugaaaagguaagaaaccaguuaaaaaacaaugccaaggaaauuggaaacggcugcuuugaauuuuaccacaaaugcgauaacacgugcauggaaagugucaaaaaugggacuuaugacuacccaaaauacucagaggaagcaaaauuaaacagagaagaaauagaugggguaaagcuggaaucaacaaggauuuaccagauuuuggcgaucuauucaacugucgccaguucauugguacugguagucucccugggggcaaucaguuucuggaugugcucuaaugggucucuacaguguagaauauguauuuaa

SEQ ID NO: 44131 - RNA, 1701 nt, Artificial Sequence; identical to SEQ ID NO: 44079
  derived and/or modified CDS sequence (wt) from hemagglutinin__InfluenzaA__AHZ36271

SEQ ID NO: 44132 - RNA, 1701 nt, Artificial Sequence; identical to SEQ ID NO: 44093
  derived and/or modified CDS sequence (wt) from hemagglutinin__InfluenzaA__AHZ36283

SEQ ID NO: 44133 - RNA, 1701 nt, Artificial Sequence; identical to SEQ ID NO: 44079
  derived and/or modified CDS sequence (wt) from hemagglutinin__InfluenzaA__AHZ36294

SEQ ID NO: 44134 - RNA, 1701 nt, Artificial Sequence
  derived and/or modified CDS sequence (wt) from hemagglutinin__InfluenzaA__AHZ36306
augaaggcaauacuaguaguucugcuauauacauuugcaaucgcaaaugcagacacauuauguauagguuaucaugcgaacaauucaacagacacuguagacacaguacuagaaaagaauguaacaguaacacacucuguuaaccuucuagaagacaagcauaacgggaaacuaugcaaacuaagagggguagccccauugcauuuggguaaauguaacauugcuggcuggauccugggaaauccagagugugaaucacucuccacagcaagcucaugguccuacauuguggaaacaucuaguucagacaauggaacguguuacccaggagauuucaucaauuaugaggagcuaagagagcaauugagcucagugucaucauuugaaagguuugagauguuccccaagacaaguucauggcccaaucaugacucgaacaaagguguaacggcagcauguccucaugcuggagcaaaaagcuucuacaaaaauuuaauauggcuaguuaaaaaaggaaauucauacccaaagcucagcaaauccuacauuaaugauaaagggaaagaaguccucgugcuguggggcauucaccauccaucuacuacugcugaccaacaaagucucuaucagaaugcagaugcauauguuuuuguggggacaucaagauacagcaagaaguucaagccggaaauagcaauaagacccaaagugagggaucaagaagggagaaugaacuacuacuggacacuaguagagccgggagacaaaauaacauucgaagcaacuggaaaucuagugguaccgagauaugcauucgcaauggaaagaaaugcuggaucugguauuaucauuucagauacaccaguccacgauugcaauacaacuugucagacacccaagggugcuauaaacaccagccucccauuucagaauauacauccgaucacaauuggaaaauguccaaaauauguaaaaagcaaaaaauugagacuggccacaggauugaggaaugucccgucuauucaaucuagaggccuauuuggggccauugccggcuucauugaagggggguggacagggaugguagauggaugguacgguuaucaccaucaaaaugagcaggggucaggauaugcagccgaccugaagagcacacagaaugccauugacaagauuacuaacaaaguaaauucuguuauugaaaagaugaauacacaguucacagcaguagguaaagaauucaaccaccuggaaaaaagaauagagaauuuaaauaaaaaaguugaugacgguuuccuggacauuuggacuuacaaugccgaacuguugguucuauuggaaaaugaaagaacuuuggacuaccacgauucaaaugugaagaacuuguaugaaaagguaagaaaccaguuaaaaaacaaugccaaggaaauuggaaacggcugcuuugaauuuuaccacaaaugcgauaacacgugcauggaaagugucaaaaaugggacuuaugacuacccaaaauacucagaggaagcaaaauuaaacagagaagaaauagaugggguaaagcuggaaucaacaaggauuuaccagauuuuggcgaucuauucaacugucgccaguucauugguacugguagucucccugggggcaaucaguuucuggaugugcucuaaugggucucuacaguguagaauauguauuuaa

SEQ ID NO: 44135 - RNA, 1701 nt, Artificial Sequence; identical to SEQ ID NO: 44093
  derived and/or modified CDS sequence (wt) from hemagglutinin__InfluenzaA__AHZ36317

SEQ ID NO: 44136 - RNA, 1701 nt, Artificial Sequence; identical to SEQ ID NO: 44093
  derived and/or modified CDS sequence (wt) from hemagglutinin__InfluenzaA__AHZ36328

SEQ ID NO: 44137 - RNA, 1701 nt, Artificial Sequence
  derived and/or modified CDS sequence (wt) from hemagglutinin__InfluenzaA__AHZ36339
augaaggcaauacuaguaguucugcuauauacauuugcaaucgcaaaugcagacacauuauguauagguuaucaugcgaacaauucaacagacacuguagacacaguacuagaaaagaauguaacaguaacacacucuguuaaccuucuagaagacaagcauaacgggaaacuaugcaaacuaagagggguagccccauugcauuuggguaaauguaacauugcuggcuggauccugggaaauccagagugugaaucacucuccacagcaagcucaugguccuacauuguggaaacaucuaguucagacaauggaacguguuacccaggagauuucaucaauuaugaggagcuaagagagcaauugagcucagugucaucauuugaaagguuugagauguuccccaagacaaguucauggcccaaucaugacucgaacaaagguguaacggcagcauguccucaugcuggagcaaaaagcuucuacaaaaauuuaauauggcuaguuaaaaaaggaaauucauacccaaagcucagcaaauccuacauuaaugauaaagggaaagaaguccucgugcuguggggcauucaccauccaucuacuacugcugaccaacaaagucucuaucagaaugcagaugcauauguuuuuguggggacaucaagauacagcaagaaguucaagccggaaauagcaauaagacccaaagugagggaucaagaagggagaaugaacuacuacuggacacuaguagagccgggagacaaaauaacauucgaagcaacuggaaaucuagugguaccgagauaugcauucgcaauggaaagaaaugcuggaucugguauuaucauuucagauacaccaguccacgauugcaauacaacuugucagacacccaagggugcuguaaacaccagccucccauuucagaauauacauccgaucacaauuggaaaauguccaaaauauguaaaaagcacaaaauugagacuggccacaggauugaggaaugucccgucuauucaaucuagaggccuauuuggggccauugccggcuucauugaagggggguggacagggaugguagauggaugguacgguuaucaccaucaaaaugagcaggggucaggauaugcagccgaccugaagagcacacagaaugccauugacaagauuacuaacaaaguaaauucuguuauugaaaagaugaauacacaguucacagcaguagguaaagaauucaaccaccuggaaagaagaauagagaauuuaaauaaaaaaguugaugacgguuuccuggacauuuggacuuacaaugccgaacuguugguucuauuggaaaaugaaagaacuuuggacuaccacgauucaaaugugaagaacuuguaugaaaagguaagaaaccaguuaaaaaacaaugccaaggaaauuggaaacggcugcuuugaauuuuaccacaaaugcgauaacacgugcauggaaagugucaaaaaugggacuuaugacuacccaaaauacucagaggaagcaaaauuaaacagagaagaaauagaugggguaaagcuggaaucaacaaggauuuaccagauuuuggcgaucuauucaacugucgccaguucauugguacugguagucucccugggggcaaucaguuucuggaugugcucuaaugggucucuacaguguagaauauguauuuaa

SEQ ID NO: 44138 - RNA, 1701 nt, Artificial Sequence
  derived and/or modified CDS sequence (wt) from hemagglutinin__InfluenzaA__AHZ36362
augaaggcaauacuaguaguucugcuauauacauuugcaaucgcaaaugcagacacauuauguauagguuaucaugcgaacaauucaacagacacuguagacacaguacuagaaaagaauguaacaguaacacacucuauuaaccuucuagaagacaagcauaacgggaaacuaugcaaacuaagagggguagccccauugcauuuggguaaauguaacauugcuggcuggauccugggaaauccagagugugaaucacucuccacagcaagcucaugguccuacauuguggaaacaucuaguucagacaauggaacguguuacccaggagauuucaucaauuaugaggagcuaagagagcaauugagcucagugucaucauuugaaagguuugagauguuccccaagacaaguucauggcccaaucaugacucgaacaaagguguaacggcagcauguccucaugcuggagcaaaaagcuucuacaaaaauuuaauauggcuaguuaaaaaaggaaauucauacccaaagcucagcaaauccuacauuaaugauaaagggaaagaaguccucgugcuguggggcauucaccauccaucuacuacugcugaccaacaaagucucuaucagaaugcagaugcauauguuuuuguggggacaucaagauacagcaagaaguucaagccggaaauagcaauaagacccaaagugagggaucaagaagggagaaugaacuacuacuggacacuaguagagccgggagacaaaauaacauucgaagcaacuggaaaucuagugguaccgagauaugcauucgcaauggaaagaaaugcuggaucugguauuaucauuucagauacaccaguccacgauugcaauacaacuugucagacacccaagggugcuguaaacaccagccucccauuucagaauauacauccgaucacaauuggaaaauguccaaaauauguaaaaagcacaaaauugagacuggccacaggauugaggaaugucccgucuauucaaucuagaggccuauuuggggccauugccggcuucauugaagggggguggacagggaugguagauggaugguacgguuaucaccaucaaaaugagcaggggucaggauaugcagccgaccugaagagcacacagaaugccauugacaagauuacuaacaaaguaaauucuguuauugaaaagaugaauacacaguucacagcaguagguaaagaauucaaccaccuggaaagaagaauagagaauuuaaauaaaaaaguugaugacgguuuccuggacauuuggacuuacaaugccgaacuguugguucuauuggaaaaugaaagaacuuuggacuaccacgauucaaaugugaagaacuuguaugaaaagguaagaaaccaguuaaaaaacaaugccaaggaaauuggaaacggcugcuuugaauuuuaccacaaaugcgauaacacgugcauggaaagugucaaaaaugggacuuaugacuacccaaaauacucagaggaagcaaaauuaaacagagaagaaauagaugggguaaagcuggaaucaacaaggauuuaccagauuuuggcgaucuauucaacugucgccaguucauugguacugguagucucccugggggcaaucaguuucuggaugugcucuaaugggucucuacaguguagaauauguauuuaa

SEQ ID NO: 44139 - RNA, 1701 nt, Artificial Sequence
  derived and/or modified CDS sequence (wt) from hemagglutinin__InfluenzaA__AHZ36385
augaagacuaucauugcuuugagcuacauucuaugucugauuuucgcucaagaaauuccuggaaaugacaacagcacggcaacgcugugccuugggcaccaugcagugccaaacggaacgauagugaaaacaaucacgaaugaccaaauugaaguuacuaaugcuacugagcugguucagaguuccucaacaggugaaauaugcaacaguccucaucagauccuugauggagaaaacugcacacuaauagaugcucuauugggagacccucagugugaugacuuccaaaacaagaaaugggaccuuuuuguugaacgaagcaaagcccacagcaacuguuacccuuaugaugugccggauuaugccucccuuaggucacuaguugccucauccggcacacuggaguuuaacaaugaaagcuucaauuggacuggagucacucaaaacggaacaagcucugcuugcauaaggagaucuaauaauaguuucuuuaguagauugaauugguugacccacuuaaacuucaaauacccagcauugaacgugacuaugccaaacaaugaacaauuugacaaauuguacauuugggggguucaccacccggguacggacaaggaccaaaucuuccuguaugcucaagcaucaggaagaaucacaguaucuaccaaaagaagccaacaggcuguaauuccgaauaucggaucuagacccagaguaaggaauaucccuagcagaguaagcaucuauuggacaauaguaaaaccgggagacauacuuuugauuaacagcacagggaaucuaauugcuccuagggguuacuucaaaauacgaagugggaaaagcucaauaaugagaucagaugcacccauuggcaaaugcaauucugcaugcaucacuccaaauggaagcauucccaaugacaaaccauuccaaaauguaaacaggaucacauacggggccugucccagauaugucaagcaaaacacucugaaauuggcaacaggaaugagaaauguaccagagaaacaaacuagagguauauuuggcgcaauagcggguuucauagaaaauggcugggagggaaugguggaugguugguacgguuucaggcaucaaaauucugagggaaggggacaggcagcagaucucaaaagcacucaagcagcaaucgaucaaaucaaugggaagcugaauagauugaucgggaaaaccaaugagaaauuccaucagauugaaaaagaauucucagaagucgaagggagaauucaggaccuugagaaauauguugaggacacuaaaauagaucucuggucauacaacgcggagcuucuuguugcccuggagaaccaacacacaauugaucugacugacucagaaaugaacaaacuguuugaaaaaacaaagaagcaacugagggaaaaugcugaggauaugggcaaugguuguuucaaaauauaccacaaaugugauaaugccugcauagggucaaucagaaauggaacuuaugaccacgauguguacagagaugaagcauuaaacaaccgauucaagaucaagggaguugagcugaagucaggguacaaagauuggauccuauggauuuccuuugccauaucauguuuuuugcuuuguguugcuuuguugggguucaucaugugggccugccaaaaaggcaacauuaggugcaacauuugcauuuga

SEQ ID NO: 44140 - RNA, 1701 nt, Artificial Sequence
  derived and/or modified CDS sequence (wt) from hemagglutinin__InfluenzaA__AHZ36397
augaagacuaucauugcuuugagcuacauucuaugucugauuuucgcucaagaaauuccuggaaaugacaacagcacggcaacgcugugccuugggcaccaugcagugccaaacggaacgauagugaaaacaaucacgaaugaccaaauugaaguuacuaaugcuacugagcugguucagaguuccucaacaggugaaauaugcaacaguccucaucagauccuugauggagaaaacugcacacuaauagaugcucuauugggagacccucagugugaugacuuccaaaacaagaaaugggaccuuuuuguugaacgaagcaaagcccacagcaacuguuacccuuaugaugugccggauuaugccucccuuaggucacuaguugccucauccggcacacuggaguuuaacaaugaaagcuucaauuggacuggagucacucaaaacggaacaagcucugcuugcauaaggagaucuaauaauaguuucuuuaguagauugaauugguugacccacuuaaacuucaaauacccagcauugaacgugacuaugccaaacaaugaacaauuugacaaauuguacauuugggggguucaccacccggguacggacaaggaccaaaucuuccuguaugcucaagcaucaggaagaaucacaguaucuaccaaaagaagccaacaggcuguaauuccgaauaucggaucuagacccagaguaaggaauaucccuagcagaguaagcaucuauuggacaauaguaaaaccgggagacauacuuuugauuaacagcacagggaaucuaauugcuccuagggguuacuucaaaauacgaagugggaaaagcucaauaaugagaucagaugcacccauuggcaaaugcaauucugcaugcaucacuccaaauggaagcauucccaaugacaaaccauuccaaaauguaaacaggaucacauacggggccugucccagauaugucaagcaaaacacucugaaauuggcaacaggaaugagaaauguaccagagaaacaaacuagagguauauuuggcgcaauagcggguuucauagaaaauggcugggagggaaugguggaugguugguacgguuucaggcaucaaaauucugagggaaggggacaggcagcagaucucaaaagcacucaagcagcaaucgaucaaaucaaugggaagcugaauagauugaucgggaaaaccaaugagaaauuccaucagauugaaaaagaauucucagaagucgaagggagaauucaggaccuugagaaauauguugaggacacuaaaauagaucucuggucauacaacgcggagcuucuuguugcccuggagaaccaacacacaauugaucugacugacucagaaaugaacaaacuguuugaaaaaacaaagaagcaacugagggaaaaugcugaggauaugggcaaugguuguuucaaaauauaccacaaaugugauaaugccugcauaggaucaaucagaaauggaacuuaugaccacaauguguacagagaugaagcauuaaacaaccgauucaagaucaagggaguugagcugaagucaggguacaaagauuggauccuauggauuuccuuugccauaucauguuuuuugcuuuguguugcuuuguugggguucaucaugugggccugccaaaaaggcaacauuaggugcaacauuugcauuuga

SEQ ID NO: 44141 - RNA, 1701 nt, Artificial Sequence; identical to SEQ ID NO: 44079
  derived and/or modified CDS sequence (wt) from hemagglutinin__InfluenzaA__AHZ36409

SEQ ID NO: 44142 - RNA, 1701 nt, Artificial Sequence
  derived and/or modified CDS sequence (wt) from hemagglutinin__InfluenzaA__AHZ36433
augaagacuaucauugcuuugagcuacauucuaugucugauuuucgcucaagaaauuccuggaaaugacaacagcacggcaacgcugugccuugggcaccaugcagugccaaacggaacaauagugaaaacaaucacgaaugaccaaauugaaguuacuaaugcuacugagcugguucagaguuccucaacaggugaaauaugcaacaguccucaucagauccuugauggagaaaacugcacacuaauagaugcucuauugggagacccucagugugaugacuuccaaaacaaggaaugggaccuuuuuguugaacgaagcaaagcccacagcaacuguuacccuuaugaugugccggauuaugccucccuuaggucacuaguugccucauccggcacacuggaguuuaacaaugaaagcuucaauuggacuggagucacucaaaacggaacaagcucugcuugcauaaggagaucuaauaauaguuucuuuaguagauugaauugguugacccacuuaaacuucaaauacccagcauugaacgugacuaugccaaacaaugaacaauuugacaaauuguacauuugggggguucaccacccggguacggacaaggaccaaaucuuccuguaugcucaagcaucaggaagaaucacaguaucuaccaaaagaagccaacaggcuguaauuccgaauaucggaucuagacccagaguaaggaauauccccagcagaguaagcaucuauuggacaauaguaaaaccgggagacauacuuuugauuaacagcacagggaaucuaauugcuccuagggguuacuucaaaauacgaagugggaaaagcucaauaaugagaucagaugcacccauuggcaaaugcaauucugcaugcaucacuccaaauggaagcauucccaaugacaaaccauuccaaaauguaaacaggaucacauacgggaccugucccagauaugucaagcaaaacacucugaaauuggcaacaggaaugagaaauguaccagagaaacaaacuagagguauauuuggcgcaauagcggguuucauagaaaauggcugggagggaaugguggaugguugguacgguuucaggcaucaaaauucugagggaaggggacaggcagcagaucucaaaagcacucaagcagcaaucgaucaaaucaaugggaagcugaauagauugaucgggaaaaccaaugagaaauuccaucagauugaaaaagaauucucagaagucgaagggagaauucaggaccuugagaaauauguugaggacacuaaaauagaucucuggucauacaacgcggagcuucuuguugcccuggagaaccaacacacaauugaucugacugacucagaaaugaacaaacuguuugaaaaaacaaagaagcaacugagggaaaaugcugaggauaugggcaaugguuguuucaaaauauaccacaaaugugauaaugccugcauaggaucaaucagaaauggaacuuaugaccacgauguguacagagaugaagcauuaaacaaccgauuccagaucaagggaguugagcugaagucaggguacaaagauuggauccuauggauuuccuuugccauaucauguuuuuugcuuuguguugcuuuguugggguucaucaugugggccugccaaaaaggcaacauuaggugcaacauuugcauuuga

SEQ ID NO: 44143 - RNA, 1701 nt, Artificial Sequence
  derived and/or modified CDS sequence (wt) from hemagglutinin__InfluenzaA__AHZ36445
augaagacuaucauugcuuugagcuacauucuaugucugauuuucgcucaagaaauuccuggaaaugacaacagcacggcaacgcugugccuugggcaccaugcagugccaaacggaacgauagugaaaacaaucacgaaugaccaaauugaaguuacuaaugcuacugagcugguucagaguuccucaacaggugaaauaugcaacaguccucaucagauccuugauggagaaaacugcacacuaauagaugcucuauugggagacccucagugugaugacuuccaaaacaagaaaugggaccuuuuuguugaacgaagcaaagcccacagcaacuguuacccuuaugaugugccggauuaugccucccuuaggucacuaguugccucauccggcacacuggaguuuaacaaugaaagcuucaauuggacuggagucacucaaaacggaacaagcucugcuugcauaaggagaucuaauaauaguuucuuuaguagauugaauugguugacccacuuaaacuucaaauacccagcauugaacgugacuaugccaaacaaugaacaauuugacaaauuguacauuugggggguucaccacccggguacagacaaggaccaaaucuuccuguaugcucaagcaucaggaagaaucacaguaucuaccaaaagaagccaacaggcuguaauuccgaauaucggaucuagacccagaguaaggaauaucccuagcagaguaagcaucuauuggacaauaguaaaaccgggagacauacuuuugauuaacagcacagggaaucuaauugcuccuagggguuacuucaaaauacgaagugggaaaagcucaauaaugagaucagaugcacccauuggcaaaugcaauucugcaugcaucacuccaaauggaagcauucccaaugacaaaccauuccaaaauguaaacaggaucacauacggggccugucccagauaugucaagcaaaacacucugaaauuggcaacaggaaugagaaauguaccagagaaacaaacuagagguauauuuggcgcaauagcggguuucauagaaaauggcugggagggaaugguggaugguugguacgguuucaggcaucaaaauucugagggaaggggacaggcagcagaucucaaaagcacucaagcagcaaucgaucaaaucaaugggaagcugaauagauugaucgggaaaaccaaugagaaauuccaucagauugaaaaagaauucucagaagucgaagggagaauucaagaccuugagaaauauguugaggacacuaaaauagaucucuggucauacaacgcggagcuucuuguugcccuggagaaccaacacacaauugaucugacugacucagaaaugaacaaacuguuugaaaaaacaaagaagcaacugagggaaaaugcugaggauaugggcaaugguuguuucaaaauauaccacaaaugugaugaugccugcauaggaucaaucagaaauggaacuuaugaccacgauguguacagagaugaagcauuaaacaacagauuccagaucaagggaguugagcugaagucaggguacaaagauuggauccuauggauuuccuuugccauaucauguuuuuugcuuuguguugcuuuguugggguucaucaugugggccugccaaaaaggcaacauuaggugcaacauuugcauuuga

SEQ ID NO: 44144 - RNA, 1701 nt, Artificial Sequence; identical to SEQ ID NO: 44077
  derived and/or modified CDS sequence (wt) from hemagglutinin__InfluenzaA__AHZ36457

SEQ ID NO: 44145 - RNA, 1701 nt, Artificial Sequence; identical to SEQ ID NO: 44079
  derived and/or modified CDS sequence (wt) from hemagglutinin__InfluenzaA__AHZ36469

SEQ ID NO: 44146 - RNA, 1701 nt, Artificial Sequence
  derived and/or modified CDS sequence (wt) from hemagglutinin__InfluenzaA__AHZ36481
augaagacuaucauugcuuugagcuacauucuaugucugauuuucgcucaagaaauuccuggaaaugacaacagcacggcaacgcugugccuugggcaccaugcagugccaaacggaacgauagugaaaacaaucacgaaugaccaaauugaaguuacuaaugcuacugagcugguucagaguuccucaacaggugaaauaugcaacaguccucaucagauccuugauggagaaaacugcacacuaauagaugcucuauugggagacccucagugugaugacuuccaaaacaagaaaugggaccuuuuuguugaacgaagcaaagcccacagcaacuguuacccuuaugaugugccggauuaugccucccuuaggucacuaguugccucauccggcacacuggaguuuaacaaugaaagcuucaauuggacuggagucacucaaaacggaacaagcucugcuugcauaaggagaucuaauaauaguuucuuuaguagauugaauugguugacccacuuaaacuucaaauacccagcauugaacgugacuaugccaaacaaugaacaauuugacaaauuguacauuugggggguucaccacccggguacggacaaggaccaaaucuuccuguaugcucaagcaucaggaagaaucacaguaucuaccaaaagaagccaacaggcuguaauuccgaauaucggaucuagacccagaguaaggaauaucccuagcagaguaagcaucuauuggacaauaguaaaaccgggagacauacuuuugauuaacagcacagggaaucuaauugcuccuagggguuacuucaaaauacgaaaugggaaaagcucaauaaugagaucagaugcacccauuggcaaaugcaauucugcaugcaucacuccaaauggaagcauucccaaugacaaaccauuccaaaauguaaacaggaucacauacggggccugucccagauaugucaagcaaaacacucugaaauuggcaacaggaaugagaaauguaccagagaaacaaacuagagguauauuuggcgcaauagcggguuucauagaaaauggcugggagggaaugguggaugguugguacgguuucaggcaucaaaauucugagggaaggggacaggcagcagaucucaaaagcacucaagcagcaaucgaucaaaucaaugggaagcugaauagauugaucgggaaaaccaaugagaaauuccaucagauugaaaaagaauucucagaagucgaagggagaauucaggaccuugagaaauauguugaggacacuaaaauagaucucuggucauacaacgcggagcuucuuguugcccuggagaaccaacacacaauugaucugacugacucagaaaugaacaaacuguuugaaaaaacaaagaagcaacugagggaaaaugcugaggauaugggcaaugguuguuucaaaauauaccacaaaugugauaaugccugcauaggaucaaucagaaauggaacuuaugaccacgauguguacagagaugaagcauuaaacaaccgauuccagaucaagggaguugagcugaagucaggguacaaagauuggauccuauggauuuccuuugccauaucauguuuuuugcuuuguguugcuuuguugggguucaucaugugggccugccaaaaaggcaacauuaggugcaacauuugcauuuga

SEQ ID NO: 44147 - RNA, 1701 nt, Artificial Sequence
  derived and/or modified CDS sequence (wt) from hemagglutinin__InfluenzaA__AHZ36493
augaagacuaucauugcuuugagcuacauucuaugucugauuuucgcucaagaaauuccuggaaaugacaacagcacggcaacgcugugccuugggcaccaugcagugccaaacggaacaauagugaaaacaaucacgaaugaccaaauugaaguuacuaaugcuacugagcugguucagaguuccucaacaggugaaauaugcaacaguccucaucagauccuugauggagaaaacugcacacuaauagaugcucuauugggagacccucagugugaugacuuccaaaacaaggaaugggaccuuuuuguugaacgaagcaaagcccacagcaacuguuacccuuaugaugugccggauuaugccucccuuaggucacuaguugccucauccggcacacuggaguuuaacaaugaaagcuucaauuggacuggagucacucaaaacggaacaagcucugcuugcauaaggagaucuaauaauaguuucuuuaguagauuaaauugguugacccacuuaaacuucaaauacccagcauugaacgugacuaugccaaacaaugaacaauuugacaaauuguacauuugggggguucaccacccggguacggacaaggaccaaaucuuccuguaugcucaagcaucaggaagaaucacaguaucuaccaaaagaagccaacaggcuguaauuccgaauaucggaucuagacccagaguaaggaauauccccagcagaguaagcaucuauuggacaauaguaaaaccgggagacauacuuuugauuaacagcacagggaaucuaauugcuccuagggguuacuucaaaauacgaagugggaaaagcucaauaaugagaucagaugcacccauuggcaaaugcaauucugccugcaucacuccaaauggaagcauucccaaugacaaaccauuccaaaauguaaacaggaucacauacgggaccugucccagauaugucaagcaaaacacucugaaauuggcaacaggaaugagaaauguaccagagaaacaaacuagagguauauuuggcgcaauagcggguuucauagaaaauggcugggagggaaugguggaugguugguacgguuucaggcaucaaaauucugagggaaggggacaggcagcagaucucaaaagcacucaagcagcaaucgaucaaaucaaugggaagcugaauagauugaucgggaaaaccaaugagaaauuccaucagauugaaaaagaauucucagaagucgaagggagaauucaggaccuugagaaauauguugaggacacuaaaauagaucucuggucauacaacgcggagcuucuuguugcccuggagaaccaacacacaauugaucugacugacucagaaaugaacaaacuguuugaaaaaacaaagaagcaacugagggaaaaugcugaggauaugggcaaugguuguuucaaaauauaccacaaaugugauaaugccugcauaggaucaaucagaaauggaacuuaugaccacgauguguacagagaugaagcauuaaacaaccgauuccagaucaagggaguugagcugaagucaggguacaaagauuggauccuauggauuuccuuugccauaucauguuuuuugcuuuguguugcuuuguugggguucaucaugugggccugccaaaaaggcaacauuaggugcaacauuugcauuuga

SEQ ID NO: 44148 - RNA, 1701 nt, Artificial Sequence; identical to SEQ ID NO: 44142
  derived and/or modified CDS sequence (wt) from hemagglutinin__InfluenzaA__AHZ36505

SEQ ID NO: 44149 - RNA, 1701 nt, Artificial Sequence
  derived and/or modified CDS sequence (wt) from hemagglutinin__InfluenzaA__AHZ36517
augaagacuaucauugcuuugagcuacauucuaugucugauuuucgcucaagaaauuccuggaaaugacaacagcacggcaacgcugugccuugggcaccaugcagugccaaacggaacaauagugaaaacaaucacgaaugaccaaauugaaguuacuaaugcuacugagcugguucagaguuccucaacaggugaaauaugcaacaguccucaucagauccuugauggagaaaacugcacacuaauagaugcucuauugggagacccucagugugaugacuuccaaaacaaggaaugggaccuuuuuguugaacgaagcaaagcccacagcaacuguuacccuuaugaugugccggauuaugccucccuuaggucacuaguugccucauccggcacacuggaguuuaacaaugaaagcuucaauuggacuggagucacucaaaacggaacaagcucugcuugcauaaggagaucuaauaauaguuucuuuaguagauugaauugguugacccacuuaaacuucaaauacccagcauugaacgugacuaugccaaacaaugaacaauuugacaaauuguacauuugggggguucaccacccggguacggacaaggaccaaaucuuccuguaugcucaagcaucaggaagaaucacaguaucuaccaaaagaagccaacaggcuguaauuccgaauaucggaucuagacccagaguaaggaauauccccagcagaguaagcaucuauuggacaauaguaaaaccgggagacauacuuuugauuaacagcacagggaaucuaauugcuccuagggguuacuucaaaauacgaagugggaaaagcucaauaaugagaucagaugcacccauuggcaaaugcaauucugcaugcaucacuccaaauggaagcauucccaaugacaaaccauuccaaaauguaaacaggaucacauacgggaccugucccagauaugucaagcaaaacacucugaaauuggcaacaggaaugagaaauguaccagagaaacaaacuagagguauauuuggcgcaauagcggguuucauagaaaauggcugggagggaaugguggaugguugguacgguuucaggcaucaaaauucugagggaaggggacaggcagcagaucucaaaagcacucaagcagcaaucgaucaaaucaaugggaagcugaauagauugaucgggaaaaccaaugagaaauuccaucagauugaaaaagaauucucagaagucgaagggagaauucaggaccuugagaaauauguugaggacacuaaaauagaucucuggucauacaacgcggagcuucuuguugcccuggagaaccaacacacaauugaucugacugacucagaaaugaacaaacuguuugaaaaaacaaagaagcaacugagggaaaaugcugaggauaugggcaaugguuguuucaaaauauaccacaaaugugauaaugccugcauaggaucaaucagaaauggaacuuaugaccacgacguguacagagaugaagcauuaaacaaccgauuccagaucaagggaguugagcugaagucaggguacaaagauuggauccuauggauuuccuuugccauaucauguuuuuugcuuuguguugcuuuguugggguucaucaugugggccugccaaaaaggcaacauuaggugcaacauuugcauuuga

SEQ ID NO: 44150 - RNA, 1701 nt, Artificial Sequence
  derived and/or modified CDS sequence (wt) from hemagglutinin__InfluenzaA__AHZ36529
augaagacuaucauugcuuugagcuacauucuaugucugauuuucgcucaagaaauuccuggaaaugacaacagcacggcaacgcugugccuugggcaccaugcagugccaaacggaacgauagugaaaacaaucacgaaugaccaaauugaaguuacuaaugcuacugagcugguucagaguuccucaacaggugaaauaugcaacaguccucaucagauccuugauggagaaaacugcacacuaauagaugcucuauugggagacccucagugugaugacuuccaaaacaagaaaugggaccuuuuuguugaacgaagcaaagcccacagcaacuguuacccuuaugaugugccggauuaugccucccuuaggucacuaguugccucauccggcacacuggaguuuaacaaugaaagcuucaauuggacuggagucacucaaaacggaacaagcucugcuugcauaaggagaucuaauaauaguuucuuuaguagauugaauugguugacccacuuaaacuucaaauacccagcauugaacgugacuaugccaaacaaugaacaauuugacaaauuguacauuugggggguucaccacccggguacagacaaggaccaaaucuuccuguaugcucaagcaucaggaagaaucacaguaucuaccaaaagaagccaacaggcuguaauuccgaauaucggaucuagacccagaguaaggaauaucccuagcagaguaagcaucuauuggacaauaguaaaaccgggagacauacuuuugauuaacagcacagggaaucuaauugcuccuagggguuacuucaaaauacgaagugggaaaagcucaauaaugagaucagaugcacccauuggcaaaugcaauucuucaugcaucacuccaaauggaagcauucccaaugacaaaccauuccaaaauguaaacaggaucacauacggggccugucccagauaugucaagcaaaacacucugaaauuggcaacaggaaugagaaauguaccagagaaacaaacuagagguauauuuggcgcaauagcggguuucauagaaaauggcugggagggaaugguggaugguugguacgguuucaggcaucaaaauucugagggaaggggacaggcagcagaucucaaaagcacucaagcagcaaucgaucaaaucaaugggaagcugaauagauugaucgggaaaaccaaugagaaauuccaucagauugaaaaagaauucucagaagucgaagggagaauucaagaccuugagaaauauguugaggacacuaaaauagaucucuggucauacaacgcggagcuucuuguugcccuggagaaccaacacacaauugaucugacugacucagaaaugaacaaacuguuugaaaaaacaaagaagcaacugagggaaaaugcugaggauaugggcaaugguuguuucaaaauauaccacaaaugugauaaugccugcauaggaucaaucagaaauggaacuuaugaccacgauguguacagagaugaagcauuaaacaaccgauuccagaucaagggaguugagcugaagucaggguacaaagauuggauccuauggauuuccuuugccauaucauguuuuuugcuuuguguugcuuuguugggguucaucaugugggccugccaaaaaggcaacauuaggugcaacauuugcauuuga

SEQ ID NO: 44151 - RNA, 1701 nt, Artificial Sequence
  derived and/or modified CDS sequence (wt) from hemagglutinin__InfluenzaA__AHZ36541
augaagacuaucauugcuuugagcuacauucuaugucugauuuucgcucaagaaauuccuggaaaugacaacagcacggcaacgcugugccuugggcaccaugcagugccaaacggaacgauagugaaaacaaucacgaaugaccaaauugaaguuacuaaugcuacugagcugguucagaguuccucaacaggugaaauaugcaacaguccucaucagauccuugauggagaaaacugcacacuaauagaugcucuauugggagacccucagugugaugacuuccaaaacaagaaaugggaccuuuuuguugaacgaagcaaagcccacagcaacuguuacccuuaugaugugccggauuaugccucccuuaggucacuaguugccucauccggcacacuggaguuuaacaaugaaagcuucaauuggacuggagucacucaaaacggaacaagcucugcuugcauaaggagaucuaauaauaguuucuuuaguagauugaauugguugacccacuuaaacuucaaauacccagcauugaacgugacuaugccaaacaaugaacaauuugacaaauuguacauuugggggguucaccacccggguacagacaaggaccaaaucuuccuguaugcucaagcaucaggaagaaucacaguaucuaccaaaagaagccaacaggcaguaauuccgaauaucggaucuagacccagaguaaggaauaucccuagcagaguaagcaucuauuggacaauaguaaaaccgggagacauacuuuugauuaacagcacagggaaucuaauugcuccuagggguuacuucaaaauacgaagugggaaaagcucaauaaugagaucagaugcacccauuggcaaaugcaauucugcaugcaucacuccaaauggaagcauucccaaugacaaaccauuccaaaauguaaacaggaucacauacggggccugucccagauaugucaagcaaaacacucugaaauuggcaacaggaaugagaaauguaccagagaaacaaacuagagguauauuuggcgcaauagcggguuucauagaaaauggcugggagggaaugguggaugguugguacgguuucaggcaucaaaauucugagggaaggggacaggcagcagaucucaaaagcacucaagcagcaaucgaucaaaucaaugggaagcugaauagauugaucgggaaaaccaaugagaaauuccaucagauugaaaaagaauucucagaagucgaagggagaauucaagaccuugagaaauauguugaggacacuaaaauagaucucuggucauacaacgcggagcuucuuguugcccuggagaaccaacacacaauugaucugacugacucagaaaugaacaaacuguuugaaaaaacaaagaagcaacugagggaaaaugcugaggauaugggcaaugguuguuucaaaauauaccacaaaugugauaaugccugcauaggaucaaucagaaauggaacuuaugaccacgauguguacagagaugaagcauuaaacaaccgauuccagaucaagggaguugagcugaagucaggguacaaagauuggauccuauggauuuccuuugccauaucauguuuuuugcuuuguguugcuuuguugggguucaucaugugggccugccaaaaaggcaacauuaggugcaacauuugcauuuga

SEQ ID NO: 44152 - RNA, 1701 nt, Artificial Sequence
  derived and/or modified CDS sequence (wt) from hemagglutinin__InfluenzaA__AHZ36553
augaagacuaucauugcuuugagcuacauucuaugucugauuuucgcucaagaaauuccuggaaaugacaacagcacggcaacgcugugccuugggcaccaugcagugccaaacggaacaauagugaaaacaaucacgaaugaccaaauugaaguuacuaaugcuacugagcugguucagaguuccucaacaggugaaauaugcaacaguccucaucagauccuugauggagaaaacugcacacuaauagaugcucuauugggagacccucagugugaugacuuccaaaacaaggaaugggaccuuuuuguugaacgaagcaaagcccacagcaacuguuacccuuaugaugugccggauuaugccucccuuaggucacuaguugccucauccggcacacuggaguuuaaaaaugaaagcuucaauuggacuggagucacucaaaacggaacaagcucugcuugcauaaggagaucuaauaauaguuucuuuaguagauugaauugguugacccacuuaaacuucaaauacccagcauugaacgugacuaugccaaacaaugaacaauuugacaaauuguacauuugggggguucaccacccggguacggacaaggaccaaaucuuccuguaugcucaagcaucaggaagaaucacaguaucuaccaaaagaagccaacaggcuguaauuccgaauaucggaucuagacccagaguaaggaauauccccagcagaguaagcaucuauuggacaauaguaaaaccgggagacauacuuuugauuaacagcacagggaaucuaauugcuccuagggguuacuucaaaauacgaagugggaaaagcucaauaaugagaucagaugcacccauuggcaaaugcaauucugcaugcaucacuccaaauggaagcauucccaaugacaaaccauuccaaaauguaaacaggaucacauacgggaccugucccagauaugucaagcaaaacacucugaaauuggcaacaggaaugagaaauguaccagagaaacaaacuagagguauauuuggcgcaauagcggguuucauagaaaauggcugggagggaaugguggaugguugguacgguuucaggcaucaaaauucugagggaaggggacaggcagcagaucucaaaagcacucaagcagcaaucgaucaaaucaaugggaagcugaauagauugaucgggaaaaccaaugagaaauuccaucagauugaaaaagaauucucagaagucgaagggagaauucaggaccuugagaaauauguugaggacacuaaaauagaucucuggucauacaacgcggagcuucuuguugcccuggagaaccaacacacaauugaucugacugacucagaaaugaacaaacuguuugaaaaaacaaagaagcaacugagggaaaaugcugaggauaugggcaaugguuguuucaaaauauaccacaaaugugauaaugccugcauaggaucaaucagaaauggaacuuaugaccacgauguguacagagaugaagcauuaaacaaccgauuccagaucaagggaguugagcugaagucaggguacaaagauuggauccuauggauuuccuuugccauaucauguuuuuugcuuuguguugcuuuguugggguucaucaugugggccugccaaaaaggcaacauuaggugcaacauuugcauuuga

SEQ ID NO: 44153 - RNA, 1701 nt, Artificial Sequence; identical to SEQ ID NO: 44077
  derived and/or modified CDS sequence (wt) from hemagglutinin__InfluenzaA__AHZ36565

SEQ ID NO: 44154 - RNA, 1701 nt, Artificial Sequence; identical to SEQ ID NO: 44077
  derived and/or modified CDS sequence (wt) from hemagglutinin__InfluenzaA__AHZ36577

SEQ ID NO: 44155 - RNA, 1701 nt, Artificial Sequence; identical to SEQ ID NO: 44077
  derived and/or modified CDS sequence (wt) from hemagglutinin__InfluenzaA__AHZ36589

SEQ ID NO: 44156 - RNA, 1701 nt, Artificial Sequence; identical to SEQ ID NO: 44152
  derived and/or modified CDS sequence (wt) from hemagglutinin__InfluenzaA__AHZ36601

SEQ ID NO: 44157 - RNA, 1701 nt, Artificial Sequence
  derived and/or modified CDS sequence (wt) from hemagglutinin__InfluenzaA__AHZ36613
augaagacuaucauugcuuugagcuacauucuaugucugauuuucgcucaagaaauuccuggaaaugacaacagcacggcaacgcugugccuugggcaccaugcagugccaaacggaacaauagugaaaacaaucacgaaugaccaaauugaaguuacuaaugcuacugagcugguucagaguuccucaacaggugaaauaugcaacaguccucaucagauccuugauggagaaaacugcacacuaauagaugcucuauugggagacccucagugugaugacuuccaaaacaaggaaugggaccuuuuuguugaacgaagcaaagcccacagcaacuguuacccuuaugaugugccggauuaugccucccuuaggucacuaguugccucauccggcacacuggaguuuaacaaugaaagcuucaauuggacuggagucacucaaaacggaacaagcucugcuugcauaaggagaucuaauaauaguuucuuuaguagauugaauugguugacccacuuaaacuucaaauacccagcauugaacgugacuaugccaaacaaugaacaauuugacaaauuguacauuugggggguucaccacccggguacggacaaggaccaaaucuuccuguaugcucaagcaucaggaagaaucacaguaucuaccaaaagaagccaacaggcuguaauuccgaauaucggaucuagacccagaguaaggaauauccccagcagaguaagcaucuauuggacaauaguaaaaccgggagacauacuuuugauuaacagcacagggaaucuaauugcuccuagggguuacuucaaaauacgaagugggaaaagcucaauaaugagaucagaugcacccauuggcaaaugcaauucugcaugcaucacuccaaauggaagcauucccaaugacaaaccauuccaaaauguaaacaggaucacauacgggaccugucccagauaugucaagcaaaacacucugaaauuggcaacaggaaugagaaauguaccagagaaacaaacuagagguauauuuggcgcaauagcggguuucauagaaaauggcugggagggaaugguggaugguugguacgguuucaggcaucaaaauucugagggaaggggacaggcagcagaucucaaaagcacucaagcagcaaucgaucaaaucaaugggaagcugaauagauugaucgggaaaaccaaugagaaauuccaucagauugaaaaagaauucucagaagucgaagggagaauucaggaccuugagaaauauguugaggacacuaaaauagaucucuggucauacaacgcggagcuucuuguugcccuggagaaccaacacacaauugaucugacugacucagaaaugaacaaacuguuugaaaaaacaaagaagcaacugagggaaaaugcugaggauaugggcaaugguuguuucaaaauauaccacaaaugugauaaugccugcauaggaucaaucagaaauggaacuuaugaccacgauguguacagagaugaagcauuaaacaaccgauuccagaucaagggaguugagcugaagucaggguacaaagauuggauccuauggauuuccuuugccacaucauguuuuuugcuuuguguugcuuuguugggguucaucaugugggccugccaaaaaggcaacauuaggugcaacauuugcauuuga

SEQ ID NO: 44158 - RNA, 1701 nt, Artificial Sequence
  derived and/or modified CDS sequence (wt) from hemagglutinin__InfluenzaA__AHZ36625
augaagacuaucauugcuuugagcuacauucuaugucugauuuucgcucaagaaauuccuggaaaugacaacagcacggcaacgcugugccuugggcaccaugcagugccaaacggaacgauagugaaaacaaucacgaaugaccaaauugaaguuacuaaugcuacugagcugguucagaguuccucaacaggugaaauaugcaacaguccucaucagauccuugauggagaaaacugcacacuaauagaugcucuauugggagacccucagugugaugacuuccaaaacaagaaaugggaccuuuuuguugaacgaagcaaagcccacagcaacuguuacccuuaugaugugccggauuaugccucccuuaggucacuaguugccucauccggcacacuggaguuuaacaaugaaagcuucaauuggacuggagucacucaaaacggaacaagcucugcuugcauaaggagaucuaauaauaguuucuuuaguagauugaauugguugacccacuuaaacuucaaauacccagcauugaacgugacuaugccaaacaaugaacaauuugacaaauuguacauuugggggguucaccacccggguacagacaaggaccaaaucuuccuguaugcucaagcaucaggaagaaucacaguaucuaccaaaagaagccaacaggcuguaauuccgaauaucggaucuagacccagaguaaggaauaucccuagcagaguaagcaucuauuggacaauaguaaaaccgggagacauacuuuugauuaacagcacagggaaucuaauugcuccuagggguuacuucaaaauacgaagugggaaaagcucaauaaugagaucagaugcacccauuggcaaaugcaauucugcaugcaucacuccaaauggaagcauucccaaugacaaaccauuccaaaauguaaacaggaucacauacggggccugucccagauaugucaagcaaaacacucugaaauuggcaacaggaaugagaaauguaccagagaaacaaacuagagguauauuuggcgcaauagcggguuucauagaaaauggcugggagggaaugguggaugguugguacgguuucaggcaucaaaauucugagggaaggggacaggcagcagaucuuaaaagcacucaagcagcaaucgaucaaaucaaugggaagcugaauagauuaaucgggaaaaccaaugagaaauuccaucagauugaaaaagaauucucagaagucgaagggagaauucaagaccuugagaaauauguugaggacacuaaaauagaucucuggucauacaacgcggagcuucuuguugcccuggagaaccaacacacaauugaucugacugacucagaaaugaacaaacuguuugaaaaaacaaagaagcaacugagggaaaaugcugaggauaugggcaaugguuguuucaaaauauaccacaaaugugauaaugccugcauaggaucaaucagaaauggaacuuaugaccacgauguguacagagaugaagcauuaaacaaccgauuccagaucaagggaguugagcugaagucaggguacaaagauuggauccuauggauuuccuuugccauaucauguuuuuugcuuuguguugcuuuguugggguucaucaugugggccugccaaaaaggcaacauuaggugcaacauuugcauuuga

SEQ ID NO: 44159 - RNA, 1701 nt, Artificial Sequence; identical to SEQ ID NO: 44142
  derived and/or modified CDS sequence (wt) from hemagglutinin__InfluenzaA__AHZ36637

SEQ ID NO: 44160 - RNA, 1701 nt, Artificial Sequence
  derived and/or modified CDS sequence (wt) from hemagglutinin__InfluenzaA__AHZ36649
augaagacuaucauugcuuugagcuacauucuaugucugauuuucgcucaagaaauuccuggaaaugacaacagcacggcaacgcugugccuugggcaccaugcagugccaaacggaacaauagugaaaacaaucacgaaugaccaaauugaaguuacuaaugcuacugagcugguucagaguuccucaacaggugaaauaugcaacaguccucaucagauccuugauggagaaaacugcacacuaauagaugcucuauugggagacccucagugugaugacuuccaaaacaaggaaugggaccuuuuuguugaacgaagcaaagcccacagcaacuguuacccuuaugaugugccggauuaugccucccuuaggucacuaguugccucauccggcacacuggaguuuaacaaugaaagcuucaauuggacuggagucacucaaaacggaacaagcucugcuugcauaaggagaucuaauaauaguuucuuuaguagauugaauugguugacccacuuaaacuucaaauacccagcauugaacgugacuaugccaaacaaugaacaauuugacaaauuguacauuugggggguucaccacccggguacggacaaggaccaaaucuuccuguaugcucaagcaucaggaagaaucacaguaucuaccaaaagaagccaacaggcuguaauuccgaauaucggaucuagacccagaguaaggaauauccccagcagaguaagcaucuauuggacaauaguaaaaccgggagacauacuuuugauuaacagcacagggaaucuaauugcuccuagggguuacuucaaaauacgaagugggaaaagcucaauaaugagaucagaugcacccauuggcaaaugcaauucugcaugcaucacuccaaauggaagcauucccaaugacaaaccauuccaaaauguaaacaggaucacauacgggaccugucccagauaugucaagcaaaacacucugaaauuggcaacaggaaugagaaauguaccagagaaacaaacuagagguauauuuggcgcaauagcggguuucauagaaaauggcugggagggaaugguggaugguugguacgguuucaggcaucaaaauucugagggaaggggacaggcagcagaucucaaaagcacucaagcagcaaucgaucaaaucaaugggaagcugaauagauugaucgggaaaaccaaugagaaauuccaucagauugaaaaagaauucucagaagucgaagggagaauucaggaccuugagaaauauguugaggacacuaaaauagaucucuggucauacaacgcggagcuucuuguugcccuggagaaccaacacacaauugaucugacugacucagaaaugaacaaacuguuugaaaaaacaaagaagcaacugagggaaaaugcugaggauaugggcaauggcuguuucaaaauauaccacaaaugugauaaugccugcauaggaucaaucagaaauggaacuuaugaccacgauguguacagagaugaagcauuaaacaaccgauuccagaucaagggaguugagcugaagucaggguacaaagauuggauccuauggauuuccuuugccauaucauguuuuuugcuuuguguugcuuuguugggguucaucaugugggccugccaaaaaggcaacauuaggugcaacauuugcauuuga

SEQ ID NO: 44161 - RNA, 1701 nt, Artificial Sequence; identical to SEQ ID NO: 42155
  derived and/or modified CDS sequence (wt) from hemagglutinin__InfluenzaA__AHZ36661

SEQ ID NO: 44162 - RNA, 1701 nt, Artificial Sequence; identical to SEQ ID NO: 42155
  derived and/or modified CDS sequence (wt) from hemagglutinin__InfluenzaA__AHZ36673

SEQ ID NO: 44163 - RNA, 1701 nt, Artificial Sequence
  derived and/or modified CDS sequence (wt) from hemagglutinin__InfluenzaA__AHZ36685
augaagacuaucauugcuuugagcuacauucuaugucugguuuucgcucaaaaacuuccuggaaaugacaauagcacggcaacgcugugccuugggcaccaugcaguaccaaacggaacgauagugaaaacaaucacgaaugaccgaauugaaguuacuaaugcuacugagcugguucagaauuccucaauaggugaaauaugcgacaguccucaucagauccuugauggagaaaacugcacacuaauagaugcucuauugggagacccucagugugauggcuuucaaaauaagaaaugggaccuuuuuguugaacgaagcaaagccuacagcaacuguuacccuuaugaugugccggauuaugccucccuuaggucacuaguugccucauccggcacacuggaguuuaacaaugaaagcuucaauugggcuggagucacucaaaacggaacaaguucugcuugcauaaggggaucuaauaguaguuucuuuaguagauuaaauugguugacccacuuaaacuucaaauacccagcauugaacgugacuaugccaaacaaugaacaauuugacaaauuguacauuugggggguucaccacccggguacggacaaggaccaaaucuuccuguaugcucaaucaucaggaagaaucacaguaucuaccaaaagaagccaacaagcuguaaucccgaauaucggaucuagacccagaauaaggaauaucccuagcagaauaagcaucuauuggacaauaguaaaaccgggagacauacuuuugauuaacagcacagggaaucuaauugcuccuagggguuacuucaaaauacgaagugggaaaagcucaauaaugagaucagaugcacccauuggcaaaugcaagucugaaugcaucacuccaaauggaagcauucccaaugacaaaccauuccaaaauguaaacaggaucacauacggggccugucccagauauguuaagcaaagcacucugaaauuggcaacaggaaugcgaaauguaccagagaaacaaacuagaggcauauuuggcgcaauagcggguuucauagaaaaugguugggagggaaugguggaugguugguacgguuucaggcaucaaaauucugagggaagaggacaagcagcagaucucaaaagcacucaagcagcaaucgaucaaaucaaugggaagcugaaucgauugaucgggaaaaccaacgagaaauuccaucagauugaaaaagaauucucagaaguagaagggagaauucaggaccuugagaaauauguugaggacacaaaaauagaucucuggucauacaacgcggagcuucuuguugcccuggagaaccaacauacaauugaucuaacugacucagaaaugaacaaacuguuugaaaaaacaaagaagcaacugagggaaaaugcugaggauaugggcaaugguuguuucaaaauauaccacaaaugugacaaugccugcauaggaucaaucagaaauggaacuuaugaccacgauguauacagggaugaagcauuaaacaaccgguuccagaucaagagaguugaguugaagucaggguacaaagauuggauccuauggauuuccuuugccauaucauguuuuuugcuuuguguugcuuuguugggguucaucaugugggccugccaaaagggcaacauuaggugcaacauuugcauuuga

SEQ ID NO: 44164 - RNA, 1683 nt, Artificial Sequence; identical to SEQ ID NO: 42000
  derived and/or modified CDS sequence (wt) from hemagglutinin__InfluenzaA__AHZ39698

SEQ ID NO: 44165 - RNA, 1683 nt, Artificial Sequence
  derived and/or modified CDS sequence (wt) from hemagglutinin__InfluenzaA__AHZ39722
augaacacucaaauccugguauucgcucugauugcgaucauuccaacaaaugcagacaaaaucugccucggacaucaugccgugucaaacggaaccaaaguaaacacauuaacugaaagaggaguggaagucgucaaugcaacugaaacaguggaacgaacaaacauccccaggaucugcucaaaagggaaaaggacaguugaccucggucaauguggacuccuggggacaaucacuggaccaccucaaugugaccaauuccuagaauuuucagccgauuuaauuauugagaggcgagaaggaagugaugucuguuauccugggaaauucgugaaugaagaagcucugaggcaaauucucagagaaucaggcggaauugacaaggaagcaaugggauucacauacaguggaauaagaacugauggagcaaccagugcauguaggagaucaggaucuucauucuaugcagaaaugaaauggcuccugucaaacacagaugaugcugcauucccgcagaugacuaagucauauaaaaauacaagaaaaagcccagcucuaauaguaugggggauccaucauuccguaucaacugcagagcaaaccaagcuauaugggaguggaaacaaacuggugacaguugggaguucuaauuaucaacaaucuuuuguaccgaguccaggagcgagaccacaaguuaauggucuaucuggaagaauugacuuucauuggcuaaugcuaaaucccaaugauacagucacuuucaguuucaauggggcuuucauagcuccagaccgugcaagcuuccugagaggaaaaucuaugggaauccagaguggaguacagguugaugccaauugugaaggggacugcuaucauaguggagggacaauaauaaguaacuugccauuucagaacauagauagcagggcaguuggaaaauguccgagauauguuaagcaaaggagucugcugcuagcaacagggaugaagaauguuccugagauuccaaagggaagaggccuauuuggugcuauagcggguuucauugaaaauggaugggaaggccuaauugaugguugguaugguuucagacaccagaaugcacagggagagggaacugcugcagauuacaaaagcacucaaucggcaauugaucaaauaacaggaaaauuaaaccggcuuauagaaaaaaccaaccaacaauuugaguugauagacaaugaauucaaugagguagagaagcaaaucgguaaugugauaaauuggaccagagauucuauaacagaaguguggucauacaaugcugaacucuugguagcaauggagaaccagcauacaauugaucuggcugauucagaaauggacaaacuguacgaacgagugaaaagacagcugagagagaaugcugaagaagauggcacugguugcuuugaaauauuucacaagugugaugaugacuguauggccaguauuagaaauaacaccuaugaucacagcaaauacagggaagaggcaaugcaaaauagaauacagauugacccagucaaacuaagcagcggcuacaaagaugugauacuuugguuuagcuucggggcaucauguuucauacuucuagccauuguaaugggccuugucuucauauguguaaagaauggaaacaugcggugcacuauuuguauauaa

SEQ ID NO: 44166 - RNA, 1683 nt, Artificial Sequence; identical to SEQ ID NO: 44165
  derived and/or modified CDS sequence (wt) from hemagglutinin__InfluenzaA__AHZ39734

SEQ ID NO: 44167 - RNA, 1683 nt, Artificial Sequence
  derived and/or modified CDS sequence (wt) from hemagglutinin__InfluenzaA__AHZ39746
augaacacucaaauccugguauucgcucugauugcgaucauuccaacaaaugcagacaaaaucugccucggacaucaugccgugucaaacggaaccaaaguaaacacauuaacugaaagaggaguggaagucgucaaugcaacugaaacaguggaacgaacaaacauccccaggaucugcucaaaagggaaaaggacaguugaccucggucaauguggacuccuggggacaaucacuggaccaccucaaugugaccaauuccuagaauuuucagccgauuuaauuauugagaggcgagaaggaagugaugucuguuauccugggaaauucgugaaugaagaagcucugaggcaaauucucagagaaucaggcggaauugacaaggaagcaaugggauucacauacaguggaauaagaacuaauggagcaaccagugcauguaggagaucaggaucuucauucuaugcagaaaugaaauggcuccugucaaacacagauaaugcugcauucccgcagaugacuaagucauauaaaaauacaagaaaaagcccagcucuaauaguaugggggauccaucauuccguaucaacugcagagcaaaccaagcuauaugggaguggaaacaaacuggugacaguugggaguucuaauuaucaacaaucuuuuguaccgaguccaggagagagaccacaaguuaauggucuaucuggaagaauugacuuucauuggcuaaugcuaaaucccaaugauacagucacuuucaguuucaauggggcuuucauagcuccagaccgugcaagcuuccugagaggaaaaucuaugggaauccagaguggaguacagguugaugccaauugugaaggggacugcuaucauaguggagggacaauaauaaguaacuugccauuucagaacauagauagcagggcaguuggaaaauguccgagauauguuaagcaaaggagucugcugcuagcaacagggaugaagaauguuccugagauuccaaagggaagaggccuauuuggugcuauagcggguuucauugaaaauggaugggaaggccuaauugaugguugguaugguuucagacaccagaaugcacagggagagggaacugcugcagauuacaaaagcacucaaucggcaauugaucaaauaacaggaaaauuaaaccggcuuauagaaaaaaccaaccaacaauuugaguugauagacaaugaauucaaugagguagagaagcaaaucgguaaugugauaaauuggaccagagauucuauaacagaaguguggucauacaaugcugaacucuugguagcaauggagaaccagcauacaauugaucuggcugauucagaaauggacaaacuguacgaacgagugaaaagacagcugagagagaaugcugaagaagauggcacugguugcuuugaaauauuucacaagugugaugaugacuguauggccaguauuagaaauaacaccuaugaucacagcaaauacagggaagaggcaaugcaaaauagaauacagauugacccagucaaacuaagcagcggcuacaaagaugugauacuuugguuuagcuucggggcaucauguuucauacuucuagccauuguaaugggccuugucuucauauguguaaagaauggaaacaugcggugcacuauuuguauauaa

SEQ ID NO: 44168 - RNA, 1683 nt, Artificial Sequence; identical to SEQ ID NO: 44165
  derived and/or modified CDS sequence (wt) from hemagglutinin__InfluenzaA__AHZ39758

SEQ ID NO: 44169 - RNA, 1683 nt, Artificial Sequence; identical to SEQ ID NO: 44165
  derived and/or modified CDS sequence (wt) from hemagglutinin__InfluenzaA__AHZ39770

SEQ ID NO: 44170 - RNA, 1683 nt, Artificial Sequence; identical to SEQ ID NO: 44165
  derived and/or modified CDS sequence (wt) from hemagglutinin__InfluenzaA__AHZ39782

SEQ ID NO: 44171 - RNA, 1701 nt, Artificial Sequence; identical to SEQ ID NO: 41899
  derived and/or modified CDS sequence (wt) from hemagglutinin__InfluenzaA__AHZ39794

SEQ ID NO: 44172 - RNA, 1701 nt, Artificial Sequence
  derived and/or modified CDS sequence (wt) from hemagglutinin__InfluenzaA__AHZ39806
augaagacuaucauugcuuugagcuacauucuaugucugguuuucgcucaaaaacuuccuggaaaugacaauagcacggcaacgcugugccuugggcaccaugcaguaccaaacggaacgauagugaaaacaaucacgaaugaccaaauugaaguuacuaaugcuacugagcugguucagaauuccucaauaggugaaauaugcgacaguccucaucagauccuugauggagaaaacugcacacuaauagaugcucuauugggagacccucagugugauggcuuucaaaauaagaaaugggaccuuuuuguugaacgaagcaaagccuacagcaacuguuacccuuaugaugugccggauuaugccucccuuaggucacuaguugccucauccggcacacuggaguuuaacaaugaaagcuucaauugggcuggagucacucaaaacggaacaaguucugcuugcauaaggggaucuaauaguaguuucuuuaguagauuaaauugguugacccacuuaaacuucaaguacccagcauugaacgugacuaugccaaacaaugaacaauuugacaaauuguacauuugggggguucaccacccggguacggacaaggaccaaaucuuccuguaugcucaaucaucaggaagaaucacaguaucuaccaaaagaagccaacaagcuguaaucccgaauaucggaucuagacccagaauaaggaauaucccuagcagaauaagcaucuauuggacaauaguaaaaccgggagacauacuuuugauuaacagcacagggaaucuaauugcuccuagggguuacuucaaaauacgaagugggaaaagcucaauaaugagaucagaugcacccauuggcaaaugcaagucugaaugcaucacuccaaauggaagcauucccaaugacaaaccauuccaaaauguaaacaggaucacauacggggccugucccagauauguuaagcaaagcacucugaaauuggcaacaggaaugcgaaauguaccagagaaacaaacuagaggcauauuuggcgcaauagcggguuucauagaaaaugguugggagggaaugguggaugguugguacgguuucaggcaucaaaauucugagggaagaggacaagcagcagaucucaaaagcacucaagcagcaaucgaucaaaucaaugggaagcugaaucgauugaucgggaaaaccaacgagaaauuccaucagauugagaaagaauucucagaaguagaagggagaauucaggaccuugagaaauauguugaggacacaaaaauagaucucuggucauacaacgcagagcuucuuguugcccuggagaaccaacauacaauugaucuaacugacucagaaaugaacaaacuguuugaaaaaacaaagaagcaacugagggaaaaugcugaggauaugggcaaugguuguuucaaaauauaccacaaaugugacaaugccugcauaggaucaaucagaaauggaacuuaugaccacgauguauacagggaugaagcauuaaacaaccgguuccagaucaagggaguugagcugaaaucaggguacaaagauuggauccuauggauuuccuuugccauaucauguuuuuugcuuuguguugcuuuguugggguucaucaugugggccugccaaaagggcaacauuaggugcaacauuugcauuuga

SEQ ID NO: 44173 - RNA, 1701 nt, Artificial Sequence
  derived and/or modified CDS sequence (wt) from hemagglutinin__InfluenzaA__AHZ39818
augaagacuaucauugcuuugagcuacauucuaugucugguuuucgcucaaaaacucccuggaaaugacaacagcacggcaacgcugugccuugggcaccaugcagugccaaacggaacgauagugaaaacaauaacaaaugaccaaauugaaguuacuaaugcuacugagcugguucagaguuccucaacaggugaaauaugcaacaguccucaucagauccuugauggagaaaacugcacacuaauagaugcucuauugggagacccucagugugauggcuuccaaaacaagaaaugggaccuuuuuguugaacgaagcaaagcccacagcaacuguuacccuuaugaugugccggauuaugccucccuuaggucacuaguugccucaucuggcacacuggaguuuaacaaugaaagcuucaauuggacuggagucacucaaaacggaacaagcucugcuugcauaaggagaucuaauaauaguuucuuuaguagauugaauugguugacccauuuaaacuucaaauacccagcauugaacgugacuaugccaaacaaugaacaauuugacaaauuguacauuugggggguucaccacccggguacggacaaggaccaaaccuuccuguaugcucaagcagcaggaagaaucacaguaucuaccaaaagaagccaacaagcuguaauuccgaauaucggaucuagacccagaguaaggaauaucccuagcagaguaagcaucuauuggacaauaguaaaaccgggagacauacuuuugauuaacagcacagggaaucuaauugcuccuagggguuacuucaaaauacggaguggaaaaagcucaauaaugagaucagaugcacccauuggcaaauguaauucugcaugcaucacuccaaauggaagcauucccaaugacaaaccauuccaaaauguaaacaggaucacauacggggccugucccagauauguuaaacaaaacacucugaaauuggcaacaggaaugagaaauguaccagagaaacaaacuagaggcauauuuggcgcaauagcugguuucauagaaaaugguugggagggaaugguggaugguugguacgguuucagacaucaaaauucugagggaaggggacaagcagcagaucucaaaagcacucaagcagcaaucgaucaaaucaaugggaagcugaauagauugaucgggaaaaccaacgagaaauuccaucagauugaaaaagaauucucagaagucgaagggagaauucaggaccuugagaaauauguugaggacacuaaaauagaucucuggucauacaacgcggagcuuauuguugcccuggagaaccaacacacaauugaucuaacugacucagaaaugaacaaacuguuugaaaaaacaaagaagcaacugagggaaaaugcugaggauaugggcaaugguuguuucaaaauauaccacaaaugugacaaugccugcauaggaucaauaagaaauggaacuuaugaccacgauguguacagagaugaagcauuaaacaaccgauuccagaucaagggaguugagcugaagucaggguacaaagauuggauccuauggauuuccuuugccauaucauguuuuuugcuuuguguuguuuuguugggguucaucaugugggccugccaaaaaggcaacauuaggugcaacauuugcauuuga

SEQ ID NO: 44174 - RNA, 1701 nt, Artificial Sequence; identical to SEQ ID NO: 41901
  derived and/or modified CDS sequence (wt) from hemagglutinin__InfluenzaA__AHZ39841

SEQ ID NO: 44175 - RNA, 1701 nt, Artificial Sequence
  derived and/or modified CDS sequence (wt) from hemagglutinin__InfluenzaA__AHZ39853
augaagaccaucauugcuuugagcuacauucuaugucuaguuuucgcucaagaacuuccuggaaaugacgacagcacggcaacgcugugccuugggcaccaugcagugccaaacggaacgauagugaaaacaaucacgaaugaccgaauugaaguuacuaaugcuacugagcugguucagaguuccucaacaggugaaauaugcaacaguccucaucagauccuugauggagaaaacugcacacuaauagaugcucuauugggagacccucagugugauggcuuccaaaacaagaaaugggaccuuuuuguugaaagaagcaaagcccacagcaacuguuacccuuaugaugugccggauuaugccucccuuaggucacuaguugccucaucuggcacacuggaguuuaacaaugaaagcuucaauuggacuggagucacucaaaacggaacaagcucugcuugcauaaggagaucuaauaauaguuucuuuaguagauugaauugguugacccacuuaaacuucaaauacccagcauugaacgugacuaugccaaacaaugaacaauuugacaaauuguacauuugggggguucaccacccggguacggacaaggaccaaaucuuccuguaugcucaagcaucaggaagaaucacaguaucuaccaaaagaagccaacaaacuguaauuccgaauaucggaucuagacccagaguaaggaauaucccuagcagaguaagcaucuauuggacaauaguaaaaccaggagacauacuuuugauuaacagcacagggaaucuaauugcuccuagggguuacuucaaaauacgaaguggaaaaagcucaauaaugagaucagaugcacccauuggcaaaugcaauucugcaugcaucacuccaaauggaagcauucccaaugacaaaccauuccaaaauguaaacaggaucacauacggggccugucccagauaugucaagcaaaacacucugaaauuggcaacaggaaugagaaauguaccagagaaacaaacuagaggcauauuuggugcaauagcggguuucauagaaaaugguugggagggaaugguggaugguugguacgguuucaggcaucaaaauucugagggaaggggacaagcagcagaucucaaaagcacucaagcagcaaucgaucaaaucaaugggaagcugaauagauugaucgggaaaaccaacgagaaauuccaucagauugaaaaagaauucucagaagucgaagggagaauucaggaccuugagaaauauguugaggacacuaaaauagaucucuggucauacaacgcggagcuucuuguugcccuggagaaccaacacacaauugaucuaacugacucagaaaugaacaaacuguuugaaaaaacaaagaagcaacugagggaaaaugcugaggauaugggcaauggcuguuucaaaauauaccacaaaugugacaaugccugcauaggaucaaucagaaauggaacuuaugaucacgauguguacagagaugaagcauuaaacaaccgauuccagaucaagggaguugagcugaagucaggguacaaagauuggauccuauggauuuccuuugccauaucauguuuuuugcuuuguguugcuuuguugggguucaucaugugggccugccaaaaaggcaacauuaggugcaacauuugcauuuga

SEQ ID NO: 44176 - RNA, 1701 nt, Artificial Sequence
  derived and/or modified CDS sequence (wt) from hemagglutinin__InfluenzaA__AHZ39865
augaagacuaucauugcuuugagcuacauucuaugucugguuuucgcucaaaaacuuccuggaaaugacaauagcacggcaacgcugugccuugggcaccaugcaguaccaaacggaacgauagugaaaacaaucacgaaugaccgaauugaaguuacuaaugcuacugagcugguucagaauuccucaauaggugaaauaugcgacaguccucaucagauccuugauggagaaaacuguacacuaauagaugcucuauugggagacccucagugugauggcuuucaaaauaagaaaugggaccuuuuuguugaacgaagcaaagccuacagcaacuguuacccuuaugaugugccggauuaugccucccuuaggucacuaguugccucauccggcacacuggaguuuaacaaugaaagcuucaauuggacuggagucacucaaaacggaacaaguucugcuugcauaaggagaucuaauaguaguuucuuuaguagauuaaauugguugacccacuuaaacuucaaauacccagcauugaacgugacuaugccaaacaaugaacaauuugacaaauuguacauuugggggguucaccacccggguacggacaaggaccaaaucuuccuguaugcucaaucaucaggaagaaucacaguaucuaccaaaagaagccaacaagcuguaaucccgaauaucggaucuagacccagaauaaggaauaucccuagcagaauaagcaucuauuggacaauaguaaaaccaggagacauacuuuugauuaacagcacagggaaucuaauugcuccuagggguuacuucaaaauacgaagugggaaaagcucaauaaugagaucagaugcacccauuggcaaaugcaagucugaaugcaucacuccaaauggaagcauuccaaaugacaaaccauuccaaaauguaaacaggaucacauacggggccugucccagauauguuaagcaaagcacucugaaauuggcaacaggaaugcgaaauguaccagagaaacaaacuagaggcauauuuggcgcaauagcggguuucauagaaaaugguugggagggaaugguggaugguugguacgguuucaggcaucaaaauucugagggaagaggacaagcagcagaucucaaaagcacucaagcagcaaucgaucaaaucaaugggaagcugaaucgauugaucgggaaaaccaacgagaaauuccaucagauugaaaaagaauucucagaaguagaagggagaauucaggaccuugagaaauauguugaggacacuaaaauagaucucuggucauacaacgcggagcuucuuguugcccuggagaaccaacauacaauugaucuaacugacucagaaaugaacaaacuguuugaaaaaacaaagaagcaacugagggaaaaugcugaggauaugggcaaugguuguuucaaaauauaccacaaaugugacaaugccugcauaggaucaaucagaaauggaacuuaugaccacgauguauacagggaugaagcauuaaacaaccgguuccaaaucaagggaguugagcugaagucaggguacaaagauuggauccuauggauuuccuuugccauaucauguuuuuugcuuuguguugcuuuguugggguucaucaugugggccugccaaaagggcaacauuaggugcaacauuugcauuuga

SEQ ID NO: 44177 - RNA, 1701 nt, Artificial Sequence
  derived and/or modified CDS sequence (wt) from hemagglutinin__InfluenzaA__AHZ39877
augaagacuaucauugcuuugagcuacauucuaugucugguuuucgcucaaaaacuuccuggaaaugacaauagcacggcaacgcugugccuugggcaccaugcaguaccaaacggaacgauagugaaaacaaucacgaaugaccgaauugaaguuacuaaugcuacugagcugguucagaauuccucaauaggugaaauaugcgacaguccucaucagauccuugauggagaaaauugcacacuaauagaugcucuauugggagacccucagugugauggcuuucaaaauaagaaaugggaccuuuuuguugaacgaagcaaagccuacagcaacuguuacccuuaugaugugccggauuaugccucccuuaggucacuaguugccucauccggcacacuggaguuuaacaaugaaagcuucaauuggacuggagucacucaaaacggaacaaguucugcuugcauaaggagaucuaauaguaguuucuuuaguagauuaaauugguugacccacuuaaacuucaaauacccagcauugaacgugacuaugccaaacaaugaacaauuugacaaauuguacauuuggggaguucaccacccggguacggacaaggaccaaaucuuccuguaugcucaaucaucaggaagaaucacaguaucuaccaaaagaagccaacaagcuguaaucccaaauaucggaucuagacccagaauaaggaauaucccuagcagaauaagcaucuauuggacaauaguaaaaccgggagacauacuuuugauuaacagcacagggaaucuaauugcuccuagggguuacuucaaaauacgaagugggaaaagcucaauaaugagaucagaugcacccauuggcaaaugcaagucugaaugcaucacuccaaauggaagcauucccaaugacaaaccauuccaaaauguaaacaggaucacauacggggccugucccagauauguuaagcaaagcacucugaaauuggcaacaggaaugcgaaauguaccagagaaacaaacuagaggcauauuuggcgcaauagcggguuucauagaaaaugguugggagggaaugguggaugguugguacgguuucaggcaucaaaauucugagggaagaggacaagcagcagaucucaaaagcacucaagcagcaaucgaucaaaucaaugggaagcugaaucgauugaucgggaaaaccaacgagaaauuccaucagauugaaaaagaauucucagaaguagaagggagaauucaggaccuugagaaauauguugaggacacuaaaauagaucucuggucauacaacgcggagcuucuuguugcccuggagaaucaacauacaauugaucuaacugacucagaaaugaacaaacuguuugaaaaaacaaagaagcaacugagggaaaaugcugaggauaugggcaaugguuguuucaaaauauaccacaaaugugacaaugccugcauaggaucaaucagaaauggaacuuaugaccacaauguguacagggaugaagcauuaaacaaccgguuccagauuaagggaguugagcuuaagucaggguacaaagauuggauccuauggauuuccuuugccacaucauguuuuuugcuuuguguugcuuuguugggguucaucaugugggccugccaaaagggcaacauuaggugcaacauuugcauuuga

SEQ ID NO: 44178 - RNA, 1701 nt, Artificial Sequence; identical to SEQ ID NO: 41915
  derived and/or modified CDS sequence (wt) from hemagglutinin__InfluenzaA__AHZ39889

SEQ ID NO: 44179 - RNA, 1701 nt, Artificial Sequence
  derived and/or modified CDS sequence (wt) from hemagglutinin__InfluenzaA__AHZ39913
augaagacuaucauugcuuugagcuacauucuaugucuaguuuucgcccaaaaacuuccuggaaaugacaacagcacggcaacgcugugccuugggcaccaugcaguaccaaacggaacgauagugaaaacaaucacgaaugaccaaauugaaguuacuaaugcuacugagcugguucagaguuccucaacaggugaaauaugcgacaguccucaucagauccuugauggagaaaacugcacacuaauagaugcucuauugggagacccucagugugauggcuuccaaaauaagaaaugggaccuuuuuguugaacgaagcaaagccuacagcaacuguuacccuuaugaugugccggauuaugccucccuuaggucacuaguugccucauccggcacacuggaguuuaacaaugaaagcuucaauuggacuggagucacucaaaacggaacaagcucugcuugcauaaggagaucugauaguaguuucuuuaguagauugaauugguugacccacuuaaacuucaaauacccagcauugaacgugacuaugccaaacaaugaacaauuugacaaauuguacauuugggggguucaccacccggguacggacaaggaccaaaucuuccuguaugcucaagcaucaggaagaaucacaguaucuaccaaaagaagccaacaaucugugaucccgaauaucggaucuagacccagaauaaggaauaucccuagcagaauaagcaucuauuggacaauaguaaaaccgggagacauacuuuugauuaacagcacagggaaucuaauugcuccuagggguuacuucaaaauacaaagugggaaaagcucaauaaugagaucagaugcacccauuggaaaaugcaauucugaaugcaucacuccaaauggaagcauucccaaugacaaaccauuccaaaauguaaacaggaucacauacggggccuguccuagauauguuaagcaaaacacucugaaauuggcaacaggaaugcgaaauguaccagagaaacaaacuagaggcauauuuggcgcaauagcggguuucauagaaaaugguugggagggaaugguggaugguugguacgguuucaggcaucaaaauucugagggaagaggacaagcagcagaucucaaaagcacucaagcagcaaucgaucaaaucaaugggaagcugaauagauugaucgggaaaaccaacgagaaauuccaucagauugaaaaagaauucucagaagucgaagggagaauucaggaccuugagaaauauguugaggacacuaaaauagaucucuggucauacaacgcggagcuucuuguugcccuggaaaaccaacauacaauugaucuaacugacucagaaaugaacaaacuguuugaaaaaacaaagaagcaacugagagaaaaugcugaagauaugggcaauggcuguuucaaaauauaccacaaaugugacaaugccugcauaggaucaaucagaaauggaacuuauaaccacgauguauacagagaugaagcauuaaacaaccgguuccagaucaagggaguugagcugaagucaggguauaaagauuggauccuauggauuuccuuugccauaucauguuuuuugcuuuguguugcuuuguugggguucaucaugugggccugccaaaaaggcaacauuaggugcaacauuugcauuuga

SEQ ID NO: 44180 - RNA, 1701 nt, Artificial Sequence
  derived and/or modified CDS sequence (wt) from hemagglutinin__InfluenzaA__AHZ39925
augaagacuaucauugcuuugagcuacauucuaugucugguuuucgcucaaaaacuuccuggaaaugacaauagcacggcaacgcugugccuugggcaccaugcaguaccaaacggaacgauagugaaaacaaucacgaaugaccgaauugaaguuacuaaugcuacugagcugguucagaauuccucaauaggugaaauaugcgacaguccucaucagauccuugauggagaaaacuguacacuaauagaugcucuauugggagacccucagugugauggcuuucaaaauaagaaaugggaccuuuuuguugaacgaagcaaagccuacagcaacuguuacccuuaugaugugccggauuaugccucccuuaggucacuaguugccucauccggcacacuggaguuuaacaaugaaagcuucaauuggacuggagucacucaaaacggaacaaguucugcuugcauaaggagaucuaauaguaguuucuuuaguagauuaaauugguugacccacuuaaacuucaaauacccagcauugaacgugacuaugccaaacaaugaacaauuugacaaauuguacauuugggggguucaccacccggguacggacaaggaccaaaucuuccuguaugcucaaucaucaggaagaaucacaguaucuaccaaaagaagccaacaagcuguaaucccgaauaucggaucuagacccagaauaagggauaucccuagcagaauaagcaucuauuggacaauaguaaaaccaggagacauacuuuugauuaacagcacagggaaucuaauugcuccuagggguuacuucaaaauacgaagugggaaaagcucaauaaugagaucagaugcacccauuggcaaaugcaagucugaaugcaucacuccaaauggaagcauuccaaaugacaaaccauuccaaaauguaaacaggaucacauacggggccugucccagauauguuaagcaaagcacucugaaauuggcaacaggaaugcgaaauguaccagagaaacaaacuagaggcauauuuggcgcaauagcggguuucauagaaaaugguugggagggaaugguggaugguugguacgguuucaggcaucaaaauucugagggaagaggacaagcagcagaucucaaaagcacucaagcagcaaucgaucaaaucaaugggaagcugaaucgauugaucgggaaaaccaacgagaaauuccaucagauugaaaaagaauucucagaaguagaagggagaauucaggaccuugagaaauauguugaggacacuaaaauagaucucuggucauacaacgcggagcuucuuguugcccuggagaaccaacauacaauugaucuaacugacucagaaaugaacaaacuguuugaaaaaacaaagaagcaacugagggaaaaugcugaggauaugggcaaugguuguuucaaaauauaccacaaaugugacaaugccugcauaggaucaaucagaaauggaacuuaugaccacgauguauacagggaugaagcauuaaacaaccgguuccagaucaagggaguugagcugaagucaggguacaaagauuggauccuauggauuuccuuugccauaucauguuuuuugcuuuguguugcuuuguugggguucaucaugugggccugccaaaagggcaacauuaggugcaacauuugcauuuga

SEQ ID NO: 44181 - RNA, 1701 nt, Artificial Sequence; identical to SEQ ID NO: 41901
  derived and/or modified CDS sequence (wt) from hemagglutinin__InfluenzaA__AHZ39937

SEQ ID NO: 44182 - RNA, 1701 nt, Artificial Sequence
  derived and/or modified CDS sequence (wt) from hemagglutinin__InfluenzaA__AHZ39949
augaagacuaucauugcuuugagcuacauucuaugucugguuuucgcucaaaaacuuccuggaaaugacaauagcacggcaacgcugugccuugggcaccaugcaguaccaaacggaacgauagugaaaacaaucacgaaugaccgaauugaaguuacuaaugcuacugagcugguucagaauuccucaauaggugaaauaugcgacaguccucaucagauccuugauggagaaaacuguacacuaauagaugcucuauugggagacccucagugugauggcuuucaaaauaagaaaugggaccuuuuuguugaacgaagcaaagccuacagcaacuguuacccuuaugaugugccggauuaugccucccuuaggucacuaguugccucauccggcacacuggaguuuaacaaugaaagcuucaauuggacuggagucacucaaaacggaacaaguucugcuugcauaaggagaucuaauaguaguuucuuuaguagauuaaauugguugacccacuuaaacuucaaauacccagcauugaacgugacuaugccaaacaaugaacaauuugacaaauuguacauuugggggguccaccacccggguacggacaaggaccaaaucuuccuguaugcucaaucaucaggaagaaucacaguaucuaccaaaagaagccaacaagcuguaaucccgaauaucggaucuagacccagaauaaggaauaucccuagcagaauaagcaucuauuggacaauaguaaaaccaggagacauacuuuugauuaacagcacagggaaucuaauugcuccuagggguuacuucaaaauacgaagugggaaaagcucaauaaugagaucagaugcacccauuggcaaaugcaagucugaaugcaucacuccaaauggaagcauuccaaaugacaaaccauuccaaaauguaaacaggaucacauacggggccugucccagauauguuaagcaaagcacucugaaguuggcaacaggaaugcgaaauguaccagagaaacaaacuagaggcauauuuggcgcaauagcggguuucauagaaaaugguugggagggaaugguggaugguugguacgguuucaggcaucaaaauucugagggaagaggacaagcagcagaucucaaaagcacucaagcagcaaucgaucaaaucaaugggaagcugaaucgauugaucgggaaaaccaacgagaaauuccaucagauugaaaaagaauucucagaaguagaagggagaauucaggaccuugagaaauauguugaggacacuaaaauagaucucuggucauacaacgcggagcuucuuguugcccuggagaaccaacauacaauugaucuaacugacucagaaaugaacaaacuguuugaaaaaacaaagaagcaacugagggaaaaugcugaggauaugggcaaugguuguuucaaaauauaccacaaaugugacaaugccugcauaggaucaaucagaaauggaacuuaugaccacgauguauacagggaugaagcauuaaacaaccgguuccagaucaagggaguugagcugaagucaggguacaaagauuggauccuauggauuuccuuugccauaucauguuuuuugcuuuguguugcuuuguugggguucaucaugugggccugccaaaagggcaacauuaggugcaacauuugcauuuga

SEQ ID NO: 44183 - RNA, 1701 nt, Artificial Sequence; identical to SEQ ID NO: 41901
  derived and/or modified CDS sequence (wt) from hemagglutinin__InfluenzaA__AHZ39961

SEQ ID NO: 44184 - RNA, 1701 nt, Artificial Sequence
  derived and/or modified CDS sequence (wt) from hemagglutinin__InfluenzaA__AHZ39973
augaagacuaucauugcuuugagcuacauucuaugucugguuuucgcucaaaaacuuccuggaaaugacaauagcacggcaacgcugugccuugggcaccaugcaguaccaaacggaacgauagugaaaacaaucacgaaugaccgaauugaaguuacuaaugcuacugagcugguucagaauuccucaauaggugaaauaugcgacaguccucaucagauccuugauggagaaaacuguacacuaauagaugcucuauugggagacccucagugugauggcuuucaaaauaagaaaugggaccuuuuuguugaacgaagcaaagccuacagcaacuguuacccuuaugaugugccggauuaugccucccuuaggucacuaguugccucauccggcacacuggaguuuaacaaugaaagcuucaauuggacuggagucacucaaaacggaacaaguucugcuugcauaaggagaucuaauaguaguuucuuuaguagauuaaauugguugacccacuuaaacuucaaauacccagcauugaacgugacuaugccaaacaaugaacaauuugacaaauuguacauuugggggguucaccacccggguacggacaaggaccaaaucuuccuguaugcucaaucaucaggaagaaucacaguaucuaccaaaagaagccaacaagcuguaaucccgaauaucggaucuagacccagaauaaggaauaucccuagcagaauaagcaucuauuggacaauaguaaaaccaggagacauacuuuugauuaacagcacagggaaucuaauugcuccuagggguuacuucaaaauacgaagugggaaaagcucaauaaugagaucagaugcacccauuggcaaaugcaagucugaaugcaucacuccaaauggaagcauuccaaaugacaaaccauuccaaaauguaaacaggaucacauacggggccugucccagauauguuaagcaaagcacucugaaauuggcaacaggaaugcgaaauguaccagagaaacaaacuagaggcauauuuggcgcaauagcggguuucauagaaaaugguugggaaggaaugguggaugguugguacgguuucaggcaucaaaauucugagggaagaggacaagcagcagaucucaaaagcacucaagcagcaaucgaucaaaucaaugggaagcugaaucgauugaucgggaaaaccaacgagaaauuccaucagauugaaaaagaauucucagaaguagaagggagaauucaggaccuugagaaauauguugaggacacuaaaauagaucucuggucauacaacgcggagcuucuuguugcccuggagaaccaacauacaauugaucuaacugacucagaaaugaacaaacuguuugaaaaaacaaagaagcaacugagggaaaaugcugaggauaugggcaaugguuguuucaaaauauaccacaaaugugacaaugccugcauaggaucaaucagaaauggaacuuaugaccacgauguauacagggaugaagcauuaaacaaccgguuccagaucaagggaguugagcugaagucaggguacaaagauuggauccuauggauuuccuuugccauaucauguuuuuugcuuuguguugcuuuguugggguucaucaugugggccugccaaaagggcaacauuaggugcaacauuugcauuuga

SEQ ID NO: 44185 - RNA, 1701 nt, Artificial Sequence
  derived and/or modified CDS sequence (wt) from hemagglutinin__InfluenzaA__AHZ39985
augaagacuaucauugcuuugagcuacauucuaugucugguuuucgcucaaaaacuuccuggaaaugacaauagcacggcaacgcugugccuugggcaccaugcaguaccaaacggaacgauagugaaaacaaucacgaaugaccgaauugaaguuacuaaugcuacugagcugguucagaauuccucaauaggugaaauaugcgacaguccucaucagauccuugauggagaaaauugcacacuaauagaugcucuauugggagacccucagugugauggcuuucaaaauaagaaaugggaccuuuuuguugaacgaagcaaagccuacagcaacuguuacccuuaugaugugccggauuaugccucccuuaggucacuaguugccucauccggcacacuggaguuuaacaaugaaagcuucaauuggacuggagucacucaaaacggaacaaguucugcuugcauaaggagaucuaauaguaguuucuuuaguagauuaaauugguugacccacuuaaacuucaaauacccagcauugaacgugacuaugccaaacaaugaacaauuugacaaauuguacauuuggggaguucaccacccggguacggacaaggaccaaaucuuccuguaugcucaaucaucaggaagaaucacaguaucuaccaaaagaagccaacaagcuguaaucccaaauaucggaucuagacccagaauaaggaauaucccuagcagaauaagcaucuauuggacaauaguaaaaccgggagacauacuuuugauuaacagcacagggaaucuaauugcuccuagggguuacuucaaaauacgaagugggaaaagcucaauaaugagaucagaugcauccauuggcaaaugcaagucugaaugcaucacuccaaauggaagcauucccaaugacaaaccauuccaaaauguaaacaggaucacauacggggccugucccagauauguuaagcaaagcacucugaaauuggcaacaggaaugcgaaauguaccagagaaacaaacuagaggcauauuuggcgcaauagcggguuucauagaaaaugguugggagggaaugguggaugguugguacgguuucaggcaucaaaauucugagggaagaggacaagcagcagaucucaaaagcacucaagcagcaaucgaucaaaucaaugggaagcugaaucgauugaucgggaaaaccaacgagaaauuccaucagauugaaaaagaauucucagaaguagaagggagaauucaggaccuugagaaauauguugaggacacuaaaauagaucucuggucauacaacgcggagcuucuuguugcccuggagaaucaacauacaauugaucuaacugacucagaaaugaacaaacuguuugaaaaaacaaagaagcaacugagggaaaaugcugaggauaugggcaaugguuguuucaaaauauaccacaaaugugacaaugccugcauaggaucaaucagaaauggaacuuaugaccacaauguguacagggaugaagcauuaaacaaccgguuccagauuaagggaguugagcuuaagucaggguacaaagauuggauccuauggauuuccuuugccacaucauguuuuuugcuuuguguugcuuuguugggguucaucaugugggccugccaaaagggcaacauuaggugcaacauuugcauuuga

SEQ ID NO: 44186 - RNA, 1701 nt, Artificial Sequence; identical to SEQ ID NO: 41901
  derived and/or modified CDS sequence (wt) from hemagglutinin__InfluenzaA__AHZ39997

SEQ ID NO: 44187 - RNA, 1701 nt, Artificial Sequence
  derived and/or modified CDS sequence (wt) from hemagglutinin__InfluenzaA__AHZ40009
augaagacuaucauugcuuugagcuacauucuaugucugguuuucgcucaaaaacuuccuggaaaugacaauagcacggcaacgcugugccuugggcaccaugcaguaccaaacggaacgauagugaaaacaaucacgaaugaccgaauugaaguuacuaaugcuacugagcugguucagauuuccucaauaggugaaauaugcgacaguccucaucagauccuugauggagaaaacugcacacuaauagaugcucuauugggagacccucagugugauggcuuucaaaauaagaaaugggaccuuuuuguugaacgaagcaaagccuacagcaacuguuacccuuaugaugugccggauuaugccucccuuaggucacuaguugccucauccggcacacuggaguuuaacaaugaaagcuucaauuggacuggagucacucaaaacggaacaaguucugcuugcauaaggaaaucuaauaguaguuucuuuaguagauuaaauugguugacccacuuaaacuucaaauacccagcauugaacgugacuaugccaaacaaugaacaauuugacaaauuguacauuugggggguucaccacccggguacggacaaggaccaaaucuuccuguaugcucaaucaucaggaagaaucacaguaucuaccaaaagaagccaacaagcuguaaucccgaauaucggaucuagacccagaauaaggaauaucccuagcagaauaagcaucuauuggacaauaguaaaaccgggagacauacuuuugauuaacagcacagggaaucuaauugcuccuagggguuacuucaaaauacgaagugggaaaagcucaauaaugagaucagaugcacccauuggcaaaugcaagucugaaugcaucacuccaaauggaagcauucccaaugacaaaccauuccaaaauguaaacaggaucacauacggggccugucccagauauguuaagcaaagcacucugaaauuggcaacaggaaugcgaaauguaccagagaaacaaacuagaggcauauuuggcgcaauagcggguuucauagaaaaugguugggagggaaugguggaugguugguacgguuucaggcaucaaaauucugagggaagaggacaagcagcagaucucaaaagcacucaagcagcaaucgaucaaaucaaugggaagcugaaucgauugaucgggaaaaccaacgagaaauuccaucagauugaaaaagaauucucagaaguagaagggagaauucaggaccuugagaaauauguugaggacacuaaaauagaucucuggucauacaacgcggagcuucuuguugcccuggagaaccaacauacaauugaucuaacugacucagaaaugaacaaacuguuugaaaaaacaaagaagcaacugagggaaaaugcugaggauaugggcaaugguuguuucaaaauauaccacaaaugugacaaugccugcauaggaucaaucagaaauggaacuuaugaccacgauguauacagggaugaagcacuaaacaaccgguuccagaucaagggaguugagcugaagucaggguacaaagauuggauccuauggauuuccuuugccauaucauguuuuuugcuuuguguugcuuuguugggguucaucaugugggccugccaaaagggcaacauuaggugcaacauuugcauuuga

SEQ ID NO: 44188 - RNA, 1701 nt, Artificial Sequence; identical to SEQ ID NO: 41901
  derived and/or modified CDS sequence (wt) from hemagglutinin__InfluenzaA__AHZ40021

SEQ ID NO: 44189 - RNA, 1701 nt, Artificial Sequence
  derived and/or modified CDS sequence (wt) from hemagglutinin__InfluenzaA__AHZ40033
augaagacuaucauugcuuugagcuacauucuaugucugguuuucgcucaaaaacuuccuggaaaugacaauagcacggcaacgcugugccuugggcaccaugcaguaccaaacggaacgauagugaaaacaaucacgaaugaccgaauugaaguuacuaaugcuacugagcugguucagaauuccucaauaggugaaauaugcgacaguccucaucagauucuugauggagaaaacugcacacuaauagaugcucuauugggagacccucagugugauggcuuucaaaauaagaaaugggaccuuuuuguugaacgaagcaaagccuacagcaacuguuacccuuaugaugugccggauuaugccucccuuaggucacuaguugccucauccggcacacuggaguuuaacaaugaaagcuucaauuggacuggagucacucaaaacggaacaaguucugcuugcauaaggagaucuaauaguaguuucuuuaguagauuaaauugguugacccacuuaaacuucaaauacccagcauugaacgugacuaugccaaacaaugaacaauuugacaaauuguacauuugggggguucaccacccagguacggacaaggaccaaaucuuccuguaugcucaaucaucaggaagaaucacaguaucuaccaaaagaagccaacaagcuguaaucccaaauaucggaucuagacccagaauaaggaauaucccuagcagaauaagcaucuauuggacaauaguaaaaccgggagacauacuuuugauuaacagcacagggaaucuaauugccccuagggguuacuucaaaauacgaagugggaaaagcucaauaaugagaucagaugcacccauuggcaaaugcaagucugaaugcaucacuccaaauggaagcauucccaaugacaaaccauuccaaaauguaaacaggaucacauacggggccugucccagauauguuaagcaaagcacucugaaauuggcaacaggaaugcgaaauguaccagagaaacaaacuagaggcauauuuggcgcaauagcagguuucauagaaaaugguugggagggaaugguggaugguugguacgguuucaggcaucaaaauucugagggaagaggacaagcagcagaucucaaaagcacccaagcagcaaucgaucaaaucaaugggaagcugaaucgauugaucgggaaaaccaacgagaaauuccaucagauugaaaaagaauucucagaaguagaagggagaauucaggaccuugagaaauauguugaggacacuaaaauagaucucuggucauacaacgcggagcuucuuguugcccuggagaaccaacauacaauugaucuaacugacucagaaaugaacaaacuguuugaaaaaacaaagaagcaacugagggaaaaugcugaggauaugggcaaugguuguuucaaaauauaccacaaaugugacaaugccugcauaggaucaauaagaaauggaacuuaugaccacaauguguacagggaugaagcauuaaacaaccgguuccagaucaagggaguugagcugaagucaggguacaaagauuggauccuauggauuuccuuugccauaucauguuuuuugcuuuguguugcuuuguugggguucaucaugugggccugccaaaagggcaacauuaggugcaacauuugcauuuga

SEQ ID NO: 44190 - RNA, 1701 nt, Artificial Sequence; identical to SEQ ID NO: 41899
  derived and/or modified CDS sequence (wt) from hemagglutinin__InfluenzaA__AHZ40045

SEQ ID NO: 44191 - RNA, 1701 nt, Artificial Sequence
  derived and/or modified CDS sequence (wt) from hemagglutinin__InfluenzaA__AHZ40060
augaagacuaucauugcuuugagcuacauucuaugucugguuuucgcucaaaaacuuccuggaaaugacaauagcacggcaacgcugugccuugggcaccaugcaguaccaaacggaacgauagugaaaacaaucacgaaugaccgaauugaaguuacuaaugcuacugagcugguucagaauuccucaauaggugaaauaugcgacaguccucaucagauccuugauggagaaaacuguacacuaauagaugcucuauugggagacccucagugugauggcuuucaaaauaagaaaugggaccuuuuuguugaacgaagcaaagccuacagcaacuguuacccuuaugaugugccggauuaugccucccuuaggucacuaguugccucauccggcacacuggaguuuaacaaugaaagcuucaauuggacuggagucacucaaaacggaacaaguucugcuugcauaaggagaucuaauaguaguuucuuuaguagauugaauugguugacccacuuaaacuucaaauacccagcauugaacgugacuaugccaaacaaugaacaauuugacaaauuguacauuugggggguucaccacccggguacggacaaggaccaaaucuuccuguaugcucaaucaucaggaagaaucacaguaucuaccaaaagaagccaacaagcuguaaucccgaauaucggaucuagacccagaauaaggaauaucccuagcagaauaagcaucuauuggacaauaguaaaaccaggagacauacuuuugauuaacagcacagggaaucuaauugcuccuagggguuacuucaaaauacgaagugggaaaagcucaauaaugagaucagaugcacccauuggcaaaugcaagucugaaugcaucacuccaaauggaagcauuccaaaugacaaaccauuccaaaauguaaacaggaucacauacggggccugucccagauauguuaagcaaagcacucugaaauuggcaacaggaaugcgaaauguaccagagaaacaaacuagaggcauauuuggcgcaauagcggguuucauagaaaaugguugggagggaaugguggaugguugguacgguuucaggcaucaaaauucugagggaagaggacaagcagcagaucucaaaagcacucaagcagcaaucgaucaaaucaaugggaagcugaaucgauugaucgggaaaaccaacgagaaauuccaucagauugaaaaagaauucucagaaguagaagggagaauucaggaccuugagaaauauguugaggacacuaaaauagaucucuggucauacaacgcggagcuucuuguugcccuggagaaccaacauacaauugaucuaacugacucagaaaugaacaaacuguuugaaaaaacaaagaagcaacugagggaaaaugcugaggauaugggcaaugguuguuucaaaauauaccacaaaugugacaaugccugcauaggaucaaucagaaauggaacuuaugaccacgauguauacagggaugaagcauuaaacaaccgguuccagaucaagggaguugagcugaagucaggguacaaagauuggauccuauggauuuccuuugccauaucauguuuuuugcuuuguguugcuuuguugggguucaucaugugggccugccaaaagggcaacauuaggugcaacauuugcauuuga

SEQ ID NO: 44192 - RNA, 1701 nt, Artificial Sequence; identical to SEQ ID NO: 41901
  derived and/or modified CDS sequence (wt) from hemagglutinin__InfluenzaA__AHZ40072

SEQ ID NO: 44193 - RNA, 1701 nt, Artificial Sequence
  derived and/or modified CDS sequence (wt) from hemagglutinin__InfluenzaA__AHZ40084
augaagacuaucauugcuuugagcuacauucuaugucugguuuucgcucaaaaacuuccuggaaaugacaauagcacggcaacgcugugccuuggacaccaugcaguaccaaacggaacgauagugaaaacaaucacgaaugaccgaauugaaguuacuaaugcuacugagcugguucagaauuccucaauaggugaaauaugcgacaguccucaucagauccuugauggagaaaacuguacacuaauagaugcucuauugggagacccucagugugauggcuuucaaaauaagaaaugggaccuuuuuguugaacgaagcaaagccuacagcaacuguuacccuuaugaugugccggauuaugccucccuuaggucacuaguugccucauccggcacacuggaguuuaacaaugaaagcuucaauuggacuggagucacucaaaacggaacaaguucugcuugcauaaggagaucuaauaguaguuucuuuaguagauuaaauugguugacccacuuaaacuucaaauacccagcauugaacgugacuaugccaaacaaugaacaauuugacaaauuguacauuugggggguucaccacccggguacggacaaggaccaaaucuuccuguaugcucaaucaucaggaagaaucacaguaucuaccaaaagaagccaacaagcuguaaucccgaauaucggaucuagacccagaauaaggaauaucccuagcagaauaagcaucuauuggacaauaguaaaaccaggagacauacuuuugauuaacagcacagggaaucuaauugcuccuagggguuacuucaaaauacgaagugggaaaagcucaauaaugagaucagaugcacccauuggcaaaugcaagucugaaugcaucacuccaaauggaagcauuccaaaugacaaaccauuccaaaauguaaacaggaucacauacggggccugucccagauauguuaagcaaagcacucugaaauuggcaacaggaaugcgaaauguaccagagaaacaaacuagaggcauauuuggcgcaauagcggguuucauagaaaaugguugggagggaaugguggaugguugguacgguuucaggcaucaaaauucugagggaagaggacaagcagcagaucucaaaagcacucaagcagcaaucgaucaaaucaaugggaagcugaaucgauugaucgggaaaaccaacgagaaauuccaucagauugaaaaagaauucucagaaguagaagggagaauucaggaccuugagaaauauguugaggacacuaaaauagaucucuggucauacaacgcggagcuucuuguugcccuggagaaccaacauacaauugaucuaacugacucagaaaugaacaaacuguuugaaaaaacaaagaagcaacugagggaaaaugcugaggauaugggcaaugguuguuucaaaauauaccacaaaugugacaaugccugcauaggaucaaucagaaauggaacuuaugaccacgauguauacagggaugaagcauuaaacaaccgguuccagaucaagggaguugagcugaagucaggguacaaagauuggauccuauggauuuccuuugccauaucauguuuuuugcuuuguguugcuuuguugggguucaucaugugggccugccaaaagggcaacauuaggugcaacauuugcauuuga

SEQ ID NO: 44194 - RNA, 1701 nt, Artificial Sequence
  derived and/or modified CDS sequence (wt) from hemagglutinin__InfluenzaA__AHZ40096
augaagacuaucauugcuuugagcuacauucuaugucugguuuucgcucaaaaacuuccuggaaaugacaauagcacggcaacgcugugccuugggcaccaugcaguaccaaacggaacgauagugaaaacaaucacgaaugaccgaauugaaguuacuaaugcuacugagcugguucagaauuccucaauaggugaaauaugcgacagcccucaucagauccuugauggagaaaacuguacacuaauagaugcucuauugggagacccucagugugauggcuuucaaaauaagaaaugggaccuuuuuguugaacgaagcaaagccuacagcaacuguuacccuuaugaugugccggauuaugccucccuuaggucacuaguugccucauccggcacacuggaguuuaacaaugaaagcuucaauuggacuggagucacucaaaacggaacaagcucugcuugcauaaggagaucuaauaguaguuucuuuaguagauuaaauugguugacccacuuaaacuucaaauacccagcauugaacgugacuaugccaaacaaugaacaauuugacaaauuguacauuugggggguucaccacccggguacggacaaggaccaaaucuuccuguaugcucaaucaucaggaagaaucacaguaucuaccaaaagaagccaacaagcuguaaucccgaauaucggaucuagacccagaauaaggaauaucccuagcagaauaagcaucuauuggacaauaguaaaaccaggagacauacuuuugauuaacagcacagggaaucuaauugcuccuagggguuacuucaaaauacgaagugggaaaagcucaauaaugagaucagaugcacccauuggcaaaugcaagucugaaugcaucacuccaaauggaagcauuccaaaugacaaaccauuccaaaauguaaacaggaucacauacggggccugucccagauauguuaagcaaagcacucuaaaauuggcaacaggaaugcgaaauguaccagagaaacaaacuagaggcauauuuggcgcaauagcggguuucauagaaaaugguugggagggaaugguggaugguugguacgguuucaggcaucaaaauucugagggaagaggacaagcagcagaucucaaaagcacucaagcagcaaucgaucaaaucaaugggaagcugaaucgauugaucgggaaaaccaacgagaaauuccaucagauugaaaaagaauucucagaaguagaagggagaauucaggaccuugagaaauauguugaggacacuaaaauagaucucuggucauacaacgcggagcuucuuguugcccuggagaaccaacauacaauugaucuaacugacucagaaaugaacaaacuguuugaaaaaacaaagaagcaacugagggaaaaugcugaggauaugggcaaugguuguuucaaaauauaccacaaaugugacaaugcuugcauaggaucaaucagaaauggaacuuaugaccacgauguauacagggaugaagcauuaaacaaccgguuccagaucaagggaguugagcugaagucaggguacaaagauuggauccuauggauuuccuuugccauaucauguuuuuugcuuuguguugcuuuguugggguucaucaugugggccugccaaaagggcaacauuaggugcaacauuugcauuuga

SEQ ID NO: 44195 - RNA, 1701 nt, Artificial Sequence
  derived and/or modified CDS sequence (wt) from hemagglutinin__InfluenzaA__AHZ40108
augaagacuaucauugcuuugagcuacauucuaugucuaguuuucgcccaaaaacuuccuggaaaugacaacagcacggcaacgcugugccuugggcaccaugcaguaccaaacggaacgauagugaaaacaaucacgaaugaccaaauugaaguuacuaaugcuacugagcugguucagaguuccucaacaggugaaauaugcgacaguccucaucagauccuugauggagaaaacugcacacuaauagaugcucuauugggagacccucagugugauggcuuccaaaauaagaaaugggaccuuuuuguugaacgaagcaaagccuacagcaacuguuacccuuaugaugugccggauuaugccucccuuaggucacuaguugccucauccggcacacuggaguuuaacaaugaaaguuucaauuggacuggagucacucaaaacggaacaagcucugcuugcauaaggagaucugauaguaguuucuuuaguagauugaauugguugacccacuuaaacuucaaauacccagcauugaacgugacuaugccaaacaaugaacaauuugacaaauuguacauuugggggguucaccacccggguacggacaaggaccaaaucuuccuguaugcucaagcaucaggaagaaucacaguaucuaccaaaagaagccaacaaucugugaucccgaauaucggaucuagacccagaauaaggaauaucccuagcagaauaagcaucuauuggacaauaguaaaaccgggagacauacuuuugauuaacagcacagggaaucuaauugcuccuagggguuacuucaaaauacaaagugggaaaagcucaauaaugagaucagaugcacccauuggaaaaugcaauucugaaugcaucacuccaaauggaagcauucccaaugacaaaccauuccaaaauguaaacaggaucacauacggggccuguccuagauauguuaagcaaaacacucugaaauuggcaacaggaaugcgaaauguaccagagaaacaaacuagaggcauauuuggcgcaauagcggguuucauagaaaaugguugggagggaaugguggaugguugguacgguuucaggcaucaaaauucugagggaagaggacaagcagcagaucucaaaagcacucaagcagcaaucgaucaaaucaaugggaagcugaauagauugaucgggaaaaccaacgagaaauuccaucagauugaaaaagaauucucagaagucgaagggagaauucaggaccuugagaaauauguugaggacacuaaaauagaucucuggucauacaacgcggagcuucuuguugcccuggaaaaccaacauacaauugaucuaacugacucagaaaugaacaaacuguuugaaaaaacaaagaagcaacugagagaaaaugcugaagauaugggcaauggcuguuucaaaauauaccacaaaugugacaaugccugcauaggaucaaucagaaauggaacuuauaaccacgauguauacagagaugaagcauuaaacaaccgguuccagaucaagggaguugagcugaagucaggguacaaagauuggauccuauggauuuccuuugccauaucauguuuuuugcuuuguguugcuuuguugggguucaucaugugggccugccaaaaaggcaacauuaggugcaacauuugcauuuga

SEQ ID NO: 44196 - RNA, 1701 nt, Artificial Sequence; identical to SEQ ID NO: 44172
  derived and/or modified CDS sequence (wt) from hemagglutinin__InfluenzaA__AHZ40120

SEQ ID NO: 44197 - RNA, 1701 nt, Artificial Sequence
  derived and/or modified CDS sequence (wt) from hemagglutinin__InfluenzaA__AHZ40130
augaagacuaucauugcuuugagcuacauucuaugucugguuuucgcucaaaaacuuccuggaaaugacaauagcacggcaacgcugugccuugggcaccaugcaguaccaaacggaacgauagugaaaacaaucacgaaugaccgaauugaaguuacuaaugccacugagcugguucagaauuccucaauaggugaaauaugcgacaguccucaucagauccuugauggagaaaacugcacacuaauagaugcucuauugggagacccucagugugauggcuuucaaaauaagaaaugggaccuuuuuguugaacgaagcaaagccuacagcaacuguuacccuuaugaugugccggauuaugccucccuuaggucacuaguugccucauccggcacacuggaguuuaacaaugaaagcuucaauuggacuggagucacucaaaacggaacaaguucugcuugcauaaggagaucuaauaguaguuucuuuaguagauuaaauugguugacccacuuaaacuucaaauacccagcauugaacgugacuaugccaaacaaugaacaauuugacaaauuguacauuugggggguucaccacccggguacggacaaggaccaaaucuuccuguaugcucaaucaucaggaagaaucacaguaucuaccaaaagaagccaacaagcuguaaucccaaauaucggaucuagacccagaauaaggaauaucccuagcagaauaagcaucuauuggacaauaguaaaaccgggagacauacuuuugauuaacagcacagggaaucuaauugcuccuagggguuacuucaaaauacgaagugggaaaagcucaauaaugagaucagaugcacccauuggcaaaugcaagucugaaugcaucacuccaaauggaagcauucccaaugacaaaccauuccaaaauguaaacaggauuacauacggggccugucccagauauguuaagcaaagcacccugaaauuggcaacaggaaugcgaaauguaccagagaaacaaacuagaggcauauuuggugcaauagcggguuucauagaaaaugguugggagggaaugguggaugguugguacgguuucaggcaucaaaauucugagggaagaggacaagcagcagaucucaaaagcacucaagcagcaaucgaucaaaucaaugggaagcugaaucgauugaucgggaaaaccaacgagaaauuccaucagauugaaaaagaauucucagaaguagaagggagaauucaggaccuugagaaauauguugaggacacuaaaauagaucucuggucauacaacgcggagcuucuuguugcccuggagaaccaacauacaauugaucuaacugacucagaaaugaacaaacuguuugaaaaaacaaagaagcaacugagggaaaaugcugaggauaugggcaaugguuguuucaaaauauaccacaaaugugacaaugccugcauaggaucaaucagaaauggaacuuaugaccacaauguguacagggaugaagcauuaaacaaccgguuccagaucaagggaguugagcugaagucaggguacaaaaauuggauccuauggauuuccuuugccauaucauguuuuuugcuuuguguugcuuuguugggguucaucaugugggcaugccaaaagggcaacauuaggugcaacauuugcauuuga

SEQ ID NO: 44198 - RNA, 1701 nt, Artificial Sequence
  derived and/or modified CDS sequence (wt) from hemagglutinin__InfluenzaA__AHZ40142
augaagacuaucauugcuuugagcuacauucuaugucugguuuucgcucaaaaacuuccuggaaaugacaauagcacggcaacgcugugccuugggcaccaugcaguaccaaacggaacgauagugaaaacaaucacgaaugaccgaauugaaguuacuaaugcuacugagcugguucagaauuccucaauaggugaaauaugcgacaguccucaucaaauccuugauggagaaaacugcacgcuaauagaugcucuauugggagacccucagugugauggcuuucaagauaagaaaugggaccuuuuuguugaacgaagcaaagccuacagcaacuguuacccuuaugaugugccggauuaugccucccuuaggucacuaguugccucauccggcacacuggaguuuaacaaugaaaacuucaauuggacuggagucacucaaaacggaacaaguucugcuugcauaaggagaucuaauaguaguuucuuuaguagauuaaauugguugacccacuuaaacuucaaauacccagcauugaacgugacuaugccaaacaaugaacaauuugacaaauuguacauuugggggguucaccacccgggcacggacaaggaccaaaucuuucuguaugcucaaucaucaggaagaaucacaguaucuaccaaaagaagccaacaagcuguaaucccgaauaucggaucuagacccagaauaaggaauaucccuagcagaauaagcaucuauuggacaauaguaaaaccgggagacauacuuuugauuaacagcacagggaaucuaauugcuccuagggguuacuucaaaauacgaagugggaaaagcucaauaaugagaucagaugcacccauuggcaaaugcaagucugaaugcaucacuccaaauggaagcauucccaaugacagaccauuccaaaauguaaacaggaucacauacggggccugucccagauauguuaagcaaagcacucugaaauuggcaacaggaaugcgaaauguaccagagaaacaaacuagaggcauauuuggcgcaauagcggguuucauagaaaaugguugggagggaaugguggaugguugguacgguuucaggcaucaaaauucugagggaagaggacaagcagcagaucucaaaagcacucaagcagcaaucgaucaaaucaaugggaagcugaaucgauugaucgggaaaaccaacgagaaauuccaucagauugaaaaagaauucucagaaguagaagggagaauucaggaccuugagaaauauguugaggacacuaaaauagaucucuggucauacaacgcggagcuucuuguugcccuggagaaccaacauacaauugaucuaacugacucagaaaugaacaaacuguuugaaaaaacaaagaagcaacugagggaaaaugcugaggauaugggcaaugguuguuucaaaauauaccacaaaugugacaaugccugcauaggaucaaucagaaauggaacuuaugaccacgauguguacagggaugaagcauugaacaaccgguuccagaucaagggaguugagcugaagucaggguacaaagauuggauccuauggauuuccuuugccauaucauguuuuuugcuuuguguugcuuuguugggguucaucaugugggccugccaaaagggcaacauuaggugcaacauuugcauuuga

SEQ ID NO: 44199 - RNA, 1701 nt, Artificial Sequence
  derived and/or modified CDS sequence (wt) from hemagglutinin__InfluenzaA__AHZ40154
augaagacuaucauugcuuugagcuacauucuaugucuggguuucgcucaagaacuuccuggaaaugacaacagcacggcaacguugugccuugggcaccaugcagugccaaacggaacgauagugaaaacaaucacgaaugaccaaauugaaguuacuaaugcuacugagcugguucagaguuccucaacaggugaaauaugcaacaguccucaucagauccuugauggagaaaacugcacacuaauagaugcucuauugggagacccucagugugauggcuuccaaaacaagaaaugggaccuuuuuguugaacgaagcaaagcccacagcaacuguuacccuuaugaugugccggauuaugccucccuuaggucacuaguugccucauccggcacacuggaguuuaacaaugaaagcuucaauuggacuggagucacucaaaacggaacaagcucugcuugcauaaggggaucuaauaauaguuucuuuaguagauugaauugguuaacccacuuaaacuucaaauacccagcauugaacgugacuaugccaaacaaugaacaauuugacaaauuguacauuugggggguucaccacccggguacggacaaggaccaaaucuuccuguaugcucaagcaucaggaagaaucaccguaucuaccaaaagaagccaacaagcuguaauuccgaauaucggaucuagacccagaguaaggaauaucccuagcagaguaagcaucuauuggacaauaguaaaaccgggagacaugcuuuugauuaacagcacagggaaucuaauugcuccuagggguuacuucaaaauacgaagugggaaaagcucaauaaugagaucagaugcacccauuggcaaaugcaauucugcaugcaucacuccaaauggaagcauucccaaugacaaaccauuccaaaauguaaacaggauaacauacggggccugucccagauauguuaagcaaaacacucugaaauuggcaacaggaaugagaaauguaccagagaaacaaacuagaggcauauuuggcgcaauagcggguuucauagaaaaugguugggaaggaaugguggaugguugguacgguuucaggcaucaaaauucugagggaaggggacaagcagcagaucucaaaagcacucaagcagcaaucgaucaaaucaaugggaagcugaauagauugaucgggaaaaccaacgagaaauuccaucagauugaaaaagaauucucagaagucgaagggagaauucaggaccuugagaaauauguugaggacacuaaaauagaucucuggucauacaacgcggagcuucuuguugcccuggagaaccaacacacaauugaucuaacugacucagaaaugaacaaacuguuugaaaaaacaaagaagcaacugagggaaaaugcugaggauaugggcaaugguuguuucaaaauauaccacaaauguaacaaugccugcauaggaucaaucagaaauggaacuuaugaccacgauguguacagagaugaagcauuaaacaaccgauuccagaucaagggaguugagcugaagucaggguacaaagauuggauccuauggauuuccuuugccauaucauguuuuuugcuuuguguugcuuuguugggguucaucaugugggccugccaaaaaggcaacauuaggugcaacauuugcauuuga

SEQ ID NO: 44200 - RNA, 1701 nt, Artificial Sequence
  derived and/or modified CDS sequence (wt) from hemagglutinin__InfluenzaA__AHZ40166
augaaggcaauacuaguaguucugcuauacacauuugcaaccgcaaaugcagacacauuauguauagguuaucaugcgaacaauucaacagacacuguagacacaguacuagaaaagaauguaacaguaacacacucuguuaaccuucuagaagacaagcauaacgggaaacuaugcaaacuaagagggguagccccauugcauuuggguaaauguaacauugcuggcuggauccugggaaauccagagugugaaucacucuccacagcaaguucaugguccuacauuguggaaacaucuaguucagacaauggaacguguuacccaggagauuucaucaauuaugaggagcuaagagagcaauugagcucagugucaucauuugaaagguuugagauauuccccaagacaaguucauggcccaaucaugacucgaacaaaggugugacggcagcauguccucaugcuggagcaaaaagcuucuacaaaaauuuaauauggcuaguuaaaaaaggaaauucauacccaaagcucagcaaauccuacauuaaugauaaagggaaagaaguccucgugcuguggggcauucaccauccaucuacuacugcugaccaacaaagucucuaucagaaugcagaugcauauguuuuuguggggacaucaagauacagcaagaaguucaagccggaaauagcaauaagacccaaagugagggaucaagaagggagaaugaacuauuacuggacacuaauagagccgggagacaaaauaacauucgaagcaacuggaaaucuagugguaccgagauaugcauucgcaauggaaagaaaugcuggaucugguauuaucauuucagauacaccaguccacgauugcaauacaacuugucagacacccgagggugcuauaaacaccagccucccauuucagaauauacauccgaucacaauuggaagauguccaaaguauguaaaaagcacaaaauugagacuggccacaggauugaggaaugucccgucuauucaaucuagaggccuauucggggccauugccggcuucauugaagggggguggacagggaugguagauggaugguacgguuaucaccaucaaaaugagcaggggucaggauaugcagccgaccugaagagcacacaaaaugccauugacaagauuacuaacaaaguaaauucuguuauugaaaagaugaauacacaguucacagcaguggguaaagaguucaaccaucuggaaaaaagaauagagaauuuaaauaaaaaaguugaugaugguuuccuggacauuuggacuuacaaugccgaacuguugguucuauuggaaaaugaaagaacuuuggacuaccacgauucaaaugugaagaacuuguaugaaaagguaagaaaccaguuaaaaaacaaugccaaggaaauuggaaacggcugcuuugaauuuuaccacaaaugcgauaacacgugcauggaaagugucaaaaaugggacuuaugacuacccaaaauacucagaggaagcaaaauuaaacagagaaaaaauagaugggguaaagcuggaaucaacaaggauuuaccagauuuuggcgaucuauucaacugucgccaguucauugguacugguagucucccugggggcaaucaguuucuggaugugcucuaaugggucucuacaguguagaauauguauuuaa

SEQ ID NO: 44201 - RNA, 1701 nt, Artificial Sequence; identical to SEQ ID NO: 41901
  derived and/or modified CDS sequence (wt) from hemagglutinin__InfluenzaA__AHZ40177

SEQ ID NO: 44202 - RNA, 1701 nt, Artificial Sequence
  derived and/or modified CDS sequence (wt) from hemagglutinin__InfluenzaA__AHZ40189
augaagacuaucauugcuuugagcuacauucuaugucugguuuucgcucaaaaacuuccuggaaaugacaauagcacggcaacgcugugccuugggcaccaugcaguaccaaacggaacgauagugaaaacaaucacgaaugaccgaauugaaguuacuaaugcuacugagcugguucagaauuccucaauaggugaaauaugcgacaguccucaucagauccuugauggagaaaacuguacacuaauagaugcucuauugggagacccucagugugauggcuuucaaaauaagaaaugggaccuuuuuguugaacgaagcaaagccuacagcaacuguuacccuuaugaugugccggauuaugccucccuuaggucacuaguugccucauccggcacacuggaguuuaacaaugaaagcuucaauuggacuggagucacucaaaacggaacaaguucugcuugcauaaggagaucuaauaguaguuucuuuaguagauuaaauugguugacccacuuaaacuucaaauacccagcauugaacgugacuaugccaaacaacgaacaauuugacaaauuguacauuugggggguucaccacccggguacggacaaggaccaaaucuuccuguaugcucaaucaucaggaagaaucacaguaucuaccaaaagaagccaacaagcuguaaucccgaauaucggaucuagacccagaauaaggaauaucccuagcagaauaagcauauauuggacaauaguaaaaccaggagacauacuuuugauuaacagcacagggaaucuaauugcuccuagggguuacuucaaaauacgaagugggaaaagcucaauaaugagaucagaugcacccauuggcaaaugcaagucugaaugcaucacuccaaauggaagcauuccaaaugacaaaccauuccaaaauguaaacaggaucacauacggggccugucccagauauguuaagcaaagcacucugaaauuggcaacaggaaugcgaaacguaccagagaaacaaacuagaggcauauuuggcgcaauagcggguuucauagaaaaugguugggagggaaugguggaugguugguacgguuucaggcaucaaaauucugagggaagaggacaagcagcagaucucaaaagcacucaagcagcaaucgaucaaaucaaugggaagcugaaucgauugaucgggaaaaccaacgagaaauuccaucagauugaaaaagaauucucagaaguagaagggagaauucaggaccuugagaaauauguugaggacacuaaaauagaucucuggucauacaacgcggagcuucuuguugcccuggagaaccaacauacaauugaucuaacugacucagaaaugaacaaacuguuugaaaaaacaaagaagcaacugagggaaaaugcugaggauaugggcaaugguuguuucaaaauauaccacaaaugugacaaugccugcauaggaucaaucagaaauggaacuuaugaccacgauguauacagggaugaagcauuaaacaaccgguuccagaucaagggaguugagcugaagucaggguacaaagauuggauccuauggauuuccuuugccauaucauguuuuuugcuuuguguugcuuuguugggguucaucaugugggccugccaaaagggcaacauuaggugcaacauuugcauuuga

SEQ ID NO: 44203 - RNA, 1701 nt, Artificial Sequence; identical to SEQ ID NO: 41901
  derived and/or modified CDS sequence (wt) from hemagglutinin__InfluenzaA__AHZ40201

SEQ ID NO: 44204 - RNA, 1701 nt, Artificial Sequence
  derived and/or modified CDS sequence (wt) from hemagglutinin__InfluenzaA__AHZ40213
augaagacuaucauugcuuugagcuacauucuaugucugguuuucgcucaaaaacuuccuggaaaugacaauagcacggcaacgcugugccuugggcaccaugcaguaccaaacggaacgauagugaaaacaaucacgaaugaccgaauugaaguuacuaaugcuacugagcuaguucagaauuccucaauaggugaaauaugcgacaguccucaucagauccuugauggagaaaacugcacacuaauagaugcucuauugggagacccucagugugauggcuuucaaaauaagaaaugggaccuuuuuguugaacgaagcaaagccuacagcaacuguuacccuuaugaugugccggauuaugccucccuuaggucacuaguugccucauccggcacacuggaguuuaacaaugaaagcuucaauugggcuggagucacucaaaacggaacaaguucugcuugcauaaggggaucuaauaguaguuucuuuaguagauuaaauugguugacccacuuaaacuucaaauacccagcauugaacgugacuaugccaaacaaugaacaauuugacaaauuguacauuugggggguucaccacccggguacggacaaggaccaaaucuuccuguaugcucaaucaucaggaagaaucacaguaucuaccaaaagaagccaacaagcuguaaucccgaauaucggaucuagacccagaauaaggaauaucccuagcagaauaagcaucuauuggacaauaguaaaaccgggagacauacuuuugauuaacagcacagggaaucuaauugcuccuagggguuacuucaaaauacgaagugggaaaagcucaauaaugagaucagaugcacccauuggcaaaugcaagucugaaugcaucacuccaaauggaagcauucccaaugacaaaccauuccaaaauguaaacaggaucacauacggggccugucccagauauguuaagcaaagcacucugaaauuggcaacaggaaugcgaaauguaccagagaaacaaacuagaggcauauuuggcgcaauagcggguuucauagaaaaugguugggagggaaugauggaugguugguacgguuucaggcaucaaaauucugagggaagaggacaagcagcagaucucaaaagcacucaagcagcaaucgaucaaaucaaugggaagcugaaucgauugaucgggaaaaccaacgagaaauuccaucagauugaaaaagaauucucagaaguagaagggagaauucaggaccuugagaaauauguugaggacacaaaaauagaucucuggucauacaacgcggagcuucuuguugcccuggagaaccaacauacaauugaucuaacugacucagaaaugaacaaacuguuugaaaaaacaaagaagcaacugagggaaaaugcugaggauaugggcaaugguuguuucaaaauauaccacaaaugugacaaugccugcauaggaucaaucagaaauggaacuuaugaccacgauguauacagggaugaagcauuaaacaaccgguuccagaucaagggaguugagcugaagucaggguacaaagauuggauccuauggauuuccuuugccauaucauguuuuuugcuuuguguugcuuuguugggguucaucaugugggccugccaaaagggcaacauuaggugcaacauuugcauuuga

SEQ ID NO: 44205 - RNA, 1701 nt, Artificial Sequence
  derived and/or modified CDS sequence (wt) from hemagglutinin__InfluenzaA__AHZ40225
augaagaccaucauugcuuugagcuacauucuaugucuaguuuuugcucaagaacuuccuggaaaugacgacagcacggcaacgcugugccuugggcaccaugcagugccaaacggaacgauagugaaaacaaucacgaaugaccaaauugaaguuacuaaugcuacugaacugguucagaguuccucaacaggugaaauaugcaacaguccucaucagauccuugauggagaaaacugcacacuaauagaugcucuauugggagacccucagugugaugguuuccaaaacaagaaaugggaccuuuuuguugaacgaagcaaagcccacagcaacuguuacccuuaugaugugccggauuaugccucccuuaggucacuaguugccucauccggcacacuggaguuuaacaaugaaagcuucaauuggacuggagucacucaaaacggaacaagcucugcuugcauaaggagaucuaauaauaguuucuuuaguagauugaauugguugacccacuuaaacuucaaauacccagcauugaacgugacuaugccaaacaaugaacaauuugacaaauuguacauuugggggguucaccacccggguacggacaaggaccaaaucuuccuguaugcucaagcaucaggaagaaucacaguaucuaccaaaagaagccaacaagcuguaauuccgaauaucggaucuagacccagaguaaggaauaucccuagcagaguaagcaucuauuggacaauaguaaaaccgggagacauacuuuugauuaacagcacagggaaucuaauugcuccuagggguuacuucaaaauacgaagugggaaaagcucaauaaugagaucagaugcacccauuggcaaaugcaauucugcaugcaucacuccaaauggaagcauucccaaugacaaaccauuccaaaauguaaacaggaucacauacggggccugucccagauaugucaagcaaaacacucugaaauuggcaacaggaaugagaaauguaccagagaaacaaacuagaggcauauuuggcgcaauagcggguuucauagaaaaugguugggagggaaugguggaugguugguacgguuucaggcaucaaaauucugagggaaggggacaagcagcagaucucaaaagcacucaagcagcaaucgaucaaaucaaugggaagcugaauagauugaucgggaaaaccaacgagaaauuccaucagauugaaaaagaauucucagaagucgaagggagaauucaggaccuugagaaauauguugaggacacuaaaauagaucucuggucauacaacgcggagcuucuuguugcccuggagaaccaacacacaauugaucuaacugacucagaaaugaacaaacuguuugaaaaaacaaagaagcaacugagggaaaaugcugaggauaugggcaaugguuguuucaaaauauaccacaaaugugacaaugccugcauaggaucaaucagaaauggaacuuaugaucacgauguguacagagaugaagcauuaaacaaccgauuccagaucaagggaguugagcugaagucaggguacaaagauuggauccuauggauuuccuuugccauaucauguuuuuuacuuuguguugcuuuguugggguucaucaugugggccugccaaaaaggcaacauuaggugcaacauuugcauuuga

SEQ ID NO: 44206 - RNA, 1701 nt, Artificial Sequence
  derived and/or modified CDS sequence (wt) from hemagglutinin__InfluenzaA__AHZ40237
augaagacuaucauugcuuugagcuacauucuaugucugguuuucgcucaaaaacuuccuggaaaugacaauagcacggcaacgcugugccuugggcaccaugcaguaccaaacggaacgauagugaaaacaaucacgaaugaccaaauugaaguuacuaaugcuacugagcugguucagaauuccucaauaggugaaauaugcgacaguccucaucagauccuugauggagaaaacugcacacuaauagaugcucuauugggagacccucagugugauggcuuucaaaauaagaaaugggaccuuuuuguugaacgaagcaaagccuacagcaacuguuacccuuaugaugugccggauuaugccucccuuaggucacuaguugccucauccggcacacuggaguuuaacaaugaaagcuucaauugggcuggagucacucaaaacggaacaaguucugcuugcauaaggggaucuaauaguaguuucuuuaguagauuaaauugguugacccacuuaaacuucaaguacccagcauugaacgugacuaugccaaacaaugaacaauuugacaaauuguacauuugggggguucaccacccggguacggacaaggaccaaaucuuccuguaugcucaaucaucaggaagaaucacaguaucuaccaaaagaagccaacaagcuguaaucccgaauaucggaucuagacccagaauaaggaauaucccuagcagaauaagcaucuauuggacaauaguaaaaccgggagacauacuuuugauuaacagcacagggaaucuaauugcuccuagggguuacuucaaaauacgaagugggaaaagcucaauaaugagaucagaugcacccauuggcaaaugcaagucugaaugcaucacuccaaauggaagcauucccacugacaaaccauuccaaaauguaaacaggaucacauacggggccugucccagauauguuaagcaaagcacucugaaauuggcaacaggaaugcgaaauguaccagagaaacaaacuagaggcauauuuggcgcaauagcggguuucauagaaaaugguugggagggaaugguggaugguugguacgguuucaggcaucaaaauucugagggaagaggacaagcagcagaucucaaaagcacucaagcagcaaucgaucaaaucaaugggaagcugaaucgauugaucgggaaaaccaacgagaaauuccaucagauugagaaagaauucucagaaguagaagggagaauucaggaccuugagaaauauguugaggacacaaaaauagaucucuggucauacaacgcagagcuucuuguugcccuggagaaccaacauacaauugaucuaacugacucagaaaugaacaaacuguuugaaaaaacaaagaagcaacugagggaaaaugcugaggauaugggcaaugguuguuucaaaauauaccacaaaugugacaaugccugcauaggaucaaucagaaauggaacuuaugaccacgauguauacagggaugaagcauuaaacaaccgguuccagaucaagggaguugagcugaagucaggguacaaagauuggauccuauggauuuccuuugccauaucauguuuuuugcuuuguguugcuuuguugggguucaucaugugggccugccaaaagggcaacauuaggugcaacauuugcauuuga

SEQ ID NO: 44207 - RNA, 1701 nt, Artificial Sequence; identical to SEQ ID NO: 41928
  derived and/or modified CDS sequence (wt) from hemagglutinin__InfluenzaA__AHZ40249

SEQ ID NO: 44208 - RNA, 1701 nt, Artificial Sequence; identical to SEQ ID NO: 41870
  derived and/or modified CDS sequence (wt) from hemagglutinin__InfluenzaA__AHZ40261

SEQ ID NO: 44209 - RNA, 1701 nt, Artificial Sequence
  derived and/or modified CDS sequence (wt) from hemagglutinin__InfluenzaA__AHZ40273
augaagacuaucauugcuuugagcuacauucuaugucugguuuucgcucaaaaacuuccuggaaaugacaauagcacggcaacgcugugccuugggcaccaugcaguaccaaacggaacgauagugaaaacaaucacgaaugaccaaauugaaguuacuaaugcuacugagcugguucagaauuccucaauaggugaaauaugcgacaguccucaucagauccuugauggagaaaacugcacacuaauagaugcucuauugggagacccucagugugauggcuuucaaaauaagaaaugggaccuuuuuguugaacgaagcaaagccuacagcaacuguuacccuuaugaugugccggauuaugccucccuuaggucacuaguugccucauccggcacacuggaguuuaacaaugaaagcuucaauugggcuggagucacucaaaacggaacaaguucugcuugcauaaggggaucuaauaguaguuucuuuaguagauuaaauugguugacccacuuaaacuucaaguacccagcauugaacgugacuaugccaaacaaugaacaauuugacaaauuguacauuugggggguucaccacccggguacggacaaggaccaaaucuuccuguaugcucaaucaucaggaagaaucacaguauccaccaaaagaagccaacaagcuguaaucccgaauaucggaucuagacccagaauaaggaauaucccuagcagaauaagcaucuauuggacaauaguaaaaccgggagacauacuuuugauuaacagcacagggaaucuaauugcuccuagggguuacuucaaaauacgaagugggaaaagcucaauaaugagaucagaugcacccauuggcaaaugcaagucugaaugcaucacuccaaauggaagcauucccaaugacaaaccauuccaaaauguaaacaggaucacauacggggccugucccagauauguuaagcaaagcacucugaaauuggcaacaggaaugcgaaauguaccagagaaacaaacuagaggcauauuuggcgcaauagcggguuucauagaaaaugguugggagggaaugguggaugguugguacgguuucaggcaucaaaauucugagggaagaggacaagcagcagaucucaaaagcacucaagcagcaaucgaucaaaucaaugggaagcugaaucgauugaucgggaaaaccaacgagaaauuccaucagauugagaaagaauucucagaaguagaagggagaauucaggaccuugagaaauauguugaggacacaaaaauagaucucuggucauacaacgcagagcuucuuguugcccuggagaaccaacauacaauugaucuaacugacucagaaaugaacaaacuguuugaaaaaacaaagaagcaacugagggaaaaugcugaggauaugggcaaugguuguuucaaaauauaccacaaaugugacaaugccugcauaggaucaaucagaaauggaacuuaugaccacgauguauacagggaugaagcauuaaacaaccgguuccagaucaagggaguugagcugaagucaggguacaaagauuggauccuauggauuuccuuugccauaucauguuuuuugcuuuguguugcuuuguugggguucaucaugugggccugccaaaagggcaacauuaggugcaacauuugcauuuga

SEQ ID NO: 44210 - RNA, 1701 nt, Artificial Sequence
  derived and/or modified CDS sequence (wt) from hemagglutinin__InfluenzaA__AHZ40285
augaagacuaucauugcuuugagcuacauucuaugucuaguuuucgcccaaaaacuuccuggaaaugacaacagcacggcaacgcugugccuugggcaccaugcaguaccaaacggaacgauagugaaaacaaucacgaaugaccaaauugaaguuacuaaugcuacugagcugguucagaguuccucaacaggugaaauaugcgacaguccucaucagauccuugauggagaaaacugcacacuaauagaugcucuauugggagacccucagugugauggcuuccaaaauaagaaaugggaccuuuuuguugaacgaagcaaagccuacagcaacuguuacccuuaugaugugccggauuaugccucccuuaggucacuaguugccucauccggcacacuggaguuuaacaaugaaagcuucaauuggacuggagucacucaaaacggaacaagcucugcuugcauaaggagaucugauaguaguuucuuuaguagauugaauugguugacccacuuaaacuucaaauacccagcauugaacgugacuaugccaaacaaugaacaauuugacaaauuguacauuugggggguucaccacccggguacggacaaggaccaaaucuuccuguaugcucaagcaucaggaagaaucacaguaucuaccaaaagaagccaacaaucugugaucccgaauaucggaucuagacccagaauaaggaauaucccuagcagaauaagcaucuauuggacaauaguaaaaccgggagacauacuuuugauuaacagcacagggaaucuaauugcuccuagggguuacuucaaaauacaaagugggaaaagcucaauaaugagaucagauacacccauuggaaaaugcaauucugaaugcaucacuccaaauggaagcauucccaaugacaaaccauuccaaaauguaaacaggaucacauacggggccuguccuagauauguuaagcaaaacacucugaaauuggcaacaggaaugcgaaauguaccagagaaacaaacuagaggcauauuuggcgcaauagcggguuucauagaaaaugguugggagggaaugguggaugguugguacgguuucaggcaucaaaauucugagggaagaggacaagcagcagaucucaaaagcacucaagcagcaaucgaucaaaucaaugggaagcugaauagauugaucgggaaaaccaacgagaaauuccaucagauugaaaaagaauucucagaagucgaagggagaauucaggaccuugagaaauauguugaggacacuaaaauagaucucuggucauacaacgcggagcuucuuguugcccuggaaaaccaacauacaauugaucuaacugacucagaaaugaacaaacuguuugaaaaaacaaagaagcaacugagagaaaaugcugaagauaugggcaauggcuguuucaaaauauaccacaaaugugacaaugccugcauaggaucaaucagaaauggaacuuauaaccacgauguauacagagaugaagcauuaaacaaccgguuccagaucaagggaguugagcugaagucaggguacaaagauuggauccuauggauuuccuuugccauaucauguuuuuugcuuuguguugcuuuguugggguucaucaugugggccugccaaaaaggcaacauuaggugcaacauuugcauuuga

SEQ ID NO: 44211 - RNA, 1701 nt, Artificial Sequence; identical to SEQ ID NO: 42155
  derived and/or modified CDS sequence (wt) from hemagglutinin__InfluenzaA__AHZ40297

SEQ ID NO: 44212 - RNA, 1701 nt, Artificial Sequence
  derived and/or modified CDS sequence (wt) from hemagglutinin__InfluenzaA__AHZ40309
augaagacuaucauugcuuugagcuacauucuaugucugguuuucgcucaaaaacuuccuggaaaugacaauagcacggcaacgcugugccuugggcaccaugcaguaccaaacggaacgauagugaaaacaaucacgaaugaccgaauugaaguuacuaaugcuacugagcugguucagaauuccucaauaggugaaauaugcgacaguccucaucagauccuugauggagaaaacugcacacuaauagaugcucuauugggagacccccagugugauggcuuccaaaauaagaaaugggaccuuuuuguugaacgaagcaaagccuacagcaacuguuacccuuaugaugugccggauuaugccucccuuaggucacuaguugccucauccggcacacuggaguuuaacaaugaaagcuucaauuggacuggagucacucaaaacggaacaaguucugcuugcauaaggagaucuaauaauaguuucuuuaguagauuaaauuggcugacccacuuaaacuucaaauacccagcauugaacgugacuaugccaaacaaugaacaauuugacaaauuguacauuugggggguucaccacccggguacggacaaggaccaaaucuuccuguaugcucaaucaucaggaagaaucacaguaucuaccaaaagaagccaacaagcuguaaucccgaauaucggaucuagacccagaauaaggaauaucccuagcagaauaagcaucuauuggacaauaguaaaaccgggagacauacuuuugauuaacagcacagggaaucuaauugcuccuagggguuacuucaaaauacgaaaugggaaaagcucaauaaugagaucagaugcacccauuggcaaaugcaagucugaaugcaucacuccaaauggaagcauucccaaugacaaaccauuccaaaauguaaacaggaucacauacggggccugucccagauauguuaagcaaagcacucugaaauuggcaacaggaaugcgaaauguaccagagaaacaaacuagaggcauauuuggcgcaauagcggguuucauagaaaaugguugggagggaaugguggaugguugguacgguuucaggcaucaaaauucugaggguagaggacaagcagcagaucucaaaagcacucaagcagcaaucgaucaaaucaaugggaagcugaaucgauugaucgggaaaaccaacgagaaauuccaucagauugaaaaagaauucucagaaguagaagggagaauucaggaccuugagaaauauguugaggacacuaaaauagaucucuggucauacaaugcggagcuucuuguugcccuggagaaccaacauacaauugaucuaacugacucagaaaugaacaaacuguuugaaaaaacaaagaagcaacugagggaaaaugcugaggauaugggcaaugguuguuucaaaauauaccacaaaugugacaaugccugcauaggaucaaucagaaauggaacuuaugaccacgauguauacagagaugaagcauuaaacaaccgguuccagauuaagggaguugagcugaagucaggguacaaagauuggauccuauggauuuccuuugccauaucauguuuuuugcuuuguguuguuuuguugggguucaucaugugggccugccaaaagggcaacauuaggugcaacauuugcauuuga

SEQ ID NO: 44213 - RNA, 1701 nt, Artificial Sequence
  derived and/or modified CDS sequence (wt) from hemagglutinin__InfluenzaA__AHZ40321
augaagacuaucauugcuuugagcuacauucuaugucugguuuucgcucaaaaacuuccuggaaaugacaauagcacggcaacgcugugccuugggcaccaugcaguaccaaacggaacgauagugaaaacaaucacgaaugaccgaauugaaguuacuaaugcuacugagcugguucagaauuccucaauaggugaaauaugcgacaguccucaucagauccuugauggugaaaacuguacacuaauagaugcucuauugggagacccucagugugauggcuuucaaaauaagaaaugggaccuuuuuguugaacgaagcaaagccuacagcaacuguuacccuuaugaugugccggauuaugccucccuuaggucacuaguugccucauccggcacacuggaguuuaacaaugaaagcuucaauuggacuggagucacucaaaacggaacaaguucugcuugcauaaggagaucuaauaguaguuucuuuaguagauuaaauugguugacccacuuaaacuucaaauacccagcauugaacgugacuaugccaaacaaugaacaauuugacaaauuguacauuugggggguucaccacccggguacggacaaggaccaaaucuuccuguaugcucaaucaucaggaagaaucacaguaucuaccaaaagaagccaacaagcuguaaucccgaauaucggaucuagacccagaauaaggaauaucccuagcagaauaagcaucuauuggacaauaguaaaaccaggagacauacuuuugauuaacagcacagggaaucuaauugcuccuagggguuacuucaaaauacgaagugggaaaagcucaauaaugagaucagaugcacccauuggcaaaugcaagucugaaugcaucacuccaaauggaagcauuccaaaugacaaaccauuccaaaauguaaacaggaucacauacggggccugucccagauauguuaagcaaagcacucugaaauuggcaacaggaaugcgaaauguaccagagaaacaaacuagaggcauauuuggcgcaauagcggguuucauagaaaaugguugggagggaaugguggaugguugguacgguuucaggcaucaaaauucugagggaagaggacaagcagcagaucucaaaagcacucaagcagcaaucgaucaaaucaaugggaagcugaaucgauugaucgggaaaaccaacgagaaauuccaucagauugaaaaagaauucucagaaguagaagggagaauucaggaccuugagaaauauguugaggacacuaaaauagaucucuggucauacaacgcggagcuucuuguugcccuggagaaccaacauacaauugaucuaacugacucagaaaugaacaaacuguuugaaaaaacaaagaagcaacugagggaaaaugcugaggauaugggcaaugguuguuucaaaauauaccacaaaugugacaaugccugcauaggaucaaucagaaauggaacuuaugaccacgauguauacagggaugaagcauuaaacaaccgguuccagaucaagggaguugagcugaagucaggguacaaagauuggauccuauggauuuccuuugccauaucauguuuuuugcuuuguguugcuuuguugggguucaucaugugggccugccaaaagggcaacauuaggugcaacauuugcauuuga

SEQ ID NO: 44214 - RNA, 1701 nt, Artificial Sequence
  derived and/or modified CDS sequence (wt) from hemagglutinin__InfluenzaA__AHZ40333
augaagacuaucauugcuuugagcuacauucuaugucugguuuucgcucaaaaacuuccuggaaaugacaauagcacggcaacgcugugccuugggcaccaugcaguaccaaacggaacgauagugaaaacaaucacgaaugaccgaauugaaguuacuaaugcuacugagcugguucagaauuccucaauaggugaaauaugcgacaguccucaucagauccuugauggagaaaacuguacacuaauagaugcucuauugggagacccucagugugauggcuuucaaaauaagaaaugggaccuuuuuguugaacgaagcaaagccuacagcaacuguuacccuuaugaugugccggauuaugccucccuuaggucacuaguugccucauccggcacacuggaguuuaacaaugaaagcuucaauuggacuggagucacucaaaacggaacaaguucugcuugcauaaggagaucuaauaguaguuucuuuaguagauuaaauugguugacccacuuaaacuucaaauacccagcauugaacgugacuaugccaaacaaugaacaauuugacaaauuguacauuugggggguucaccacccggguacggacaaggaccaaaucuuccuguaugcucaaucaucaggaagaaucacaguaucuaccaaaagaagccaacaagcuguaaucccgaauaucggaucuagacccagaauaaggaauaucccuagcagaauaagcaucuauuggacaauaguaaaaccaggagacauacuuuugauuaacagcacagggaaucuaauugcuccuagggguuacuucaaaauacgaagugggaaaagcucaauaaugagaucagaugcacccauuggcaaaugcaagucugaaugcaucacuccaaauggaagcauuccaaaugacaaaccauuccaaaauguaaacaggaucacauacggggccugucccagauauguuaagcaaagcacucugaaguuggcaacaggaaugcgaaauguaccagagaaacaaacuagaggcauauuuggcgcaauagcggguuucauagaaaaugguugggagggaaugguggaugguugguacgguuucaggcaucaaaauucugagggaagaggacaagcagcagaucucaaaagcacucaagcagcaaucgaucaaaucaaugggaagcugaaucgauugaucgggaaaaccaacgagaaauuccaucagauugaaaaagaauucucagaaguagaagggagaauucaggaccuugagaaauauguugaggacacuaaaauagaucucuggucauacaacgcggagcuucuuguugcccuggagaaccaacauacaauugaucuaacugacucagaaaugaacaaacuguuugaaaaaacaaagaagcaacugagggaaaaugcugaggauaugggcaaugguuguuucaaaauauaccacaaaugugacaaugccugcauaggaucaaucagaaauggaacuuaugaccacgauguauacagggaugaagcauuaaacaaccgguuccagaucaagggaguugagcugaagucaggguacaaagauuggauccuauggauuuccuuugccauaucauguuuuuugcuuuguguugcuuuguugggguucaucaugugggccugccaaaagggcaacauuaggugcaacauuugcauuuga

SEQ ID NO: 44215 - RNA, 1701 nt, Artificial Sequence
  derived and/or modified CDS sequence (wt) from hemagglutinin__InfluenzaA__AHZ40345
augaagacuaucauugcuuugagcuacauucuaugucugguuuucgcucaaaaacuuccuggaaaugacaauagcacggcaacgcugugccuugggcaccaugcaguaccaaacggaacgauagugaaaacaaucacgaaugaccgaauugaaguuacuaaugcuacugagcugguucagaauuccucaauaggugaaauaugcgacaguccucaucagauccuugauggagaaaacuguacacuaauagaugcucuauugggagacccucagugugauggcuuucaaaauaagaaaugggaccuuuuuguugaacgaagcaaagccuacagcaacuguuacccuuaugaugugccggauuaugccucccuuaggucacuaguugccucauccggcacacuggaguuuaacaaugaaagcuucaauuggacuggagucacucaaaacggaacaaguucugcuugcauaaggagaucuaauaguaguuucuuuaguagauuaaauugguugacccacuuaaacuucaaauacccagcauugaacgugacuaugccaaacaaugaacaauuugacaaauuguacauuugggggguucaccacccggguacggacaaggaccaaaucuuccuguaugcucaaucaucaggaagaaucacaguaucuaccaaaagaagccaacaagcuguaaucccgaauaucggaucuagacccagaauaaggaauaucccuagcagaauaagcaucuauuggacaauaguaaaaccaggagacauacuuuugauuaacagcacagggaaucuaauugcuccuagggguuacuucaaaauacgaagugggaaaagcucaauaaugagaucagaugcacccauuggcaaaugcaagucugaaugcaucacuccaaauggaagcauuccaagugacaaaccauuccaaaauguaaacaggaucacauacggggccugucccagauauguuaagcaaagcacucugaaauuggcaacaggaaugcgaaauguaccagagaaacaaacuagaggcauauuuggcgcaauagcggguuucauagaaaaugguugggagggaaugguggaugguugguacgguuucaggcaucaaaauucugagggaagaggacaagcagcagaucucaaaagcacucaagcagcaaucgaucaaaucaaugggaagcugaaucgauugaucgggaaaaccaacgagaaauuccaucagauugaaaaagaauucucagaaguagaagggagaauucaggaccuugagaaauauguugaggacacuaaaauagaucucuggucauacaacgcggagcuucuuguugcccuggagaaccaacauacaauugaucuaacugacucagaaaugaacaaacuguuugaaaaaacaaagaagcaacugagggaaaaugcugaggauaugggcaaugguuguuucaaaauauaccacaaaugugacaaugccugcauaggaucaaucagaaauggaacuuaugaccacgauguauacagggaugaagcauuaaacaaccgguuccagaucaagggaguugagcugaagucaggguacaaagauuggauccuauggauuuccuuugccauaucauguuuuuugcuuuguguugcuuuguugggguucaucaugugggccugccaaaagggcaacauuaggugcaacauuugcauuuga

SEQ ID NO: 44216 - RNA, 1701 nt, Artificial Sequence; identical to SEQ ID NO: 41896
  derived and/or modified CDS sequence (wt) from hemagglutinin__InfluenzaA__AHZ40357

SEQ ID NO: 44217 - RNA, 1701 nt, Artificial Sequence
  derived and/or modified CDS sequence (wt) from hemagglutinin__InfluenzaA__AHZ40369
augaagacuaucauugcuuugagcuacauucuaugucugguuuucgcucaaaaacuuccuggaaaugacaauagcacggcaacgcugugccuugggcaccaugcaguaccaaacggaacgauagugaaaacaaucacgaaugaccgaauugaaguuacuaaugcuacugagcugguucagaauuccucaauaggugaaauaugcgacaguccucaucagauccuugauggagaaaacugcacacuaauagaugcucuauugggagacccucagugugauggcuuccaaaauaagaaaugggaccuuuuuguugaacgaagcaaagccuacagcaacuguuacccuuaugaugugccggauuaugccucccuuaggucacuaguugccucauccggcacacuggaguuuaacaaugaaagcuucaauuggacuggagucacucaaaacggaacaaguucugcuugcauaaggagaucuaauaguaguuucuuuaguagauuaaauugguugacccacuuaaacuucaaauacccagcauugaacgugacuaugccaaacaaugaacaauuugacaaauuguacauuugggggguucaccacccggguacggacaaggaccaaaucuuccuguaugcucaaucaucaggaagaaucacaguaucuaccaaaagaagccaacaagcuguaaucccgaauaucggaucuagacccagaauaaggaauaucccuagcagaauaagcaucuauuggacaauaguaaaaccgggagacauacuuuugauuaacagcacagggaaucuaauugcuccuagggguuacuucaaaauacgaagugggagaagcucaauaaugagaucagaugcacccauuggcaaaugcaagucugaaugcaucacuccaaauggaagcauucccaaugacaaaccauuccaaaauguaaacaggaucacauacggggccugucccagauauguuaagcaaagcacucugaaauuggcaacaggaaugcgaaauguaccagagaaacaaacuagaggcauauuuggcgcaauagcggguuucauagaaaaugguugggagggaaugguggaugguugguacgguuucaggcaucaaaauucugaaggaagaggacaagcagcagaucucaaaagcacucaagcagcaaucgaucaaaucaaugggaagcugaaucgauugaucgggaaaaccaacgagaaauuccaucagauugaaaaagaauucucagaaguagaagggagaauucaggaccuugagaaauauguugaggacacuaaaauagaucucuggucauacaacgcagagcuucuuguugcccuagagaaccaacauacaauugaucuaacugacucagaaaugaacaaacuguuugaaaaaacaaagaagcaacugagggaaaaugcugaggauaugggcaaugguuguuucaaaauauaccacaaaugugacaaugccugcauaggaucaaucagaaauggaacuuaugaccacgauguauacagagaugaagcacuaaacaaccgguuccagaucaagggaguugagcugaagucaggguacaaagauuggauccuauggauuuccuuugccauaucauguuuuuugcuuuguguugcuuuguugggguucaucaugugggccugccaaaagggcaacauuaggugcaacauuugcauuuga

SEQ ID NO: 44218 - RNA, 1701 nt, Artificial Sequence
  derived and/or modified CDS sequence (wt) from hemagglutinin__InfluenzaA__AHZ40381
augaagacuaucauugcuuugagcuacauucuaugucugguuuucgcucaaaaacuuccuggaaaugacaauagcacggcaacgcugugccuugggcaccaugcaguaccaaacggaacgauagugaaaacaaucacgaaugaccgaauugaaguuacuaaugcuacugaacugguucagaauuccucaauaggugaaauaugcgacaguccucaucagauccuugauggagaaaacugcacacuaauagaugcucuauugggagacccucagugugauggcuuucaaaauaagaaaugggaccuuuuuguugaacgaagcaaagccuacagcaacuguuacccuuaugaugugccggauuaugccucccuuaggucacuaguugccucauccggcacacuggaguuuaacaaugaaagcuucaauugggcuggagucacucaaaacggaacaaguucugcuugcauaaggggaucuaauaguaguuucuuuaguagauugaauugguugacccacuuaaacuucaaauacccagcauugaacgugacuaugccaaacaaugaacaauuugacaaauuguacauuugggggguucaccacccggguacggacaaggaccaaaucuuccuguaugcucaaucaucaggaagaaucacaguaucuaccaaaagaagccaacaagcuguaaucccgaauaucggaucuagacccagaauaaggaauaucccuagcagaauaagcaucuauuggacaauaguaaaaccgggagacauacuuuugauuaacagcacagggaaucuaauugcuccuagggguuacuucaaaauacgaagugggaaaagcucaauaaugagaucagaugcacccauuggcaaaugcaagucugaaugcaucacuccaaauggaagcauucccaaugacaaaccauuccaaaauguaaacaggaucacauacggggccugucccagauauguuaagcaaagcacucugaaauuggcaacaggaaugcgaaauguaccagagaaacaaacuagaggcauauuuggcgcaauagcggguuucauagaaaaugguugggagggaaugguggaugguugguacgguuucaggcaucaaaauucugagggaagaggacaagcagcagaucucaaaagcacucaagcagcaaucgaucaaaucaaugggaagcugaaucgauugaucgggaaaaccaacgagaaauuccaucagauugaaaaagaauucucagaaguagaagggagaauucaggaccuugagaaauauguugaggacacaaaaauagaucucuggucauacaacgcggagcuucuuguugcucuggagaaccaacauacaauugaucuaacugacucagaaaugaacaaacuguuugaaaaaacaaagaagcaacugagggaaaaugcugaggauaugggcaaugguuguuucaaaauauaccacaaaugugacaaugccugcauaggaucaaucagaaauggaacuuaugaccacgauguauacagggaugaagcauuaaacaaccgguuccagaucaagggaguugaguugaagucaggguacaaagauuggauccuauggauuuccuuugccauaucauguuuuuugcuuuguguugcuuuguugggguucaucaugugggccugccaaaagggcaacauuaggugcaacauuugcauuuga

SEQ ID NO: 44219 - RNA, 1701 nt, Artificial Sequence
  derived and/or modified CDS sequence (wt) from hemagglutinin__InfluenzaA__AHZ40393
augaagacuaucauugcuuugagcuacauucuaugucugguuuucgcucaaaaacuuccuggaaaugacaauagcacggcaacgcugugccuugggcaccaugcaguaccaaacggaacgauagugaaaacaaucacgaaugaccgaauugaaguuacuaaugcuacugagcugguucagaauuccucaauaggugaaauaugcgacaguccucaucagauccuugauggagaaaacuguacacuaauagaugcucuauugggagacccucagugugauggcuuucaaaauaagaaaugggaccuuuuuguugaacgaagcaaagccuacagcaacuguuacccuuaugaugugccggauuaugccucccuuaggucacuaguugccucauccggcacacuggaguuuaacaaugaaagcuucaauuggacuggagucacucaaaacggaacaaguucugcuugcauaaggagaucuaauaguaguuucuuuaguagauuaaauugguugacccacuuaaacuucaaauacccagcauugaacgugacuaugccaaacaaugaacaauuugacaaauuguacauuugggggguucaccacccggguacggacaaggaccaaaucuuccuguaugcucaaucaucaggaagaaucacaguaucuaccaaaagaagccaacaagcuguaaucccgaauaucggaucuagacccagaauaaggaauaucccuagcagaauaagcaucuauuggacaauaguaaaaccaggagacauacuuuugauuaacagcacagggaaucuaauugcuccuagggguuacuucaaaauacgaagugggaaaagcucaauaaugagaucagaugcacccauuggcaaaugcaagucugaaugcaucacuccaaauggaagcauuccaaaugacaaaccauuccaaaauguaaacaggaucacauacggggccugucccagauauguuaagcaaagcacucugaaguuggcaacaggaaugcgaaauguaccagagaaacaaacuagaggcauauuuggcgcaauagcggguuucauagaaaaugguugggagggaaugguggaugguugguacgguuucagacaucaaaauucugagggaagaggacaagcagcagaucucaaaagcacucaagcagcaaucgaucaaaucaaugggaagcugaaucgauugaucgggaaaaccaacgagaaauuccaucagauugaaaaagaauucucagaaguagaagggagaauucaggaccuugagaaauauguugaggacacuaaaauagaucucuggucauacaacgcggagcuucuuguugcccuggagaaccaacauacaauugaucuaacugacucagaaaugaacaaacuguuugaaaaaacaaagaagcaacugagggaaaaugcugaggauaugggcaaugguuguuucaaaauauaccacaaaugugacaaugccugcauaggaucaaucagaaauggaacuuaugaccacgauguauacagggaugaagcauuaaacaaccgguuccagaucaagggaguugagcugaagucaggguacaaagauuggauccuauggauuuccuuugccauaucauguuuuuugcuuuguguugcuuuguugggguucaucaugugggccugccaaaagggcaacauuaggugcaacauuugcauuuga

SEQ ID NO: 44220 - RNA, 1701 nt, Artificial Sequence; identical to SEQ ID NO: 41901
  derived and/or modified CDS sequence (wt) from hemagglutinin__InfluenzaA__AHZ40405

SEQ ID NO: 44221 - RNA, 1701 nt, Artificial Sequence; identical to SEQ ID NO: 41901
  derived and/or modified CDS sequence (wt) from hemagglutinin__InfluenzaA__AHZ40417

SEQ ID NO: 44222 - RNA, 1701 nt, Artificial Sequence
  derived and/or modified CDS sequence (wt) from hemagglutinin__InfluenzaA__AHZ40429
augaagaccaucauugcuuugagcuacauucuaugucuaguuuucgcucaagaacuuccuggaaaugacgacagcacggcaacgcugugccuugggcaccaugcagugccaaacggaacgauagugaaaacaaucacgaaugaccaaauugaaguuacuaaugcuacugagcugguucagaguuccucaacaggugaaauaugcaacaguccucaucagauccuugauggagaaaacugcacacuaauagaugcucuauugggagacccucagugugauggcuuccaaaacaagaaaugggaccuuuuuguugaacgaagcaaagcccacagcaacuguuacccuuaugaugugccggauuaugccucccuuaggucgcuaguugccucauccggcacacuggaguuuaaaaaugaaagcuucaauuggacuggagucacucaaaacggaacaagcucugcuugcauaaggagaucuaauaauaguuucuuuaguagauugaauugguugacccacuuaaacuucaaauacccagcauugaacgugacuaugccaaacaaugaacaauuugacaaauuguacauuugggggguucaccacccggguacggacaaggaccaaaucuuccuguaugcucaagcaucaggaagaaucacaguaucuaccaaaagaagccaacaagcuguaauuccgaauaucggaucuagacccagaguaaggaauaucccuagcagaguaagcaucuauuggacaauaguaaaaccgggagacauacuuuugauuaacagcacagggaaucuaauugcuccuagggguuacuucaaaauacgaagugggaaaagcucaauaaugagaucagaugcacccauuggcaaaugcaauucugcaugcaucacuccaaauggaagcauucccaaugacaaaccauuccaaaauguaaacaggaucacauacggggccugucccagauaugucaagcaaaacacucugaaauuggcaacaggaaugagaaauguaccagagaaacaaacuagaggcauauuuggcgcaauagcggguuucauagaaaaugguugggagggaaugguggaugguugguacgguuucaggcaucaaaauucugagggaaggggacaagcagcagaucucaaaagcacucaagcagcaaucgaucaaaucaaugggaagcugaauagauugaucgggaaaaccaacgagaaauuccaucagauugaaaaagaauucucagaagucgaagggagaauucaggaccuugagaaauauguugaggacacuaaaauagaucucuggucauacaacgcggagcuucuuguugcccuggagaaccaacacacaauugaucuaacugacucagaaaugaacaaacuguuugaaaaaacaaagaagcaacugagggaaaaugcugaggauaugggcaaugguuguuucaaaauauaccacaaaugugacaaugcuugcauaggaucaaucagaaauggaacuuaugaucacgauguguacagagaugaagcauuaaacaaccgauuccagaucaagggaguugagcugaagucaggguacaaagauuggauccuauggauuuccuuugccauaucauguuuuuugcuuuguguugcuuuguugggguucaucaugugggccugccaaaaaggcaacauuaggugcaacauuugcauuuga

SEQ ID NO: 44223 - RNA, 1701 nt, Artificial Sequence
  derived and/or modified CDS sequence (wt) from hemagglutinin__InfluenzaA__AHZ40441
augaagacuaucauugcuuugagcuacauucuaugucugguuuucgcucaaaaacuuccuggaaaugacaauagcacggcaacgcugugccuugggcaccaugcaguaccaaacggaacgauagugaaaacaaucacgaaugaccgaauugaaguuacuaaugcuacugagcugguucagaauuccucaauaggugaaauaugcgacaguccucaucagauccuugauggagaaaacuguacacuaauagaugcucuauugggagacccucagugugauggcuuucaaaauaagaaaugggaccuuuuuguugaacgaagcaaagccuacagcaacuguuacccuuaugaugugccggauuaugccucccuuaggucacuaguugccucauccggcacacuggaguuuaacaaugaaagcuucaauuggacuggagucacucaaaacggaacaaguucugcuugcauaaggagaucuaauaguaguuucuuuagcagauuaaauugguugacccacuuaaacuucaaauacccagcauugaacgugacuaugccaaacaaugaacaauuugacaaauuguacauuugggggguucaccacccggguacggacaaggaccaaaucuuccuguaugcucaaucaucaggaagaaucacaguaucuaccaaaagaagccaacaagcuguaaucccgaauaucggaucuagacccagaauaaggaauaucccuagcagaauaagcaucuauuggacaauaguaaaaccaggagacauacuuuugauuaacagcacagggaaucuaauugcuccuagggguuacuucaaaauacgaagugggaaaagcucaauaaugagaucagaugcacccauuggcaaaugcaagucugaaugcaucacuccaaauggaagcauuccaaaugacaaaccauuccaaaauguaaacaggaucacauacggggccugucccagauauguuaagcaaagcacucugaaauuggcaacaggaaugcgaaauguaccagagaaacaaacuagaggcauauuuggcgcaauagcggguuucauagaaaaugguugggagggaaugguggaugguugguacgguuucaggcaucaaaauucugagggaagaggacaagcagcagaucucaaaagcacucaagcagcaaucgaucaaaucaaugggaagcugaaucgauugaucgggaaaaccaacgagaaauuccaucagauugaaaaagaauucucagaaguagaagggagaauucaggaccuugagaaauauguugaggacacuaaaauagaucucuggucauacaacgcggagcuucuuguugcccuggagaaccaacauacaauugaucuaacugacucagaaaugaacaaacuguuugaaaaaacaaagaagcaacugagggaaaaugcugaggauaugggcaaugguuguuucaaaauauaccacaaaugugacaaugccugcauaggaucaaucagaaauggaacuuaugaccacgauguauacagggaugaagcauuaaacaaccgguuccagaucaagggaguugagcugaagucaggguacaaagauuggauccuauggauuuccuuugccauaucauguuuuuugcuuuguguugcuuuguugggguucaucaugugggccugccaaaagggcaacauuaggugcaacauuugcauuuga

SEQ ID NO: 44224 - RNA, 1701 nt, Artificial Sequence; identical to SEQ ID NO: 42038
  derived and/or modified CDS sequence (wt) from hemagglutinin__InfluenzaA__AHZ40453

SEQ ID NO: 44225 - RNA, 1701 nt, Artificial Sequence
  derived and/or modified CDS sequence (wt) from hemagglutinin__InfluenzaA__AHZ40465
augaagacuaucauugcuuugagcuacauucuaugucugguuuucgcucaaaaacuuccuggaaaugacaauagcacggcaacgcugugccuugggcaccaugcaguaccaaacggaacgauagugaaaacaaucacgaaugaccgaauugaaguuacuaaugcuacugagcugguucagaauuccucaauaggugaaauaugcgacaguccucaucagauccuugauggagaaaacugcacacuaauagaugcucuauugggagacccgcagugugauggcuuucaaaauaagaaaugggaccuuuuuguugaacgaagcaaagccuacagcaacuguuacccuuaugauaugccggauuaugccucccugaggucacuaguugccucauccggcacacuggaguuuaacaaugaaagcuucaauuggacuggagucacucaaaacggaacaaguucugcuugcauaaggagaucuaauaguaguuucuuuaguagauuaaauugguugacccacuuaaacuucaaauacccagcauugaacgugacuaugccaaacaaugaacgauuugacaaauuguacauuugggggguucaccacccggguacggacaaggaccaaaucuuccuguaugcucaaucaucaggaagaaucacaguaucuaccaaaagaagccaacaagcuguaaucccaaauaucggaucuagacccagaauaaggaauaucccuagcagaauaagcaucuauuggacaauaguaaaaccgggagacauacuuuugauuaacagcacagggaaucuaauugcuccuagggguuacuucaaaauacgaagugggaaaagcucaauaaugagaucagaugcacccauuggcaaaugcaagucugaaugcaucacuccaaauggaagcauucccaaugacaaaccauuccaaaauguaaacaggaucacauacggggccugucccagauauguuaagcaaagcacucugaaauuggcaaccggaaugcgaaauguaccagagaaacaaacuagaggcauauuuggcgcaauagcggguuucauagaaaaugguugggagggaaugguggaugguugguacgguuucaggcaucaaaauucugagggaagaggacaagcagcagaucucaaaagcacucaagcagcaaucgaucaaaucaaugggaagcugaaucgauugaucgggaaaaccaacgagaaauuccaucagauugaaaaagaauucucagaaguagaagggagaauucaggaccuugagaaauauguugaggacacuaaaauagaucucuggucauacaacgcggagcuucuuguugcccuggagaaccaacauacaauugaucuaacugacucagaaaugaacaaacuguuugaaaaaacaaagaagcaacugagggaaaaugcugaggauaugggcaaugguuguuucaaaauauaccacaaaugugacaaugccugcauaggaucaauaagaaauggaacuuaugaccacaauguguacagggaugaagcauuaaacaaccgguuccagaucaagggaguugagcugaagucaggguacaaagauuggauccuauggauuuccuuugccauaucauguuuuuugcuuuguguugcuuuguugggguucaucaugugggccugccaaaagggcaacauuaggugcaacauuugcauuuga

SEQ ID NO: 44226 - RNA, 1701 nt, Artificial Sequence
  derived and/or modified CDS sequence (wt) from hemagglutinin__InfluenzaA__AHZ40477
augaagacuaucauugcuuugagcuacauucuaugucuaguuuucgcccaaaaacuuccuggaaaugacaacagcacggcaacgcugugccuugggcaccaugcaguaccaaacggaacgauagugaaaacaaucacgaaugaccaaauugaaguuacuaaugcuacugagcugguucagaguuccucaacaggugaaauaugcgacaguccucaucagauccuugauggagaaaacugcacacuaauagaugcucuauugggagacccucagugugauggcuuccaaaauaagaaaugggaccuuuuuguugaacgaagcaaagccuacagcaacuguuacccuuaugaugugccggauuaugccucccuuaggucacuaguugccucauccggcacacuggaguuuaacaaugaaagcuucaauuggacuggagucacucaaaacggaacaagcucugcuugcauaaggagaucugauaguaguuucuuuaguagauugaauugguugacccacuuaaacuucaaauacccagcauugaacgugacuaugccaaacaaugaacaauuugacaaauuguacauuugggggguucaccacccggguacggacaaggaccaaaucuuccuguaugcucaagcaucaggaagaaucacaguaucuaccaaaagaagccaacaaucugugaucccgaauaucggaucuagacccagaauaaggaauaucccuagcagaauaagcaucuauuggacaauaguaaaaccgggagacauacuuuugauuaacagcacagggaaucuaauugcuccuagggguuacuucaaaauacaaagugggaaaagcucaauaaugagaucagaugcacccauuggaaaaugcaauucugaaugcaucacuccaaauggaagcauucccaaugacaaaccauuccaaaauguaaacaggaucacauacggggccuguccuagauauguuaagcaaaacacucugaaauuggcaacaggaaugcgaaauguaccagagaaacaaacuagaggcauauuuggcgcaauagcggguuucauagaaaaugguugggagggaaugguggaugguugguacgguuucaggcaucaaaauucugaaggaagaggacaagcagcagaucucaaaagcacucaagcagcaaucgaucaaaucaaugggaagcugaauagauugaucgggaaaaccaacgagaaauuccaucagauugaaaaagaauucucagaagucgaagggagaauucaggaccuugagaaauauguugaggacacuaaaauagaucucuggucauacaacgcggagcuucuuguugcccuggaaaaccaacauacaauugauuuaacugacucagaaaugaacaaacuguuugaaaaaacaaagaagcaacugagagaaaaugcugaagauaugggcaauggcuguuucaaaauauaccacaaaugugacaaugccugcauaggaucaaucagaaauggaacuuauaaccacgauguauacagagaugaagcauuaaacaaccgguuccagaucaagggaguugagcugaagucaggguacaaagauuggauccuauggauuuccuuugccauaucauguuuuuugcuuuguguugcuuuguugggguucaucaugugggccugccaaaaaggcaacauuaggugcaacauuugcauuuga

SEQ ID NO: 44227 - RNA, 1701 nt, Artificial Sequence
  derived and/or modified CDS sequence (wt) from hemagglutinin__InfluenzaA__AHZ40489
augaaggcaauacuaguaguuaugcuauauacauuugcaaccgcaaaugcagacacauuauguauagguuaucaugcgaacaauucaacagacacuguagacacaguacuagaaaagaauguaacaguaacacacucuguuaaucuucuagaagacaagcauaacgggaaacuaugcaaacuaagagggguagccccauugcauuuggguaaauguaacauugcuggcuggauccugggaaauccagagugugaaucacucuccacagcaagcucaugguccuacauuguggaaacaucugguucagacaauggaacguguuacccaggagauuucaucgauuaugaggagcuaagagagcaauugagcucagugucaucauuugaaagguuugagauauuccccaaaacaaguucauggccaaaucaugacucgaacaaagguguaacggcagcauguccucaugcuggagcaaaaggcuucuacaaaaauuuaauauggcuaguuaaaaaaggaaauucauacccaaagcucagcauauccuacauuaaugacaaagggaaagaaguccucgugcuauggggcauucaccauccaucuacuacugcugaccaacaaagucucuaucagaaugcagauacauauguuuuuguggggacaucaagauacagcaagaaguucaagccggaaauagcaauaagacccaaagugagggaucaagaagggagaaugaacuauuacuggacacuaguagagccgggagacaaaauaacauucgaagcaacuggaaaucuagugguaccgagauaugcauuugcaauggaaagaaaugcuggaucugguauuaucauuucagauacaccaguucacgauugcaauacgacuugucagacacccaagggugcuauaaacaccagccucccauuucagaauauacauccgaucacaauuggaaaauguccaaaauauguaaaaagcacaaaauugagacuggccacaggauugaggaaugucccgucuauucaaucuagaggccuauuuggggccauugcuggcuucauugaagggggguggacagggaugguagauggaugguacgguuaucaccaucaaaaugagcaggggucaggauaugcagccgaccugaagagcacacagaaugccauugacaagauuacuaacaaaguaaauucuguuauugaaaagaugaacacacaguucacagcaguagguaaagaguucaaccaccuggaaaaaagaauagagaauuuaaauaaaaaaguugaugaugguuuccuggacauuuggacuuacaaugccgaacuguugguucuauuggaaaaugaaagaacuuuggacuaccacgauucaaaugugaagaacuuauaugaaaagguaagaaaccaguuaaaaaacaaugccaaggaaauuggaaauggcugcuuugaauuuuaccacaaaugcgauaacacgugcauggaaagugucaaaaaugggacuuaugauuacccaaaauacucagaggaagcaaaauuaaacagagaagaaauagaugggguaaagcuggaaucaacaaggauuuaccagauuuuggcgaucuauucaacugccgcuaguucauugguacugguagucucccugggggcaaucaguuuuuggaugugcucuaaugggucucuacaguguagaauauguauuuaa

SEQ ID NO: 44228 - RNA, 1701 nt, Artificial Sequence; identical to SEQ ID NO: 44193
  derived and/or modified CDS sequence (wt) from hemagglutinin__InfluenzaA__AHZ40500

SEQ ID NO: 44229 - RNA, 1701 nt, Artificial Sequence; identical to SEQ ID NO: 41901
  derived and/or modified CDS sequence (wt) from hemagglutinin__InfluenzaA__AHZ40512

SEQ ID NO: 44230 - RNA, 1701 nt, Artificial Sequence
  derived and/or modified CDS sequence (wt) from hemagglutinin__InfluenzaA__AHZ40524
augaagacuaucauugcuuugagcuacauucuaugucugguuuucgcucaaaaacuuccuggaaaugacaauagcacggcaacgcugugccuugggcaccaugcaguaccaaacggaacgauagugaaaacaaucacgaaugaccgaauugaaguuacuaaugcuacugagcugguucagaauuccucaauaggugaaauaugcgacaguccucaucagauccuugauggagaaaacugcacacuaauagaugcucuauugggagacccucagugugauggcuuucaaaauaagaaaugggaccuuuuuguugaacgaagcaaagccuacagcaacuguuacccuuaugaugugccggauuaugccucccuuaggucacuaguugccucauccggcacacuggaguuuaacaaugaaagcuucaauugggcuggagucacucaaaacggaacaaguucugcuugcauaaggggaucuaauaguaguuucuuuaguagauuaaauugguugacccacuuaaacuucaaauacccagcauugaacgugacuaugccaaacaaugagcaauuugacaaauuguacauuugggggguccaccacccagguacggacaaggaccaaaucuuccuguaugcucaaucaucaggaagaaucacaguaucuaccaaaagaagccaacaagcuguaaucccgaauaucggaucuagacccagaauaaggaauaucccuagcagaauaagcaucuauuggacaauaguaaaaccgggagacauacuuuugauuaacagcacagggaaucuaauugcuccuagggguuacuucaaaauacgaagugggaaaagcucaauaaugagaucagaugcacccauuggcaaaugcaaaucugaauguaucacuccaaauggaagcauucccaaugacaaaccauuccaaaauguaaacaggaucacauacggggccugucccagauauguuaagcaaagcacucugaaauuggcaacaggaaugcgaaauguaccagagagacaaacuagaggcauauuuggcgcaauagcggguuucauagaaaaugguugggagggaaugguggaugguugguacgguuucaggcaucaaaauucugagggaagaggacaagcagcagaucucaaaagcacucaagcagcaaucgaucaaaucaaugggaagcugaaucgauugaucgggaaaaccaacgagaaauuccaucagauugaaaaagaauucucagaaguagaagggagaauucaggaccuugagaaauauguugaggacacaaaaauagaucucuggucauacaacgcggagcuucuuguugcccuggagaaccaacauacaauugaucuaacugacucagaaaugaacaaacuguuugaaaaaacaaagaagcaacugagggaaaaugcugaggauaugggcaaugguuguuucaaaauauaccacaaaugugacaaugccugcauaggaucaaucagaaauggaacuuaugaccacgauguauacagggaugaagcauuaaacaaccgguuccagaucaagggaguugagcugaagucaggguacaaagauuggauccuauggauuuccuuugccauaucauguuuuuugcuuuguguugcuuuguugggguucaucaugugggccugccaaaagggcaacauuaggugcaacauuugcauuuga

SEQ ID NO: 44231 - RNA, 1701 nt, Artificial Sequence
  derived and/or modified CDS sequence (wt) from hemagglutinin__InfluenzaA__AHZ40536
augaagacuaucauugcuuugagcuacauucuaugucugguuuucgcucaaaaacuuccuggaaaugacaauagcacggcaacgcugugccuugggcaccaugcaguaccaaacggaacgauagugaaaacaaucacgaaugaccaaauugaaguuacuaaugcuacugagcugguucagaauuccucaauaggugaaauaugcgacaguccucaucagauccuugauggagaaaacuguacacuaauagaugcucuauugggagacccucagugugauggcuuucaaaauaagaaaugggaccuuuuuguugaacgaagcaaagccuacagcaacuguuacccuuaugaugugccggauuaugccucccuuaggucacuaguugccucauccggcacacuggaguuuaacaaugaaagcuucaauuggacuggagucacucaaaacggaacaaguucugcuugcauaaggagaucuaauaguaguuucuuuaguagauuaaauugguugacccacuuaaacuucaaauacccagcauugaacgugacuaugccaaacaaugaacaauuugacaaauuguacauuugggggguucaccacccggguacggacaaggaccaaaucuuccuguaugcucaaucaucaggaagaaucacaguaucuaccaaaagaagccaacaagcuguaaucccgaauaucggaucuagacccagaauaaggaauaucccuagcagaauaagcaucuauuggacaauaguaaaaccaggagacauacuuuugauuaacagcacagggaaucuaauugcuccuagggguuacuucaaaauacgaagugggaaaagcucaauaaugagaucagaugcacccauuggcaaaugcaagucugaaugcaucacuccaaauggaagcauuccaaaugacaaaccauuccaaaauguaaacaggaucacauacggggccugucccagauauguuaagcaaagcacucugaaauuggcaacaggaaugcgaaacguaccagagaaacaaacuagaggcauauuuggcgcaauagcggguuucauagaaaaugguugggagggaaugguagaugguugguacgguuucaggcaucaaaauucugagggaagaggacaagcagcagaucucaaaagcacucaagcagcaaucgaucaaaucaaugggaaacugaaucgauugaucgggaaaaccaacgagaaauuccaucagauugaaaaagaauucucagaaguagaagggagaauucaggaccuugagaaauauguugaggauacuaaaauagaucucuggucauacaaugcggagcuucuuguugcccuggagaaccaacauacaauugaucuaacugacucagaaaugaacaaacuguuugaaaaaacaaagaagcaacugagggaaaaugcugaggauaugggcaaugguuguuucaaaauauaccacaaaugugacaaugccugcauaggaucaaucagaaauggaacuuaugaccacgauguauacagggaugaagcauuaaacaaccgguuccagaucaagggaguugagcugaagucaggguacaaagauuggauccuauggauuuccuuugccauaucauguuuuuugcuuuguguugcuuuguugggguucaucaugugggccugccaaaagggcaacauuaggugcaacauuugcauuuga

SEQ ID NO: 44232 - RNA, 1701 nt, Artificial Sequence
  derived and/or modified CDS sequence (wt) from hemagglutinin__InfluenzaA__AHZ40548
augaagacuaucauugcuuugagcuacauucuaugucugguuuucgcucaaaaacuuccuggaaaugacaauagcacggcaacgcugugccuugggcaccaugcaguaccaaacggaacgauagugaaaacaaucacgaaugaccgaauugaaguuacuaaugcuacugagcugguucagaauuccucaauaggugaaauaugcgacaguccucaucagauccuugauggagaaaacuguacacuaauagaugcucuauugggagacccucagugugauggcuuucaaaauaagaaaugggaccuuuuuguugaacgaagcaaagccuacagcaacuguuacccuuaugaugugccggauuaugccucccuuaggucacuaguugccucauccggcacacuggaguuuaacaaugaaagcuucaauuggacuggagucacccaaaacggaacaaguucugcuugcauaaggagaucuaauaguaguuucuuuaguagauuaaauugguugacccacuuaaacuucaaauacccagcauugaacgugacuaugccaaacaaugaacaauuugacaaauuguacauuugggggguucaccacccggguacggacaaggaccaaaucuuccuguaugcucaaucaucaggaagaaucacaguaucuaccaaaagaagccaacaagcuguaaucccgaauaucggaucuagacccagaauaaggaauaucccuagcagaauaagcaucuauuggacaauaguaaaaccaggagacauacuuuugauuaacagcacagggaaucuaauugcuccuagggguuacuucaaaauacgaagugggaaaagcucaauaaugagaucagaugcacccauuggcaaaugcaagucugaaugcaucacuccaaauggaagcauuccaaaugacaaaccauuccaaaauguaaacaggaucacauacggggccugucccagauauguuaagcaaagcacucugaaauuggcaacaggaaugcgaaauguaccagagaaacaaacuagaggcauauuuggcgcaauagcggguuucauagaaaaugguugggagggaaugguggaugguugguacgguuucaggcaucaaaauucugagggaagaggacaagcagcagaucucaaaagcacucaagcagcaaucgaucaaaucaaugggaagcugaaucgauugaucgggaaaaccaacgagaaauuccaucagauugaaaaagaauucucagaaguagaagggagaauucaggaccuugagaaauauguugaggacacuaaaauagaucucuggucauacaacgcggagcuucuuguugcccuggagaaccaacauacaauugaucuaacugacucagaaaugaacaaacuguuugaaaaaacaaagaagcaacugagggaaaaugcugaggauaugggcaaugguuguuucaaaauauaccacaaaugugacaaugccugcauaggaucaaucagaaauggaacuuaugaccacgauguauacagggaugaagcauuaaacaaccgguuccagaucaagggaguugagcugaagucaggguacaaagauuggauccuauggauuuccuuugccauaucauguuuuuugcuuuguguugcuuuguugggguucaucaugugggccugccaaaagggcaacauuaggugcaacauuugcauuuga

SEQ ID NO: 44233 - RNA, 1701 nt, Artificial Sequence; identical to SEQ ID NO: 41870
  derived and/or modified CDS sequence (wt) from hemagglutinin__InfluenzaA__AHZ40572

SEQ ID NO: 44234 - RNA, 1701 nt, Artificial Sequence
  derived and/or modified CDS sequence (wt) from hemagglutinin__InfluenzaA__AHZ40583
augaagacuaucauugcuuugagcuacauucuaugucugguuuucgcucaaaaacuuccuggaaaugacaauagcacggcaacgcugugccuugggcaccaugcaguaccaaacggaacgauagugaaaacaaucacgaaugaccgaauugaaguuacuaaugccacugagcugguucagaauuccucaauaggugaaauaugcgacaguccucaucagauccuugauggagaaaacugcacacuaauagaugcucuauugggagacccucagugcgauggcuuucaaaauaagaaaugggaccuuuuuguugaacgaagcaaagccuacagcaacuguuacccuuaugaugugccggauuaugccucccuuaggucacuaguugccucauccggcacacuggaguuuaacaaugaaagcuucaauuggacuggagucacucaaaacggaacaaguucugcuugcauaaggagaucuaauaguaguuucuuuaguagauuaaauugguugacccacuuaaacuucaaauacccagcauugaacgugacuaugccaaacaaugaacaauuugacaaauuguacauuugggggguucaccacccggguacggacaaggaccaaaucuuccuguaugcucaaucaucaggaagaaucacaguaucuaccaaaagaagccaacaagcuguaaucccaaauaucggaucuagacccagaauaaggaauaucccuagcagaauaagcaucuauuggacaauaguaaaaccgggagacauacuuuugauuaacagcacagggaaucuaauugcuccuagggguuacuucaaaauacgaagugggaaaagcucaauaaugagaucagaugcacccauuggcaaaugcaagucugaaugcaucacuccaaauggaagcauucccaaugacaaaccauuccaaaauguaaacaggaucacauacggggccugucccagauauguuaagcaaagcacucugaaauuggcaacaggaaugcggaauguaccagagaaacaaacuagaggcauauuuggugcaauagcggguuucauagaaaaugguugggagggaaugguggaugguugguacgguuucaggcaucaaaauucugagggaagaggacaagcagcagaucucaaaagcacucaagcagcaaucgaucaaaucaaugggaagcugaaucgauugaucgggaaaaccaacgagaaauuccaucagauugaaaaagaauucucagaaguagaagggagaauucaagaccuugagaaauauguugaggacacuaaaauagaucucuggucauacaacgcggagcuucuuguugcccuggagaaccaacauacaauugaucuaacugacucagaaaugaacaaacuguuugaaaaaacaaagaagcaacugagggaaaaugcugaggauaugggcaaugguuguuucaaaauauaccacaaaugugacaaugccugcauaggaucaaucagaaauggaacuuaugaccacaauguguacagggaugaagcauuaaacaaccgguuccagaucaagggaguugagcugaagucaggguacaaagauuggauccuauggauuuccuuugccauaucauguuuuuugcuuuguguugcuuuguugggguucaucaugugggcaugccaaaagggcaacauuaggugcaacauuugcauuuga

SEQ ID NO: 44235 - RNA, 1701 nt, Artificial Sequence
  derived and/or modified CDS sequence (wt) from hemagglutinin__InfluenzaA__AHZ40595
augaaggcaauacuaguaguuaugcuauauacauuugcaaccgcaaaugcagacacauuauguauagguuaucaugcgaacaauucaacagacacuguagacacaguacuagaaaagaauguaacaguaacacacucuguuaaucuucuagaagacaagcaugacgggaaacuaugcaaacuaagagggguagccccauugcauuuggguaaauguaacauugcuggcuggauccugggaaauccagagugugaaucacucuccacagcaagcucaugguccuacauuguggaaacaucugguucagacaauggaacguguuacccaggagauuucaucgauuaugaggagcuaagagagcaauugagcucagugucaucauuugaaagguuugagauauuccccaaaacaaguucauggcccaaucaugacucgaacaaagguguaacggcagcauguccucaugcuggagcaaaaggcuucuacaaaaauuuaauauggcuaguuaaaaaaggaaauucauacccaaagcucagcauauccuacauuaaugauaaagggaaagaaguccucgugcuauggggcauucaccauccaucuacuacugcugaccaacaaagucucuaucagaaugcagauacauauguuuuuguggggacaucaagauacagcaagaaguucaagccggaaauagcaauaagacccaaagugagggaucaagaagggagaaugaacuauuacuggacacuaguagagccgggagacaaaauaacauucgaagcaacuggaaaucuagugguaccgagauaugcauuugcaaugaaaagaaaugcuggaucugguauuaucauuucagauacaccaguucacgauugcaauacaacuugucagacacccaagggugcuauaaacaccagccucccauuucagaauauacauccaaucacaauuggaaaauguccaaaauauguaaaaagcacaaaauugagacuggccacaggauugaggaaugucccgucuauucaaucuagaggccuauuuggggccauugcuggcuucauugaagggggauggacagggaugguagauggaugguacgguuaucaccaucaaaaugagcaggggucaggauaugcagccgaccugaagagcacacagaaugccauugacaagauuacuaacaaaguaaauucuguuauugaaaagaugaauacacaguucacagcaguagguaaagaguucaaccaccuggaaaaaagaauagagaauuuaaauaaaaaaguugaugaugguuuccuggacauuuggacuuacaaugccgaacuguugguucuauuggaaaaugaaagaacuuuggacuaccacgauucaaaugugaagaacuuauaugaaaagguaagaaaccaguuaaaaaacaaugccaaagaaauuggaaauggcugcuuugaauuuuaccacaaaugcgauaacacgugcauggaaagugucaaaaaugggacuuaugauuacccaaaauacucagaggaagcaaaauuaaacagagaaaaaauagaugggguaaagcuggaaucaacaaggauuuaccagauuuuggcgaucuauucaacugccgcuaguucauugguacugguagucucccugggggcaaucaguuuuuggaugugcucuaaugggucucuacaguguagaauauguauuuaa

SEQ ID NO: 44236 - RNA, 1701 nt, Artificial Sequence
  derived and/or modified CDS sequence (wt) from hemagglutinin__InfluenzaA__AHZ40606
augaagacuaucauugcuuugagcuacauucuaugucugguuuucgcucaaaaacuuccuggaaaugacaauagcacggcaacgcugugccuugggcaccaugcaguaccaaacggaacgauagugaaaacaaucacgaaugaccgaauugaaguuacuaaugcuacugagcugguucagaauuccucaauaggugaaauaugcgacaguccucaucagauccuugauggagaaaacuguacacuaauagaugcucuauugggagacccucagugugauggcuuucaaaauaagaaaugggaccuuuuuguugaacgaagcaaagccuacagcaacuguuacccuuaugaugugccggauuaugccucccuuaggucacuaguugccucauccggcacacuggaguuuaacaaugaaagcuucaauuggacuggagucacucaaaacggaacaaguucugcuugcauaaggagaucuaauaguaguuucuuuaguagauuaaauugguugacccacuuaaacuucaaauacccagcauugaacgugacuaugccaaacaaugaacaauuugacaaauuauacauuugggggguucaccacccggguacggacaaggaccaaaucuuccuguaugcucaaucaucaggaagaaucacaguaucuaccaaaagaagccaacaagcuguaaucccgaauaucggaucuagacccagaauaaggaauaucccuagcagaauaagcaucuauuggacaauaguaaaaccaggagacauacuuuugauuaacagcacagggaaucuaauugcuccuagggguuacuucaaaauacgaagugggaaaagcucaauaaugagaucagaugcacccauuggcaaaugcaagucugaaugcaucacuccaaauggaagcauuccaaaugacaaaccauuccaaaauguaaacaggaucacauacggggccugucccagauauguuaagcaaagcacucugaaauuggcaacaggaaugcgaaauguaccagagaaacaaacuagaggcauauuuggcgcaauagcggguuucauagaaaaugguugggagggaaugauggaugguugguacgguuucaggcaucaaaauucugagggaagaggacaagcagcagaucucaaaagcacucaagcagcaaucgaucaaaucaaugggaagcugaaucgauugaucgggaaaaccaacgagaaauuccaucagauugaaaaagaauucucagaaguagaagggagaauucaggaccuugagaaauauguugaggacacuaaaauagaucucuggucauacaacgcggagcuucuuguugcccuggagaaccaacauacaauugaucuaacugacucagaaaugaacaaacuguuugaaaaaacaaagaagcaacugagggaaaaugcugaggauaugggcaaugguuguuucaaaauauaccacaaaugugacaaugccugcauaggaucaaucagaaauggaacuuaugaccacgauguauacagggaugaagcauuaaacaaccgguuccagaucaagggaguugagcugaagucaggguacaaagauuggauccuauggauuuccuuugccauaucauguuuuuugcuuuguguugcuuuguugggguucaucaugugggccugccaaaagggcaacauuaggugcaacauuugcauuuga

SEQ ID NO: 44237 - RNA, 1701 nt, Artificial Sequence; identical to SEQ ID NO: 41901
  derived and/or modified CDS sequence (wt) from hemagglutinin__InfluenzaA__AHZ40618

SEQ ID NO: 44238 - RNA, 1701 nt, Artificial Sequence
  derived and/or modified CDS sequence (wt) from hemagglutinin__InfluenzaA__AHZ40626
augaagaccaucauugcuuugagcuacauucuaugucuaguuuucgcucaagaacuuccuggaaaugacgacagcacggcaacgcugugccuugggcaccaugcagugccaaacggaacgauagugaaaacaaucacgaaugaccaaauugaaguuacuaaugcuacugagcugguucagaguuccucaacaggugaaauaugcaacaguccucaucagauccuugauggagaaaacugcacacuaauagaugcucuauugggagacccucagugugauggcuuccaaaacaagaaaugggaccuuuuuguugaacgaagcaaagcccacagcaacuguuacccuuaugaugugccggauuaugccucccuuaggucacuaguugccucauccggcacacuggaguuuaacaaugaaagcuucaauuggacuggagucacucaaaacggaacaagcucugcuugcauaaggagaucuaauaauaguuucuuuaguagauugaauugguugacccacuuaaacuucaaauacccagcauugaacgugacuaugccaaacaaugaacaauuugacaaauuguacauuugggggguucaccacccggguacggacaaggaccaaaucuuccuguaugcucaagcaucaggaagaaucacaguaucuaccaaaagaagccaacaagcuguaauuccgaauaucggaucuagacccagaguaaggaauaucccuagcagaguaagcaucuauuggacaauaguaaaaccgggagacauacuuuugauuaacagcacagggaaucuaauugcuccuagggguuacuucaaaauacgaagugggaaaagcucaauaaugagaucagaugcacccauuggcaaaugcaauucugcaugcaucacuccaaauggaagcauucccaaugacaaaccauuccaaaauguaaacaggaucacauacggggccugucccagauaugucaagcaaaacacucugaaauuggcaacaggaaugagaaauguaccagagaaacaaacuagaggcauauuuggcgcaauagcggguuucauagaaaaugguugggagggaaugguggaugguugguacgguuucaggcaucaaaauucugagggaaggggacaagcagcagaucucaaaagcacucaagcagcaaucgaucaaaucaaugggaagcugaauagauugaucgggaaaaccaacgagaaauuccaucagauugaaaaagaauucucagaagucgaagggagaauucaggaccuugagaaauauguugaggacacuaaaauagaucucuggucauacaacgcggagcuucuuguugcccuggagaaccaacacacaauugaucuaacugacucagaaaugaacaaacuguuugaaaaaacaaagaagcaacugagggaaaaugcugaggauaugggcaaugguuguuucaaaauauaccacaaaugugacaaugccugcauaggaucaaucagaaauggaacuuaugaucacgauguguacagagaugaagcauuaaacaaccgauuccagaucaagggaauugagcugaagucaggguacaaagauuggauccuauggauuuccuuugccauaucauguuuuuugcuuuguguugcuuuguugggguucaucaugugggccugccaaaaaggcaacauuaggugcaacauuugcauuuga

SEQ ID NO: 44239 - RNA, 1701 nt, Artificial Sequence
  derived and/or modified CDS sequence (wt) from hemagglutinin__InfluenzaA__AHZ40638
augaagacuaucauugcuuugagcuacauucuauguuugguuuucgcucaaaaacuuccuggaaaugacaauagcacggcaacgcugugccuugggcaccaugcaguaccaaacggaacgauagugaaaacaaucacgaaugaccgaauugaaguuacuaaugcuacugagcugguucagaauuccucaauaggugaaauaugcgacaguccucaucagauccuugauggagaaaacuguacacuaauagaugcucuauugggagacccucagugugauggcuuucaaaauaagaaaugggaccuuuuuguugaacgaagcaaagccuacagcaacuguuacccuuaugaugugccggauuaugccucccuuaggucacuaguugccucauccggcacacuggaguuuaacaaugaaagcuucaauuggacuggagucacucaaaacggaacaaguucugcuugcauaaggagaucuaauaguaguuucuuuaguagauuaaauugguugacccacuuaaacuucaaauacccagcauugaacgugacuaugccaaacaaugaacaauuugacaaauuguacauuugggggguucaccacccggguacggacaaggaccaaaucuuccuguaugcucaaucaucaggaagaaucacaguaucuaccaaaagaagccaacaagcuguaaucccgaauaucggaucuagacccagaauaaggaauaucccuagcagaauaagcaucuauuggacaauaguaaaaccaggagacauacuuuugauuaacagcacagggaaucuaauugcuccuagggguuacuucaaaauacgaagugggaaaagcucaauaaugagaucagaugcacccauuggcaaaugcaagucugaaugcaucacuccaaauggaagcauuccaaaugacaaaccauuccaaaauguaaacaggaucacauacggggccugucccagauauguuaagcaaagcacucugaaauuggcaacaggaaugcgaaauguaccagagaaacaaacuagaggcauauuuggcgcaauagcggguuucauagaaaaugguugggagggaaugguggaugguugguacgguuucaggcaucaaaauucugagggaagaggacaagcagcagaucucaaaagcacucaagcagcaaucgaucaaaucaaugggaagcugaaucgauugaucgggaaaaccaacgagaaauuccaucagauugaaaaagaauucucagaaguagaagggagaauucaggaccuugagaaauauguugaggacacuaaaauagaucucuggucauacaacgcggagcuucuuguugcccuggagaaccaacauacaauugaucuaacugacucagaaaugaacaaacuguuugaaaaaacaaagaagcaacuaagggaaaaugcugaggauaugggcaaugguuguuucaaaauauaccacaaaugugacaaugccugcauaggaucaaucagaaauggaacuuaugaccacgauguauacagggaugaagcauuaaacaaccgguuccagaucaagggaguugagcugaagucaggguacaaagauuggauccuauggauuuccuuugccauaucauguuuuuugcuuuguguugcuuuguugggguucaucaugugggccugccaaaagggcaacauuaggugcaacauuugcauuuga

SEQ ID NO: 44240 - RNA, 1701 nt, Artificial Sequence; identical to SEQ ID NO: 41870
  derived and/or modified CDS sequence (wt) from hemagglutinin__InfluenzaA__AHZ40650

SEQ ID NO: 44241 - RNA, 1701 nt, Artificial Sequence
  derived and/or modified CDS sequence (wt) from hemagglutinin__InfluenzaA__AHZ40662
augaagaccaucauugcuuugagcuacauucuaugucuaguuuucgcucaagaacuuccuggaaaugacgacagcacggcaacgcugugccuugggcaccaugcagugccaaacggaacgauagugaaaacaaucacgaaugaccgaauugaaguuacuaaugcuacugagcugguucagaguuccucaacaggugaaauaugcaacaguccucaucagauccuugauggagaaaacugcacacuaauagaugcucuauugggagacccucagugugauggcuuccaaaacaagaaaugggaccuuuuuguugaaagaagcaaagcccacagcaacuguuacccuuaugaugugccggauuaugccucccuuaggucacuaguugccucauccggcacacuggaguuuaacaaugaaagcuucaauuggacuggagucacucaaaacggaacaagcucugcuugcauaaggagaucuaauaauaguuucuuuaguagauugaauugguugacccacuuaaacuucaaauacccagcauugaacgugacuauaccaaacaaugaacaauuugacaaauuguacauuugggggguucaccacccggguacagacaaggaccaaaucuuccuguaugcucaagcaucaggaagaaucacaguaucuaccaaaagaagccaacaaacuguaauuccgaauaucggaucuagacccagaguaaggaauaucccuagcagaguaagcaucuauuggacaauaguaaaaccaggagacauacuuuugauuaacagcacagggaaucuaauugcuccuagggguuacuucaaaauacgaaguggaaaaagcucaauaaugagaucagaugcacccauuggcaaaugcaauucugcaugcaucacuccaaauggaagcauucccaaugacaaaccauuccaaaauguaaacaggaucacauacggggccugucccagauaugucaagcaaaacacucugaaauuggcaacaggaaugagaaauguaccagagaaacaaacuagaggcauauuuggugcaauagcggguuucauagaaaaugguugggagggaaugguggaugguugguacgguuucaggcaucaaaauucugagggaaggggacaagcagcagaucucaaaagcacucaagcagcaaucgaucaaaucaaugggaagcugaauagauugaucgggaaaaccaacgagaaauuccaucagauugaaaaagaauucucagaagucgaagggagaauucaggaccuugagaaauauguugaggacacuaaaauagaucucuggucauacaacgcggagcuucuuguugcccuggagaaccaacacacaauugaucuaacugacucagaaaugaacaaacuguuugaaaaaacaaagaagcaacugagggaaaaugcugaggauaugggcaaugguuguuucaaaauauaccacaaaugugacaaugccugcauaggaucaaucagaaauggaacuuaugaucacgauguguacagagaugaagcauuaaacaaccgauuccagaucaagggaguugagcugaagucaggguacaaagauuggauccuauggauuuccuuugccauaucauguuuuuugcuuuguguugcuuuguugggguucaucaugugggccugccaaaaaggcaacauuaggugcaacauuugcauuuga

SEQ ID NO: 44242 - RNA, 1701 nt, Artificial Sequence; identical to SEQ ID NO: 41915
  derived and/or modified CDS sequence (wt) from hemagglutinin__InfluenzaA__AHZ40674

SEQ ID NO: 44243 - RNA, 1701 nt, Artificial Sequence; identical to SEQ ID NO: 41901
  derived and/or modified CDS sequence (wt) from hemagglutinin__InfluenzaA__AHZ40686

SEQ ID NO: 44244 - RNA, 1701 nt, Artificial Sequence; identical to SEQ ID NO: 41880
  derived and/or modified CDS sequence (wt) from hemagglutinin__InfluenzaA__AHZ40698

SEQ ID NO: 44245 - RNA, 1701 nt, Artificial Sequence; identical to SEQ ID NO: 41880
  derived and/or modified CDS sequence (wt) from hemagglutinin__InfluenzaA__AHZ40710

SEQ ID NO: 44246 - RNA, 1701 nt, Artificial Sequence; identical to SEQ ID NO: 42583
  derived and/or modified CDS sequence (wt) from hemagglutinin__InfluenzaA__AHZ40722

SEQ ID NO: 44247 - RNA, 1701 nt, Artificial Sequence
  derived and/or modified CDS sequence (wt) from hemagglutinin__InfluenzaA__AHZ40734
augaagacuaucauugcuuugagcuacauucuaugucugguuuucgcucaaaaacuuccuggaaaugacaauagcacggcaacgcugugccuugggcaccaugcaguaccaaacggaacgauagugaaaacaaucacgaaugaccgaauugaaguuacuaaugcuacugagcugguucagaauuccucaauaggugaaauaugcgacaguccucaucaaauccuugauggagaaaacugcacacuaauagaugcucuauugggagacccucagugugauggcuuucaaaauaagaaaugggaccuuuuuguugaacgaagcaaagccuacagcaacuguuacccuuaugaugugccggauuaugccucccuuaggucacuaguugccucauccggcacacuggaguuuaacaaugaaaacuucaauuggacuggagucacucaaaacggaacaaguucugcuugcauaaggagaucuaauaguaguuucuuuaguagauuaaauugguugacccacuuaaacuucaaauacccagcauugaacgugacuaugccaaacaaugaacaauuugacaaauuguacauuugggggguucaccacccgggcacggacaaggaccaaaucuuccuguaugcucaaucaucaggaagaaucacaguaucuaccaaaagaagccaacaagcuguaaucccgaauaucggaucuagacccagaauaaggaauaucccuagcagaauaagcaucuauuggacaauaguaaaaccgggagacauacuuuugauuaacagcacagggaaucuaauugcuccuagggguuacuucaaaauacgaagugggaaaagcucaauaaugagaucagaugcacccauuggcaaaugcaagucugaaugcaucacuccaaauggaagcauucccaaugacagaccauuccaaaauguaaacaggaucacauacggggccugucccagauauguuaagcaaagcacucugaaauuggcaacaggaaugcgaaauguaccagagaaacaaacuagaggcauauuuggcgcaauagcggguuucauagaaaaugguugggagggaaugguggaugguugguacgguuucaggcaucaaaauucugagggaagaggacaagcagcagaucucaaaagcacucaagcagcaaucgaucaaaucaaugggaagcugaaucgauugaucgggaaaaccaacgagaaauuccaucagauugaaaaagaauucucagaaguagaagggagaauucaggaccuugagaaauauguugaggacacuaaaauagaucucuggucauacaacgcggagcuucuuguugcccuggagaaccaacauacaauugaucuaacugacucagaaaugaacaaacuguuugaaaaaacaaagaagcaacugagggaaaaugcugaggauaugggcaaugguuguuucaaaauauaccacaaaugugacaaugccugcauaggaucaaucagaaauggaacuuaugaccacgauguguacagggaugaagcauuaaacaaccgguuccagaucaagggaguugagcugaagucaggguacaaagauuggauccuauggauuuccuuugccauaucauguuuuuugcuuuguguugcuuuguugggguucaucaugugggccugccaaaagggcaacauuaggugcaacauuugcauuuga

SEQ ID NO: 44248 - RNA, 1701 nt, Artificial Sequence
  derived and/or modified CDS sequence (wt) from hemagglutinin__InfluenzaA__AHZ40746
augaagacuaucauugcuuugagcuacauucuaugucugguuuucgcucaaaaacuuccuggaaaugacaauagcacggcaacgcugugccuugggcaccaugcaguaccaaacggaacgauagugaaaacaaucacgaaugaccgaauugaaguuacuaaugcuacugagcugguucagaauuccucaauaggugaaauaugcgacaguccucaucagauccuugauggagaaaacugcacacuaauagaugcucuauugggagacccucagugugauggcuuucaaaauaagaaaugggaccuuuuuguugaacgaagcaaagccuacagcaacuguuacccuuaugaugugccggauuaugccucccuuaggucacuaguugccucauccggcacacuggaguuuaacaaugaaagcuucaauugggcuggagucacucaaaacggaacaaguucugcuugcauaaggggaucuaauaguaguuucuuuaguagauuaaauugguugacccacuuaaacuucaaauacccagcauugaacgugacuaugccaaacaaugaacaauuugacaaauuguacauuugggggguucaccacccggguacggacaaggaccaaaucuuccuguaugcucaaucaucaggaagaaucacaguaucuaccaaaagaagccaacaagcuguaaucccgaauaucggaucuagacccagaauaaggaauaucccuagcagaauaagcaucuauuggacaauaguaaaaccgggagacauacuuuugauuaacagcacagggaaucuaauugcuccuagggguuacuucaaaauacgaagugggaaaagcucaauaaugagaucagaugcacccauuggcaaaugcaagucugaaugcaucacuccaaauggaagcauucccaaugacaaaccauuccaaaauguaaacaggaucacauacggggccugucccagauauguuaagcaaagcacucugaaauuggcaacaggaaugcgaaauguaccagagaaacaaaccagaggcauauuuggcgcaauagcggguuucauagaaaaugguugggagggaaugguggaugguugguacgguuucaggcaucaaaauucugagggaagaggacaagcagcagaucucaaaagcacucaagcagcaaucgaucaaaucaaugggaagcugaaucgauugaucgggaaaaccaacgagaaauuccaucagauugagaaagaauucucagaaguagaagggagaauucaggaccuugagaaauauguugaggacacaaaaauagaucucuggucauacaacgcggagcuucuuguugcccuggagaaccaacauacaauugaucuaacugacucagaaaugaacaaacuguuugaaaaaacaaagaagcaacugagggaaaaugcugaggauaugggcaaugguuguuucaaaauauaccacaaaugugacaaugccugcauaggaucaaucagaaauggaacuuaugaccacgauguauacagggaugaagcauuaaacaaccgguuccagaucaagggaguugagcugaagucaggguacaaagauuggauccuauggauuuccuuugccauaucauguuuuuugcuuuguguugcuuuguugggguucaucaugugggccugccaaaagggcaacauuaggugcaacauuugcauuuga

SEQ ID NO: 44249 - RNA, 1701 nt, Artificial Sequence; identical to SEQ ID NO: 44199
  derived and/or modified CDS sequence (wt) from hemagglutinin__InfluenzaA__AHZ40758

SEQ ID NO: 44250 - RNA, 1701 nt, Artificial Sequence; identical to SEQ ID NO: 34679
  derived and/or modified CDS sequence (wt) from hemagglutinin__InfluenzaA__AHZ40782

SEQ ID NO: 44251 - RNA, 1701 nt, Artificial Sequence; identical to SEQ ID NO: 34679
  derived and/or modified CDS sequence (wt) from hemagglutinin__InfluenzaA__AHZ40793

SEQ ID NO: 44252 - RNA, 1701 nt, Artificial Sequence; identical to SEQ ID NO: 34679
  derived and/or modified CDS sequence (wt) from hemagglutinin__InfluenzaA__AHZ40804

SEQ ID NO: 44253 - RNA, 1701 nt, Artificial Sequence
  derived and/or modified CDS sequence (wt) from hemagglutinin__InfluenzaA__AHZ40815
augaaggcaauacuaguaguucugcuauauacauuugcaaccgcaaaugcagacacauuauguauagguuaucaugcgaacaauucaacagacacuguagacacaguacuagaaaagaauguaacaguaacacacucuguuaaccuucuagaagacaagcauaacgggaaacuaugcaaacuaagagggguagccccauugcauuuggguaaauguaacauugcuggcuggauccugggaaauccagagugugaaucacucuccacagcaagcucaugguccuacauuguggaaacaccuaguucagacaauggaacguguuacccaggagauuucaucgauuaugaggagcuaagagagcaauugagcucagugucaucauuugaaagguuugagauauuccccaagacaaguucauggcccaaucaugacucgaacaaagguguaacggcagcauguccucaugcuggagcaaaaagcuucuacaaaaauuuaauauggcuaguuaaaaaaggaaauucauacccaaagcucagcaaauccuacauuaaugauaaagggaaagaaguccucgugcuauggggcauucaccauccaucuacuagugcugaccaacaaagucucuaucagaaugcagaugcauauguuuuuguggggucaucaagauacagcaagaaguucaagccggaaauagcaauaagacccaaagugagggaucgagaagggagaaugaacuauuacuggacacuaguagagccgggagacaaaauaacauucgaagcaacuggaaaucuagugguaccgagauaugcauucgcaauggaaagaaaugcuggaucugguauuaucauuucagauacaccaguccacgauugcaauacaacuugucaaacacccaagggugcuauaaacaccagccucccauuucagaauauacauccgaucacaauuggaaaauguccaaaauauguaaaaagcacaaaauugagacuggccacaggauugaggaauaucccgucuauucaaucuagaggccuauuuggggccauugccgguuucauugaagggggguggacagggaugguagauggaugguacgguuaucaccaucaaaaugagcaggggucaggauaugcagccgaccugaagagcacacagaaugccauugacgagauuacuaacaaaguaaauucuguuauugaaaagaugaauacacaguucacagcaguagguaaagaguucaaccaccuggaaaaaagaauagagaauuuaaauaaaaaaguugaugaugguuuccuggacauuuggacuuacaaugccgaacuguugguucuauuggaaaaugaaagaacuuuggacuaccacgauucaaaugugaagaacuuauaugaaaagguaagaagccagcuaaaaaacaaugccaaggaaauuggaaacggcugcuuugaauuuuaccacaaaugcgauaacacgugcauggaaagugucaaaaaugggacuuaugacuacccaaaauacucagaggaagcaaaauuaaacagagaagaaauagaugggguaaagcuggaaucaacaaggauuuaccagauuuuggcgaucuauucaacugucgccaguucauugguacugguagucucccugggggcaaucaguuucuggaugugcucuaaugggucucuacaguguagaauauguauuuaa

SEQ ID NO: 44254 - RNA, 1701 nt, Artificial Sequence
  derived and/or modified CDS sequence (wt) from hemagglutinin__InfluenzaA__AHZ40826
augaaggcaauacuaguaguucugcuauauacauuugcaaccgcaaaugcagacacauuauguauagguuaucaugcgaacaauucaacagacacuguagacacaguacuagaaaagaauguaacaguaacacacucuguuaaccuucuagaagacaagcauaacgggaaacuaugcaaacuaagagggguagccccauugcauuuggguaaauguaacauugcuggcuggauccugggaaauccagagugugaaucacucuccacagcaagcucaugguccuacauuguggaaacaccuaguucagacaauggaacguguuacccaggagauuucaucgauuaugaggagcuaagagagcaauugagcucagugucaucauuugaaagguuugagauauuccccaagacaaguucauggcccaaucaugacucgaacaaagguguaacggcagcauguccucaugcuggagcaaaaagcuucuacaaaaauuuaauauggcuaguuaaaaaaggaaauucauacccaaagcucagcaaauccuacauuaaugauaaagggaaagaaguccucgugcuauggggcauucaccauccaucuacuagugcugaccaacaaaguaucuaucagaaugcagaugcauauguuuuuguggggucaucaagauacagcaagaaguucaagccggaaauagcaauaagacccaaagugagggaucaagaagggagaaugaacuauuacuggacacuaguagagccgggagacaaaauaacauucgaagcaacuggaaaucuagugguaccgagauaugcauucgcaauggaaagaaaugcuggaucugguauuaucauuucagauacaccaguccacgauugcaauacaacuugucaaacacccaagggugcuauaaacaccagccucccauuucagaauauacauccgaucacaauuggaaaauguccaaaauauguaaaaagcacaaaauugagacuggccacaggauugaggaauaucccgucuauucaaucuagaggccuauuuggggccauugccgguuucauugaagggggguggacagggaugguagauggaugguacgguuaucaccaucaaaaugagcaggggucaggauaugcagccgaccugaagagcacacagaaugccauugacgagauuacuaacaaaguaaauucuguuauugaaaagaugaauacacaguucacagcaguagguaaagaguucaaccaccuggaaaaaagaauagagaauuuaaauaaaaaaguugaugaugguuuccuggacauuuggacuuacaaugccgaacuguugguucuauuggaaaaugaaagaacuuuggacuaccacgauucaaaugugaagaacuuauaugaaaagguaagaagccagcuaaaaaacaaugccaaggaaauuggaaacggcugcuuugaauuuuaccacaaaugcgauaacacgugcauggaaagugucaaaaaugggacuuaugacuacccaaaauacucagaggaagcaaaauuaaacagagaagaaauagaugggguaaagcuggaaucaacaaggauuuaccagauuuuggcgaucuauucaacugucgccaguucauugguacugguagucucccugggggcaaucaguuucuggaugugcucuaaugggucucuacaguguagaauauguauuuaa

SEQ ID NO: 44255 - RNA, 1701 nt, Artificial Sequence
  derived and/or modified CDS sequence (wt) from hemagglutinin__InfluenzaA__AHZ40848
augaaggcaauacuaguaguucugcuauauacauuugcaaccgcaaaugcagacacauuauguauagguuaucaugcgaacaauucaacagacacuguagacacaguacuagaaaagaauguaacaguaacacacucuguuaaccuucuagaagacaagcauaacgggaaacuaugcaaacuaagagggguagccccauugcauuuggguaaauguaacauugcuggcuggauccugggaaauccagagugugaaucacucuccacagcaagcucaugguccuacauuguggaaacaccuaguucagacaauggaacguguuacccaggagauuucaucgauuaugaggagcuaagagagcaauugagcucagugucaucauuugaaagguuugagauauuccccaagacaaguucauggcccaaucaugacucgaacaaagguguaacggcagcauguccucaugcuggagcaaaaagcuucuacaaaaauuuaauauggcuaguuaaagaaggaaauucauacccaaagcucagcaaauccuacauuaaugauaaagggaaagaaguccucgugcuauggggcauucaccauccaucuacuagugcugagcaacaaagucucuaucagaaugcagaugcauauguuuuuguggggucaucaagauacagcaagaaguucaagccggaaauagcagcaagacccaaagugaggggucaagcagggagaaugaacuauuacuggacacuaguagagccgggagacaaaauaacauucgaagcaacuggaaaucuagugguaccgagauaugcauucgcaauggaaagaaaugcuggaucugguauuaucauuucagauacaccaguccacgauugcaauacaacuugucaaacacccaagggugcuauaaacaccagccucccauuucagaauauacauccgaucacaauuggaaaauguccaaaauauguaaaaagcacaaaauugagacuggccacaggauugaggaauaucccgucuauucaaucuagaggccuauuuggggccauugccgguuucauugaagggggguggacagggaugguagauggaugguacgguuaucaccaucaaaaugagcaggggucaggauaugcagccgaccugaagagcacacagaaugccauugacgagauuacuaacaaaguaaauucuguuauugaaaagaugaauacacaguucacagcaguagguaaagaguucaaccaccuggaaaaaagaauagagaauuuaaauaaaaaaguugaugaugguuuccuggacauuuggacuuacaaugccgaacuguugguucuauuggaaaaugaaagaacuuuggacuaccacgauucaaaugugaagaacuuauaugaaaagguaagaagccagcuaaaaaacaaugccaaggaaauuggaaacggcugcuuugaauuuuaccacaaaugcgauaacacgugcauggaaagugucaaaaaugggacuuaugacuacccaaaauacucagaggaagcaaaauuaaacagagaagaaauagaugggguaaagcuggaaucaacaaggauuuaccagauuuuggcgaucuauucaacugucgccaguucauugguacugguagucucccugggggcaaucaguuucuggaugugcucuaaugggucucuacaguguagaauauguauuuaa

SEQ ID NO: 44256 - RNA, 1701 nt, Artificial Sequence
  derived and/or modified CDS sequence (wt) from hemagglutinin__InfluenzaA__AHZ40881
augaaggcaauacuaguaguucugcuauauacauuugcaaccgcaaaugcagacacauuauguauagguuaucaugcgaacaauucaacagacacuguagacacaguacuagaaaagaauguaacaguaacacacucuguuaaccuucuagaagacaagcauaacgggaaacuaugcaaacuaagagggguagccccauugcauuuggguaaauguaacauugcuggcuggauccugggaaauccagagugugaaucacucuccacagcaagcucaugguccuacauuguggaaacaccuaguucagacaauggaacguguuacccaggagauuucaucgauuaugaggagcuaagagagcaauugagcucagugucaucauuugaaagguuugagauauuccccaagacaaguucauggcccaaucaugacucgaacaaagguguaacggcagcauguccucaugcuggagcaaaaagcuucuacaaaaauuuaauauggcuaguuaaaaaaggaaauucauacccaaagcucagcaaauccuacauuaaugauaaagggaaagaaguccucgugcuauggggcauucaccauccaucuacuagugcugagcaacaaagucucuaucagaaugcagaugcauauguuuuuguggggucaucaagauacagcaagaaguucaagccggaaauagcagcaagacccaaagugaggggucaagcagggagaaugaacuauuacuggacacuaguagagccgggagacaaaauaacauucgaagcaacuggaaaucuagugguaccgagauaugcauucgcaauggaaagaaaugcuggaucugguauuaucauuucagauacaccaguccacgauugcaauacaacuugucaaacacccaagggugcuauaaacaccagccucccauuucagaauauacauccgaucacaauuggaaaauguccaaaauauguaaaaagcacaaaauugagacuggccacaggauugaggaauaucccgucuauucaaucuagaggccuauuuggggccauugccgguuucauugaagggggguggacagggaugguagauggaugguacgguuaucaccaucaaaaugagcaggggucaggauaugcagccgaccugaagagcacacagaaugccauugacgagauuacuaacaaaguaaauucuguuauugaaaagaugaauacacaguucacagcaguagguaaagaguucaaccaccuggaaaaaagaauagagaauuuaaauaaaaaaguugaugaugguuuccuggacauuuggacuuacaaugccgaacuguugguucuauuggaaaaugaaagaacuuuggacuaccacgauucaaaugugaagaacuuauaugaaaagguaagaagccagcuaaaaaacaaugccaaggaaauuggaaacggcugcuuugaauuuuaccacaaaugcgauaacacgugcauggaaagugucaaaaaugggacuuaugacuacccaaaauacucagaggaagcaaaauuaaacagagaagaaauagaugggguaaagcuggaaucaacaaggauuuaccagauuuuggcgaucuauucaacugucgccaguucauugguacugguagucucccugggggcaaucaguuucuggaugugcucuaaugggucucuacaguguagaauauguauuuaa

SEQ ID NO: 44257 - RNA, 1701 nt, Artificial Sequence; identical to SEQ ID NO: 44256
  derived and/or modified CDS sequence (wt) from hemagglutinin__InfluenzaA__AHZ40892

SEQ ID NO: 44258 - RNA, 1701 nt, Artificial Sequence; identical to SEQ ID NO: 44255
  derived and/or modified CDS sequence (wt) from hemagglutinin__InfluenzaA__AHZ40914

SEQ ID NO: 44259 - RNA, 1701 nt, Artificial Sequence; identical to SEQ ID NO: 44256
  derived and/or modified CDS sequence (wt) from hemagglutinin__InfluenzaA__AHZ40925

SEQ ID NO: 44260 - RNA, 1701 nt, Artificial Sequence
  derived and/or modified CDS sequence (wt) from hemagglutinin__InfluenzaA__AHZ40936
augaaggcaauacuaguaguucugcuauauacauuugcaaccgcaaaugcagacacauuauguauagguuaucaugcgaacaauucaacagacacuguagacacaguacuagaaaagaauguaacaguaacacacucuguuaaccuucuagaagacaagcauaacgggaaacuaugcaaacuaagagggguagccccauugcauuuggguaaauguaacauugcuggcuggauccugggaaauccagagugugaaucacucuccacagcaagcucaugguccuacauuguggaaacaccuaguucagacaauggaacguguuacccaggagauuucaucgauuaugaggagcuaagagagcaauugagcucagugucaucauuugaaagguuugagauauuccccaagacaaguucauggcccaaucaugacucgaacaaagguguaacggcagcauguccucaugcuggagcaaaaagcuucuacaaaaauuuaauauggcuaguuaaaaaaggaaauucauacccaaagcucagcaaauccuacauuaaugauaaagggaaagaaguccucgugcuauggggcauucaccauccaucuacuagugcugagcaacaaagucucuaucagaaugcagaugcauauguuuuuguggggucaucaagauacagcaagaaguucaagccggaaauagcagcaagacccaaagugagggaucaagcagggagaaugaacuauuacuggacacuaguagagccgggagacaaaauaacauucgaagcaacuggaaaucuagugguaccgagauaugcauucgcaauggaaagaaaugcuggaucugguauuaucauuucagauacaccaguccacgauugcaauacaacuugucaaacacccaagggugcuauaaacaccagccucccauuucagaauauacauccgaucacaauuggaaaauguccaaaauauguaaaaagcacaaaauugagacuggccacaggauugaggaauaucccgucuauucaaucuagaggccuauuuggggccauugccgguuucauugaagggggguggacagggaugguagauggaugguacgguuaucaccaucaaaaugagcaggggucaggauaugcagccgaccugaagagcacacagaaugccauugacgagauuacuaacaaaguaaauucuguuauugaaaagaugaauacacaguucacagcaguagguaaagaguucaaccaccuggaaaaaagaauagagaauuuaaauaaaaaaguugaugaugguuuccuggacauuuggacuuacaaugccgaacuguugguucuauuggaaaaugaaagaacuuuggacuaccacgauucaaaugugaagaacuuauaugaaaagguaagaagccagcuaaaaaacaaugccaaggaaauuggaaacggcugcuuugaauuuuaccacaaaugcgauaacacgugcauggaaagugucaaaaaugggacuuaugacuacccaaaauacucagaggaagcaaaauuaaacagagaagaaauagaugggguaaagcuggaaucaacaaggauuuaccagauuuuggcgaucuauucaacugucgccaguucauugguacugguagucucccugggggcaaucaguuucuggaugugcucuaaugggucucuacaguguagaauauguauuuaa

SEQ ID NO: 44261 - RNA, 1701 nt, Artificial Sequence; identical to SEQ ID NO: 44255
  derived and/or modified CDS sequence (wt) from hemagglutinin__InfluenzaA__AHZ40947

SEQ ID NO: 44262 - RNA, 1701 nt, Artificial Sequence; identical to SEQ ID NO: 44256
  derived and/or modified CDS sequence (wt) from hemagglutinin__InfluenzaA__AHZ40958

SEQ ID NO: 44263 - RNA, 1701 nt, Artificial Sequence; identical to SEQ ID NO: 44260
  derived and/or modified CDS sequence (wt) from hemagglutinin__InfluenzaA__AHZ40969

SEQ ID NO: 44264 - RNA, 1701 nt, Artificial Sequence; identical to SEQ ID NO: 44260
  derived and/or modified CDS sequence (wt) from hemagglutinin__InfluenzaA__AHZ40980

SEQ ID NO: 44265 - RNA, 1701 nt, Artificial Sequence; identical to SEQ ID NO: 44260
  derived and/or modified CDS sequence (wt) from hemagglutinin__InfluenzaA__AHZ40991

SEQ ID NO: 44266 - RNA, 1701 nt, Artificial Sequence; identical to SEQ ID NO: 44260
  derived and/or modified CDS sequence (wt) from hemagglutinin__InfluenzaA__AHZ41002

SEQ ID NO: 44267 - RNA, 1701 nt, Artificial Sequence; identical to SEQ ID NO: 44260
  derived and/or modified CDS sequence (wt) from hemagglutinin__InfluenzaA__AHZ41013

SEQ ID NO: 44268 - RNA, 1701 nt, Artificial Sequence; identical to SEQ ID NO: 44256
  derived and/or modified CDS sequence (wt) from hemagglutinin__InfluenzaA__AHZ41024

SEQ ID NO: 44269 - RNA, 1701 nt, Artificial Sequence; identical to SEQ ID NO: 44256
  derived and/or modified CDS sequence (wt) from hemagglutinin__InfluenzaA__AHZ41035

SEQ ID NO: 44270 - RNA, 1701 nt, Artificial Sequence; identical to SEQ ID NO: 44256
  derived and/or modified CDS sequence (wt) from hemagglutinin__InfluenzaA__AHZ41046

SEQ ID NO: 44271 - RNA, 1701 nt, Artificial Sequence; identical to SEQ ID NO: 44256
  derived and/or modified CDS sequence (wt) from hemagglutinin__InfluenzaA__AHZ41057

SEQ ID NO: 44272 - RNA, 1701 nt, Artificial Sequence; identical to SEQ ID NO: 44256
  derived and/or modified CDS sequence (wt) from hemagglutinin__InfluenzaA__AHZ41068

SEQ ID NO: 44273 - RNA, 1701 nt, Artificial Sequence; identical to SEQ ID NO: 44260
  derived and/or modified CDS sequence (wt) from hemagglutinin__InfluenzaA__AHZ41079

SEQ ID NO: 44274 - RNA, 1701 nt, Artificial Sequence; identical to SEQ ID NO: 44256
  derived and/or modified CDS sequence (wt) from hemagglutinin__InfluenzaA__AHZ41090

SEQ ID NO: 44275 - RNA, 1701 nt, Artificial Sequence; identical to SEQ ID NO: 44260
  derived and/or modified CDS sequence (wt) from hemagglutinin__InfluenzaA__AHZ41101

SEQ ID NO: 44276 - RNA, 1701 nt, Artificial Sequence; identical to SEQ ID NO: 44256
  derived and/or modified CDS sequence (wt) from hemagglutinin__InfluenzaA__AHZ41112

SEQ ID NO: 44277 - RNA, 1701 nt, Artificial Sequence; identical to SEQ ID NO: 44256
  derived and/or modified CDS sequence (wt) from hemagglutinin__InfluenzaA__AHZ41123

SEQ ID NO: 44278 - RNA, 1701 nt, Artificial Sequence; identical to SEQ ID NO: 44256
  derived and/or modified CDS sequence (wt) from hemagglutinin__InfluenzaA__AHZ41134

SEQ ID NO: 44279 - RNA, 1701 nt, Artificial Sequence; identical to SEQ ID NO: 44256
  derived and/or modified CDS sequence (wt) from hemagglutinin__InfluenzaA__AHZ41145

SEQ ID NO: 44280 - RNA, 1701 nt, Artificial Sequence; identical to SEQ ID NO: 44256
  derived and/or modified CDS sequence (wt) from hemagglutinin__InfluenzaA__AHZ41156

SEQ ID NO: 44281 - RNA, 1701 nt, Artificial Sequence; identical to SEQ ID NO: 44256
  derived and/or modified CDS sequence (wt) from hemagglutinin__InfluenzaA__AHZ41167

SEQ ID NO: 44282 - RNA, 1701 nt, Artificial Sequence; identical to SEQ ID NO: 44256
  derived and/or modified CDS sequence (wt) from hemagglutinin__InfluenzaA__AHZ41178

SEQ ID NO: 44283 - RNA, 1701 nt, Artificial Sequence; identical to SEQ ID NO: 44256
  derived and/or modified CDS sequence (wt) from hemagglutinin__InfluenzaA__AHZ41189

SEQ ID NO: 44284 - RNA, 1701 nt, Artificial Sequence; identical to SEQ ID NO: 44255
  derived and/or modified CDS sequence (wt) from hemagglutinin__InfluenzaA__AHZ41246

SEQ ID NO: 44285 - RNA, 1701 nt, Artificial Sequence; identical to SEQ ID NO: 44260
  derived and/or modified CDS sequence (wt) from hemagglutinin__InfluenzaA__AHZ41263

SEQ ID NO: 44286 - RNA, 1701 nt, Artificial Sequence; identical to SEQ ID NO: 44256
  derived and/or modified CDS sequence (wt) from hemagglutinin__InfluenzaA__AHZ41281

SEQ ID NO: 44287 - RNA, 1701 nt, Artificial Sequence; identical to SEQ ID NO: 44256
  derived and/or modified CDS sequence (wt) from hemagglutinin__InfluenzaA__AHZ41292

SEQ ID NO: 44288 - RNA, 1701 nt, Artificial Sequence; identical to SEQ ID NO: 44255
  derived and/or modified CDS sequence (wt) from hemagglutinin__InfluenzaA__AHZ41303

SEQ ID NO: 44289 - RNA, 1701 nt, Artificial Sequence; identical to SEQ ID NO: 44255
  derived and/or modified CDS sequence (wt) from hemagglutinin__InfluenzaA__AHZ41314

SEQ ID NO: 44290 - RNA, 1701 nt, Artificial Sequence; identical to SEQ ID NO: 44255
  derived and/or modified CDS sequence (wt) from hemagglutinin__InfluenzaA__AHZ41325

SEQ ID NO: 44291 - RNA, 1701 nt, Artificial Sequence; identical to SEQ ID NO: 44255
  derived and/or modified CDS sequence (wt) from hemagglutinin__InfluenzaA__AHZ41336

SEQ ID NO: 44292 - RNA, 1701 nt, Artificial Sequence; identical to SEQ ID NO: 44255
  derived and/or modified CDS sequence (wt) from hemagglutinin__InfluenzaA__AHZ41347

SEQ ID NO: 44293 - RNA, 1701 nt, Artificial Sequence; identical to SEQ ID NO: 44256
  derived and/or modified CDS sequence (wt) from hemagglutinin__InfluenzaA__AHZ41358

SEQ ID NO: 44294 - RNA, 1701 nt, Artificial Sequence; identical to SEQ ID NO: 44256
  derived and/or modified CDS sequence (wt) from hemagglutinin__InfluenzaA__AHZ41366

SEQ ID NO: 44295 - RNA, 1701 nt, Artificial Sequence; identical to SEQ ID NO: 44260
  derived and/or modified CDS sequence (wt) from hemagglutinin__InfluenzaA__AHZ41377

SEQ ID NO: 44296 - RNA, 1701 nt, Artificial Sequence; identical to SEQ ID NO: 44256
  derived and/or modified CDS sequence (wt) from hemagglutinin__InfluenzaA__AHZ41388

SEQ ID NO: 44297 - RNA, 1701 nt, Artificial Sequence; identical to SEQ ID NO: 44260
  derived and/or modified CDS sequence (wt) from hemagglutinin__InfluenzaA__AHZ41410

SEQ ID NO: 44298 - RNA, 1701 nt, Artificial Sequence; identical to SEQ ID NO: 44256
  derived and/or modified CDS sequence (wt) from hemagglutinin__InfluenzaA__AHZ41432

SEQ ID NO: 44299 - RNA, 1701 nt, Artificial Sequence
  derived and/or modified CDS sequence (wt) from hemagglutinin__InfluenzaA__AHZ41441
augaaggcaauacuaguaguucugcuauauacauuugcaaccgcaaaugcagacacauuauguauagguuaucaugcgaacaauucaacagacacuguagacacaguacuagaaaagaauguaacaguaacacacucuguuaaccuucuagaagacaagcauaacgggaaacuaugcaaacuaagagggguagccccauugcauuuggguaaauguaacauugcuggcuggauccugggaaauccagagugugaaucacucuccacagcaagcucaugguccuacauuguggaaacaccuaguucagacaauggaacguguuacccaggagauuucaucgauuaugaggagcuaagagagcaauugagcucagugucaucauuugaaagguuugagauauuccccaagacaaguucauggcccaaucaugacucgaacaaagguguaacggcagcauguccucaugcuggagcaaaaagcuucuacaaaaauuuaauauggcuaguuaaagaaggaaauucauacccaaagcucagcaaauccuacauuaaugauaaagggaaagaaguccucgugcuauggggcauucaccauccaucuacuagugcugagcaacaaagucucuaucagaaugcagaugcauauguuuuuguggggucaucaagauacagcaagaaguucaagccggaaauagcagcaagacccaaagugagggaucaagcagggagaaugaacuauuacuggacacuaguagagccgggagacaaaauaacauucgaagcaacuggaaaucuagugguaccgagauaugcauucgcaauggaaagaaaugcuggaucugguauuaucauuucagauacaccaguccacgauugcaauacaacuugucaaacacccaagggugcuauaaacaccagccucccauuucagaauauacauccgaucacaauuggaaaauguccaaaauauguaaaaagcacaaaauugagacuggccacaggauugaggaauaucccgucuauucaaucuagaggccuauuuggggccauugccgguuucauugaagggggguggacagggaugguagauggaugguacgguuaucaccaucaaaaugagcaggggucaggauaugcagccgaccugaagagcacacagaaugccauugacgagauuacuaacaaaguaaauucuguuauugaaaagaugaauacacaguucacagcaguagguaaagaguucaaccaccuggaaaaaagaauagagaauuuaaauaaaaaaguugaugaugguuuccuggacauuuggacuuacaaugccgaacuguugguucuauuggaaaaugaaagaacuuuggacuaccacgauucaaaugugaagaacuuauaugaaaagguaagaagccagcuaaaaaacaaugccaaggaaauuggaaacggcugcuuugaauuuuaccacaaaugcgauaacacgugcauggaaagugucaaaaaugggacuuaugacuacccaaaauacucagaggaagcaaaauuaaacagagaagaaauagaugggguaaagcuggaaucaacaaggauuuaccagauuuuggcgaucuauucaacugucgccaguucauugguacugguagucucccugggggcaaucaguuucuggaugugcucuaaugggucucuacaguguagaauauguauuuaa

SEQ ID NO: 44300 - RNA, 1701 nt, Artificial Sequence; identical to SEQ ID NO: 44255
  derived and/or modified CDS sequence (wt) from hemagglutinin__InfluenzaA__AHZ41452

SEQ ID NO: 44301 - RNA, 1701 nt, Artificial Sequence
  derived and/or modified CDS sequence (wt) from hemagglutinin__InfluenzaA__AHZ41463
augaaggcaauacuaguaguucugcuauauacauuugcaaccgcaaaugcagacacauuauguauagguuaucaugcgaacaauucaacagacacuguauacacaguacuagaaaagaauguaacaguaacacacucuguuaaccuucuagaagacaagcauaacgggaaacuaugcaaacuaagagggguagccccauugcauuuggguaaauguaacauugcuggcuggauccugggaaauccagagugugaaucacucuccacagcaagcucaugguccuacauuguggaaacaccuaguucagacaauggaacguguuacccaggagauuucaucgauuaugaggagcuaagagagcaauugagcucagugucaucauuugaaagguuugagauauuccccaagacaaguucauggcccaaucaugacucgaacaaagguguaacggcagcauguccucaugcuggagcaaaaagcuucuacaaaaauuuaauauggcuaguuaaaaaaggaaauucauacccaaagcucagcaaauccuacauuaaugauaaagggaaagaaguccucgugcuauggggcauucaccauccaucuacuagugcugagcaacaaagucucuaucagaaugcagaugcauauguuuuuguggggucaucaagauacagcaagaaguucaagccggaaauagcagcaagacccaaagugaggggucaagcagggagaaugaacuauuacuggacacuaguagagccgggagacaaaauaacauucgaagcaacuggaaaucuagugguaccgagauaugcauucgcaauggaaagaaaugcuggaucugguauuaucauuucagauacaccaguccacgauugcaauacaacuugucaaacacccaagggugcuauaaacaccagccucccauuucagaauauacauccgaucacaauuggaaaauguccaaaauauguaaaaagcacaaaauugagacuggccacaggauugaggaauaucccgucuauucaaucuagaggccuauuuggggccauugccgguuucauugaagggggguggacagggaugguagauggaugguacgguuaucaccaucaaaaugagcaggggucaggauaugcagccgaccugaagagcacacagaaugccauugacgagauuacuaacaaaguaaauucuguuauugaaaagaugaauacacaguucacagcaguagguaaagaguucaaccaccuggaaaaaagaauagagaauuuaaauaaaaaaguugaugaugguuuccuggacauuuggacuuacaaugccgaacuguugguucuauuggaaaaugaaagaacuuuggacuaccacgauucaaaugugaagaacuuauaugaaaagguaagaagccagcuaaaaaacaaugccaaggaaauuggaaacggcugcuuugaauuuuaccacaaaugcgauaacacgugcauggaaagugucaaaaaugggacuuaugacuacccaaaauacucagaggaagcaaaauuaaacagagaagaaauagaugggguaaagcuggaaucaacaaggauuuaccagauuuuggcgaucuauucaacugucgccaguucauugguacugguagucucccugggggcaaucaguuucuggaugugcucuaaugggucucuacaguguagaauauguauuuaa

SEQ ID NO: 44302 - RNA, 1701 nt, Artificial Sequence; identical to SEQ ID NO: 44255
  derived and/or modified CDS sequence (wt) from hemagglutinin__InfluenzaA__AHZ41473

SEQ ID NO: 44303 - RNA, 1701 nt, Artificial Sequence; identical to SEQ ID NO: 44255
  derived and/or modified CDS sequence (wt) from hemagglutinin__InfluenzaA__AHZ41484

SEQ ID NO: 44304 - RNA, 1701 nt, Artificial Sequence; identical to SEQ ID NO: 44260
  derived and/or modified CDS sequence (wt) from hemagglutinin__InfluenzaA__AHZ41495

SEQ ID NO: 44305 - RNA, 1701 nt, Artificial Sequence; identical to SEQ ID NO: 44255
  derived and/or modified CDS sequence (wt) from hemagglutinin__InfluenzaA__AHZ41506

SEQ ID NO: 44306 - RNA, 1701 nt, Artificial Sequence
  derived and/or modified CDS sequence (wt) from hemagglutinin__InfluenzaA__AHZ41517
augaaggcaauacuaguaguucugcuauauacauuugcaaccgcaaaugcagacacauuauguauagguuaucaugcgaacaauucaacagacacuguagacacaguacuagaaaagaauguaacaguaacacacucuguuaaccuucuagaagacaagcauaacgggaaacuaugcaaacuaagagggguagccccauugcauuuggguaaauguaacauugcuggcuggauccugggaaauccagagugugaaucacucuccacagcaagcucaugguccuacauuguggaaacaccuaguucagacaauggaacguguuacccaggagauuucaucgauuaugaggagcuaagagagcaauugagcucagugucaucauuugaaagguuugagauauuccccaagacaaguucauggcccaaucaugacucgaacaaagguguaacggcagcauguccucaugcuggagcaaaaagcuucuacaaaaauuuaauauggcuaguuaaaaaaggaaauucauacccaaagcucagcgaauccuacauuaaugauaaagggaaagaaguccucgugcuauggggcauucaccauccaucuacuagugcugagcaacaaagucucuaucagaaugcagaugcauauguuuuuguggggucaucaagauacagcaagaaguucaagccggaaauagcagcaagacccaaagugaggggucaagcagggagaaugaacuauuacuggacacuaguagagccgggagacaaaauaacauucgaagcaacuggaaaucuagugguaccgagauaugcauucgcaauggaaagaaaugcuggaucugguauuaucauuucagauacaccaguccacgauugcaauacaacuugucaaacacccaagggugcuauaaacaccagccucccauuucagaauauacauccgaucacaauuggaaaauguccaaaauauguaaaaagcacaaaauugagacuggccacaggauugaggaauaucccgucuauucaaucuagaggccuauuuggggccauugccgguuucauugaagggggguggacagggaugguagauggaugguacgguuaucaccaucaaaaugagcaggggucaggauaugcagccgaccugaagagcacacagaaugccauugacgagauuacuaacaaaguaaauucuguuauugaaaagaugaauacacaguucacagcaguagguaaagaguucaaccaccuggaaaaaagaauagagaauuuaaauaaaaaaguugaugaugguuuccuggacauuuggacuuacaaugccgaacuguugguucuauuggaaaaugaaagaacuuuggacuaccacgauucaaaugugaagaacuuauaugaaaagguaagaagccagcuaaaaaacaaugccaaggaaauuggaaacggcugcuuugaauuuuaccacaaaugcgauaacacgugcauggaaagugucaaaaaugggacuuaugacuacccaaaauacucagaggaagcaaaauuaaacagagaagaaauagaugggguaaagcuggaaucaacaaggauuuaccagauuuuggcgaucuauucaacugucgccaguucauugguacugguagucucccugggggcaaucaguuucuggaugugcucuaaugggucucuacaguguagaauauguauuuaa

SEQ ID NO: 44307 - RNA, 1701 nt, Artificial Sequence
  derived and/or modified CDS sequence (wt) from hemagglutinin__InfluenzaA__AHZ41528
augaaggcaauacuaguaguucugcuauauacauuugcaaccgcaaaugcagacacauuauguauagguuaucaugcgaacaauucaacagacacuguagacacaguacuagaaaagaauguaacaguaacacacucuguuaaccuucuagaagacaagcauaacgggaaacuaugcaaacuaagagggguagccccauugcauuuggguaaauguaacauugcuggcuggauccugggaaauccagagugugaaucacucuccacagcaagcucaugguccuacauuguggaaacaccuaguucagacaauggaacguguuacccaggagauuucaucgauuaugaggagcuaagagagcaauugagcucagugucaucauuugaaagguuugagauauuccccaagacaaguucauggcccaaucaugacucgaacaaagguguaacggcagcauguccucaugcuggagcaaaaagcuucuacaaaaauuuaauauggcuaguuaaaaaaggaaauucauacccaaagcucagcgaauccuacauuaaugauaaagggaaagaaguccucgugcuauggggcauucaccauccaucuacuagugcugaucaacaaagucucuaucagaaugcagaugcauauguuuuuguggggucaucaagauacagcaagaaguucaagccggaaauagcagcaagacccaaagugaggggucaagcagggagaaugaacuauuacuggacacuaguagagccgggagacaaaauaacauucgaagcaacuggaaaucuagugguaccgagauaugcauucgcaauggaaagaaaugcuggaucugguauuaucauuucagauacaccaguccacgauugcaauacaacuugucaaacacccaagggugcuauaaacaccagccucccauuucagaauauacauccgaucacaauuggaaaauguccaaaauauguaaaaagcacaaaauugagacuggccacaggauugaggaauaucccgucuauucaaucuagaggccuauuuggggccauugccgguuucauugaagggggguggacagggaugguagauggaugguacgguuaucaccaucaaaaugagcaggggucaggauaugcagccgaccugaagagcacacagaaugccauugacgagauuacuaacaaaguaaauucuguuauugaaaagaugaauacacaguucacagcaguagguaaagaguucaaccaccuggaaaaaagaauagagaauuuaaauaaaaaaguugaugaugguuuccuggacauuuggacuuacaaugccgaacuguugguucuauuggaaaaugaaagaacuuuggacuaccacgauucaaaugugaagaacuuauaugaaaagguaagaagccagcuaaaaaacaaugccaaggaaauuggaaacggcugcuuugaauuuuaccacaaaugcgauaacacgugcauggaaagugucaaaaaugggacuuaugacuacccaaaauacucagaggaagcaaaauuaaacagagaagaaauagaugggguaaagcuggaaucaacaaggauuuaccagauuuuggcgaucuauucaacugucgccaguucauugguacugguagucucccugggggcaaucaguuucuggaugugcucuaaugggucucuacaguguagaauauguauuuaa

SEQ ID NO: 44308 - RNA, 1701 nt, Artificial Sequence; identical to SEQ ID NO: 44260
  derived and/or modified CDS sequence (wt) from hemagglutinin__InfluenzaA__AHZ41539

SEQ ID NO: 44309 - RNA, 1701 nt, Artificial Sequence
  derived and/or modified CDS sequence (wt) from hemagglutinin__InfluenzaA__AHZ41550
augaaggcaauacuaguaguucugcuauauacauuugcaaccgcaaaugcagacacauuauguauagguuaucaugcgaacaauucaacagacacuguagacacaguacuagaaaagaauguaacaguaacacacucuguuaaccuucuagaagacaagcauaacgggaaacuaugcaaacuaagagggguagccccauugcauuuggguaaauguaacauugcuggcuggauccugggaaauccagagugugaaucacucuccacagcaagcucaugguccuacauuguggaaacaccuaguucagacaauggaacguguuacccaggagauuucaucgauuaugaggagcuaagagagcaauugagcucagugucaucauuugaaagguuugagauauuccccaagacaaguucauggcccaaucaugacucgaacaaagguguaacggcagcauguccucaugcuggagcaaaaagcuucuacaaaaauuuaauauggcuaguuaaagaaggaaauucauacccaaagcucagcaaauccuacauuaaugauaaagggaaagaaguccucgugcuauggggcauucaccauccaucuacuagugcugagcaacaaagucucuaucagaaugcagaugcauauguuuuuguggggucaucaagauacagcaagaaguucaagccggaaauagcagcaagacccaaagugaggggucaagcagggagaaugaacuauuacuggacacuaguagagccgggagacaaaauaacauucgaagcaacuggaaaucuagugguaccgagauaugcauucgcaauggaaagaaaugcuggaucugguauuaucauuucagauacaccaguccacgauugcaauacaacuugucaaacacccaagggugcuauaaacaccagccucccauuucagaauauacauccgaucacaauuggaaaauguccaaaauauguaaaaagcacaaaauugagacuggccacaggauugaggaauaucccgucuauucaaucuagaggccuauuuggggccauugccgguuucauugaagggggguggacagggaugguagauggaugguacgguuaucaccaucaaaaugagcaggggucaggauaugcagccgaccugaagagcacacagaaugccauugacgagauuacuaacaaaguaaauucuguuauugaaaagaugaauacacaguucacagcaguagguaaagaguucaaccaccuggaaaaaagaauagagaauuuaaauaaaaaaguugaugaugguuuccuggacauuuggacuuacaaugccgaacuguugguucuauuggaaaaugaaagaacuuuggacuaccacgauucaaaugugaagaacuuauaugaaaagguaagaagccaguuaaaaaacaaugccaaggaaauuggaaacggcugcuuugaauuuuaccacaaaugcgauaacacgugcauggaaagugucaaaaaugggacuuaugacuacccaaaauacucagaggaagcaaaauuaaacagagaagaaauagaugggguaaagcuggaaucaacaaggauuuaccagauuuuggcgaucuauucaacugucgccaguucauugguacugguagucucccugggggcaaucaguuucuggaugugcucuaaugggucucuacaguguagaauauguauuuaa

SEQ ID NO: 44310 - RNA, 1701 nt, Artificial Sequence; identical to SEQ ID NO: 44256
  derived and/or modified CDS sequence (wt) from hemagglutinin__InfluenzaA__AHZ41561

SEQ ID NO: 44311 - RNA, 1701 nt, Artificial Sequence
  derived and/or modified CDS sequence (wt) from hemagglutinin__InfluenzaA__AHZ41572
augaaggcaauacuaguaguucugcuauauacauuugcaaccgcaaaugcagacacauuauguauagguuaucaugcgaacaauucaacagacacuguagacacaguacuagaaaagaauguaacaguaacacacucuguuaaccuucuagaagacaagcauaacgggaaacuaugcaaacuaagagggguagccccauugcauuuggguaaauguaacauugcuggcuggauccugggaaauccagagugugaaucacucuccacagcaagcucaugguccuacauuguggaaacaccuaguucagacaauggaacguguuacccaggagauuucaucgauuaugaggagcuaagagagcaauugagcucagugucaucauuugaaagguuugagauauuccccaagacaaguucauggcccaaucaugacucgaacaaagguguaacggcagcauguccucaugcuggagcaaaaagcuucuacaaaaauuuaauauggcuaguuaaaaaaggaaauucauacccaaagcucagcaaauccuacauuaaugauaaagggaaagaaguccucgugcuauggggcauucaccauccaucuacuagugcugagcaacaaagucucuaucagaaugcagaugcauauguuuuuguggggucaucaagauacagcaagaaguucaagccggaaauagcagcaagacccaaagugaggggucaagcagggagaaugaacuauuacuggacacuaguagagccgggagacgaaauaacauucgaagcaacuggaaaucuagugguaccgagauaugcauucgcaauggaaagaaaugcuggaucugguauuaucauuucagauacaccaguccacgauugcaauacaacuugucaaacacccaagggugcuauaaacaccagccucccauuucagaauauacauccgaucacaauuggaaaauguccaaaauauguaaaaagcacaaaauugagacuggccacaggauugaggaauaucccgucuauucaaucuagaggccuauuuggggccauugccgguuucauugaagggggguggacagggaugguagauggaugguacgguuaucaccaucaaaaugagcaggggucaggauaugcagccgaccugaagagcacacagaaugccauugacgagauuacuaacaaaguaaauucuguuauugaaaagaugaauacacaguucacagcaguagguaaagaguucaaccaccuggaaaaaagaauagagaauuuaaauaaaaaaguugaugaugguuuccuggacauuuggacuuacaaugccgaacuguugguucuauuggaaaaugaaagaacuuuggacuaccacgauucaaaugugaagaacuuauaugaaaagguaagaagccagcuaaaaaacaaugccaaggaaauuggaaacggcugcuuugaauuuuaccacaaaugcgauaacacgugcauggaaagugucaaaaaugggacuuaugacuacccaaaauacucagaggaagcaaaauuaaacagagaagaaauagaugggguaaagcuggaaucaacaaggauuuaccagauuuuggcgaucuauucaacugucgccaguucauugguacugguagucucccugggggcaaucaguuucuggaugugcucuaaugggucucuacaguguagaauauguauuuaa

SEQ ID NO: 44312 - RNA, 1701 nt, Artificial Sequence; identical to SEQ ID NO: 44260
  derived and/or modified CDS sequence (wt) from hemagglutinin__InfluenzaA__AHZ41583

SEQ ID NO: 44313 - RNA, 1701 nt, Artificial Sequence; identical to SEQ ID NO: 44255
  derived and/or modified CDS sequence (wt) from hemagglutinin__InfluenzaA__AHZ41594

SEQ ID NO: 44314 - RNA, 1701 nt, Artificial Sequence
  derived and/or modified CDS sequence (wt) from hemagglutinin__InfluenzaA__AHZ41605
augaaggcaauacuaguaguucugcuauauacauuugcaaccgcaaaugcagacacauuauguauagguuaucaugcgaacaauucaacagacacuguagacacaguacuagaaaagaauguaacaguaacacacucuguuaaccuucuagaagacaagcauaacgggaaacuaugcaaacuaagagggguagccccauugcauuuggguaaauguaacauugcuggcuggauccugggaaauccagagugugaaucacucuccacagcaagcucaugguccuacauuguggaaacaccuaguucagacaauggaacguguuacccaggagauuucaucgauuaugaggagcuaagagagcaauugagcucagugucaucauuugaaagguuugagauauuccccaauacaaguucauggcccaaucaugacucgaacaaagguguaacggcagcauguccucaugcuggagcaaaaagcuucuacaaaaauuuaauauggcuaguuaaaaaaggaaauucauacccaaagcucagcaaauccuacauuaaugauaaagggaaagaaguccucgugcuauggggcauucaccauccaucuacuagugcugagcaacaaagucucuaucagaaugcagaugcauauguuuuuguggggucaucaagauacagcaagaaguucaagccggaaauagcagcaagacccaaagugaugggucaagcagggagaaugaacuauuacuggacacuaguagagccgggagacaaaauaacauucgaagcaacuggaaaucuagugguaccgagauaugcauucgcaauggaaagaaaugcuggaucugguauuaucauuucagauacaccaguccacgauugcaauacaacuugucaaacacccaagggugcuauaaacaccagccucccauuucagaauauacauccgaucacaauuggaaaauguccaaaauauguaaaaagcacaaaauugagacuggccacaggauugaggaauaucccgucuauucaaucuagaggccuauuuggggccauugccgguuucauugaagggggguggacagggaugguagauggaugguacgguuaucaccaucaaaaugagcaggggucaggauaugcagccgaccugaagagcacacagaaugccauugacgagauuacuaacaaaguaaauucuguuauugaaaagaugaauacacaguucacagcaguagguaaagaguucaaccaccuggaaaaaagaauagagaauuuaaauaaaaaaguugaugaugguuuccuggacauuuggacuuacaaugccgaacuguugguucuauuggaaaaugaaagaacuuuggacuaccacgauucaaaugugaagaacuuauaugaaaagguaagaagccagcuaaaaaacaaugccaaggaaauuggaaacggcugcuuugaauuuuaccacaaaugcgauaacacgugcauggaaagugucaaaaaugggacuuaugacuacccaaaauacucagaggaagcaaaauuaaacagagaagaaauagaugggguaaagcuggaaucaacaaggauuuaccagauuuuggcgaucuauucaacugucgccaguucauugguacugguagucucccugggggcaaucaguuucuggaugugcucuaaugggucucuacaguguagaauauguauuuaa

SEQ ID NO: 44315 - RNA, 1701 nt, Artificial Sequence; identical to SEQ ID NO: 44255
  derived and/or modified CDS sequence (wt) from hemagglutinin__InfluenzaA__AHZ41616

SEQ ID NO: 44316 - RNA, 1701 nt, Artificial Sequence; identical to SEQ ID NO: 44260
  derived and/or modified CDS sequence (wt) from hemagglutinin__InfluenzaA__AHZ41627

SEQ ID NO: 44317 - RNA, 1701 nt, Artificial Sequence; identical to SEQ ID NO: 44260
  derived and/or modified CDS sequence (wt) from hemagglutinin__InfluenzaA__AHZ41638

SEQ ID NO: 44318 - RNA, 1701 nt, Artificial Sequence; identical to SEQ ID NO: 44256
  derived and/or modified CDS sequence (wt) from hemagglutinin__InfluenzaA__AHZ41649

SEQ ID NO: 44319 - RNA, 1701 nt, Artificial Sequence; identical to SEQ ID NO: 44256
  derived and/or modified CDS sequence (wt) from hemagglutinin__InfluenzaA__AHZ41660

SEQ ID NO: 44320 - RNA, 1701 nt, Artificial Sequence; identical to SEQ ID NO: 44260
  derived and/or modified CDS sequence (wt) from hemagglutinin__InfluenzaA__AHZ41671

SEQ ID NO: 44321 - RNA, 1701 nt, Artificial Sequence; identical to SEQ ID NO: 44260
  derived and/or modified CDS sequence (wt) from hemagglutinin__InfluenzaA__AHZ41682

SEQ ID NO: 44322 - RNA, 1701 nt, Artificial Sequence; identical to SEQ ID NO: 44260
  derived and/or modified CDS sequence (wt) from hemagglutinin__InfluenzaA__AHZ41693

SEQ ID NO: 44323 - RNA, 1701 nt, Artificial Sequence; identical to SEQ ID NO: 44260
  derived and/or modified CDS sequence (wt) from hemagglutinin__InfluenzaA__AHZ41704

SEQ ID NO: 44324 - RNA, 1701 nt, Artificial Sequence; identical to SEQ ID NO: 44260
  derived and/or modified CDS sequence (wt) from hemagglutinin__InfluenzaA__AHZ41715

SEQ ID NO: 44325 - RNA, 1701 nt, Artificial Sequence; identical to SEQ ID NO: 44260
  derived and/or modified CDS sequence (wt) from hemagglutinin__InfluenzaA__AHZ41726

SEQ ID NO: 44326 - RNA, 1701 nt, Artificial Sequence; identical to SEQ ID NO: 44260
  derived and/or modified CDS sequence (wt) from hemagglutinin__InfluenzaA__AHZ41737

SEQ ID NO: 44327 - RNA, 1701 nt, Artificial Sequence; identical to SEQ ID NO: 44260
  derived and/or modified CDS sequence (wt) from hemagglutinin__InfluenzaA__AHZ41748

SEQ ID NO: 44328 - RNA, 1701 nt, Artificial Sequence; identical to SEQ ID NO: 44260
  derived and/or modified CDS sequence (wt) from hemagglutinin__InfluenzaA__AHZ41759

SEQ ID NO: 44329 - RNA, 1701 nt, Artificial Sequence; identical to SEQ ID NO: 42087
  derived and/or modified CDS sequence (wt) from hemagglutinin__InfluenzaA__AHZ42561

SEQ ID NO: 44330 - RNA, 1701 nt, Artificial Sequence
  derived and/or modified CDS sequence (wt) from hemagglutinin__InfluenzaA__AHZ42572
augaagacuaucauugcuuugagcuacauucuaugucugguuuucgcucaaaaacuuccuggaaaugacaauagcacggcaacgcugugccuugggcaccaugcaguaccaaacggaacgauagugaaaacaaucacgaaugaccgaauugaaguuacuaaugcuacugagcugguucagaauuccucaauaggugaaauaugcgacaguccucaucagauccuugauggagaaaacuguacacuaauagaugcucuauugggagacccucagugugauggcuuucaaaauaagaaaugggaccuuuuuguugaacgaagcaaagccuacagcaacuguuacccuuaugaugugccggauuaugccucccuuaggucacuaguugccucauccggcacacuggaguuuaacaaugaaagcuucaauuggacuggagucacucaaaacggaacaagcucugcuugcauaaggagaucuaauaguaguuucuuuaguagauuaaauugguugacccacuuaaacuucaaauacccagcauugaacgugacuaugccaaacaaugaacaauuugacaaauuguacauuugggggguucaccacccggguacggacaaggaccaaaucuuccuguaugcucaaucaucaggaagaaucacaguaucuaccaaaagaagccaacaagcuguaaucccgaauaucggaucuagacccagaauaaggaauaucccuagcagaauaagcaucuauuggacaauaguaaaaccaggagacauacuuuugauuaacagcacagggaaucuaauugcuccuagggguuacuucaaaauacgaagugggaaaagcucaauaaugagaucagaugcacccauuggcaaaugcaagucugaaugcaucacuccaaauggaagcauuccaaaugacaaaccauuccaaaauguaaacaggaucacauacggggccugucccagauauguuaagcaaagcacucugaaauuggcaacaggaaugcgaaauguaccagagaaacaaacuagaggcauauuuggcgcaauagcggguuucauagaaaaugguugggagggaaugguggaugguugguacgguuucaggcaucaaaauucugagggaagaggacaagcagcagaucucaaaagcacucaagcagcaaucgaucaaaucaaugggaagcugaaucgauugaucgggaaaaccaacgagaaauuccaucagauugaaaaagaauucucagaaguagaagggagaauucaggaccuugagaaauauguugaggacacuaaaauagaucucuggucauacaacgcggagcuucuuguugcccuggagaaccaacauacaauugaucuaacugacucagaaauggacaaacuguuugaaaaaacaaagaagcaacugagggaaaaugcugaggauaugggcaaugguuguuucaaaauauaccacaaaugugacaaugccugcauaggaucaaucagaaauggaacuuaugaccacgauguauacagggaugaagcauuaaacaaccgguuccagaucaagggaguugagcugaagucaggguacaaagauuggauccuauggauuuccuuugccauaucauguuuuuugcuuuguguugcuuuguugggguucaucaugugggccugccaaaagggcaacauuaggugcaacauuugcauuuga

SEQ ID NO: 44331 - RNA, 1701 nt, Artificial Sequence
  derived and/or modified CDS sequence (wt) from hemagglutinin__InfluenzaA__AHZ42584
augaagacuaucauugcuuugagcuacauucuaugucugguuuucgcucaaaaacuuccuggaaaugacaauagcacggcaacgcugugccuugggcaccaugcaguaccaaacggaacgauagugaaaacaaucacgaaugaccgaauugaaguuacuaaugcuacugagcugguucagaauuccucaauaggugaaauaugcgacaguccucaucagauccuugauggagaaaacuguacacuaauagaugcucuauugggagacccucagugugauggcuuucaaaauaagaaaugggaccuuuuuguugaacgaagcaaagccuacagcaacuguuacccuuaugaugugccggauuaugccucccuuaggucacuaguugccucauccggcacacuggaguuuaacaaugaaagcuucaauuggacuggagucacucaaaacggaacaaguucugcuugcauaaggaaaucuaauaguaguuucuuuaguagauuaaauugguugacccacuuaaacuucaaauacccagcauugaacgugacuaugccaaacaaugaacaauuugacaaauuguacauuugggggguucaccacccggguacggacaaggaccaaaucuuccuguaugcucaaucaucaggaagaaucacaguaucuaccaaaagaagccaacaagcuguaaucccgaauaucggaucuagacccagaauaaggaauaucccuagcagaauaagcaucuauuggacaauaguaaaaccaggagacauacuuuugauuaacagcacagggaaucuaauugcuccuagggguuacuucaaaauacgaagugggaaaagcucaauaaugagaucagaugcacccauuggcaaaugcaagucugaaugcaucacuccaaauggaagcauuccaaaugacaaaccauuccaaaauguaaacaggaucacauacggggccugucccagauauguuaagcaaagcacucugaaauuggcaacaggaaugcgaaauguaccagagaaacaaacuagaggcauauuuggcgcaauagcggguuucauagaaaaugguugggagggaaugguggaugguugguacgguuucaggcaucaaaauucugagggaagaggacaagcagcagaucucaaaagcacucaagcagcaaucgaucaaaucaaugggaagcugaaucgauugaucgggaaaaccaacgagaaauuccaucagauugaaaaagaauucucagaaguagaagggagaauucaggaccuugagaaauauguugaggacacuaaaauagaucucuggucauacaacgcggagcuucuuguugcccuggagaaccaacauacaauugaucuaacugacucagaaaugaacaaacuguuugaaaaaacaaagaagcaacugagggaaaaugcugaggauaugggcaaugguuguuucaaaauauaccacaaaugugacaaugccugcauaggaucaaucagaaauggaacuuaugaccacgauguauacagggaugaagcauuaaacaaccgguuccagaucaagggaguugagcugaagucaggguacaaagauuggauccuauggauuuccuuugccauaucauguuuuuugcuuuguguugcuuuguugggguucaucaugugggccugccaaaagggcaacauuaggugcaacauuugcauuuga

SEQ ID NO: 44332 - RNA, 1701 nt, Artificial Sequence
  derived and/or modified CDS sequence (wt) from hemagglutinin__InfluenzaA__AHZ42596
augaagacuaucauugcuuugagcuacauucuaugucuaguuuucgcucaaaaacuuccuggaaaugacaauagcacggcaacgcugugccuugggcaccaugcaguaccaaacggaacgauagugaaaacaaucacgaaugaccgaauugaaguuacuaaugcuacugagcugguucagaauuccucaauaggugaaauaugcgacaguccucaucagauccuugauggagaaaacuguacacuaauagaugcucuauugggagacccucagugugauggcuuucaaaauaagaaaugggaccuuuuuguugaacgaagcaaagccuacagcaacuguuacccuuaugaugugccggauuaugccucccuuaggucacuaguugccucauccggcacacuggaguuuaacaaugaaagcuucaauuggacuggagucacucaaaacggaacaaguucugcuugcauaaggagaucuaauaguaguuucuuuaguagauuaaauugguugacccacuuaaacuucaaauacccagcauugaacgugacuaugccaaacaaugaacaauuugacaaauuguacauuugggggguucaccacccggguacggacaaggaccaaaucuuccuguaugcucaaucaucaggaagaaucacaguaucuaccaaaagaagccaacaagcuguaaucccgaauaucggaucuagacccagaauaaggaauaucccuagcagaauaagcaucuauuggacaauaguaaaaccaggagacauacuuuugauuaacagcacagggaaucuaauugcuccuagggguuacuucaaaauacgaagugggaaaagcucaauaaugagaucagaugcacccauuggcaaaugcaagucugaaugcaucacuccaaauggaagcauuccaaaugacaaaccauuccaaaauguaaacaggaucacauacggggccugucccagauauguuaagcagagcacucugaaguuggcaacaggaaugcgaaauguaccagagaaacaaacuagaggcauauuuggcgcaauagcggguuucauagaaaaugguugggagggaaugguggaugguugguacgguuucaggcaucaaaauucugagggaagaggacaagcagcagaucucaaaagcacucaagcagcaaucgaucaaaucaaugggaagcugaaucgauugaucgggaaaaccaacgagaaauuccaucagauugaaaaagaauucucagaaguagaagggagaauucaggaccuugagaaauauguugaggacacuaaaauagaucucuggucauacaacgcggagcuucuuguugcccuggagaaccaacauacaauugaucuaacugacucagaaaugaacaaacuguuugaaaaaacaaagaagcaacugagggaaaaugcugaggauaugggcaaugguuguuucaaaauauaccacaaaugugacaaugccugcauaggaucaaucagaaauggaacuuaugaccacgauguauacagggaugaagcauuaaacaaccgguuccagaucaagggaguugagcugaagucaggguacaaagauuggauccuauggauuuccuuugccauaucauguuuuuugcuuuguguugcuuuguugggguucaucaugugggccugccaaaagggcaacauuaggugcaacauuugcauuuga

SEQ ID NO: 44333 - RNA, 1701 nt, Artificial Sequence; identical to SEQ ID NO: 44227
  derived and/or modified CDS sequence (wt) from hemagglutinin__InfluenzaA__AHZ42608

SEQ ID NO: 44334 - RNA, 1701 nt, Artificial Sequence
  derived and/or modified CDS sequence (wt) from hemagglutinin__InfluenzaA__AHZ42619
augaagacuaucauugcuuugagcuacauucuaugucugguuuucgcucaaaaacuuccuggaaaugacaauagcacggcaacgcugugccuugggcaccaugcaguaccaaacggaacgauagugaaaacaaucacgaaugaccgaauugaaguuacuaaugcuacugagcugguucagaauuccucaauaggugaaauaugcgacaguccucaucagauccuugauggagaaaacuguacacuaauagaugcucuacugggagacccucagugugauggcuuucaaaauaagaaaugggaccuuuuuguugaacgaagcaaagccuacagcaacuguuacccuuaugaugugccggauuaugccucccuuaggucacuaguugccucauccggcacacuggaguuuaacaaugaaagcuucaauuggacuggagucacucaaaacggaacaaguucugcuugcauaaggagaucuaauaguaguuucuuuaguagauuaaauugguugacccacuuaaacuucaaauacccagcauugaacgugacuaugccaaacaaugaacaauuugacaaauuguacauuugggggguucaccacccggguacggacaaggaccaaaucuuccuguaugcucaaucaucaggaagaaucacaguaucuaccaaaagaagccaacaagcuguaaucccgaauaucggaucuagacccagaauaaggaauaucccuagcagaauaagcaucuauuggacaauaguaaaaccaggagacauacuuuugauuaacagcacagggaaucuaauugcuccuagggguuacuucaaaauacgaagugggaaaagcucaauaaugagaucagaugcacccauuggcaaaugcaagucugaaugcaucacuccaaauggaagcauuccaaaugacaaaccauuccaaaauguaaacaggaucacauacggggccugucccagauauguuaagcaaagcacucugaaauuggcaacaggaaugcgaaauguaccagagaaacaaacuagaggcauauuuggcgcaauagcggguuucauagaaaaugguugggagggaaugguggaugguugguacgguuucaggcaucaaaauucugagggaagaggacaagcagcagaucucaaaagcacucaagcagcaaucgaucaaaucaaugggaagcugaaucgauugaucgggaaaaccaacgagaaauuccaucagauugaaaaagaauucucagaaguagaagggagaauucaggaccuugagaaauauguugaggacacuaaaauagaucucuggucauacaacgcggagcuucuuguugcccuggagaaccaacauacaauugaucuaacugacucagaaaugaacaaacuguuugaaaaaacaaagaagcaacugagggaaaaugcugaggauaugggcaaugguuguuucaaaauauaccacaaaugugacaaugccugcauaggaucaaucagaaauggaacuuaugaccacgauguauacagggaugaagcauuaaacaaccgguuccagaucaagggaguugagcugaagucaggguacaaagauuggauccuauggauuuccuuugccauaucauguuuuuugcuuuguguugcuuuguugggguucaucaugugggccugccaaaagggcaacauuaggugcaacauuugcauuuga

SEQ ID NO: 44335 - RNA, 1701 nt, Artificial Sequence
  derived and/or modified CDS sequence (wt) from hemagglutinin__InfluenzaA__AHZ42631
augaagacuaucauugcuuugagcuacauucuaugucugguuuucgcucaaaaacuuccuggaaauuacaauagcacggcaacgcugugccuugggcaccaugcaguaccaaacggaacgauagugaaaacaaucacgaaugaccgaauugaaguuacuaaugcuacugagcugguucagaauuccucaauaggugaaauaugcgacaguccucaucagauccuugauggagaaaacuguacacuaauagacgcucuauugggagacccucagugugauggcuuucaaaauaagaaaugggaccuuuuuguugaacgaagcaaagccuacagcaacuguuacccuuaugaugugccggauuaugccucccuuaggucacuaguugccucauccggcacacuggaguuuaacaaugaaagcuucaauuggacuggagucacucaaaacggaacaaguucugcuugcauaaggagaucuaauaguaguuucuuuaguagauuaaauugguugacccacuuaaacuucaaauacccagcauugaacgugacuaugccaaacaaugaacaauuugacaaauuguacauuugggggguucaccacccggguacggacaaggaccaaaucuuccuguaugcucaaucaucaggaagaaucacaguaucuaccaaaagaagccaacaagcuguaaucccgaauaucggaucuagacccagaauaaggaauaucccuagcagaauaagcaucuauuggacaauaguaaaaccaggagacauacuuuugauuaacagcacagggaaucuaauugcuccuagggguuacuucaaaauacgaagugggaaaagcucaauaaugagaucagaugcacccauuggcaaaugcaagucugaaugcaucacuccaaauggaagcauuccaaaugacaaaccauuccaaaauguaaacaggaucacauacggggccugucccagauauguuaagcaaagcacucugaaauuggcaacaggaaugcgaaauguaccagagaaacaaacuagaggcauauuuggcgcaauagcggguuucauagaaaaugguugggagggaaugguggaugguugguacgguuucaggcaucaaaauucugagggaagaggacaagcagcagaucucaaaagcacucaagcagcaaucgaucaaaucaaugggaagcugaaucgauugaucgggaaaaccaacgagaaauuccaucagauugaaaaagaauucucagaaguagaagggagaauucaggaccuugagaaauauguugaggacacuaaaauagaucucuggucauacaacgcggagcuucuuguugcccuggagaaccaacauacaauugaucuaacugacucagaaaugaacaaacuguuugaaaaaacaaagaagcaacugagggaaaaugcugaggauaugggcaaugguuguuucaaaauauaccacaaaugugacaaugccugcauaggaucaaucagaaauggaacuuaugaccacgauguauacagggaugaagcauuaaacaaccgguuccagaucaagggaguugagcugaagucaggguacaaagauuggauccuauggauuuccuuugccauaucauguuuuuugcuuuguguugcuuuguugggguucaucaugugggccugccaaaagggcaacauuaggugcaacauuugcauuuga

SEQ ID NO: 44336 - RNA, 1701 nt, Artificial Sequence
  derived and/or modified CDS sequence (wt) from hemagglutinin__InfluenzaA__AHZ42643
augaaggcaauacuaguaguuaugcuauauacauuugcaaccgcaaaugcagacacauuauguauagguuaucaugcgaacaauucaacagacacuguagacacaguacuagaaaagaauguaacaguaacacacucuguuaaucuucuagaagacaagcauaacgggaaacuaugcaaacuaagagggguagccccauugcauuuggguaaauguaacauugcuggcuggauccugggaaauccagagugugaaucacucuccacagcaagcucaugguccuacauuguggaaacaucugguucagacaauggaacguguuacccaggagauuucaucgauuaugaggagcuaagagagcaauugagcucagugucaucauuugaaagguuugagauauuccccaaagcaaguucauggcccaaucaugauucgaacaaagguguaacggcagcauguccucaugcuggagcaaaaggcuucuacaaaaauuuaauauggcuaguuaaaaaaggaaauucauacccaaagcucagcauauccuacauuaaugauaaagggaaagaaguccucgugcuauggggcauucaccauccaucuacuacugcugaccaacaaagucucuaucagaaugcagauacauauguuuuuguggggacaucaagauacagcaagaaguucaagccggaaauagcaauaagacccaaagugagggaucaagaagggagaaugaacuauuacuggacacuaguagagccgggagacaaaauaacauucgaagcaacuggaaaucuagugguaccgagauaugcauuugcaauggaaagaaaugcuggaucugguauuaucauuucagauacaccaguucacgauugcaauacaacuugucagacacccaagggugcuauaaacaccagccucccauuucagaauauacauccgaucacaauuggaaaauguccaaaauauguaaaaagcacaaaauugagacuggccacaggauugaggaaugucccgucuauucaaucuagaggccuauuuggggccauugcuggcuucauugaagggggauggacagggaugguagauggaugguacgguuaucaccaucaaaaugagcaggggucaggauaugcagccgaccugaagagcacacagaaugccauugacaagauuacuaacaaaguaaauucuguuauugaaaagaugaauacacaguucacagcaguagguaaagaguucaaccaccuggaaaaaagaauagagaauuuaaauaaaaaaguugaugaugguuuccuggacauuuggacuuacaaugccgaacuguugguucuauuggaaaaugaaaggacuuuggacuaccacgauucaaaugugaagaacuuauaugaaaagguaagaaaccaguuaaaaaacaaugccaaggaaauuggaaauggcugcuuugaauuuuaccacaaaugcgauaacacgugcauggaaagugucaaaaaugggacuuaugauuacccaaaauacucagaggaagcaaaauuaaacagagaaaaaauagaugggguaaagcuggaaucaacaaggauuuaccagauuuuggcgaucuauucaacugccgcuaguucauugguacugguagucucccugggggcaaucaguuuuuggaugugcucuaaugggucucuacaguguagaauauguauuuaa

SEQ ID NO: 44337 - RNA, 1701 nt, Artificial Sequence
  derived and/or modified CDS sequence (wt) from hemagglutinin__InfluenzaA__AHZ42654
augaagacuaucauugcuuugagcuacauucuaugucugguuuucgcucaaaaacuuccuggaaaugacaauagcacggcaacgcugugccuugggcaccaugcaguaccaaacggaacgauagugaaaacaaucacgaaugaccgaauugaaguuacuaaugcuacugagcugguucagaauuccucaauaggugaaauaugcgacaguccucaucagauccuugauggagaaaacuguacacuaauagaugcucuauugggagacccucagugugauggcuuucaaaauaagaaaugggaccuuuuuguugaacgaagcaaagccuacagcaacuguuacccuuaugaugugccggauuaugccucccuuaggucacuaguugccucauccggcacacuggaguuuaacaaugaaagcuucaauuggacuggagucacucaaaacggaacaaguucugcuugcauaaggagaucuaauaguaguuucuuuaguagauuaaauugguugacccacuuaaacuucaaauacccagcauugaacgugacuaugccaaacaacgaacaauuugacaaauuguacauuugggggguucaccacccggguacggacaaggaccaaaucuuccuguaugcucaaucaucaggaagaaucacaguaucuaccaaaagaagccaacaagcuguaaucccgaauaucggaucuagacccagaauaaggaauaucccuagcagaauaagcaucuauuggacaauaguaaaaccaggagacauacuuuugauuaacagcacagggaaucuaauugcuccuagggguuacuucaaaauacgaagugggaaaagcucaauaaugagaucagaugcacccauuggcaaaugcaagucugaaugcaucacuccaaauggaagcauuccaaaugacaaaccauuccaaaauguaaacaggaucacauacggggccugucccagauauguuaagcaaagcacucugaaauuggcaacaggaaugcgaaacguaccagagaaacaaacuagaggcauauuuggcgcaauagcggguuucauagaaaaugguugggagggaaugguggaugguugguacgguuucaggcaucaaaauucugagggaagaggacaagcagcagaucucaaaagcacucaagcagcaaucgaucaaaucaaugggaagcugaaucgauugaucgggaaaaccaacgagaaauuccaucagauugaaaaagaauucucagaaguagaagggagaauucaggaccuugagaaauauguugaggacacuaaaauagaucucuggucauacaacgcggagcuucuuguugcccuggagaaccaacauacaauugaucuaacugacucagaaaugaacaaacuguuugaaaaaacaaagaagcaacugagggaaaaugcugaggauaugggcaaugguuguuucaaaauauaccacaaaugugacaaugccugcauaggaucaaucagaaauggaacuuaugaccacgauguauacagggaugaagcauuaaacaaccgguuccagaucaagggaguugagcugaagucaggguacaaagauuggauccuauggauuuccuuugccauaucauguuuuuugcuuuguguugcuuuguugggguucaucaugugggccugccaaaagggcaacauuaggugcaacauuugcauuuga

SEQ ID NO: 44338 - RNA, 1701 nt, Artificial Sequence; identical to SEQ ID NO: 44234
  derived and/or modified CDS sequence (wt) from hemagglutinin__InfluenzaA__AHZ42666

SEQ ID NO: 44339 - RNA, 1701 nt, Artificial Sequence
  derived and/or modified CDS sequence (wt) from hemagglutinin__InfluenzaA__AHZ42678
augaagacuaucauugcuuugagcuacauucuaugucugguuuucgcucaaaaacuuccuggaaaugacaauagcacggcaacgcugugccuugggcaccaugcaguaccaaacggaacgauagugaaaacaaucacgaaugaccgaauugaaguuacuaaugcuacugagcugguucagaauuccucaauaggugaaauaugcgacaguccucaucagauucuugauggagaaaacugcacacuaauagaugcucuauugggagacccucagugugauggcuuucaaaauaagaaaugggaccuuuuuguugaacgaagcaaagccuacagcaacuguuacccuuaugaugugccggauuaugccucccuuaggucacuaguugccucauccggcacacuggaguuuaacaaugaaagcuucaauuggacuggagucacucaaaacggaacaaguucugcuugcauaaggagaucuaauaguaguuucuuuaguagauuaaauugguugacccacuuaaacuucaaauacccagcauugaacgugacuaugccaaacaaugaacaauuugacaaauuguacauuugggggguucaccacccagguacggacaaggaccaaaucuuccuguaugcucaaucaucaggaagaaucacaguaucuaccaaaagaagccaacaagcuguaaucccaaauaucggaucuagacccagaauaaggaauaucccuagcagaauaagcaucuauuggacaauaguaaaaccgggagacauacuuuugauuaacagcacagggaaucuaauugcuccuagggguuacuucaaaauacgaagugggaaaagcucaauaaugagaucagaugcacccauuggcaaaugcaagucugaaugcaucacuccaaauggaagcauucccaaugacaaaccauuccaaaauguaaacaggaucacauacggggccugucccagauauguuaagcaaagcacucugaaauuggcaacaggaaugcgaaauguaccagagaaacaaacuagaggcauauuuggcgcaauagcagguuucauagaaaaugguugggagggaaugguggaugguugguacgguuucaggcaucaaaauucugagggaagaggacaagcagcagaucucaaaagcacccaagcagcaaucgaucaaaucaaugggaagcugaaucgauugaucgggaaaaccaacgagaaauuccaucagauugaaaaagaauucucagaaguagaagggagaauucaggaccuugagaaauauguugaggacacuaaaauagaucucuggucauacaacgcggagcuucuuguugcccuggagaaccaacauacaauugaucuaacugacucagaaaugaacaaacuguuugaaaaaacuaagaagcaacugagggaaaaugcugaggauaugggcaaugguuguuucaaaauauaccacaaaugugacaaugccugcauaggaucaauaagaaauggaacuuaugaccacaauguguacagggaugaagcauuaaacaaccgguuccagaucaagggaguugagcugaagucaggguacaaagauuggauccuauggauuuccuuugccauaucauguuuuuugcuuuguguugcuuuguugggguucaucaugugggccugccaaaagggcaacauuaggugcaacauuugcauuuga

SEQ ID NO: 44340 - RNA, 1701 nt, Artificial Sequence
  derived and/or modified CDS sequence (wt) from hemagglutinin__InfluenzaA__AHZ42690
augaaggcaauacuaguaguucugcuauacacauaugcaaccgcaaaugcagacacauuauguauagguuaucaugcgaacaauucaacagacacuguagacacaguacuagaaaagaauguaacaguaacacacucuguuaaccuucuagaagacaagcauaacgggaaacuaugcaaacuaagagggguagccccauugcauuuggguaaauguaacauugcuggcuggauccugggaaauccagagugugaaucacucuccacagcaaguucaugguccuacauuguggaaacaucuaguucagacaauggaacguguuacccaggagauuucaucaauuaugaggagcuaagagagcaauugagcucagugucaucauuugaaagguuugagauauuccccaagacaaguucauggcccaaucaugacucgaacaaagguguaacggcagcauguccucaugcuggagcaaaaagcuucuacaaaaauuuaauauggcuaguuaaaaaaggaaauucauacccaaagcucagcaaauccuacauuaaugauaaagggaaagaaguccucgugcuguggggcauucaccauccaucuacuacuacugaccaacaaagucucuaucagaaugcagaugcauauguuuuuguggggacaucaagauacagcaagaaguucaagccggaaauagcaauaagacccaaagugagggaucaagaagggagaaugaacuauuacuggacacuaauagagccgggagacaaaauaacauucgaagcaacuggaaaucuagugguaccgagauaugcauucgcaauggaaagaaaugcuggaucugguauuaucauuucagauacaccaguccacgauugcaauacaacuugucagacacccgagggggcuauaaacaccagccucccauuucagaauauacauccgaucacaauuggaaaauguccaaaguauguaaaaagcacaaaauugagacuggccacaggauugaggaaugucccgucuauucaaucuagaggccuauucggggccauugccggcuucauugaagggggguggacagggaugguagauggaugguacgguuaucaccaucaaaaugagcaggggucaggauaugcagccgaccugaagagcacacaaaaugccauugacaagauuacuaacaaaguaaauucuguuauugaaaagaugaauacacaguucacagcaguggguaaagaguucaaccaccuggaaaaaagaauagagaauuuaaauaaaaaaguugaugaugguuuccuggacauuuggacuuacaaugccgaacuguugguucuauuggaaaaugaaagaacuuuggacuaccacgauucaaaugugaagaacuuguaugaaaagguaagaaaccaguuaaaaaacaaugccaaggaaauuggaaacggcugcuuugaauuuuaccacaaaugcgauaacacgugcauggaaagugucaaaaaugggacuuaugacuacccaaaauacucagaggaagcaaaauuaaacagagaaaaaauagaugggguaaagcuggaaucaacaaggauuuaccagauuuuggcgaucuauucaacugucgcuaguucauugguacugguagucucccugggggcaaucaguuucuggaugugcucuaaugggucucuacaguguagaauauguauuuaa

SEQ ID NO: 44341 - RNA, 1701 nt, Artificial Sequence; identical to SEQ ID NO: 44232
  derived and/or modified CDS sequence (wt) from hemagglutinin__InfluenzaA__AHZ42701

SEQ ID NO: 44342 - RNA, 1701 nt, Artificial Sequence
  derived and/or modified CDS sequence (wt) from hemagglutinin__InfluenzaA__AHZ42713
augaagacuaucauugcuuugagcuacauucuaugucugguuuucgcucaaaaacuuccuggaaaugacaauagcacggcaacgcugugccuugggcaccaugcaguaccaaacggaacgauagugaaaacaaucacgaaugaccgaauugaaguuacuaaugcuacugagcugguucagaauuccucaauaggugaaauaugcgacaguccucaucagauucuugauggagaaaacugcacacuaauagaugcucuauugggagacccucagugugauggcuuucaaaauaagaaaugggaccuuuuuguugaacgaagcaaagccuacagcaacuguuacccuuaugaugugccggauuaugccucccuuaggucacuaguugccucauccggcacacuggaguuuaacaaugaaagcuucaauuggacuggagucacucaaaacggaacaaguucugcuugcauaaggagaucuaauaguaguuucuuuaguagauuaaauugguugacccacuuaaacuucaaauacccagcauugaacgugacuaugccaaacaaugaacaauuugacaaauuguacauuugggggguucaccacccagguacagacaaggaccaaaucuuccuguaugcucaaucaucaggaagaaucacaguaucuaccaaaagaagccaacaagcuguaaucccaaauaucggaucuagacccagaauaaggaauaucccuagcagaauaagcaucuauuggacaauaguaaaaccgggagacauacuuuugauuaacagcacagggaaucuaauugccccuagggguuacuucaaaauacgaagugggaaaagcucaauaaugagaucagaugcacccauuggcaaaugcaagucugaaugcaucacuccaaauggaagcauucccaaugacaaaccauuccaaaauguaaacaggaucacauacggggccugucccagauauguuaagcaaagcacucugaaauuggcaacaggaaugcgaaauguaccagagaaacaaacuagaggcauauuuggcgcaauagcagguuucauagaaaaugguugggagggaaugguggaugguugguacgguuucaggcaucaaaauucugagggaagaggacaagcagcagaucucaaaagcacccaagcagcaaucgaucaaaucaaugggaagcugaaucgauugaucgggaaaaccaacgagaaauuccaucagauugaaaaagaauucucagaaguagaagggagaauucaggaccuugagaaauauguugaggacacuaaaauagaucucuggucauacaacgcggagcuucuuguugcccuggagaaccaacauacaauugaucuaacugacucagaaaugaacaaacuguuugaaaaaacaaagaagcaacugagggaaaaugcugaggauaugggcaaugguuguuucaaaauauaccacaaaugugacaaugccugcauaggaucaauaagaaauggaacuuaugaccacaauguguacagggaugaagcauuaaacaaccgguuccagaucaagggaguugagcugaagucaggguacaaagauuggauccuauggauuuccuuugccauaucauguuuuuugcuuuguguugcuuuguugggguucaucaugugggccugccaaaagggcaacauuaggugcaacauuugcauuuga

SEQ ID NO: 44343 - RNA, 1701 nt, Artificial Sequence
  derived and/or modified CDS sequence (wt) from hemagglutinin__InfluenzaA__AHZ42725
augaagacuaucauugcuuugagcuacauucuaugucugguuuucgcucaaaaacuuccuggaaaugacaauagcacggcaacgcugugccuugggcaccaugcaguaccaaacggaacgauagugaaaacaaucacgaaugaccgaauugaaguuacuaaugcuacugagcugguucagaauuccucaauaggugaaauaugcgacaguccucaucagauccuugauggagaaaacuguacacuaauagaugcucuauugggagacccucagugugauggcuuucaaaauaagaaaugggaccuuuuuguugaacgaagcaaagccuacagcaacuguuacccuuaugaugugccggauuaugccucccuuaggucacuaguugccucauccggcacacuggaguuuaacaaugaaagcuucaauuggacuggagucacucaaaacggaacaaguucugcuugcauaaggagaucuaauaguaguuucuuuaguagauuaaauugguugacccacuuaaacuucaaauacccagcauugaacgugacuaugccaaacaaugaacaauuugacaaauuguacauuugggggguucaccacccggguacggacaaggaccaaaucuuccuguaugcucaaucaucaggaagaaucacaguaucuaccaaaagaagccaacaagcuguaaucccgaauaucggaucuagacccagaauaaggaauaucccuagcagaauaagcaucuauuggacaauaguaaaaccaggagacauacuuuugauuaacagcacagggaaucuaauugcuccuagggguuacuucaaaauacgaaaugggaaaagcucaauaaugagaucagaugcacccauuggcaaaugcaagucugaaugcaucacuccaaauggaagcauuccaaaugacaaaccauuccaaaauguaaacaggaucacauacggggccugucccagauauguuaagcaaagcacucugaaauuggcaacaggaaugcgaaauguaccagagaaacaaacuagaggcauauuuggcgcaauagcggguuucauagaaaaugguugggagggaaugguggaugguugguacgguuucaggcaucaaaauucugagggaagaggacaagcagcagaucucaaaagcacucaagcagcaaucgaucaaaucaaugggaagcugaaucgauugaucgggaaaaccaacgagaaauuccaucagauugaaaaagaauucucagaaguagaagggagaauucaggaccuugagaaauauguugaggacacuaaaauagaucucuggucauacaacgcggagcuucuuguugcccuggagaaccaacauacaauugaucuaacugacucagaaaugaacaaacuguuugaaaaaacaaagaagcaacugagggaaaaugcugaggauaugggcaaugguuguuucaaaauauaccacaaaugugacaaugccugcauaggaucaaucagaaauggaacuuaugaccacgauguauacagggaugaagcauuaaacaaccgguuccagaucaagggaguugagcugaagucaggguacaaagauuggauccuauggauuuccuuugccauaucauguuuuuugcuuuguguugcuuuguugggguucaucaugugggccugccaaaagggcaacauuaggugcaacauuugcauuuga

SEQ ID NO: 44344 - RNA, 1701 nt, Artificial Sequence
  derived and/or modified CDS sequence (wt) from hemagglutinin__InfluenzaA__AHZ42737
augaaggcaauacuaguaguucugcuauacacauuugcaaccgcaaaugcagacacauuauguauagguuaucaugcgaacaauucaacagacacuguagacacaguacuagaaaagaauguaacaguaacacacucuguuaaccuucuagaagacaagcauaaugggaaacuaugcaaacuaagagggguagccccauugcauuuggguaaauguaacauugcuggcuggauccugggaaauccagagugugaaucacucuccacagcaaguucaugguccuacauuguggaaacaucuaguucagacaauggaacguguuacccaggagauuucaucaauuaugaggagcuaagagagcaauugagcucagugucaucauuugaaagguuugagauauuccccaagacaaguucauggcccaaucaugacucgaacaaagguguaacggcagcauguccucaugcuggagcaaaaagcuucuacaaaaauuuaauauggcuaguuaaaaagggaaauucauacccaaagcucagcaaauccuacauuaaugauaaagggaaagaaguccucgugcuguggggcauucaccauccaucuacuacugcugaccaacaaagucucuaucagaaugcagaugcauauguuuuuguggggacaucaagauacagcaagaaguucaagccggaaauagcaauaagacccaaagugagggaucaagaagggagaaugaacuauuacuggacacuaauagagccgggagacaaaauaacauucgaagcaacuggaaaucuagugguaccgagauaugcauucgcaauggagagaaaugcugaaucugguauuaucauuucagauacaccaguccacgauugcaauacaacuugucagacacccgagggugcuauaaacaccagccucccauuucagaauauacauccgaucacaauuggaaaauguccaaaguauguaaaaagcacaaaauuaagacuggccacaggauugaggaaugucccgucuauucaaucuagaggccuauucggggccauugccggcuucauugaagggggguggacagggaugguagauggaugguacgguuaucaccaucaaaaugagcagggaucaggauaugcagccgaccugaagagcacacaaaaugccauugacaagauuacuaacaaaguaaauucuguuauugaaaagaugaauacacaguucacagcaguggguaaagaguucaaccaccuggaaaaaagaauagagaauuuaaauaaaaaaguugaugaugguuuccuggacauuuggacuuacaaugccgaacuguugguucuauuggaaaaugaaagaacuuuggacuaccacgauucaaaugugaagaacuuguaugaaaagguaagaaaccaguuaaaaaacaaugccaaggaaauuggaaacggcugcuuugaauuuuaccacaaaugcgauaacacgugcauggaaagugucaaaaaugggacuuaugacuacccaaaauacucagaggaagcaaaauuaaacagagaaaaaauagaugggguaaagcuggaaucaacaaggauuuaccagauuuuggcgaucuauucaacugucgccaguucauugguacugguagucucccugggggcaaucaguuucuggauguguucuaaugggucucuacaguguagaauauguauuuaa

SEQ ID NO: 44345 - RNA, 1701 nt, Artificial Sequence; identical to SEQ ID NO: 41899
  derived and/or modified CDS sequence (wt) from hemagglutinin__InfluenzaA__AHZ42748

SEQ ID NO: 44346 - RNA, 1701 nt, Artificial Sequence; identical to SEQ ID NO: 41915
  derived and/or modified CDS sequence (wt) from hemagglutinin__InfluenzaA__AHZ42760

SEQ ID NO: 44347 - RNA, 1701 nt, Artificial Sequence
  derived and/or modified CDS sequence (wt) from hemagglutinin__InfluenzaA__AHZ42772
augaagaccaucauugcuuugagcuacauucuaugucuaguuuucgcucaagaacuuccuggaaaugacgacagcacggcaacgcugugccuugggcaccaugcagugccaaacggaacgauagugaaaacaaucacgaaugaccgaauugaaguuacuaaugcuacugagcugguucagaguuccucaacaggugaaauaugcaacaguccucaucagauccuugauggagaaaacugcacacuaauagaugcucuauugggagacccucagugugauggcuuccaaaacaagaaaugggaccuuuuuguugaaagaagcaaagcccacagcaacuguuacccuuaugaugugccggauuaugccucccuuaggucacuaguugccucauccggcacacuggaguuuaacaaugaaagcuucaauuggacuggagucacucaaaacggaacaagcucugcuugcauaaggagaucuaauaauaguuucuuuaguagauugaauugguugacccacuuaaacuucaaauacccagcauugaacgugacuaugccaaacaaugaacaauuugacaaauuguacauuugggggguucaccacccggguacggacaaggaccaaaucuuccuguaugcucaagcaucaggaagaaucacaguaucuaccaaaagaagccaacaaacuguaauuccgaauaucggaucuagacccagaguaaggaauaucccuagcagaguaagcaucuauuggacaauaguaaaaccaggagacauacuuuugauuaacagcacagggaaucuaauugcuccuagggguuacuucaaaauacgaaguggaaaaagcucaauaaugagaucagaugcacccauuggcaaaugcaauucugcaugcaucacuccaaauggaagcauucccaaugacaaaccauuccaaaauguaaacaggaucacauacggggccugucccagauaugucaagcaaaacacucugaaauuggcaacaggaaugagaaauguaccagagaaacaaacuagaggcauauuuggugcaauagcggguuucauagaaaaugguugggagggaaugguggaugguugguacgguuucaggcaucaaaauucugagggaaggggacaagcagcagaucucaaaagcacucaagcagcaaucgaucaaaucaaugggaagcugaauagauugaucgggaaaaccaacgagaaauuccaucagauugaaaaagaauucucagaagucgaagggagaauucaggaccuugagaaauauguugaggacacuaaaauagaucucuggucauacaacgcggagcuucuuguugcccuggagaaccaacacacaauugaucuaacugacucagaaaugaacaaacuguuugaaaaaacaaagaagcaacugagggaaaaugcugaggauaugggcaaugguuguuucaaaauauaccacaaaugugacaaugccugcauaggaucaaucagaaauggaacuuaugaucacgauguguacagagaugaagcauuaaacaaccgauuccagaucaaggaaguugagcugaagucaggguacaaagauuggauccuauggauuuccuuugccauaucauguuuuuugcuuuguguugcuuuguugggguucaucaugugggccugccaaaaaggcaacauuaggugcaacauuugcauuuga

SEQ ID NO: 44348 - RNA, 1701 nt, Artificial Sequence; identical to SEQ ID NO: 41901
  derived and/or modified CDS sequence (wt) from hemagglutinin__InfluenzaA__AHZ42784

SEQ ID NO: 44349 - RNA, 1701 nt, Artificial Sequence
  derived and/or modified CDS sequence (wt) from hemagglutinin__InfluenzaA__AHZ42796
augaagacuaucauugcuuugagcuacauucuaugucugguuuucgcucaaaaacuuccuggaaaugacaauagcacggcaacgcugugccuugggcaccaugcaguaccaaacggaacgauagugaaaacaaucacgaaugaccgaauugaaguuacuaaugcuacugagcugguucagaauuccucaauaggugaaauaugcgacaguccucaucagauucuugauggagaaaacugcacacuaauagaugcucuauugggagacccucagugugauggcuuucaaaauaagaaaugggaccuuuuuguugaacgaagcaaagccuacagcaacuguuacccuuaugaugugccggauuaugccucccuuaggucacuaguugccucauccggcacacuggaguuuaacaaugaaagcuucaauuggacuggagucacucaaaacggaacaaguucugcuugcauaaggagaucuaauaguaguuucuuuaguagauuaaauugguugacccacuuaaacuucaaauacccagcauugaacgugacuaugccaaacaaugaacaauuugacaaauuguacauuugggggguucaccacccagguacggacaaggaccaaauuuuccuguaugcucaaucaucaggaagaaucacaguaucuaccaaaagaagccaacaagcuguaaucccaaauaucggaucuagacccagaauaaggaauaucccuagcagaauaagcaucuauuggacaauaguaaaaccgggagacauacuuuugauuaacagcacagggaaucuaauugcuccuagggguuacuucaaaauacgaagugggaaaagcucaauaaugagaucagaugcacccauuggcaaaugcaagucugaaugcaucacuccaaauggaagcauucccaaugacaaaccauuccaaaauguaaacaggaucacauacggggccugucccagauauguuaagcaaagcacucugaaauuggcaacaggaaugcgaaauguaccagagaaacaaacuagaggcauauuuggcgcaauagcagguuucauagaaaaugguugggagggaaugguggaugguugguacgguuucaggcaucaaaauucugagggaagaggacaagcagcagaucucaaaagcacccaagcagcaaucgaucaaaucaaugggaagcugaaucgauugaucgggaaaaccaacgagaaauuccaucagauugaaaaggaauucucagaaguagaagggagaauucaggaccuugagaaauauguugaggacacuaaaauagaucucuggucauacaacgcggagcuucuuguugcccuggagaaccaacauacaauugaucuaacugacucagaaaugaacaaacuguuugaaaaaacaaagaagcaacugagggaaaaugcugaggauaugggcaaugguuguuucaaaauauaccacaaaugugacaaugccugcauaggaucaauaagaaauggaacuuaugaccacaauguguacagggaugaagcauuaaacaaccgguuccagaucaagggaguugagcugaagucaggguacaaagauuggauccuauggauuuccuuugccauaucauguuuuuugcuuuguguugcuuuguugggguucaucaugugggccugccaaaagggcaacauuaggugcaacauuugcauuuga

SEQ ID NO: 44350 - RNA, 1701 nt, Artificial Sequence
  derived and/or modified CDS sequence (wt) from hemagglutinin__InfluenzaA__AHZ42808
augaagacuaucauugcuuugagcuacauucuaugucugguuuucgcucaaaaacuuccuggaaaugacaauagcacggcaacgcugugccuugggcaccaugcaguaccaaacggaacgauagugaaaacaaucacgaaugaccgaauugaaguuacuaaugcuacugagcugguucagaauuccucaauaggugaaauaugcgacaguccucaucagauucuugauggagaaaacugcacacuaauagaugcucuauugggagacccucagugugauggcuuucaaaauaagaaaugggaccuuuuuguugaacgaagcaaagccuacagcaacuguuacccuuaugaugugccggauuaugccucccuuaggucacuaguugccucauccggcacacuggaauuuaacaaugaaagcuucaauuggacuggagucacucaaaacggaacaaguucugcuugcauaaggagaucuaauaguaguuucuuuaguagauuaaauugguugacccacuuaaacuucaaauacccagcauugaacgugacuaugccaaacaaugaacaauuugacaaauuguacauuuggggaguucaccacccagguacggacaaggaccaaaucuuccuguaugcucaaucaucaggaagaaucacaguaucuaccaaaagaagccaacaagcuguaaucccaaauaucggaucuagacccagaauaaggaauaucccuagcagaauaagcaucuauuggacaauaguaaaaccgggagacauacuuuugauuaacagcacagggaaucuaauugcuccuagggguuacuucaaaauacgaagugggaaaagcucaauaaugagaucagaugcacccauuggcaaaugcaagucugaaugcaucacuccaaauggaagcauucccaaugacaaaccauuccaaaauguaaacaggaucacauacggggccugucccagauauguuaagcaaagcacucugaaauuggcaacaggaaugcgaaauguaccagagaaacaaacuagaggcauauuuggcgcaauagcagguuucauagaaaaugguugggagggaaugguggaugguugguacgguuucaggcaucaaaauucugagggaagaggacaagcagcagaucucaaaagcacccaagcagcaaucgaucaaaucaaugggaagcugaaucgauugaucgggaaaaccaacgagaaauuccaucagauugaaaaagaauucucagaaguagaagggagaauucaggaccuugagaaauauguugaggacacuaaaauagaucucuggucauacaacgcggagcuucuuguugcccuggagaaccaacauacaauugaucuaacugacucagaaaugaacaaacuguuugaaaaaacaaagaagcaacugagggaaaaugcugaggauaugggcaaugguuguuucaaaauauaccacaaaugugacaaugccugcauaggaucaauaagaaauggaacuuaugaccacaauguguacagggaugaagcauuaaacaaccgguuccagaucaagggaguugagcugaagucaggguacaaagauuggauccuauggauuuccuuugccauaucauguuuuuugcuuuguguugcuuuguugggguucaucaugugggccugccaaaagggcaacauuaggugcaacauuugcauuuga

SEQ ID NO: 44351 - RNA, 1701 nt, Artificial Sequence
  derived and/or modified CDS sequence (wt) from hemagglutinin__InfluenzaA__AHZ42820
augaaggcaauacuaguaguucugcuauacacauuugcaaccgcaaaugcagacacauuauguauagguuaucaugcgaacaauucaacagacacuguagacacaguacuagaaaagaauguaacaguaacacacucuguuaaccuucuagaagacaagcauaacgggaaacuaugcaaacuaagagggguagccccauugcauuuggguaaauguaacauugcuggcuggauccugggaaauccagagugugaaucacucuccacagcaaguucaugguccuacauuguggaaacaucuaguucagacaauggaacguguuacccaggagauuucaucaauuaugaggagcuaagagagcaauugagcucagugucaucauuugaaagguuugagauauuccccaagacaaguucauggcccaaucaugacucgaacaaagguguaacggcagcauguccucaugcuggagcaaaaagcuucuacaaaaauuuaauauggcuaguuaaaaagggaaauucauacccaaagcucagcaaauccuacauuaaugauaaagggaaagaaguccucgugcuguggggcauucaccauccaucuacuacugcugaccaacaaagucucuaucagaaugcagaugcauauguuuuuguggggacaucaagauacagcaagaaguucaagccggaaauagcaauaagacccaaagugagggaucaagaagggagaaugaacuauuacuggacacuaauagagccgggagacaaaauaacauucgaagcaacuggaaaucuagugguaccgagauaugcauucgcaauggagagaaaugcugaaucugguauuaucauuucagauacaccaguccacgauugcaauacaacuugucagacacccgagggugcuauaaacaccagccucccauuucagaauauacauccgaucacaauuggaaaauguccaaaguauguaaaaagcacaaaauuaagacuggccacaggauugaggaaugucccgucuauucaaucuagaggccuauucggggccauugccggcuucauugaagggggguggacagggaugguagauggaugguacgguuaucaccaucaaaaugagcagggaucaggauaugcagccgaccugaagagcacacaaaaugccauugacaagauuacuaacaaaguaaauucuguuauugaaaagaugaauacacaguucacagcaguggguaaagaguucaaccaccuggaaaaaagaauagagaauuuaaauaaaaaaguugaugaugguuuccuggacauuuggacuuacaaugccgaacuguugguucuauuggaaaaugaaagaacuuuggacuaccacgauucaaaugugaagaacuuguaugaaaagguaagaaaccaguuaaaaaacaaugccaaggaaauuggaaacggcugcuuugaauuuuaccacaaaugcgauaacacgugcauggaaagugucaaaaaugggacuuaugacuacccaaaauacucagaggaagcaaaauuaaacagagaaaaaauagaugggguaaagcuggaaucaacaaggauuuaccagauuuuggcgaucuauucaacugucgccaguucauugguacugguagucucccugggggcaaucaguuucuggaugugcucuaaugggucucuacaguguagaauauguauuuaa

SEQ ID NO: 44352 - RNA, 1701 nt, Artificial Sequence
  derived and/or modified CDS sequence (wt) from hemagglutinin__InfluenzaA__AHZ42831
augaagacuaucauugcuuugagcuacauucuaugucuaguuuucgcucaaaaacuuccuggaaaugacaauagcacggcaacgcugugccuugggcaccaugcaguaccaaacggaacgauagugaaaacaaucacgaaugaccgaauugaaguuacuaaugcuacugagcugguucagaauuccucaauaggugaaauaugcgacaguccucaucagauccuugauggagaaaacugcacacuaauagaugcucuauugggagacccucagugugauggcuuccaaaauaagaaaugggaccuuuuuguugaacgaagcaaagccuacagcaacuguuacccuuaugaugugccggauuaugccucccuuaggucacuaguugccucauccggcacacuggaguuuaacaaugaaagcuucaauuggacuggagucacucaaaacggaacaaguucugcuugcauaaggagaucuaauaauaguuucuuuaguagauuaaauugguugacccacucaaacuucaaauacccagcauugaacgugacuaugccaaacaaugaacaauuugacaaauuguacauuugggggguucaccauccggguacggacaaggaccaaaucuuccuguaugcucaaucaucaggaagaaucacaguaucuaccaaaagaagccaacaagcuguaaucccgaauaucggaucuagacccagaauaaggaauaucccuagcagaauaagcaucuauuggacaauaguaaaaccgggagacauacuuuugauuaacagcacagggaaucuaauugcuccuagggguuacuucaaaauacgaagugggaaaagcucaauaaugagaucagaugcacccauuggcaaaugcaagucugaaugcaucacuccaaacggaagcauucccaaugacaaaccauuccaaaauguaaacaggaucacauacggggccugucccagauauguuaagcaaagcacucugaaauuggcaacaggaaugcgaaauguaccagagaaacaaacuagaggcauauuuggugcaauagcggguuucauagaaaaugguugggagggaaugauggaugguugguacgguuucaggcaccaaaauucugagggaagaggacaagcagcagaucucaaaagcacucaagcagcaaucgaucaaaucaaugggaagcugaaucgauugaucgggaaaaccaacgagaaauuccaucagauugaaaaagaauuuucagaaguagaagggagaauucaggaccuugagaaauauguugaggacacuaaaauagaucucuggucauacaacgcggagcuucuuguugcccuggagaaccaacauacaauugaucuaacugacucagaaaugaacaaacuguuugaaaaaacaaagaagcaacugagggaaaaugcugaggauaugggcaaugguuguuucaaaauauaccacaaaugugacaaugccugcauaggaucaaucagaaauggaacuuaugaccacgauguauacagagaugaagcauuaaacaaccgguuccagaucaagggaguugagcugaagucaggguacaaagauuggauccuauggauuuccuuugccauaucauguuuuuugcuuuguguugcuuuguugggguucaucaugugggccugccaaaagggcaacauuaggugcaacauuugcauuuga

SEQ ID NO: 44353 - RNA, 1701 nt, Artificial Sequence
  derived and/or modified CDS sequence (wt) from hemagglutinin__InfluenzaA__AHZ42843
augaagacuaucauugcuuugagcuacauucuaugucugguuuucgcucaaaaacuuccuggaaaugacaauagcacggcaacgcugugccuugggcaccaugcaguaccaaacggaacgauggugaaaacaaucacgaaugaccgaauugaaguuacuaaugcuacugagcugguucagaauuccucaauaggugaaauaugcgacaguccucaucagauucuugauggagaaaacugcacacuaauagaugcucuauugggagacccucagugugauggcuuucaaaauaagaaaugggaccuuuuuguugaacgaagcaaagccuacagcaacuguuacccuuaugaugugccggauuaugccucccuuaggucacuaguugccucauccggcacacuggaguuuaacaaugaaagcuucaauuggacuggagucacucaaaacggaacaaguucugcuugcauaaggagaucuaauaguaguuucuuuaguagauuaaauugguugacccacuuaaacuucaaauacccagcauugaacgugacuaugccaaacaaugaacaauuugacaaauuguacauuugggggguucaccacccagguacggacaaggaccaaaucuuccuguaugcucaaucaucaggaagaaucacaguaucuaccaaaagaagccaacaagcuguaaucccaaauaucggaucuagacccagaauaaggaauaucccuagcagaauaagcaucuauuggacaauaguaaaaccgggagacauacuuuugauuaacagcacagggaaucuaauugcuccuagggguuacuucaaaauacgaagugggaaaagcucaauaaugagaucagaugcacccauuggcaaaugcaagucugaaugcaucacuccaaauggaagcauucccaaugacaaaccauuccaaaauguaaacaggaucacauacggggccugucccagauauguuaagcaaagcacucugaaauuggcaacaggaaugcgaaauguaccagagaaacaaacuagaggcauauuuggcgcaauagcagguuucauagaaaaugguugggagggaaugguggaugguugguacgguuucaggcaucaaaauucugagggaagaggacaagcagcagaucucaaaagcacccaagcagcaaucgaucaaaucaaugggaagcugaaucgauugaucgggaaaaccaacgagaaauuccaucagauugaaaaagaauucucagaaguagaagggagaauucaggaccuugagaaauauguugaggacacuaaaauagaucucuggucauacaacgcggagcuucuuguugcccuggagaaccaacauacaauugaucuaacugacucagaaaugaacaaacuguuugaaaaaacaaagaagcaacugagggaaaaugcugaggauaugggcaaugguuguuucaaaauauaccacaaaugugacaaugccugcauaggaucaauaagaaauggaacuuaugaccacaauguguacagggaugaagcauuaaacaaccgguuccagaucaagggaguugagcugaagucaggguacaaagauuggauccuauggauuuccuuugccauaucauguuuuuugcuuuguguugcuuuguugggguucaucaugugggccugccaaaagggcaacauuaggugcaacauuugcauuuga

SEQ ID NO: 44354 - RNA, 1701 nt, Artificial Sequence
  derived and/or modified CDS sequence (wt) from hemagglutinin__InfluenzaA__AHZ42855
augaagacuaucauugcuuugagcuacauucuaugucugguuuucgcucaaaaacuuccuggaaaugacaauagcacggcaacgcugugccuugggcaccaugcaguaccaaacggaacgauagugaaaacaaucacgaaugaccgaauugaaguuacuaaugcuacugagcugguucagaauuccucaauaggugaaauaugcgacaguccucaucagauucuugauggagaaaacugcacacuaauagaugcucuauugggagacccucagugugauggcuuucaaaauaagaaaugggaccuuuuuguugaacgaagcaaagccuacagcaacuguuacccuuaugaugugccggauuaugccucccuuaggucacuaguugccucauccggcacacuggaguuuaacaaugaaagcuucaauuggacuggagucacucaaaacggaacaaguucugcuugcauaaggagaucuaauaguaguuucuuuaguagauuaaauugguugacccacuuaaacuucaaauacccagcauugaacaugacuaugccaaacaaugaacaauuugacaaauuguacauuugggggguucaccacccagguacggacaaggaccaaaucuuccuguaugcucaaucaucaggaagaaucacaguaucuaccaaaagaagccaacaagcuguaaucccaaauaucggaucuagacccagaauaaggaauaucccuagcagaauaagcaucuauuggacaauaguaaaaccgggagacauacuuuugauuaacagcacagggaaucuaauugcuccuagggguuacuucaaaauacgaagugggaaaagcucaauaaugagaucagaugcacccauuggcaaaugcaagucugaaugcaucacuccaaauggaagcauucccaaugacaaaccauuccaaaauguaaacaggaucacauacggggccugucccagauauguuaagcaaagcacucugaaauuggcaacaggaaugcgaaauguaccagagaaacaaacuagaggcauauuuggcgcaauagcagguuucauagaaaaugguugggagggaaugguggaugguugguacgguuucaggcaucaaaauucugagggaagaggacaagcagcagaucucaaaagcacccaagcagcaaucgaucaaaucaaugggaagcugaaucgauugaucgggaaaaccaacgagaaauuccaucagauugaaaaagaauucucagaaguagaagggagaauucaggaccuugagaaauauguugaggacacuaaaauagaucucuggucauacaacgcggagcuucuuguugcccuggagaaccaacauacaauugaucuaacugacucagaaaugaacaaacuguuugaaaaaacaaagaagcaacugagggaaaaugcugaggauaugggcaaugguuguuucaaaauauaccacaaaugugacaaugccugcauaggaucaauaagaaauggaacuuaugaccacaauguguacagggaugaagcauuaaacaaccgguuccagaucaagggaguugagcugaagucaggguacaaagauuggauccuauggauuuccuuugccauaucauguuuuuugcuuuguguugcuuuguugggguucaucaugugggccugccaaaagggcaacauuaggugcaacauuugcauuuga

SEQ ID NO: 44355 - RNA, 1701 nt, Artificial Sequence
  derived and/or modified CDS sequence (wt) from hemagglutinin__InfluenzaA__AHZ42867
augaagacuaucauugcuuugagcuacauucuaugucugguuuucgcucaaaaacuuccuggaaaugacaauagcacggcaacgcugugccuugggcaccaugcaguaccaaacggaacgauagugaaaacaaucacgaaugaccaaauugaaguuacuaaugcuacugagcugguucagaauuccucaauaggugaaauaugcgacaguccucaucagauccuugauggagaaaacugcacacuaauagaugcucuauugggagacccucagugugauggcuuucaaaauaagaaaugggaccuuuuuguugaacgaagcaaagccuacagcaacuguuacccuuaugaugugccggauuaugccucccuuaggucacuaguugccucaucaggcacacuggaguuuaacaaugaaagcuucaauugggcuggagucacucaaaacggaacaaguucugcuugcauaaggggaucuaauaguaguuucuuuaguagauuaaauugguugacccacuuaaacuucaaguacccagcauugaacgugaccaugccaaacaaugaacaauuugacaaauuguacauuugggggguucaccacccggguacggacaaggaccaaaucuuccuguaugcucaaucaucaggaagaaucacaguaucuaccaaaagaagccaacaagcuguaaucccgaauaucggaucuagacccagaauaaggaauaucccuagcagaauaagcaucuauuggacaauaguaaaaccgggagacauacuuuugauuaacagcacagggaaucuaauugcuccuagggguuacuucaaaauacgaagugggaaaagcucaauaaugagaucagaugcacccauuggcaaaugcaagucugaaugcaucacuccaaauggaagcauucccaaugacaaaccauuccaaaauguaaacaggaucacauacggggccugucccagauauguuaagcaaagcacucugaaauuggcaacaggaaugcgaaauguaccagagaaacaaacuagaggcauauuuggcgcaauagcggguuucauagaaaaugguugggagggaaugguggaugguugguacgguuucaggcaucaaaauucugagggaagaggacaagcagcagaucucaaaagcacucaagcagcaaucgaucaaaucaaugggaagcugaaucgauugaucgggaaaaccaacgagaaauuccaucagauugagaaagaauucucagaaguagaagggagaauucaggaccuugagaaauauguugaggacacaaaaauagaucucuggucauacaacgcagagcuucuuguugcccuggagaaccaacauacaauugaucuaacugacucagaaaugaacaaacuguuugaaaaaacaaagaagcaacugagggaaaaugcugaggauaugggcaaugguuguuucaaaauauaccacaaaugugacaaugccugcauaggaucaaucagaaauggaacuuaugaccacgauguauacagggaugaagcauuaaacaaccgguuccagaucaagggaguugagcugaagucagaguacaaagauuggauccuauggauuuccuuugccauaucauguuuuuugcuuuguguugcuuuguugggguucaucaugugggccugccaaaagggcaacauuaggugcaacauuugcauuuga

SEQ ID NO: 44356 - RNA, 1701 nt, Artificial Sequence
  derived and/or modified CDS sequence (wt) from hemagglutinin__InfluenzaA__AHZ42879
augaagacuaucauugcuuugagcuacauucuaugucugguuuucgcucaaaaacuuccuggaaaugacaauagcacggcaacacugugccuugggcaccaugcaguaccaaacggaacgauagugaaaacaaucacgaaugaccgaauugaaguuacuaaugcuacugagcugguucagaauuccucaauaggugaaauaugcgacaguccucaucagauucuugauggagaaaacugcacacuaauagaugcucuauugggagacccucagugugauggcuuucaaaauaagaaaugggaccuuuuuguugaacgaagcaaagccuacagcaacuguuacccuuaugaugugccggauuaugccucccuuaggucacuaguugccucauccggcacacuggaguuuaacaaugaaagcuucaauuggacuggagucacucaaaacggaacaaguucugcuugcauaaggagaucuaauaguaguuucuuuaguagauuaaauugguugacccacuuaaacuucaaauacccagcauugaacgugacuaugccaaacaaugaacaauuugacaaauuguacauuugggggguucaccacccagguacggacaaggaccaaaucuuccuguaugcucaaucaucaggaagaaucacaguaucuaccaaaagaagccaacaagcuguaaucccaaauaucggaucuagacccagaauaaggaauaucccuagcagaauaagcaucuauuggacaauaguaaaaccgggagacauacuuuugauuaacagcacagggaaucuaauugcuccuagggguuacuucaaaauacgaagugggaaaagcucaauaaugagaucagaugcacccauuggcaaaugcaagucugaaugcaucacuccaaauggaagcauucccaaugacaaaccauuccaaaauguaaacaggaucacauacggggccugucccagauauguuaagcaaagcacucugaaauuggcaacaggaaugcgaaauguaccagagaaacaaacuagaggcauauuuggcgcaauagcagguuucauagaaaaugguugggagggaaugguggaugguugguacgguuucaggcaucaaaauucugagggaagaggacaagcagcagaucucaaaagcacccaagcagcaaucgaucaaaucaaugggaagcugaaucgauugaucgggaaaaccaacgagaaauuccaucagauugaaaaagaauucucagaaguagaagggagaauucaggaccuugagaaauauguugaggacacuaaaauagaucucuggucauacaacgcggagcuucuuguugcccuggagaaccaacauacaauugaucuaacugacucagaaaugaacaaacuguuugaaaaaacaaagaagcaacugagggaaaaugcugaggauaugggcaaugguuguuucaaaauauaccacaaaugugacaaugccugcauaggaucaauaagaaauggaacuuaugaccacaauguguacagggaugaagcauuaaacaaccgguuccagaucaagggaguugagcugaagucaggguacaaagauuggauccuauggauuuccuuugccauaucauguuuuuugcuuuguguugcuuuguugggguucaucaugugggccugccaaaagggcaacauuaggugcaacauuugcauuuga

SEQ ID NO: 44357 - RNA, 1701 nt, Artificial Sequence
  derived and/or modified CDS sequence (wt) from hemagglutinin__InfluenzaA__AHZ42891
augaagacuaucauugcuuugagcuacauucuaugucugguuuucgcucaaaaacuuccuggaaaugacaauagcacggcaacgcugugccuugggcaccaugcaguaccaaacggaacgauagugaaaacaaucacgaaugaccgaauugaaguuacuaaugcuacugagcugguucagaauuccucaauaggugaaauaugcgacaguccucaucagauccuugauggagaaaacuguacacuaauagaugcucuauugggagacccucagugugauggcuuucaaaauaagaaaugggaccuuuuuguugaacgaagcaaagccuacagcagcuguuacccuuaugaugugccggauuaugccucccuuaggucacuaguugccucauccggcacacuggaguuuaacaaugaaagcuucaauugggcuggagucacucaaaacggaacaaguucugcuugcauaaggagaucuaauaguaguuucuuuaguagauuaaauugguugacccacuuaaacuucaaauacccagcauugaacgugacuaugccaaacaaugaacaauuugacaaauuguacauuugggggguucaccacccggguacggacaaggaccaaaucuuccuguaugcucaaucaucaggaagaaucacaguaucuaccaaaagaagccaacaagcuguaaucccgaauaucggaucuagacccagaauaaggaauaucccuagcagaauaagcaucuauuggacaauaguaaaaccaggagacauacuuuugauuaacagcacagggaaucuaauugcuccuagggguuacuucaaaauacgaagugggaaaagcucaauaaugagaucagaugcacccauuggcaaaugcaagucugaaugcaucacuccaaauggaagcauuccaaaugacaaaccauuccaaaauguaaacaggaucacauacggggccugucccagauauguuaagcaaagcacucugaaauuggcaacaggaaugcgaaauguaccagagaaacaaacuagaggcauauuuggcgcaauagcggguuucauagaaaaugguugggagggaaugguggaugguugguacgguuucaggcaucaaaauucugagggaagaggacaagcagcagaucucaaaagcacucaagcagcaaucgaucaaaucaaugggaagcugaaucgauugaucgggaaaaccaacgagaaauuccaucagauugaaaaagaauucucagaaguagaagggagaauucaggaccuugagaaauauguugaggacacuaaaauagaucucuggucauacaacgcggagcuucuuguugcccuggagaaccaacauacaauugaucuaacugacucagaaaugaacaaacuguuugaaaaaacaaaaaagcaacugagggaaaaugcugaggauaugggcaaugguuguuucaaaauauaccacaaaugugacaaugccugcauaggaucaaucagaaauggaacuuaugaccacgauguauacagggaugaagcauuaaacaaucgguuccagaucaagggaguugagcugaagucaggguacaaagauuggauccuauggauuuccuuugccauaucauguuuuuugcuuuguguugcuuuguugggguucaucaugugggccugccaaaagggcaacauuaggugcaacauuugcauuuga

SEQ ID NO: 44358 - RNA, 1701 nt, Artificial Sequence
  derived and/or modified CDS sequence (wt) from hemagglutinin__InfluenzaA__AHZ42903
augaagacuaucauugcuuugagcuacauucuaugucugguuuucgcucaaaaaauuccuggaaaugacaauagcacggcaacgcugugccuugggcaccaugcaguaccaaacggaacgauagugaaaacaaucacgaaugaccgaauugaaguuacuaaugcuacugagcugguucagaauuccucaauaggugaaauaugcgacaguccucaucagauucuugauggagaaaacugcacacuaauagaugcucuauugggagacccucagugugauggcuuucaaaauaagaaaugggaccuuuuuguugaacgaagcaaagccuacagcaacuguuacccuuaugaugugccggauuaugccucccuuaggucacuaguugccucauccggcacacuggaguuuaacaaugaaagcuucaauuggacuggagucacucaaaacggaacaaguucugcuugcauaaggagaucuaauaguaguuucuuuaguagauuaaauugguugacccacuuaaacuucaaauacccagcauugaacgugacuaugccaaacaaugaacaauuugacaaauuguacauuugggggguucaccacccagguacggacaaggaccaaaucuuccuguaugcucaaucaucaggaagaaucacaguaucuaccaaaagaagccaacaagcuguaaucccaaauaucggaucuagacccagaauaaggaauaucccuagcagaauaagcaucuauuggacaauaguaaaaccgggagacauacuuuugauuaacagcacagggaaucuaauugccccuagggguuacuucaaaauacgaagugggaaaagcucaauaaugagaucagaugcacccauuggcaaaugcaagucugaaugcaucacuccaaauggaagcauucccaaugacaaaccauuccaaaauguaaacaggaucacauacggggccugucccagauauguuaagcaaagcacucugaaauuggcaacaggaaugcgaaauguaccagagaaacaaacuagaggcauauuuggcgcaauagcagguuucauagaaaaugguugggagggaaugguggaugguugguacgguuucaggcaucaaaauucugagggaagaggacaagcagcagaucucaaaagcacccaagcagcaaucgaucaaaucaaugggaagcugaaucgauugaucgggaaaaccaacgagaaauuccaucagauugaaaaagaauucucagaaguagaagggagaauucaggaccuugagaaauauguugaggacacuaaaauagaucucuggucauacaacgcggagcuucuuguugcccuggagaaucaacauacaauugaucuaacugacucagaaaugaacaaacuguuugaaaaaacaaagaagcaacugagggaaaaugcugaggauaugggcaaugguuguuucaaaauauaccacaaaugugacaaugccugcauaggaucaauaagaaauggaacuuaugaccacaauguguacagggaugaagcauuaaacaaccgguuccagaucaagggaguugagcugaagucaggguacaaagauuggauccuauggauuuccuuugccauaucauguuuuuugcuuuguguugcuuuguugggguucaucaugugggccugccaaaagggcaacauuaggugcaacauuugcauuuga

SEQ ID NO: 44359 - RNA, 1701 nt, Artificial Sequence; identical to SEQ ID NO: 42100
  derived and/or modified CDS sequence (wt) from hemagglutinin__InfluenzaA__AHZ42915

SEQ ID NO: 44360 - RNA, 1683 nt, Artificial Sequence; identical to SEQ ID NO: 42000
  derived and/or modified CDS sequence (wt) from hemagglutinin__InfluenzaA__AHZ59747

SEQ ID NO: 44361 - RNA, 1683 nt, Artificial Sequence
  derived and/or modified CDS sequence (wt) from hemagglutinin__InfluenzaA__AHZ59759
augaacacucaaauccugguauucgcucugauugcgaucauuccaacaaaugcagacaaaaucugccucggacaucaugccgugucaaacggaaccaaaguaaacacauuaacugaaagaggaguggaagucgucaaugcaacugaaacaguggaacgaacaaacauccccaggaucugcucaaaagggaaaaggacaguugaccucggucaauguggacuccuggggacaaucacuggaccaccucaaugugaccaauuccuagaauuuucagccgauuuaauuauugagaggcgagaaggaagugaugucuguuauccugggaaauucgugaaugaagaagcucugaggcaaauucucagagaaucaggcggaauugacaaggaagcaaugggauucacauacaguggaauaagaacuaauggagcaaccagugcauguaggagaucaggaucuucauucuaugcagaaaugaaauggcuccugucaaacacagauaaugcugcauucccgcagaugacuaagucauauaaaaauacaagaaaaagcccagcucuaauaguaugggggauccaucauuccguaucaacugcagagcaaaccaagcuauaugggaguggaaacaaacuggugacaguugggaguucuaauuaucaacaaucuuuuguaccgaguccaggagcgagaccacaaguuaauggucuaucuggaagaauugacuuucauuggcuaaugcuaaaucccaaugauacagucacuuucaguuucaauggggcuuucauagcuccagaccgugcaagcuuccugagaggaaaaucuaugggaauccagaguggaguacagguugaugccaauugugaaggggacugcuaucauaguggagggacaauaauaaguaacuugccauuucagaacauagauagcagggcaguuggaaaauguccgagauauguuaagcaaaggagucugcugcuagcaacagggaugaagaauguuccugagauuccaaagggaagaggccuauuuggugcuauagcggguuucauugaaaauggaugggaaggccuaauugaugguugguaugguuucagacaccagaaugcacagggagagggaacugcugcagauuacaaaagcacucaaucggcaauugaucaaauaacaggaaaauuaaaccggcuuauagaaaaaaccaaccaacaauuugaguugauagacaaugaauucaaugagguagagaagcaaaucgguaaugugauaaauuggaccagagauucuauaacagaaguguggucauacaaugcugaacucuugguagcaauggagaaccagcauacaauugaucuggcugauucagaaauggacaaacuguacgaacgagugaaaagacagcugagagagaaugcugaagaagauggcacugguugcuuugaaauauuucacaagugugaugaugacuguauggccaguauuagaaauaacaccuaugaucacagcaaaagcagggaagaggcaaugcaaaauagaauacagauugacccagucaaacuaagcagcggcuacaaagaugugauacuuugguuuagcuucggggcaucauguuucauacuucuagccauuguaaugggccuugucuucauauguguaaagaauggaaacaugcggugcacuauuuguauauaa

SEQ ID NO: 44362 - RNA, 1683 nt, Artificial Sequence
  derived and/or modified CDS sequence (wt) from hemagglutinin__InfluenzaA__AHZ59771
augaacacucaaauccugguauucgcucugauugcgaucauuccaacaaaugcagacaaaaucugccucggacaucaugccgugucaaacggaaccaaaguaaacacauuaacugaaagaggaguggaagucgucaaugcaacugaaacaguggaacgaacaaacauccccaggaucugcucaaaagggaaaaggacaguugaccucggucaauguggacuccuggggacaaucacuggaccaccucaaugugaccaauuccuagaauuuucagccgauuuaauuauugagaggcgagaaggaagugaugucuguuauccugggaaauucgugaaugaagaagcucugaggcaaauucucagagaaucaggcggaauugacaaggaagcaaugggauucacauacaguggaauaagaacuaauggagcaaccagugcauguaggagaucaggaucuucauucuaugcagaaaugaaauggcuccugucaaacacagauaaugcugcauucccgcagaugacuaagucauauaaaaauacaagaaaaagcccagcucuaauaguaugggggauccaucauuccguaucaacugcagagcaaaccaagcuauaugggaguggaaacaaacuggugacaguugggaguucuaauuaucaacaaucuuuuguaccgaguccaggagcgagaccacaaguuaauggucaaucuggaagaauugacuuucauuggcuaaugcuaaaucccaaugauacagucacuuucaguuucaauggggcuuucauagcuccagaccgugcaagcuuccugagaggaaaaucuaugggaauccagaguggaguacagguugaugccaauugugaaggggacugcuaucauaguggagggacaauaauaaguaacuugccauuucagaacauagauagcagggcaguuggaaaauguccgagauauguuaagcaaaggagucugcugcuagcaacagggaugaagaauguuccugagauuccaaagggaagaggccuauuuggugcuauagcggguuucauugaaaauggaugggaaggccuaauugaugguugguaugguuucagacaccagaaugcacagggagagggaacugcugcagauuacaaaagcacucaaucggcaauugaucaaauaacaggaaaauuaaaccggcuuauagaaaaaaccaaccaacaauuugaguugauagacaaugaauucaaugagguagagaagcaaaucgguaaugugauaaauuggaccagagauucuauaacagaaguguggucauacaaugcugaacucuugguagcaauggagaaccagcauacaauugaucuggcugauucagaaauggacaaacuguacgaacgagugaaaagacagcugagagagaaugcugaagaagauggcacugguugcuuugaaauauuucacaagugugaugaugacuguauggccaguauuagaaauaacaccuaugaucacagcaaauacagggaagaggcaaugcaaaauagaauacagauugacccagucaaacuaagcagcggcuacaaagaugugauacuuugguuuagcuucggggcaucauguuucauacuucuagccauuguaaugggccuugucuucauauguguaaagaauggaaacaugcggugcacuauuuguauauaa

SEQ ID NO: 44363 - RNA, 1683 nt, Artificial Sequence
  derived and/or modified CDS sequence (wt) from hemagglutinin__InfluenzaA__AHZ59795
augaacacucaaauccugguauucgcucugauugcgaucauuccaacaaaugcagacaaaaucugccucggacaucaugccgugucaaacggaacuaaaguaaacacauuaacugaaagaggaguggaagucgucaaugcaacugaaacaguggaacgaacaaacauccccaggaucugcucaaaagggaaaaggacaguugaccucggucaauguggacuccuggggacaaucacuggaccaccucaaugugaccaauuccuagaauuuucagccgauuuaauuauugagaggcgagaaggaagugaugucuguuauccugggaaauucgugaaugaagaagcucugaggcaaauucucagagaaucaggcggaauugacaaggaagcaaugggauucacauacaguggaauaagaacuaauggaacaaccagugcauguaggagaucaggaucuucauucuaugcagaaaugaaauggcuccugucaaacacagauaaugcugcauucccgcagaugacuaagucauauaaaaauacaagaaaaagcccagcucuaauaguaugggggauccaucauuccguaucaacugcagagcaaaccaagcuauaugggaguggaaacaaacuggugacaguugggaguucuaauuaucaacaaucuuuuguaccgaguccaggagcgagaccacaaguuaauggucuaucuggaagaauugacuuucauuggcuaaugcuaaaucccaaugauacagucacuuucaguuucaauggggcuuucauagcuccagaccgugcaagcuuccugagaggaaaaucuaugggaauccagaguggaguacagguugaugccaauugugaaggggacugcuaucauaguggagggacaauaauaaguaacuugccauuucagaacauagauagcagggcaguuggaaaauguccgagauauguuaagcaaaggagucugcugcuagcaacagggaugaagaauguuccugagauuccaaagggaagaggccuauuuggugcuauagcggguuucauugaaaauggaugggaaggccuaauugaugguugguaugguuucagacaccagaaugcacagggagagggaacugcugcagauuacaaaagcacucaaucggcaauugaucaaauaacaggaaaauuaaaccggcuuauagaaaaaaccaaccaacaauuugaguugauagacaaugaauucaaugagguagagaagcaaaucgguaaugugauaaauuggaccagagauucuauaacagaaguguggucauacaaugcugaacucuugguagcaauggagaaccagcauacaauugaucuggcugauucagaaauggacaaacuguacgaacgagugaaaagacagcugagagagaaugcugaagaagauggcacugguugcuuugaaauauuucacaagugugaugaugacuguauggccaguauuagaaauaacaccuaugaucacagcaaauacagggaagaggcaaugcaaaauagaauacagauugacccagucaaacuaaguagcggcuacaaagaugugauacuuugguuuagcuucggggcaucauguuucauacuucuagccauuguaaugggccuugucuucauauguguaaagaauggaaacaugcggugcacuauuuguauauaa

SEQ ID NO: 44364 - RNA, 1683 nt, Artificial Sequence
  derived and/or modified CDS sequence (wt) from hemagglutinin__InfluenzaA__AHZ59807
augaacacucaaauccugguauucgcucugauugcgaucauuccaacaaaugcagacaaaaucugccucggacaucaugccgugucaaacggaaccaaaguaaacacauuaacugaaagaggaguggaagucgucaaugcaacugaaacaguggaacgaacaaacauccccaggaucugcucaaaagggaaaaggacaguugaccucggucaauguggacuccuggggacaaucacuggaccaccucaaugugaccaauuccuagaauuuucagccgauuuaauuauugagaggcgagaaggaagugaugucuguuauccugggaaauucgugaaugaagaagcucugaggcaaauucucagagaaucaggcggaauugacaaggaagcaaugggauucacauacaguggaauaagaacuaauggaacaaccagugcauguaggagaucaggaucuucauucuaugcagaaaugaaauggcuccugucaaacacagauaaugcugcauucccgcagaugacuaagucauauaaaaauacaagaaaaagcccagcucuaauaguaugggggauccaucauuccguaucaacugcagagcaaaccaagcuauaugggaguggaaacaaacuggugacaguugggaguucuaauuaucaacaaucuuuuguaccgaguccaggagcgagaccacaaguuaauggucuaucuggaagaauugacuuucauuggcuaaugcuaaaucccaaugauacagucacuuucaguuucaauggggcuuucauagcuccagaccgugcaagcuuccugagaggaaaaucuaugggaauccagaguggaguacagguugaugccaauugugaaggggacugcuaucauaguggagggacaauaauaaguaacuugccauuucagaacauagauagcagggcaguuggaaaauguccgagauauguuaagcaaaggagucugcugcuagcaacagggaugaagaauguuccugagauuccaaagggaagaggccuauuuggugcuauagcggguuucauugaaaauggaugggaaggccuaauugaugguugguaugguuucagacaccagaaugcacagggagagggaacugcugcagauuacaaaagcacucaaucggcaauugaucaaauaacaggaaaauuaaaccggcuuauagaaaaaaccaaccaacaauuugaguugauagacaaugaauucaaugagguagagaagcaaaucgguaaugugauaaauuggaccagagauucuauaacagaaguguggucauacaaugcugaacucuugguagcaauggagaaccagcauacaauugaucuggcugauucagaaauggacaaacuguacgaacgagugaaaagacagcugagagagaaugcugaagaagauggcacugguugcuuugaaauauuucacaagugugaugaugacuguauggccaguauuagaaauaacaccuaugaucacagcaaauacagggaagaggcaaugcaaaauagaauacagauugacccagucaaacuaagcagcggcuacaaagaugugauacuuugguuuagcuucggggcaucauguuucauacuucuagccauuguaaugggccuugucuucauauguguaaagaauggaaacaugcggugcacuauuuguauauaa

SEQ ID NO: 44365 - RNA, 1683 nt, Artificial Sequence; identical to SEQ ID NO: 44364
  derived and/or modified CDS sequence (wt) from hemagglutinin__InfluenzaA__AHZ59819

SEQ ID NO: 44366 - RNA, 1683 nt, Artificial Sequence; identical to SEQ ID NO: 42000
  derived and/or modified CDS sequence (wt) from hemagglutinin__InfluenzaA__AHZ59831

SEQ ID NO: 44367 - RNA, 1683 nt, Artificial Sequence; identical to SEQ ID NO: 42000
  derived and/or modified CDS sequence (wt) from hemagglutinin__InfluenzaA__AHZ59843

SEQ ID NO: 44368 - RNA, 1683 nt, Artificial Sequence; identical to SEQ ID NO: 42000
  derived and/or modified CDS sequence (wt) from hemagglutinin__InfluenzaA__AHZ59855

SEQ ID NO: 44369 - RNA, 1683 nt, Artificial Sequence; identical to SEQ ID NO: 44362
  derived and/or modified CDS sequence (wt) from hemagglutinin__InfluenzaA__AHZ59867

SEQ ID NO: 44370 - RNA, 1683 nt, Artificial Sequence; identical to SEQ ID NO: 42000
  derived and/or modified CDS sequence (wt) from hemagglutinin__InfluenzaA__AHZ59879

SEQ ID NO: 44371 - RNA, 1683 nt, Artificial Sequence; identical to SEQ ID NO: 44362
  derived and/or modified CDS sequence (wt) from hemagglutinin__InfluenzaA__AHZ59915

SEQ ID NO: 44372 - RNA, 1683 nt, Artificial Sequence; identical to SEQ ID NO: 42000
  derived and/or modified CDS sequence (wt) from hemagglutinin__InfluenzaA__AHZ59927

SEQ ID NO: 44373 - RNA, 1683 nt, Artificial Sequence; identical to SEQ ID NO: 44362
  derived and/or modified CDS sequence (wt) from hemagglutinin__InfluenzaA__AHZ59939

SEQ ID NO: 44374 - RNA, 1683 nt, Artificial Sequence; identical to SEQ ID NO: 42000
  derived and/or modified CDS sequence (wt) from hemagglutinin__InfluenzaA__AHZ59951

SEQ ID NO: 44375 - RNA, 1683 nt, Artificial Sequence; identical to SEQ ID NO: 42000
  derived and/or modified CDS sequence (wt) from hemagglutinin__InfluenzaA__AHZ59963

SEQ ID NO: 44376 - RNA, 1683 nt, Artificial Sequence; identical to SEQ ID NO: 42000
  derived and/or modified CDS sequence (wt) from hemagglutinin__InfluenzaA__AHZ59988

SEQ ID NO: 44377 - RNA, 1683 nt, Artificial Sequence; identical to SEQ ID NO: 42000
  derived and/or modified CDS sequence (wt) from hemagglutinin__InfluenzaA__AHZ60000

SEQ ID NO: 44378 - RNA, 1683 nt, Artificial Sequence; identical to SEQ ID NO: 42000
  derived and/or modified CDS sequence (wt) from hemagglutinin__InfluenzaA__AHZ60012

SEQ ID NO: 44379 - RNA, 1683 nt, Artificial Sequence; identical to SEQ ID NO: 42000
  derived and/or modified CDS sequence (wt) from hemagglutinin__InfluenzaA__AHZ60024

SEQ ID NO: 44380 - RNA, 1683 nt, Artificial Sequence; identical to SEQ ID NO: 44363
  derived and/or modified CDS sequence (wt) from hemagglutinin__InfluenzaA__AHZ60036

SEQ ID NO: 44381 - RNA, 1683 nt, Artificial Sequence; identical to SEQ ID NO: 44363
  derived and/or modified CDS sequence (wt) from hemagglutinin__InfluenzaA__AHZ60048

SEQ ID NO: 44382 - RNA, 1683 nt, Artificial Sequence
  derived and/or modified CDS sequence (wt) from hemagglutinin__InfluenzaA__AHZ60060
augaacacucaaauccugguauucgcucugauugcgaucauuccaacaaaugcagacaaaaucugccucggacaucaugccgugucaaacggaacuaaaguaaacacauuaacugaaagaggaguggaagucgucaaugcaacugaaacaguggaacgaacaaacauccccaggaucugcucaaaagggaaaaggacaguugaccucggucaauguggacuccuggggacaaucacuggaccaccucaaugugaccaauuccuagaauuuucagccgauuuaauuauugagaggcgagaaggaagugaugucuguuauccugggaaauucgugaaugaagaagcucugaggcaaauucucagagaaucaggcggaauugacaaggaagcaaugggauucacauacaguggaauaagaacuaauggaacaaccagugcauguaggagaucaggaucuucauucuaugcagaaaugaaauggcuccugucaaacacagauaaugcugcauucccgcagaugacuaagucauauaaaaauacaagaaaaagcccagcucuaauaguaugggggauccaucauuccguaucaacugcagagcaaaccaagcuauaugggaguggaaacaaacuggugacaguugggaguucuaauuaucaacaaucuuuuguaccgaguccaggagcgagaccacaaguuaauggucuaucuggaagaauugacuuucauuggcuaaugcuaaaucccaaugauacagucacuuucaguuucaauggggcuuucauagcuccagaccgugcaagcuuccugagaggaaaaucuaugggaauccagaguggaguacagguugaugccaauugugaaggggacugcuaucauaguggagggacaauaauaaguaacuugccauuucagaacauagauagcagggcaguuggaaaauguccgagauauguuaagcaaaggagucugcugcuagcaacagggaugaagaauguuccugagauuccaaagggaagaggccuauuuggugcuauagcggguuucauugaaaauggaugggaaggccuaauugaugguugguaugguuucagacaccagaaugcacagggagagggaacugcugcagauuacaaaagcacucaaucggcaauugaucaaauaacaggaaaauuaaaccggcuuauagaaaaaaccaaccaacaauuugaguugauagacaaugaauucaaugagguagagaagcaaaucgguaaugugauaaauuggaccagagauucuauaacagaaguguggucauacaaugcugaacucuugguagcaauggagaaccagcauacaauugaucuggcugauucagaaauggacaaacuguacgaacgagugaaaagacagcugagagagaaugcugaagaagauggcacugguugcuuugaaauauuucacaagugugaugaugacuguauggccaguauuagaaauaacaccuaugaucacagcaaauacagggaagaggcaaugcaaaauagaauacagauugacccagucaaacuaagcagcggcuacaaagaugugauacuuugguuuagcuucggggcaucauguuucauacuucuagccauuguaaugggccuugucuucauauguguaaagaauggaaacaugcggugcacuauuuguauauaa

SEQ ID NO: 44383 - RNA, 1683 nt, Artificial Sequence; identical to SEQ ID NO: 44363
  derived and/or modified CDS sequence (wt) from hemagglutinin__InfluenzaA__AHZ60072

SEQ ID NO: 44384 - RNA, 1683 nt, Artificial Sequence; identical to SEQ ID NO: 44363
  derived and/or modified CDS sequence (wt) from hemagglutinin__InfluenzaA__AHZ60084

SEQ ID NO: 44385 - RNA, 1683 nt, Artificial Sequence
  derived and/or modified CDS sequence (wt) from hemagglutinin__InfluenzaA__AHZ60096
augaacacucaaauccugguauucgcucugauugcgaucauuccaacaaaugcagacaaaaucugccucggacaucaugccgugucaaacggaaccaaaguaaacacauuaacugaaagaggaguggaagucgucaaugcaacugaaacaguggaacgaacaaacauccccaggaucugcucaaaagggaaaaggacaguugaccucggucaauguggacuccuggggacaaucacuggaccaccucaaugugaccaauuccuagaauuuucagccgauuuaauuauugagaggcgagaaggaagugaugucuguuauccugggaaauucgugaaugaagaagcucugaggcaaauucucagagaaucaggcggaauugacaaggaagcaaugggauucacauacaguggaauaagaacuaauggagcaaccagugcauguaggagaucaggaucuucauucuaugcagaaaugaaauggcuccugucaaacacagaugaugcugcauucccgcagaugacuaagucauauaaaaauacaagaaaaagcccagcucuaauaguaugggggauccaucauuccguaucaacugcagagcaaaccaagcuauaugggaguggaaacaaacuggugacaguugggaguucuaauuaucaacaaucuuuuguaccgaguccaggagcgagaccacaaguuaauggucuaucuggaagaauugacuuucauuggcuaaugcuaaaucccaaugauacagucacuuucaguuucaauggggcuuucauagcuccagaccgugcaagcuuccugagaggaaaaucuaugggaauccagaguggaguacagguugaugccaauugugaaggggacugcuaucauaguggagggacaauaauaaguaacuugccauuucagaacauagauagcagggcaguuggaaaauguccgagauauguuaagcaaaggagucugcugcuagcaacagggaugaagaauguuccugagauuccaaagggaagaggccuauuuggugcuauagcggguuucauugaaaauggaugggaaggccuaauugaugguugguaugguuucagacaccagaaugcacagggagagggaacugcugcagauuacaaaagcacucaaucggcaauugaucaaauaacaggaaaauuaaaccggcuuauagaaaaaaccaaccaacaauuugaguugauagacaaugaauucaaugagguagagaagcaaaucgguaaugugauaaauuggaccagagauucuauaacagaaguguggucauacaaugcugaacucuugguagcaauggagaaccagcauacaauugaucuggcugauucagaaauggacaaacuguacgaacgagugaaaagacagcugagagagaaugcugaagaagauggcacugguugcuuugaaauauuucacaagugugaugaugacuguauggccaguauuagaaauaacaccuaugaucacagcaaauacagggaagaggcaaugcaaaauagaauacagauugacccagucaaacuaagcagcggcuacaaagaugugauacuuugguuuagcuucggggcaucauguuucauacuucuagccauuguaaugggccuugucuucauauguguaaagaauggaaacaugcggugcacuauuuguauauaa

SEQ ID NO: 44386 - RNA, 1701 nt, Artificial Sequence
  derived and/or modified CDS sequence (wt) from hemagglutinin__InfluenzaA__AIC64889
augaaggcaauacuaguaguucugcuauauacauuugcaaccgcaaaugcagacacauuauguauagguuaucaugcgaacaauucaacagacacuguagacacaguacuagaaaagaauguaacaguaacacacucuguuaacauucuagaagacaagcauaacgggaaacuaugcaaacuaagagggguagccccauugcauuuggguaaauguaacauugcuggcuggauccugggaaauccagagugugaaucacucuccacagcaagcucaugguccuacauuguggaaacaucuaguucagacaauggaacguguuacccaggagauuucaucgauuaugaggagcuaagagagcaauugagcucagugucaucauuugaaagguuugagauauuccccaagacaaguucauggcccaaucaugacucgaacaaagguguaacggcagcauguccucaugcuggagcaaaaagcuucuacaaaaauuuaauauggcuaguuaaaaaagaaaauucauacccaaagcucagcaaauccuacauuaaugauaaagggaaagaaguccucgugcuauggggcauucaccauccaucuacuagugcugaccaacaaagucucuaucagaaugcagaugcauauguuuuuguggggucaucaagauacagcaagaaguucaagccggaaauagcaauaagacccaaagugaggggucaagaagggagaaugaacuauuacuggacacuaguagagccgggagacaaaauaacauucgaagcaacuggaaaucuagugguaccgagauaugcauucgcaauggaaagaaaugcuggaucugguauuaucauuucagauacaccaguccacgauugcaauacaacuugucagacacccaagggugcuauaaacaccagccucccauuucagaauauacauccgaucacaauuggaaaauguccaaaauauguaaaaagcacaaaauugagacuggccacaggauugaggaaugucccgucuauucaaucuagaggccuauuuggggccauugccgguuucauugaagggggguggacagggaugguagauggaugguacgguuaucaccaucaaaaugagcaggggucaggauaugcagccgaccugaagagcacacagaaugccauugacgagauuacuaacaaaguaaauucuguuauugaaaagaugaauacacaguucacagcaguagguaaagaguucaaccaccuggaaaaaagaauagagaauuuaaauaaaaaaguugaugaugguuuccuggacauuuggacuuacaaugccgaacuguugguucuauuggaaaaugaaagaacuuuggacuaccacgauucaaaugugaagaacuuauaugaaaagguaagaagccagcuaaaaaacaaugccaaggaaauuggaaacggcugcuuugaauuuuaccacaaaugcgauaacacgugcauggaaagugucaaaaaugggacuuaugacuacccaaaauacucagaggaagcaaaauuaaacagagaagaaauagaugggguaaagcuggaaucaacaaggauuuaccagauuuuggcgaucuauucaacugucgccaguucauugguacugguagucucccugggggcaaucaguuucuggaugugcucuaaugggucucuacaguguagaauauguauuuaa

SEQ ID NO: 44387 - RNA, 1701 nt, Artificial Sequence
  derived and/or modified CDS sequence (wt) from hemagglutinin__InfluenzaA__AIC73738
augaaggcaauacuaguaguucugcuauacacauuugcaaccgcaaaugcagacacauuauguauagguuaucaugcgaacaauucaacagacacuguagacacaguacuagaaaagaauguaacaguaacacacucuguuaaccuucuagaagacaagcauaacgggaaacuaugcaaacuaagagggguagccccauugcauuuggguaaauguaacauugcuggcuggauccugggaaauccagagugugaaucacucuccacagcaaguucaugguccuacauuguggaaacaucuaguucagacaauggaacguguuacccaggagauuucaucaauuaugaggagcuaagagagcaauugagcucagugucaucauuugaaagauuugagauauuccccaagacaaguucauggcccaaucaugacucgaacaaagguguaacggcagcauguccucacgcuggagcaaaaagcuucuacaaaaauuuaauauggcuaguuaaaaaaggaaauucauacccaaagcucagccaauccuacauuaaugauaaagggaaagaaguccucgugcuguggggcauucaccauccaucuacuacugcugaccaacaaagucucuaucagaaugcagaugcauauguuuucguggggacaucaagauacagcaagaaguucaagccggaaauagcaauaagacccaaagugagggaucaagaagggagaaugaacuauuacuggacacuaguagagccgggagacaaaauaacauucgaagcaacuggaaaucuagugguaccgagauaugcauucacaauggaaagaaaugcuggaucugguauuaucauuucagauacaccaguccacgauugcaauacaacuugucagacacccgagggugcuauaaacaccagccucccauuucagaauauacauccgaucacaauuggaaaauguccaaaguauguaaaaagcacaaaauugagacuggccacaggauugaggaaugucccaucuauucaaucuagaggccuauucggggccauugccggcuuuauugaagggggguggacagggaugguagauggaugguacgguuaucaccaucaaaaugagcaggggucaggauaugcagccgaccugaagagcacacaaaaugccauugacaaaauuacuaacaaaguaaauucuguuauugaaaagaugaauacacaguucacagcaguggguaaagaguucaaccacuuggaaaaaagaauagagaauuuaaauaaaaaaguugaugaugguuuccuggacauuuggacuuacaaugccgaacugcugguucuauuggaaaaugaaagaacuuuggacuaccacgauucaaaugugaagaacuuguaugaaaagguaagaaaccaguuaaaaaacaaugccaaggaaauuggaaacggcugcuuugaauuuuaccacaaaugcgauaacacgugcauggaaagugucaaaaaugggacuuaugacuacccaaaauacucagaggaagcaaaauuaaacagagaaaaaauagaugggguaaagcuggaaucaacaaggauuuaccagauuuuggcgaucuauucaacugucgccaguucauugguacugguagucucccugggggcaaucagcuucuggaugugcucuaaugggucucuacaguguagaauauguauuuaa

SEQ ID NO: 44388 - RNA, 1701 nt, Artificial Sequence
  derived and/or modified CDS sequence (wt) from hemagglutinin__InfluenzaA__AIC73739
augaaggcaauacuaguaguucugcuauacacauuugcaaccgcaaaugcagacacauuauguauagguuaucaugcgaacaauucaacagacacuguagacacaguacuagaaaagaauguaacaguaacacacucuguuaaccuucuagaagacaagcauaacgggaaacuaugcaaacuaagagggguagccccauugcauuuggguaaauguaacauugcuggcuggauccugggaaauccagagugugaaucacucuccacagcaaguucaugguccuacauuguggaaacaucuaguucagacaauggaacguguuacccaggagauuucaucaauuaugaggagcuaagagagcaauugagcucagugucaucauuugaaagauuugagauauuccccaagacaaguucauggcccaaucaugacucgaacaaagguguaacggcagcauguccucacgcuggagcaaaaagcuucuacaaaaauuuaauauggcuaguuaaaaaaggaaauucauacccaaagcucagccaauccuacauuaaugauaaagggaaagaaguccucgugcuguggggcauucaccauccaucuacuacugcugaccaacaaagucucuaucagaaugcagaugcauauguuuucguggggacaucaagauacagcaagaaguucaagccggaaauagcaauaagacccaaagugagggaucaagaagggagaaugaacuauuacuggacacuaguagagccgggagacaaaauaacauucgaagcaacuggaaaucuagugguaccgagauaugcauucacaauggaaagacaugcuggaucugguauuaucauuucagauacaccaguccacgauugcaauacaacuugucagacacccgagggugcuauaaacaccagccucccauuucagaauauacauccgaucacaauuggaaaauguccaaaguauguaaaaagcacaaaauugagacuggccacaggauugaggaaugucccaucuauucaaucuagaggccuauucggggccauugccggcuucauugaagggggguggacagggaugguagauggaugguacgguuaucaccaucaaaaugagcaggggucaggauaugcagccgaccugaagagcacacaaaaugccauugacaaaauuacuaacaaaguaaauucuguuauugaaaagaugaauacacaguucacagcaguggguaaagaguucaaccacuuggaaaaaagaauagagaauuuaaauaaaaaaguugaugaugguuuccuggacauuuggacuuacaaugccgaacugcugguucuauuggaaaaugaaagaacuuuggacuaccacgauucaaaugugaagaacuuguaugaaaagguaagaaaccaguuaaaaaacaaugccaaggaaauuggaaacggcugcuuugaauuuuaccacaaaugcgauaacacgugcauggaaagugucaaaaaugggacuuaugacuacccaaaauacucagaggaagcaaaauuaaacagagaaaaaauagaugggguaaagcuggaaucaacaaggauuuaccagauuuuggcgaucuauucaacugucgccaguucauugguacugguagucucccugggggcaaucagcuucuggaugugcucuaaugggucucuacaguguagaauauguauuuaa

SEQ ID NO: 44389 - RNA, 1701 nt, Artificial Sequence
  derived and/or modified CDS sequence (wt) from hemagglutinin__InfluenzaA__AIC73740
augaaggcaauacuaguaguucugcuauauacauuuacaaccgcaaaugcagacacauuauguauagguuaucaugcgaacaauucaacagacacuguagacacaguacuagaaaagaauguaacaguaacacacucuguuaaccuucuagaagacaagcauaacgggaaacuaugcaaacuaagagggguagccccauugcauuuggguaaauguaacauugcuggcuggauccugggaaauccagagugugaaucacucuccacagcaaguucaugguccuacauuguggaaacaucuaguucagacaauggaacguguuacccaggagauuucaucaauuaugaggagcuaagagagcaauugagcucagugucaucauuugaaagguuugagauauuccccaagacaaguucauggcccaaucaugacucgaacaaagguguaacggcagcauguccucacgcuggagcaaaaagcuucuacaaaaauuuaauauggcuaguuaaaaaaggaaauucauacccaaagcucagccaauccuacauuaaugauaaagggaaagaaguccucgugcuguggggcauucaccauccaccuacuacugcugaccaacaaagucucuaucagaaugcagaugcauauguuuuuguggggacaucaagauacagcaagaaguucaagccggaaauagcaauaagacccaaagugagggaucaagaagggagaaugaacuauuacuggacacuaguagagccgggagacaaaauaacauucgaagcaaccggaaaucuagugguaccgagauaugcauucacaauggaaagaaaugcuggaucugguauuaucauuucagauacaccaguccacgauugcaauacaacuugucagacacccgagggugcuauaaacaccagccucccauuucagaauauacauccgaucacaauuggaaaauguccaaaguauguaaaaagcacaaaauugagacuggccacaggauugaggaaugucccgucuauucaaucuagaggccuauucggggccauugccggcuucauugaagggggguggacagggaugguagauggaugguacgguuaucaccaucaaaaugagcaggggucaggauaugcagccgaccugaagagcacacaaaaugccauugacaagauuacuaacaaaguaaauucuguuauugaaaagaugaauacacaguucacagcaguggguaaagaguucaaccaccuggaaaaaagaauagagaauuuaaauaaaaaaguugaugaugguuuccuggacauuuggacuuacaaugccgaacuguugguucuauuggaaaaugaaagaacuuuggacuaccacgauucaaaugugaagaacuuguaugaaaagguaagaaaccaguuaaaaaacaaugccaaggaaauuggaaacggcugcuuugaauuuuaccacaaaugcgauaacacgugcauggaaagugucaaaaaugggacuuaugacuacccaaaauacucagaggaagcaaaauuagacagagaaaaaauagaugggguaaggcuggaaucaacaaggauuuaccagauuuuggcgaucuauucaacugucgccaguucauugguacugguagucucccuaggggcaaucagcuucuggaugugcucuaaugggucucuacaguguagaauauguauuuaa

SEQ ID NO: 44390 - RNA, 1701 nt, Artificial Sequence
  derived and/or modified CDS sequence (wt) from hemagglutinin__InfluenzaA__AIC73741
augaagacuaucauugcuuugagcuacauucuaugucugguuuucgcucaaaaacuuccuggaaaugacaauagcacggcaacgcugugccuugggcaccaugcaguaccaaacggaacgauagugaaaacaaucacgaaugaccgaauugaaguuacuaaugcuacugagcugguucagaauuccucaauaggugaaauaugcgacaguccucaucagauccuugauggagaaaacugcacacuaauagaugcucuauugggagacccucauugugauggcuuucaaaauaagaaaugggaccuuuuuguugaacgaagcaaagccuacagcaacuguuacccuuaugaugugccggauuaugccucccuuaggucacuaguugccucauccggcacacuggaguuuaacaaugaaagcuucaauugggcuggagucacucaaaacggaacaaguucugcuugcauaaggggaucuaauaguaguuucuuuaguagauuaaauugguugacccacuuaaacuucaaauacccagcauugaacgugacuaugccaaacaaugaacaauuugacaaauuguacauuugggggguucaccacccggguacggacaaggaccaaaucuuccuguaugcucaaucaucaggaagaaucacaguaucuaccaaaagaagccaacaagcuguaaucccgaauaucggaucuagacccagaauaaggaauaucccuagcagaauaagcaucuauuggacaauaguaaaaccgggagacauacuuuugauuaacagcacagggaaucuaauugcuccuagggguuacuucaaaauacgaagugggaaaagcucaauaaugagaucagaugcacccauuggcaaaugcaagucugaaugcaucacuccaaauggaagcauucccaaugacaaaccauuccaaaauguaaacaggaucacauacggggccugucccagauauguuaagcaaagcacucugaaauuggcaacaggaaugcgaaauguaccagagaaacaaacuagaggcauauuuggcgcaauagcggguuucauagaaaaugguugggagggaaugauggaugguugguacgguuucaggcaucaaaauucugagggaagaggacaagcagcagaucucaaaagcacucaagcagcaaucgaucaaaucaaugggaagcugaaucgauugaucgggaaaaccaacgagaaauuccaucagauugaaaaagaauucucagaaguagaagggagaauucaggaccuugagaaauauguugaggacacaaaaauagaucucuggucauacaacgcggagcuucuuguugcccuggagaaccaacauacaauugaucuaacugacucagaaaugaacaagcuguuugaaaaaacaaagaagcaacugagggaaaaugcugaggauaugggcaauggcuguuucaaaauauaccacagaugugacaaugccugcauaggaucaaucagaaauggaacuuaugaccacaauguauacagggaugaagcauuaaacaaccgguuccagaucaggggaguugagcugaagucaggguacaaagauuggauccuauggauuuccuuugccauaucauguuuuuugcuuuguguugcuuuguugggguucaucaugugggccugccaaaagggcaacauuaggugcaacauuugcauuuga

SEQ ID NO: 44391 - RNA, 1701 nt, Artificial Sequence
  derived and/or modified CDS sequence (wt) from hemagglutinin__InfluenzaA__AIC73742
augaaggcaauacuaguaguucugcuauauacauuugcaaccgcaaaugcagacacauuauguauagguuaucaugcgaacaauucaacagacacuguagacacaguacuagaaaagaacguaacaguaacacacucuguuaaccuucuagaagacaagcauaacgggaaacuaugcaaacuaagagggguagccccauugcauuuggguaaauguaacauugcuggcuggauccugggaaauccagagugugaaucacucuccacagcaaguucaugguccuacauuguggaaacaucuaguucagacaauggaacguguuacccaggagauuucaucaauuaugaggagcuaagagagcaauugagcucagugucaucauuugaaagguuugagauauuccccaagacaaguucauggcccaaucaugacucgaacaaagguguaacggcagcauguccucacgcuggagcaaaaagcuucuacaaaaauuuaauauggcuaguuaaaaaaggaaauucauacccaaagcuccgccaauccuacauuaaugauaaagggaaagaaguccucgugcuguggggcauucaccacccaucuacuacuacugaccaacaaagucucuaucagaaugcagaugcauauguuuuuguggggacaucaagauacagcaagaaguucaagccggaaauagcaauaagacccaaagugagggaucaagaaggaagaaugaacuauuacuggacacuaguagagccgggagacaaaauaacauucgaagcaacuggaaaucuagugguaccgagauaugcauucacaauggaaagaaaugcuggaucugguauuaucauuucagauacaccaguccacgauugcaauacaacuugucagacacccgagggugcuauaaacaccagccucccauuucagaauauacauccgaucacaauuggaaaauguccaaaguauguaaaaagcacaaaauugagacuggccacaggauugaggaaugucccgucuauucaaucuagaggccuauucggggccauugccggcuucauugaaggaggguggacagggaugguagauggaugguacgguuaucaccaucaaaaugagcaggggucaggauaugcagccgaccugaagagcacacaaaaugccauugacaagauuacuaacaaaguaaauucuguuauugaaaagaugaauacacaguucacagcaguggguaaagaguucaaccaccuggaaaaaagaauagagaauuuaaauagaaaaguugaugaugguuuccuggacauuuggacuuacaaugccgaacuguugguucuauuggaaaaugaaagaacuuuggacuaccacgauucaaaugugaagaacuuguaugaaaagguaagaaaccaguuaaaaaacaaugccaaggaaauuggaaacggcugcuuugaauuuuaccacaaaugcgauaacacgugcauggaaagugucaaaaaugggacuuaugacuacccaaaauacucagaggaagcaaaauuaaacagagaaaaaauagaugggguaaagcuggaaucaacaaggauuuaccagauuuuggcgaucuauucaacugucgccaguucauuggugcugguagucucccugggggcaaucagcuucuggaugugcucuaaugggucucuacaguguagaauauguauuuaa

SEQ ID NO: 44392 - RNA, 1701 nt, Artificial Sequence; identical to SEQ ID NO: 44391
  derived and/or modified CDS sequence (wt) from hemagglutinin__InfluenzaA__AIC73743

SEQ ID NO: 44393 - RNA, 1701 nt, Artificial Sequence
  derived and/or modified CDS sequence (wt) from hemagglutinin__InfluenzaA__AIC73744
augaaggcaauacuaguaguucugcuauauacauuugcaaccgcaaaugcagacacauuauguauagguuaucaugcgaacaauucaacagacacuguagacacaguacuagaaaagaauguaacaguaacacacucuguuaaccuucuagaagacaagcauaacgggaaacuaugcaaacuaagagggguagccccauugcauuuggguaaauguaacauugcuggcuggauccugggaaauccagagugugaaucacucuccacagcaaguucaugguccuacauuguggaaacaucuaguucagacaauggaacguguuacccaggagauuucaucaauuaugaggagcuaagagagcaauugagcucagugucaucauuugaaagguuugagauauuccccaagacaaguucauggcccaaucaugacucgaacaaagguguaacggcagcauguccucacgcuggagcaaaaagcuucuacaaaaauuuaauauggcuaguuaaaaaaggaaauucauacccaaagcucaaccaauccuacauuaaugauaaagggaaagaaguccucgugcuguggggcauucaccauccaucuacuacugcugaccaacaaagucucuaucagaaugcagaugcauauguuuuuguggggacaucaagauacagcaagaaguucaagccggaaauagcaauaagacccaaagugagggaucaagaagggagaaugaacuauuacuggacacuaguagagccgggagacaaaauaacauucgaagcaacuggaaaucuagugguaccgagauaugcauucacaauggaaagaaaugcuggaucugguauuaucauuucagauacaccagcccacgauugcaauacaacuugucagacacccgagggugcuauaaacaccagccucccauuucagaauauacauccgaucacaauuggaaaauguccaaaguauguaaaaagcacaaaauugagacuggccacaggauugaggaaugucccgucuauucaaucuagaggccuauucggggccauugccggcuucauugaagggggguggacagggaugguagauggaugguacgguuaucaccaucaaaaugagcaggggucaggauaugcagccgaccugaagagcacacaaaaugccauugacaagauuacuaacaaaguaaauucuguuauugaaaagaugaauacacaguucacagcaguggguaaagaguucaaccaccuggaaaaaagaauagagaauuuaaauaaaaaaguugaugaugguuuccuggacauuuggacuuacaaugccgaacuguugguucuauuggaaaaugaaagaacuuuggacuaccacgauucaaaugugaagaacuuguaugaaaagguaagaaaccaguuaaaaaacaaugccaaggaaauuggaaacggcugcuuugaauuuuaccacaaaugcgauaacacgugcauggaaagugucaaaaaugggacuuaugacuacccaaaauacucagaggaagcaaaauuaaacagagaaaaaauagaugggguaaagcuggaaucaacaaggauuuaccagauuuuggcgaucuauucaacugucgccaguucauugguacugguagucucccugggggcaaucagcuucuggaugugcucuaaugggucucuacaguguagaauauguauuuaa

SEQ ID NO: 44394 - RNA, 1701 nt, Artificial Sequence
  derived and/or modified CDS sequence (wt) from hemagglutinin__InfluenzaA__AIC73745
augaaggcaauacuaguaguucugcuauauacauuugcaaccgcaaaugcagacacuuuauguauagguuaucaugcgaacaauucaacagacacuguagacacaguacuagaaaagaauguaacaguaacacacucuguuaaccuucuagaagacaagcauaacgguaaacuaugcaaacuaagagggguagccccauugcauuuggguaaauguaacauugcuggcuggauccugggaaauccagagugugaaucacuauccacagcaaguucaugguccuacauuguggaaacaucuaguucagacaauggaacguguuacccaggagauuucaucaauuaugaggagcuaagagagcaauugagcucagugucaucauuugaaagguuugagauauuccccaagacaaguucauggcccaaucaugacucgaacaaagguguaacggcagcauguccucacgcuggagcaaaaagcuucuacaaaaauuuaauauggcuaguuaaaaaaggaaauucauacccaaagcucagucaauccuacauuaaugauaaagggaaagaaguccucgugcuguggggcauucaccauccaucuacuacugcugaccaacaaagucucuaucagaaugcagaugcauauguuuuuguggggacaucaagauacagcaagaaguucaagccggaaauagcaauaagacccaaagugagggaucaagaagggagaaugaacuauuacugggcacuaguagagccgggagacaaaauaacauucgaagcaacuggaaaucuagugguaccgagauaugcauucacaauggaaagaaaugcuggaucugguauuaucauuucagauacaccaguccacgauugcaauacaacuugucagacacccgagggugcuauaaacaccagccucccauuucagaauauacauccgaucacaauuggaaaauguccaaaguauguaaaaagcacaaaauugagacuggcaacaggauugaggaauaucccgucuauucaaucuagaggccuauucggggccauugccggcuucauugaagggggguggacagggaugguagauggaugguacgguuaucaccaucaaaaugagcaggggucaggauaugcagccgaccugaagagcacacaaaaugccauugacaagauuacuaacaaaguaaacucuguuauugaaaagaugaauacacaguucacagcaguggguaaagaguucaaccaccuggaaaaaagaauagagaauuuaaauaaaaaaguugaugaugguuuccuggacauuuggacuuacaaugccgaacuguugguucuauuggaaaaugaaagaacuuuggacuaccacgauucaaaugugaagaacuuguaugaaaagguaagaaaccaguuaaaaaacaaugccaaggaaauuggaaacggcugcuuugaauuuuaccacaaaugcgauaacacgugcauggaaagugucaaaaaugggacuuaugacuacccaaaauacucagaggaagcaaaauuaaacagagaaaaaauagaugggguaaagcuggaaucaacaaggauuuaccagauuuuggcgaucuauucaacugucgccaguucauugguacugguagucucccugggggcaaucagcuucuggaugugcucuaaugggucucuacaguguagaauauguauuuaa

SEQ ID NO: 44395 - RNA, 1701 nt, Artificial Sequence
  derived and/or modified CDS sequence (wt) from hemagglutinin__InfluenzaA__AIC73746
augaaggcaauacuaguaguucugcuauauacauuugcaaccgcaaaugcagacacauuauguauagguuaucaugcgaacaauucaacagacacuguagacacaguacuagaaaagaauguaacaguaacacacucuguuaaccuucuagaagacaagcauaacgggaaacuaugcaaacuaagagggguaaccccauugcauuuggguaaauguaacauugcuggcuggauccugggaaauccagagugugaaucacucuccacagcaaguucaugguccuacauuguggaaacaucuaguucagacaauggaacguguuacccaggagauuucaucaauuaugaggagcuaagagagcaauugagcucagugucaucauuugaaagguuugagauauuccccaagacaaguucauggcccaaucaugacucgaacaaagguguaacggcagcauguccucacgcuggagcaaaaagcuucuacaaaaauuuaauauggcuaguuaaaaaaggaaauucauacccaaagcucagccaauccuacauuaaugauaaagggaaagaaguccucgugcuguggggcauucaccacccaucuacuacuacugaccaacaaagucucuaucagaaugcagaugcauauguuuuuguggggacaucaagauacagcaagaaguucaagccggaaauagcaauaagacccaaagugagggaucaagaagggagaaugaacuauuacuggacacuaguagagccgggagacaaaauaacauucgaagcaacuggaaaucuagugguaccgagauaugcauucacaauggaaagaaaugcuggaucugguauuaucauuucagauacaccaguccacgauugcaauacaacuugucagacacccgagggugcuauaaacaccagccucccauuucagaauauacauccgaucacaauuggaaaauguccaaaguauguaaaaagcacaaaauugagacuggccacaggauugaggaaugucccgucuauucaaucuagaggccuauucggggccauugccggcuucauugaaggaggguggacagggaugguagauggaugguacgguuaucaccaucaaaaugagcaggggucaggauaugcagccgaccugaagagcacacaaaaugccauugacaagauuacuaacaaaguaaauucuguuauugaaaagaugaauacacaguucacagcaguggguaaagaguucaaccaccuggaaaaaagaauagagaauuuaaauaaaaaaguugaugaugguuuccuggacauuuggacuuacaaugccgaacuguugguucuauuggaaaaugaaagaacuuuggacuaccacgauucaaaugugaagaacuuguaugaaaagguaagaaaccaguuaaaaaacaaugccaaggaaauuggaaacggcugcuuugaauuuuaccacaaaugcgauaacacgugcauggaaagugucaaaaaugggacuuaugacuacccaaaauacucagaggaagcaaaauuaaacagagaaaaaauagaugggguaaagcuggaaucaacaaggauuuaccagauuuuggcgaucuauucaacugucgccaguucauugguacugguagucucccugggggcaaucagcuucuggaugugcucuaaugggucacuacaguguagaauauguauuuaa

SEQ ID NO: 44396 - RNA, 1701 nt, Artificial Sequence
  derived and/or modified CDS sequence (wt) from hemagglutinin__InfluenzaA__AIC73747
augaaggcaauacuaguaguucugcuauauacacuugcaaccgcaaaugcagacacauuauguauagguuaucaugcgaacaauucaacagacacuguagacacaguacuagaaaagaauguaacaguaacacacucuguuaaccuucuagaagacaagcauaacgggaaacuaugcaaacuaagagggguagccccauugcauuuggguaaauguaacauugcuggcuggauccugggaaauccagagugugaaucacucuccacggcaaguucaugguccuacauuguggaaacaucuaguucagacaauggaacguguuacccaggagauuucaucaauuaugaggagcuaagagagcaauugagcucagugucaucauuugaaagguuugagauauuccccaagacaaguucauggcccaaucacgacucgaacaaagguguaacggcagcauguccucacgcuggagcaaaaagcuucuacaaaaauuuaauauggcuaguuaaaaaaggaaauucauacccaaagcucagccaauccuacauuaaugauaaagggaaagaaguccucgugcuguggggcauucaccacccaucuacuacugcugaccaacaaagucucuaucagaaugcagaugcauauguuuuuguggggacaucaagauacagcaagaaguucaagccggaaauagcaauaagacccaaagugagggaucaagaagggagaaugaacuacuacuggacacuaguagagccgggagacaaaauaacauucgaagcaacuggaaaucuagugguaccgagauaugcauucacaauggaaagaaauacuggaucugguauuaucauuucagauacaccaguccacgauugcaauacaacuugucagacacccgagggugcuauaaacaccagccucccauuucagaauauacauccgaucacaauuggaaaauguccaaaguauguaaaaagcacaaaauugagacuggccacaggauugaggaaugucccgucuauucaaucuagaggccuauucggggccauugccggcuucauugaagggggguggacagggaugguagauggaugguacgguuaucaccaucaaaaugagcaggggucaggauaugcagccgaccuuaagagcacacaaaaugccauugacaagauuacuaacaaaguaaauucuguuauugaaaagaugaauacacaguucacagcaguggguaaagaguucaaccaccuggaaaaaagaauagagaauuuaaauaaaaaaguugaugaugguuuccuggacauuuggacuuacaaugccgaacuguugguucuauuggaaaaugaaagaacuuuggacuaccacgauucaaaugugaagaacuuguaugaaaagguaagaaaccaguuaaaaaacaaugccaaggaaauuggaaacggcugcuuugaauuuuaccacaaaugcgauaacacgugcauggaaagugucaaaaaugggacuuaugacuacccaaaauacucagaggaagcaaaauuaaacagagaaaaaauagaugggguaaaacuggaaucaacaaggauuuaccagauuuuggcgaucuauucaacugucgccaguucauugguacugguagucucccugggggcaaucagcuucuggaugugcucuaaugggucucuacaguguagaauauguauuuaa

SEQ ID NO: 44397 - RNA, 1701 nt, Artificial Sequence
  derived and/or modified CDS sequence (wt) from hemagglutinin__InfluenzaA__AIC73748
augaaggcaauacuaguaguucugcuauacacauuugcaaccgcaaaugcagacacauuauguauagguuaucaugcgaacaauucaacagacacuguagacacaguacuagaaaagaauguaacaguaacacacucuguuaaccuucuagaagacaagcauaacgggaaacuaugcaaacuaagagggguagccccauugcauuuggguaaauguaacauugcuggcuggauccugggaaauccagagugugaaucacucuccacagcaaguucaugguccuacauuguggaaacaucuaguucagacaauggaacguguuacccaggagauuucaucaauuaugaggagcuaagagagcaauugagcucagugucaucauuugaaagauuugagauauuccccaagacaaguucauggcccaaucaugacucgaacaaagguguaacggcagcauguccucacgcuggagcaaaaagcuucuacaaaaauuuaauauggcuaguuaaaaaaggaaauucauacccaaagcucagccaauccuacauuaaugauaaagggaaagaaguccucgugcuguggggcauucaccauccaucuacuacugcugaccaacaaagucucuaucagaaugcagaugcauauguuuucguggggacaucaagauacagcaagaaguucaagccggaaauagcaauaagacccaaagugagggaucaagaagggagaaugaacuauuacuggacacuaguagagccgggagacaaaauaacauucgaagcaacuggaaaucuagugguaccgagauaugcauucacaauggaaagaaaugcuggaucugguauuaucauuucagauacaccaguccacgauugcaauacaacuugucagacacccgagggugcuauaaacaccagccuuccauuucagaauauacauccgaucacaauuggaaaauguccaaaguauguaaaaagcacaaaauugagacuggccacaggauugaggaaugucccaucuauucaaucuagaggccuauucggggccauugccggcuucauugaagggggguggacagggaugguagauggaugguacgguuaucaccaucaaaaugagcaggggucaggauaugcagccgaccugaagagcacacaaaaugccauugacaaaauuacuaacaaaguaaauucuguuauugaaaagaugaauacacaguucacagcaguggguaaagaguucaaccacuuggaaaaaagaauagagaauuuaaauaaaaaaguugaugaugguuucuuggacauuuggacuuacaaugccgaacugcugguucuauuggaaaaugaaagaacuuuggacuaccacgauucaaaugugaagaacuuguaugaaaagguaagaaaccaguuaaaaaacaaugccaaggaaauuggaaacggcugcuuugaauuuuaccacaaaugcgauaacacgugcauggaaagugucaaaaaugggacuuaugacuacccaaaauacucagaggaagcaaaauuaaacagagaaaaaauagaugggguaaagcuggaaucaacaaggauuuaccagauuuuggcgaucuauucaacugucgccaguucauugguacugguagucucccugggggcaaucagcuucuggaugugcucuaaugggucucuacaguguagaauauguauuuaa

SEQ ID NO: 44398 - RNA, 1701 nt, Artificial Sequence
  derived and/or modified CDS sequence (wt) from hemagglutinin__InfluenzaA__AIC73749
augaagacuaucauugcuuugagcuacauucuaugucugguuuucgcucaaaaacuuccuggaaaugacaauagcacggcaacgcugugccuugggcaccaugcaguaccaaacggaacgauagugaaaacaaucacgaaugaccgaauugaaguuacuaaugcuacugagcugguucagaauuccucaauaggugaaauaugcgacaguccucaucagauccuugauggaaaaaacugcacacuaauagaugcucuauugggagacccucagugugauggcuuucaaaauaaaagaugggaccuuuuuguugaacgaagcaaagccuacagcaacuguuacccuuaugaugugccggauuaugccucccuuaggucacuaguugccucauccggcacacuggaguuuaacgaugaaagcuucaauugggcuggagucacucaaaacggaacaaguucugcuugcauaaggggaucuaauaguaguuucuuuaguagauuaaauugguugacccacucaaacuucaaauacccagcauugaacgugacuaugccaaacaaugaacaauuugacaaauuguacauuugggggguucaccacccggguacagacaaggaccaaaucuuccuguaugcucacucaucaggaagaaucacaguaucuaccaaaagaagccaacaagcuguaaucccgaauaucggaucuagacccagaauaaggaauaucccuagcagaauaagcaucuauuggacaauaguaaaaccgggagacauacuuuugauuaacagcacagggaaucuaauugcuccuagggguuacuucaaaauacaaagugggaaaagcucaauaaugagaucagaugcacccauuggcaaaugcaagucugaaugcaucacuccaaauggaagcauuaccaaugacaaaccauuccaaaauguaaacaggaucacauacggggccugucccagauauguuaagcaaagcacucugaaauuggcaacaggaaugcgaaauguaccagagaaacaaacuagaggcauauuuggcgcaauagcggguuucauagaaaaugguugggagggaaugaaggaugguugguacgguuucaggcaucaaaauucugagggaagaggacaagcagcagaucucaaaagcacucaagcagcaaucgaucaaaucaaugggaagcugaaucgauugaucgggaaaaccaacgagaaauuccaucagauugaaaaagaauucucagaaguagaagggagaauucaggaccuugagaaauauguugaggacacaaaaauagaucucuggucauacaacgcggagcuucuuguugcccuggagaaccaacauacaauugaucuaacugacucagaaaugaacaaacuguuugaaaaaacaaagaagcaacugagggaaaaugcugaggauaugggcaaugguuguuucaaaauauaccacaaaugugacaaugccugcauaggaucaaucagaaauggaacuuaugaccacgauguauacagggaugaagcuuuaaacaaccgguuccagaucaagggaguugagcugaagucaggguacaaagauuggauccuauggauuuccuuugccauaucauguuuuuugcuuuguguugcuuuguugggguucaucaugugggccugccaaaagggcaacauuaggugcaacauuugcauuuga

SEQ ID NO: 44399 - RNA, 1701 nt, Artificial Sequence
  derived and/or modified CDS sequence (wt) from hemagglutinin__InfluenzaA__AIC73750
augaaggcaauacuaguaguucugcuauauacauuugcaaccgcaaaugcagacacauuauguauagguuaucaugcgaacaauucaacagacacuguagacacaguacuagaaaagaauguaacaguaacacacucuguuaaccuucuagaagacaagcauaacgggaaacuaugcaaacuaagagggguagccccauugcauuuggguaaauguaacauugcuggcuggauccugggaaauccagagugugaaucacucuccacagcaaguucaugguccuacauuguggaaacaucuaguucagacaauggaacguguuacccaggagauuucaucaauuaugaggagcuaagagagcaauugagcucagugucaucauuugaaagguuugagauauuccccaagacaaguucauggcccaaucaugacucgaacaaagguguaacggcagcauguccucacgcuggagcaaaaagcuucuacaaaaauuuaauauggcuaguuaaaaaaggaaauucauacccaaagcucagccaauccuacauuaaugauaaagggaaagaaguccucgugcuguggggcauucaccacccaucuacuacugcugaccaacaaagucucuaucagaaugcagaugcauauguuuuuguggggacaucaagauacagcaagaaguucaagccggaaauagcaauaagacccaaagugagggaucaagaagggagaaugaacuauuacuggacacuaguagagccgggagacaaaauaacauucgaagcaacuggaaaucuagugguaccgagauaugcauucacaauggaaagaaaugcuggaucugguauuaucauuucagauacaccaguccacgauugcaauacaacuugucagacacccgagggugcuauaaacaccagccucccauuucaaaauauacauccgaucacaauuggaaaauguccaaaguauguaaaaagcacaaaauugagacuggccacaggauugaggaaugucccgucuauucaaucuagaggccuauucggggccauugccggcuucauugaaggaggguggacagggaugguagauggaugguacgguuaucaccaucaaaaugagcaggggucaggauaugcagccgaccugaagagcacacaaaaugccauugacaagauuacuaacaaaguaaauucuguuauugaaaagaugaauacacaguucacagcaguggguaaagaguucaaccaccuggaaaaaagaauagagaauuuaaauaaaaaaguugaugaugguuuccuggacauuuggacuuacaaugccgaacuguugguucuauuggaaaaugaaagaacuuuggacuaccacgauucaaaugugaagaacuuguaugaaaagguaagaaaccaguuaaaaaacaaugccaaggaaauuggaaacggcugcuuugaauuuuaccacaaaugcgauaacacgugcauggaaagugucaaaaaugggacuuaugacuacccaaaauacucagaggaagcaaaauuaaacagagaaaaaauagaugggguaaagcuggaaucaacaaggauuuaccagauuuuggcgaucuauucaacugucgccaguucauugguacugguagucucccugggggcaaucagcuucuggaugugcucuaaugggucucuacaguguagaauauguauuuaa

SEQ ID NO: 44400 - RNA, 1701 nt, Artificial Sequence
  derived and/or modified CDS sequence (wt) from hemagglutinin__InfluenzaA__AIC73754
augaaggcaauacuaguaguucugcuauacacauuugcaaccgcaaaugcagacacauuauguauagguuaucaugcgaacaauucaacagacacuguagacacaguacuagaaaagaauguaacaguaacacacucuguuaaccuucuagaagacaagcauaacgggaaacuaugcaaacuaagagggguagccccauugcauuuggguaaauguaacauugcuggcuggauccugggaaauccagagugugaaucacucuccacagcaaguucaugguccuacauuguggaaacaucuaguucagacaauggaacguguuacccaggagauuucaucaauuaugaggagcuaagagagcaauugagcucagugucaucauuugaaagauuugagauauuccccaagacaaguucauggcccaaucaugacucgaacaaagguguaacggcagcauguccucacgcuggagcaaaaagcuucuacaaaaauuuaauauggcuaguuaaaaaaggaaauucauacccaaagcucagccaauccuacauuaaugauaaagggaaagaaguccucgugcuguggggcauucaccauccaucuacuacugcugaccaacaaagucucuaucagaaugcagaugcauauguuuucguggggacaucaagauacagcaggaaguucaagccggaaauagcaauaagacccaaagugagggaucaagaagggagaaugaacuauuacuggacacuaguagagccgggagacaaaauaacauucgaagcaacuggaaaucuagugguaccgagauaugcauucacaauggaaagaaaugcuggaucugguauuaucauuucagauacaccaguccacgauugcaauacaacuugucagacacccgagggugcuauaaacaccagccucccauuucagaauauacauccgaucacaauuggaaaauguccaaaguauguaaaaagcacaaaauugagacuggccacaggauugaggaaugucccaucuauucaaucuagaggccuauucggggccauugccggcuucauugaagggggguggacagggaugguagauggaugguacgguuaucaccaucaaaaugagcaggggucaggauaugcagccgaccugaagagcacacaaaaugccauugacaaaauuacuaacaaaguaaauucuguuauugaaaagaugaauacacaguucacagcaguggguaaagaguucaaccacuuggaaaaaagaauagagaauuuaaauaaaaaaguugaugaugguuuccuggacauuuggacuuacaaugccgaacugcugguucuauuggaaaaugaaagaacuuuggacuaccacgauucaaaugugaagaacuuguaugaaaagguaagaaaccaguuaaaaaacaaugccaaggaaauuggaaacggcugcuuugaauuuuaccacaaaugcgauaacacgugcauggaaagugucaaaaaugggacuuaugacuacccaaaauacucagaggaagcaaaauuaaacagagaaaaaauagaugggguaaagcuggaaucaacaaggauuuaccagauuuuggcgaucuauucaacugucgccaguucauugguacugguagucucccugggggcaaucagcuucuggaugugcucuaaugggucucuacaguguagaauauguauuuaa

SEQ ID NO: 44401 - RNA, 1701 nt, Artificial Sequence
  derived and/or modified CDS sequence (wt) from hemagglutinin__InfluenzaA__AIC73755
augaaggcaauacuaguaguucugcuauacacauuugcaaccgcaaaugcagacacauuauguauagguuaucaugcgaacaauucaacagacacuguagacacaguacuagaaaagaauguaacaguaacacacucuguuaaccuucuagaagacaagcauaacgggaaacuaugcaaacuaagagggguagccccauugcauuuggguaaauguaacauugcuggcuggauccugggaaauccagagugugaaucacucuccacagcaaguucaugguccuacauuguggaaacaucuaguucagacaauggaacguguuacccaggagauuucaucaauuaugaggagcuaagagagcaauugagcucagugucaucauuugaaagauuugagauauuccccaagacaaguucauggcccaaucaugacucgaacaaagguguaacggcagcauguccucacgcuggagcaaaaagcuucuacaaaaauuuaauauggcuaguuaaaaaaggaaauucauacccaaagcucagccaauccuacauuaaugauaaagggaaagaaguccucgugcuguggggcauucaccauccaucuacuacugcugaccaacaaagucucuaucagaaugcagaugcauauguuuuuguggggacaucaagauacagcaagaaguucaagccggaaauagcaauaagacccaaagugagggaucaagaagggagaaugaacuauuacuggacacuaguagagccgggagacaaaauaacauucgaagcaacuggaaaucuagugguaccgagauaugcauucacaauggaaagaaaugcuggaucugguauuaucauuucagauacaccaguccacgauugcaauacaacuugucagacacccgagggugcuauaaacaccagccucccauuucagaauauacauccgaucacaauuggaaaauguccaaaguauguaaaaagcacaaaauugagacuggccacaggauugaggaaugucccaucuauucaaucuagaggccuauucggggccauugccggcuucauugaagggggguggacagggaugguagauggaugguacgguuaucaccaucaaaaugagcaggggucaggauaugcagccgaccugaagagcacacaaaaugccauugacaaaauuacuaacaaaguaaauucuguuauugaaaagaugaauacacaguucacagcaguggguaaagaguucaaccaccuggaaaaaagaauagagaauuuaaauaaaaaaguugaugaugguuuccuggacauuuggacuuacaaugccgaacugcugguucuauuggaaaaugaaagaacuuuggacuaccacgauucaaaugugaagaacuuguaugaaaagguaagaaaccaguuaaaaaacaaugccaaggaaauuggaaacggcugcuuugaauuuuaccacaaaugcgauaacacgugcauggaaagugucaaaaaugggacuuaugacuacccaaaauacucagaggaagcaaaauuaaacagagaaaaaauagaugggguaaagcuggaaucaacaaggauuuaccagauuuuggcgaucuauucaacugucgccaguucauugguacugguagucucccugggggcaaucagcuucuggaugugcucuaaugggucucuacaguguagaauauguauuuaa

SEQ ID NO: 44402 - RNA, 1701 nt, Artificial Sequence; identical to SEQ ID NO: 44401
  derived and/or modified CDS sequence (wt) from hemagglutinin__InfluenzaA__AIC73756

SEQ ID NO: 44403 - RNA, 1701 nt, Artificial Sequence; identical to SEQ ID NO: 44401
  derived and/or modified CDS sequence (wt) from hemagglutinin__InfluenzaA__AIC73757

SEQ ID NO: 44404 - RNA, 1701 nt, Artificial Sequence
  derived and/or modified CDS sequence (wt) from hemagglutinin__InfluenzaA__AIC73758
augaaggcaauacuaguaguucugcuauacacauuugcaaccgcaaaugcagacacauuauguauagguuaucaugcgaacaauucaacagacacuguagacacaguacuagaaaagaauguaacaguaacacacucuguuaaccuucuagaagacaagcauaacgggaaacuaugcaaacuaagagggauagccccauugcauuuggguaaauguaacauugcuggcuggauccugggaaauccagagugugaaucacucuccacagcaaguucaugguccuacauuguggaaacaucuaguucagacaauggaacguguuacccaggagauuucaucaauuaugaggagcuaagagagcaauugagcucagugucaucauuugaaagauuugagauauuccccaagacaaguucauggcccaaucaugacucgaacaaagguguaacggcagcauguccucacgcuggagcaaaaagcuucuacaaaaauuuaauauggcuaguuaaaaaaggaaauucauacccaaagcucagccaauccuacauuaaugauaaagggaaagaaguccucgugcuguggggcauucaccauccaucuacuacugcugaccaacaaagucucuaucagaaugcagaugcauauguuuuuguggggacaucaagauacagcaagaaguucaagccggaaauagcaauaagacccaaagugagggaucaagaagggagaaugaacuauuacuggacacuaguagagccgggagacaaaauaacauucgaagcaacuggaaaucuagugguaccgagauaugcauucacaauggaaagaaaugcuggaucugguauuaucauuucagauacaccaguccacgauugcaauacaacuugucagacacccgagggugcuauaaacaccagccucccauuucagaauauacauccgaucacaauuggaaaauguccaaaguauguaaaaagcacaaaauugagacuggccacaggauugaggaaugucccaucuauucaaucuagaggccuauucggggccauugccggcuucauugaagggggguggacagggaugguagauggaugguacgguuaucaccaucaaaaugagcaggggucaggauaugcagccgaccugaagagcacacaaaaugccauugacaaaauuacuaacaaaguaaauucuguuauugaaaagaugaauacacaguucacagcaguggguaaagaguucaaccaccuggaaaaaagaauagagaauuuaaauaaaaaaguugaugaugguuuccuggacauuuggacuuacaaugccgaacugcugguucuauuggaaaaugaaagaacuuuggacuaccacgauucaaaugugaagaacuuguaugaaaagguaagaaaucaguuaaaaaacaaugccaaggaaauuggaaacggcugcuuugaauuuuaccacaaaugcgauaacacgugcauggaaagugucaaaaaugggacuuaugacuacccaaaauacucagaggaagcaaaauuaaacagagaaaaaauagaugggguaaagcuggaaucaacaaggauuuaccagauuuuggcgaucuauucaacugucgccaguucauugguacugguagucucccugggggcaaucagcuucuggaugugcucuaaugggucucuacaguguagaauauguauuuaa

SEQ ID NO: 44405 - RNA, 1701 nt, Artificial Sequence
  derived and/or modified CDS sequence (wt) from hemagglutinin__InfluenzaA__AIC73760
augaaggcaauacuaauaguucugcuauauacauuugcaaccgcaaaugcagacacauuauguauagguuaucaugcgaacaauucaacagauacuguagacacaguacuagaaaagaauguaacaguaacacacucuguuaaccuucuagaagacaagcauaacgggaaacuaugcaaacuaagagggguagccccauugcauuuggguaaauguaacauugcuggcuggauccugggaaauccagagugugaaucacucuccacggcaaguucaugguccuacauuguggaaacaucuaguucagacaauggaacauguuacccaggagauuucaucaauuaugaggagcuaagagagcaauugagcucagugucaucauuugaaagguuugagauauuccccaagacgaguucauggcccaaucaugacucgaacaaagguguaacggcagcauguccucacgcuggagcaaaaagcuucuacaaaaauuuaauauggcuaguuaaaaaaggaaauucauacccaaagcucagccaauccuacauuaaugauaaagggaaagaaguccucgugcuguggggcauucaccauccaucuacuacugcugaccaacaaagucucuaucagaaugcagaugcauauguuuuuguggggacaucaagauacagcaagaaguucaagccggaaauagcaauaagacccaaagugagggaucaagaagggagaaugaacuauuacuggacacuaguagagccgggagacaaaauaacauucgaagcaacuggaaaucuagugguaccgagauaugcauucacaauggaaagaaaugcuggaucugguauuaucauuucagauacaccaguccacgauugcaauacaacuugucagacacccgaaggugcuauaaacaccagccucccauuucagaauauacauccgaucacaauuggaaaauguccaaaguauguaaaaagcacaaaauugagacuggccacaggauugaggaaugucccgucuauucaaucuagaggccuauucggggccauugccggcuucauugaagggggguggacaggaaugguagauggaugguacgguuaucaccaucaaaaugagcagggaucaggauaugcagccgaccugaagagcacacaaaaugccauugacaagauuacuaacaaaguaaauucuguuauugaaaagaugaauacacaguucacagcaguggguaaagaguucaaccaccuggaaaaaagaauagagaauuuaaauaaaaaaguugaugaugguuuccuggacauuuggacuuacaaugccgaacuguugguucuauuggaaaaugaaagaacuuuggacuaccacgauucaaaugugaagaacuuguaugaaaagguaagaaaccaguuaaaaaacaaugccaaggaaauuggaaacggaugcuuugaauuuuaccacaaaugcgauaacacgugcauggaaagugucaaaaaugggacuuaugacuacccaaaauacucagaggaagcaaaauuaaacagagaaaaaauagaugggguaaagcuggaaucaacaaggauuuaccagauuuuggcgaucuauucaacugucgccaguucauugguacugguagucucccugggggcaaucagcuucuggaugugcucuaaugggucucuacaguguagaauauguauuuaa

SEQ ID NO: 44406 - RNA, 1701 nt, Artificial Sequence; identical to SEQ ID NO: 44405
  derived and/or modified CDS sequence (wt) from hemagglutinin__InfluenzaA__AIC73761

SEQ ID NO: 44407 - RNA, 1701 nt, Artificial Sequence
  derived and/or modified CDS sequence (wt) from hemagglutinin__InfluenzaA__AIC73762
augaaggcaauacuaguaguucugcuauauacauuugcaaccgcaaaugcagacacauuauguauagguuaucaugcgaacaauucaacagacacuguagacacaguacuagaaaagaauguaacaguaacacacucuguuaaccuucuagaagacaagcauaacgggaaacuaugcaaacuaagagggguagccccauugcauuuggguaaauguaacauugcuggcuggauccugggaaauccagagugugaaucacucuccacagcaaguucaugguccuacauuguggaaacaucuaguucagacaauggaacguguuacccaggagauuucaucaauuaugaggagcuaagagagcaauugagcucagugucaucauuugaaagguuugagauauuccccaagacaaguucauggcccaaucaugacucgaacaaagguguaacggcagcauguccucacgcuggagcaaaaagcuucuacaaaaauuuaauauggcuaguuaaaaaaggaaauucauacccaaagcucagccaauccuacauuaaugauaaagggaaagaaguccucgugcuguggggcauucaccauccaucuacuacugcugaccaacaaagucucuaucagaaugcagaugcauauguuuuuguggggacaucaagauacagcaagaaguucaagccggaaauagcaauaagacccaaagugagggaucaagaagggagaaugaacuauuacuggacacuaguagaaccgggagacaaaauaacauucgaagcaacuggaaaucuagugguaccgagauaugcauucacaauggaaagaaaugcuggaucugguauuaucauuucagauacaccaguccacgauugcaauacaacuugucagacacccgagggugcuauaaacaccagccucccauuucagaauauacauccgaucacaauuggaaaauguccaaaguauguaaaaagcacaaaauugagacuggccacaggauugaggaaugucccgucuauucaaucuagaggccuauucggggccauugccggcuucauugaagggggguggacagggaugguagauggaugguacgguuaucaccaucaaaaugagcaggggucaggauaugcagccgaccagaagagcacacaaaaugccauugacaagauuacuaacaaaguaaauucuguuauugaaaagaugaauacacaguucacagcaguggguaaagaguucaaccaccuggaaaaaagaauagagaauuuaaauaaaaaaguugaugaugguuuccuggacauuuggacuuacaaugccgaacuguugguucuauuggaaaaugaaagaacuuuggacuaccacgauucaaaugugaagaacuuguaugaaaagguaagaaaccaguuaaaaaacaaugccaaggaaauuggaaacggcugcuuugaauuuuaccacaaaugcgauaacacgugcauggaaagugucaaaaaugggacuuaugacuacccaaaauacucagaggaagcaaaauuaaacagagaaaaaauagaugggguaaagcuggaaucaacaaggauuuaccagauuuuggcgaucuauucaacugucgccaguucauugguacugguagucucccugggggcaaucagcuucuggaugugcucuaaugggucucuacaguguagaauauguauuuaa

SEQ ID NO: 44408 - RNA, 1701 nt, Artificial Sequence
  derived and/or modified CDS sequence (wt) from hemagglutinin__InfluenzaA__AIC73763
augaaggcaauacuaguaguucugcuauauacauuugcaaccgcaaaugcagacacauuauguauagguuaucaugcgaacaauucaacagacacuguagacacaguacuagaaaagaauguaacaguaacacacucuguuaaccuucuagaagacaagcauaacgggaaacuaugcaaacuaagagggguagccccauugcauuuggguaaauguaacauugcuggcuggauccugggaaauccagagugugaaucacucuccacagcaaguucaugguccuacauuguggaaacaucuaguucagacaauggaacguguuacccaggagauuucaucaauuaugaggagcuaagagagcaauugagcucagugucaucauuugaaagguuugagauauuccccaagacaaguucauggcccaaucaugacucgaacaaagguguaacggcagcauguccucacgcuggagcaaaaagcuucuacaaaaauuuaauauggcuaguuaaaaaaggaaauucauacccaaagaucagccaauccuacauuaaugauaaagggaaagaaguccucgugcuguggggcauucaccacccaucuacuacugcugaccaacaaagucucuaucagaaugcagaugcauauguuuuuguggggacaucaagauacagcaagaaguucaagccggaaauagcaauaagacccaaagugagggaucaagaagggagaaugaacuacuacuggacacuaguagagccgggagacaaaauaacauucgaagcaacuggaaaucuagugguaccgagauaugcauucacaauggaaagaaaugcuggaucugguauuaucauuucagauacaccaguccacgauugcaauacaacuugucagacacccgagggugcuauaaacaccagccucccauuucagaauauacauccgaucacaauuggaaaauguccaaaguauguaaaaagcacaaaauugagacuggccacaggauugaggaaugucccgucuauucaaucuagaggccuauucggggccauugccggcuucauugaagggggguggacagggaugguagauggaugguacgguuaucaccaucaaaaugagcaggggucaggauaugcagccgaccugaagagcacacaaaaugccauugacaagauuacuaacaaaguaaauucuguuauugaaaagaugaauacacaguucacagcaguagguaaagaguucaaccacuuggaaaaaagaauagagaauuuaaauaaaaaaguugaugaugguuuccuggacauuuggacuuacaaugccgaacuguugguucuauuggaaaaugaaagaacuuuggacuaccacgauucaaaugugaagaacuuguaugaaaagguaagaaaccaguuaaaaaacaaugccaaggaaauuggaaacggcugcuuugaauuuuaccacaaaugcgauaacacgugcauggaaagugucaaaaaugggacuuaugacuacccaaaauacucagaggaggcaaaauuaaacagagaaaaaauagaugggguaaaacuggaaucaacaaggauuuaccagauuuuggcgaucuauucaacugucgccaguucauugguacugguagucucccugggggcaaucagcuucuggaugugcucuaaugggucucuacaguguagaauauguauuuaa

SEQ ID NO: 44409 - RNA, 1701 nt, Artificial Sequence; identical to SEQ ID NO: 43034
  derived and/or modified CDS sequence (wt) from hemagglutinin__InfluenzaA__AIC73765

SEQ ID NO: 44410 - RNA, 1701 nt, Artificial Sequence
  derived and/or modified CDS sequence (wt) from hemagglutinin__InfluenzaA__AIC73766
augaaggcaauacuaguaguucugcuauauacauuugcaaccgcaaaugcagacacauuauguauagguuaucaugcgaacaauucaacagacacuguagacacaguacuagaaaagaauguaacaguaacacacucuguuaaccuucuagaagacaagcauaacgggaaacuaugcaaacuaagagggguagccccauugcauuuggguaaauguaacauugcuggcuggauccugggaaauccagagugugaaucacucuccacagcaaguucaugguccuacauuguggaaacaucuaguucagacaauggaacguguuacccaggagauuucaucaauuaugaggagcuaagagagcaauugagcucagugucaucauuugaaagguuugagauauuccccaagacaaguucauggcccaaucaugacucgaacaaagguguaacggcagcauguccucacgcuggagcaaaaagcuucuacaaaaauuuaauauggcuaguuaaaaaaggaaauucauacccaaagcucagccaauccuacauuaaugauaaagggaaagaaguccucgugcuguggggcauucaccacccaucuacuacugcugaccaacaaagucucuaucagaaugcagaugcauauguuuuuguggggacaucaagauacagcaagaaguucaagccggaaauagcaauaagacccaaagugagggaucaagaagggagaaugaacuacuacuggacacuaguagagccgggagacaaaauaacauucgaagcaacuggaaaucuagugguaccgagauaugcauucacaauggaaagaaaugcuggaucugguauuaucauuucagauacaccaguccacgauugcaauacaacuugucagacacccgagggagcuauaaacaccagccucccauuucagaauauacauccgaucacaauuggaaaauguccaaaguauguaaaaagcacaaaauugagacuggccacaggauugaggaaugucccgucuauucaaucuagaggccuauucggggccauugccggcuucauugaagggggguggacagggaugguagauggaugguacgguuaucaccaucaaaaugagcaggggucaggauaugcagccgaccugaagagcacacaaaaugccauugacaagauuacuaacaaaguaaauucuguuauugaaaagaugaauacacaguucacagcaguggguaaagaguucaaccaccuggaaaaaagaauagagaauuuaaauaaaaaaguugaugaugguuuccuggacauuuggacuuacaaugccgaacuguugguucuauuggaaaaugaaagaacuuuggacuaccacgauucaaaugugaagaacuuguaugaaaagguaagaaaccaguuaaaaaacaaugccaaggaaauuggaaacggcugcuuugaauuuuaccacaaaugcgauaacacgugcauggaaagugucaaaaaugggacuuaugacuacccaaaauacucagaggaagcaaaauuaaacagagaaaaaauagaugggguaaaacuggaaucaacaaggauuuaccagauuuuggcgaucuauucaacugucgccaguucauugguacugguagucucccugggggcaaucagcuucuggaugugcucuaaugggucucuacaguguagaauauguauuuaa

SEQ ID NO: 44411 - RNA, 1701 nt, Artificial Sequence
  derived and/or modified CDS sequence (wt) from hemagglutinin__InfluenzaA__AIC73767
augaaggcaauacuaguaguucugcuauauacauuugcaaccgcaaaugcagacacuuuauguauagguuaucaugcgaacaauucaacagacacuguagacacaguacuagaaaagaauguaacaguaacacacucuguuaaccuucuagaagacaaacauaacgguaaacuaugcaaacuaagagggguagccccauugcauuuggguaaauguaacauugcuggcuggauccugggaaauccagagugugaaucacucuccacagcaaguucaugguccuacauuguggaaacaucuaguucagacaauggaacguguuacccaggagauuucaucaauuaugaggagcuaagagagcaauugagcucagugucaucauuugaaagguuugagauauuccccaagacaaguucauggcccaaucaugacucgaacaaagguguaacggcagcauguccucacgcuggagcaaaaagcuucuacaaaaauuuaauauggcuaauuaaaaaaggaaauucauacccaaagcucagucaauccuacauuaaugauaaagggaaagaaguccucgugcuguggggcauucaccauccaucuacuacugcugaccaacaaagucucuaucagaaugcagaugcauauguuuuuguggggacaucaagauacagcaagaaguucaagccggaaauagcaauaagacccaaagugagggaucaagaagggagaaugaacuauuacuggacacuaguagagccgggagacaaaauaacauucgaagcaacuggaaaucuagugguaccgagauaugcauucacaauggaaagaaaugcuggaucugguauuaucauuucagauacaccaguccacgauugcaauacaacuugucagacacccgagggugcuauaaacaccagccucccauuucagaauauacauccgaucacaauuggaaaauguccaaaguauguaaaaagcacaaaauugagacuggcaacaggauugaggaauaucccgucuauucaaucuagaggccuauucggggccauugccggcuucauugaagggggguggacagggaugguagauggaugguacgguuaucaccaucaaaaugagcaggggucaggauaugcagccgaccugaagagcacacaaaaugccauugacaagauuacuaacaaaguaaacucuguuauugaaaagaugaauacacaguucacagcaguggguaaagaguucaaccaccuggaaaaaagaauagagaauuuaaauaaaaaaguugaugaugguuuccuggacauuuggacuuacaaugccgaacuguugguucuauuggaaaaugaaagaacuuuggacuaccacgauucaaaugugaagaacuuguaugaaaagauaagaaaccaguuaaaaaacaaugccaaggaaauuggaaacggcugcuuugaauuuuaccacaaaugcgauaacaugugcauggaaagugucaaaaaugggacuuaugacuacccaaaauacucagaggaagcaaaauuaaacagagaaaaaauagaugggguaaagcuggaaucaacaaggauuuaccagauuuuggcgaucuacucaacugucgccaguucauugguacugguagucucccugggggcaaucagcuucuggaugugcucuaaugggucucuacaauguagaauauguauuuaa

SEQ ID NO: 44412 - RNA, 1701 nt, Artificial Sequence
  derived and/or modified CDS sequence (wt) from hemagglutinin__InfluenzaA__AIC73768
augaaggcaauacuaguaguucugcuauacacauuugcaaccgcaaaugcagacacauuauguauagguuaucaugcgaacaauucaacagacacuguagacacaguacuagaaaagaauguaacaguaacacacucuguuaaccuucuagaagacaagcauaacgggaaacuaugcaaacuaagagggguagccccauugcauuuggguaaauguaacauugcuggcuggauccugggaaauccagagugugaaucacucuccacagcaaguucaugguccuacauuguggaaacaucuaguucagacaauggaacguguuacccaggagauuucaucaauuaugaggagcuaagggagcaauugagcucagugucaucauuugaaagauuugagauauuccccaagacaaguucauggcccaaucaugacucgaacaaagguguaacggcagcauguccucacgcuggagcaaaaagcuucuacaaaaauuuaauauggcuaguuaaaaaaggaaauucauacccaaagcucagccaauccuacauuaaugauaaagggaaagaaguccucgugcuguggggcauucaccauccaucuacuacugcugaccaacaaagucucuaucagaaugcagaugcauauguuuuuguggggacaucaagauacagcaagaaguucaagccggaaauagcaauaagacccaaagugagggaucaagaagggagaaugaacuauuacuggacacuaguagagccgggagacaaaauaacauucgaagcaacuggaaaucuagugguaccgagauaugcauucacaauggaaagaaaugcuggaucugguauuaucauuucagauacaccaguccacgauugcaauacaacuugucagacacccgagggugcuauaaacaccagccucccauuucagaauauacauccgaucacaauugggaaauguccaaaguauguaaaaagcacaaaauugagacuggccacaggauugaggaaugucccaucuauucaaucuagaggccuauucggggccauugccggcuucauugaagggggguggacagggaugguagauggaugguacgguuaucaccaucaaaaugagcaggggucaggauaugcagccgaccugaagagcacacaaaaugccaucgacaaaauuacuaacaaaguaaauucuguuauugaaaagaugaauacacaguucacagcaguggguaaagaguucaaccacuuggaaaaaagaauagagaauuuaaauaaaaaaguugaugaugguuuccuggacauuuggacuuacaaugccgaacugcugguucuauuggaaaaugaaagaacuuuggacuaccacgauucaaaugugaagaacuuguaugaaaagguaagaaaccaguuaaaaaacaaugccaaggaaauuggaaacggcugcuuugaauuuuaccacaaaugcgauaacacgugcauggaaagugucaaaaaugggacuuaugacuacccaaaauacucagaggaagcaaaauuaaacagagaaaaaauagaugggguaaagcuggaaucaacaaggauuuaccagauuuuggcgaucuauucaacugucgccaguucauugguacugguagucucccugggggcaaucagcuucuggaugugcucuaaugggucucuacaguguagaauauguauuuaa

SEQ ID NO: 44413 - RNA, 1701 nt, Artificial Sequence
  derived and/or modified CDS sequence (wt) from hemagglutinin__InfluenzaA__AIC73769
augaaggcaauacuaguaguucugcuauacacauuugcaaccgcaaaugcagacacauuauguauagguuaucaugcgaacaauucaacagacacuguagacacaguacuagaaaagaauguaacaguaacacacucuguuaaccuucuagaagacaagcauaacgggaaacuaugcaaacuaagagggguagccccauugcauuuggguaaauguaacauugcuggcuggauccugggaaauccagagugugaaucacucuccacagcaaguucaugguccuacauuguggaaacaucuaguucagacaauggaacguguuacccaggagauuucaucaauuaugaggagcuaagggagcaauugagcucagugucaucauuugaaagauuugagauauuccccaagacaaguucauggcccaaucaugacucgaacaaagguguaacggcagcauguccucacgcuggagcaaaaagcuucuacaaaaauuuaauauggcuaguuaaaaaaggaaauucauacccaaagcucagccaauccuacauuaaugauaaagggaaagaaguccucgugcuguggggcauucaccauccaucuacuacugcugaccaacaaagucucuaucagaaugcagaugcauauguuuuuguggggacaucaagauacagcaagaaguucaagccggaaauagcaauaagacccaaagugagggaucaagaagggagaaugaacuauuacuggacacuaguagagccgggagacaaaauaacauucgaagcaacuggaaaucuagugguaccgagauaugcauucacaauggaaaggaaugcuggaucugguauuaucauuucagauacaccaguccacgauugcaauacaacuugucagacacccgagggugcuauaaacaccagccucccauuucagaauauacauccgaucacaauugggaaauguccaaaguauguaaaaagcacaaaauugagacuggccacaggauugaggaaugucccaucuauucaaucuagaggccuauucggggccauugccggcuucauugaagggggguggacagggaugguagauggaugguacgguuaucaccaucaaaaugagcaggggucaggauaugcagccgaccugaagagcacacaaaaugccauugacaaaauuacuaacaaaguaaauucuguuauugaaaagaugaauacacaguucacagcaguggguaaagaguucaaccacuuggaaaaaagaauagagaauuuaaauaaaaaaguugaugaugguuuccuggacauuuggacuuacaaugccgaacugcugguucuauuggaaaaugaaagaacuuuggacuaccacgauucaaaugugaagaacuuguaugaaaagguaagaaaccaguuaaaaaacaaugccaaggaaauuggaaacggcugcuuugaauuuuaccacaaaugcgauaacacgugcauggaaagugucaaaaaugggacuuaugacuacccaaaauacucagaggaagcaaaauuaaacagagaaaaaauagaugggguaaagcuggaaucaacaaggauuuaccagauuuuggcgaucuauucaacugucgccaguucauugguacugguagucucccugggggcaaucagcuucuggaugugcucuaaugggucucuacaguguagaauauguauuuaa

SEQ ID NO: 44414 - RNA, 1701 nt, Artificial Sequence
  derived and/or modified CDS sequence (wt) from hemagglutinin__InfluenzaA__AIC73770
augaaggcaauacuaguaguucugcuauacacauuugcaaccgcaaaugcagacacauuauguauagguuaucaugcgaacaauucaacagacacuguagacacaguacuagaaaagaauguaacaguaacacacucuguuaaccuucuagaagacaagcauaacgggaaacuaugcaaacuaagagggguagccccauugcauuuggguaaauguaacauugcuggcuggauccugggaaauccagagugugaaucacucuccacagcaaguucaugguccuacauuguggaaacaucuaguucagacaauggaacguguuacccaggagauuucaucaauuaugaggagcuaagggagcaauugagcucagugucaucauuugagagauuugagauauuccccaagacaaguucauggcccaaucaugacucgaacaaagguguaacggcagcauguccucacgcuggagcaaaaagcuucuacaaaaauuuaauauggcuaguuaaaaaaggaaauucauacccaaagcucagccaauccuacauuaaugauaaagggaaagaaguccucgugcuguggggcauucaccauccaucuacuacugcugaccaacaaagucucuaucagaaugcagaugcauauguuuuuguggggacaucaagauacagcaagaaguucaagccggaaauagcaauaagacccaaagugagggaucaagaagggagaaugaacuauuacuggacacuaguagagccgggagacaaaauaacauucgaagcaacuggaaaucuagugguaccgagauaugcauucacaauggaaagaaaugcuggaucugguauuaucauuucagauacaccaguccacgauugcaauacaacuugucagacacccgagggugcuauaaacaccagccucccauuucagaauauacauccgaucacaauugggaaauguccaaaguauguaaaaagcacaaaauugagacuggccacaggauugaggaaugucccaucuauucaaucuagaggccuauucggggccauugccggcuucauugaagggggguggacagggaugguagauggaugguacgguuaucaccaucaaaaugagcaggggucaggauaugcagccgaccugaagagcacacaaaaugccauugacaaaauuacuaacaaaguaaauucuguuauugaaaagaugaauacacaguucacagcaguggguaaagaguucaaccacuuggaaaaaagaauagagaauuuaaauaaaaaaguugaugaugguuuccuggacauuuggacuuacaaugccgaacugcugguucuauuggaaaaugaaagaacuuuggacuaccacgauucaaaugugaagaacuuguaugaaaagguaagaaaccaguuaaaaaacaaugccaaggaaauuggaaacggcugcuuugaauuuuaccacaaaugcgauaacacgugcauggaaagugucaaaaaugggacuuaugacuacccaaaauacucagaggaagcaaaauuaaacagagaaaaaauagaugggguaaagcuggaaucaacaaggauuuaccagauuuuggcgaucuauucaacugucgccaguucauugguacugguagucucccugggggcaaucagcuucuggaugugcucuaaugggucucuacaguguagaauauguauuuaa

SEQ ID NO: 44415 - RNA, 1701 nt, Artificial Sequence
  derived and/or modified CDS sequence (wt) from hemagglutinin__InfluenzaA__AIC73771
augaaggcaauacuaguaguucugcuauauacauuugcaaccgcaaaugcagacacauuauguauagguuaucaugcgaacaauucaacagauacuguagacacaguacuagaaaagaauguaacaguaacacacucuguuaaccuucuagaagacaagcauaacgggaaacuaugcaaacuaagagggguagccccauugcauuuggguaaauguaacauugcuggcuggauccugggaaauccagagugugaaucacucuccacagcaagcucaugguccuacauuguggaaacaucuaguucagacaauggaacauguuacccaggagauuucaucaauuaugaggagcuaagagagcaauugagcucagugucaucauuugaaagguuugagauauuccccaagacgaguucauggcccaaucaugacucgaacaaagguguaacggcagcauguccucacgcuggagcaaaaagcuucuacaaaaauuuaauauggcuaguuaaaaaaggaaauucauacccaaagcucagccaauccuacauuaaugauaaagggaaagaaguccucgugcuguggggcauucaccauccaucuacuacugcugaccaacaaagucucuaucagaaugcagaugcauauguuuuuguggggacaucaagauacagcaagaaguucaagccggaaauagcaauaagacccaaagugagggaucaagaagggagaaugaacuauuacuggacacuaguagagccgggagacaaaauaacauucgaagcaacuggaaaucuagugguaccgagauaugcauucacaauggaaagaaaugcuggaucugguauuaucauuucagauacaccaguccacgauugcaauacaacuugucagacacccgaaggugcuauaaacaccagccucccauuucagaauauacauccgaucacaauuggaaaauguccaaaguauguaaaaagcacaaaauugagacuggccacaggauugaggaaugucccgucuauucaaucuagaggccuauucggggccauugccgguuucauugaagggggguggacagggaugguagauggaugguacgguuaucaccaucaaaaugagcaggggucaggauaugcagccgaccugaagagcacacaaaaugccauugacaagauuacuaacaaaguaaauucuguuauugaaaagaugaauacacaguucacagcaguggguaaagaguucaaccaccuggaaaaaagaauagagaauuuaaauaaaaaaguugaugaugguuuccuggacauuuggacuuacaaugcugaacuguugguucuauuggaaaaugaaagaacuuuggacuaccacgauucaaaugugaagaacuuguaugaaaagguaagaaaccaguuaaaaaacaaugccaaggaaauuggaaacggcugcuuugaauuuuaccacaaaugcgauaacacgugcauggaaagugucaaaaaugggacuuaugacuacccaaaauacucagaggaagcaaaauuaaacagagaaaaaauagaugggguaaagcuggaaucaacaaggauuuaccagauuuuggcgaucuauucaacugucgccaguucauugguacugguagucucccugggggcaaucagcuucuggaugugcucuaaugggucucuacaguguagaauauguauuuaa

SEQ ID NO: 44416 - RNA, 1701 nt, Artificial Sequence
  derived and/or modified CDS sequence (wt) from hemagglutinin__InfluenzaA__AIC73772
augaaggcaauacuaguaguucugcuauauacauuugcaaccgcaaaugcagacacauuauguauagguuaucaugcgaacaauucaacagacacuguagacacaguacuagaaaagaauguaacaguaacacacucuguuaaccuucuagaagacaagcauaacgggaaacuaugcaaacuaagagggguagccccauugcauuuggguaaauguaacauugcuggcuggauccugggaaauccagagugugaaucacucuccacagcaaguucaugguccuacauuguggaaacaucuaguucagacaauggaacguguuacccaggagauuucaucaauuaugaggagcuaagagagcaauugagcucagugucaucauuugaaagguuugagauauuccccaagacaaguucauggcccaaucaugacucgaacaaagguguaacggcagcauguccucacgcuggagcaaaaagcuucuacaaaaauuuaauauggcuaguuaaaaaaggaaauucauacccaaagcucagccaauccuacauuaaugauaaagggaaagaaguccucgugcuguggggcauucaccacccaucuacuacugcugaccaacaaagucucuaucagaaugcagaugcauauguuuuuguggggacaucaagauacagcaagaaguucaagccggaaauagcaauaagacccaaagugagggaucaagaagggagaaugaacuacuacuggacacuaguagagccgggagacaaaauaacauucgaagcaacuggaaaucuagugguaccgagauaugcauucacaauggaaagaaaugcuggaucugguauuaucauuucagauacaccaguccacgauugcaauacaacuugucagacacccgagggugcuauaaacaccagccuuccauuucagaauauacauccgaucacaauuggaaaauguccaaaguauguaaaaagcacaaaauugagacuggccacaggauugaggaaugucccgucuauucaaucuagaggccuauucggggccauugccggcuucauugaagggggguggacagggaugguagauggaugguacgguuaucaccaucaaaaugagcaggggucaggauaugcagccgaccugaagagcacacaaaaugccauugacaagauuacuaacaaaguaaauucuguuauugaaaagaugaauacacaguucacagcaguggguaaagaguucaaccaccuggaaaaaagaauagagaauuuaaauaaaaaaguugaugaugguuuccuggacauuuggacuuacaaugccgaacuguugguucuauuggaaaaugaaagaacuuuggacuaccacgauucaaaugugaagaacuuguaugaaaagguaagaaaccaguuaaaaaacaaugccaaggaaauuggaaacggcugcuuugaauuuuaccacaaaugcgauaacacgugcauggaaagugucaaaaaugggacuuaugacuacccaaaauacucagaggaggcaaaauuaaacagagaaaaaauagaugggguaaaacuggaaucaacaaggguuuaccagauuuuggcgaucuauucaacugucgccaguucauugguacugguagucucccugggggcaaucagcuucuggaugugcucuaaugggucucuacaguguagaauauguauuuaa

SEQ ID NO: 44417 - RNA, 1701 nt, Artificial Sequence; identical to SEQ ID NO: 44415
  derived and/or modified CDS sequence (wt) from hemagglutinin__InfluenzaA__AIC73773

SEQ ID NO: 44418 - RNA, 1701 nt, Artificial Sequence
  derived and/or modified CDS sequence (wt) from hemagglutinin__InfluenzaA__AIC73775
augaaggcaauacuaguaguucugcuauacacauuugcaaccgcaaaugcagacacauuauguauagguuaucaugcgaacaauucaacagacacuguagacacaguacuagaaaagaauguaacaguaacacacucuguuaaccuucuagaagacaagcauaacgggaaacuaugcaaacuaagagggguagccccauugcauuuggguaaauguaacauugcuggcuggauccugggaaauccagagugugaaucacucuccacagcaaguucaugguccuacauuguggaaacaucuaguucagacaauggaacguguuacccaggagauuucaucaauuaugaggagcuaagggagcaauugagcucagugucaucauuugaaagauuugagauauuccccaagacaaguucauggcccaaucaugacucgaacaaagguguaacggcagcauguccucacgcuggagcaaaaagcuucuacaaaaauuuaauauggcuaguuaaaaaaggaaauucauacccaaagcucagccaauccuacauuaaugauaaagggaaagaaguccucgugcuguggggcauucaccauccaucuacuacugcugaccaacaaagucucuaucagaaugcagaugcauauguuuuuguggggacaucaagauacagcaagaaguucaagccggaaauagcaauaagacccaaagugagggaucaagaagggagaaugaacuauuacuggacacuaguagagccgggagacaaaauaacauucgaagcaacuggaaaucuagugguaccaagauaugcauucacaauggaaagaaaugcuggaucugguauuaucauuucagauacaccaguccacgauugcaauacaacuugucagacacccgagggugcuauaaacaccagccucccauuucagaauauacauccgaucacaauugggaaauguccaaaguauguaaaaagcacaaaauugagacuggccacaggauugaggaaugucccaucuauucaaucuagaggccuauucggggccauugccggcuucauugaagggggguggacagggaugguagauggaugguacgguuaucaccaucaaaaugagcaggggucaggauaugcagccgaccugaagagcacacaaaaugccaucgacaaaauuacuaacaaaguaaauucuguuauugaaaagaugaauacacaguucacagcaguggguaaagaguucaaccacuuggaaaaaagaauagagaauuuaaauaaaaaaguugaugaugguuuccuggacauuuggacuuacaaugccgaacugcugguucuauuggaaaaugaaagaacuuuggacuaccacgauucaaaugugaagaacuuguaugaaaagguaagaaaccaguuaaaaaacaaugccaaggaaauuggaaacggcugcuuugaauuuuaccacaaaugcgauaacacgugcauggaaagugucaaaaaugggacuuaugacuacccaaaauacucagaggaagcaaaauuaaacagagaaaaaauagaugggguaaagcuggaaucaacaaggauuuaccagauuuuggcgaucuauucaacugucgccaguucauugguacugguagucucccugggggcaaucagcuucuggaugugcucuaaugggucucuacaguguagaauauguauuuaa

SEQ ID NO: 44419 - RNA, 1701 nt, Artificial Sequence
  derived and/or modified CDS sequence (wt) from hemagglutinin__InfluenzaA__AIC73776
augaaggcaauacuaguaguucugcuauacacauuugcaaccgcaaaugcagacacauuauguauagguuaucaugcgaacaauucaacagacacuguagacacaguacuagaaaagaauguaacaguaacacacucuguuaaccuucuagaagacaagcauaacgggaaacuaugcaaacuaagagggguagccccauugcauuuggguaaauguaacauugcuggcuggauccugggaaauccagagugugaaucacucuccacagcaaguucaugguccuacauuguggaaacaucuaguucagacaauggaacguguuacccaggagauuucaucaauuaugaggagcuaagagagcaauugagcucagugucaucauuugaaagguuugagauauuccccaagacaaguucauggcccaaucaugacucgaacaaagguguaacggcagcauguccucacgcuggagcaaaaagcuucuacaaaaauuuaauauggcuaguuaaaaaaggaaauucauacccaaagcucagccaauccuacauuaaugauaaagggaaagaaguucucgugcuguggggcauucaccauccaucuacuacugcugaccaacaaagucucuaucagaaugcagaugcauauguuuuuguggggacaucaagauacagcaagaaguucaagccggaaauagcaauaagacccaaagugagggaucaagaagggagaaugaacuauuacuggacacuaguagagccgggagacaaaauaacauucgaagcaacuggaaaucuaguggugccgagauaugcauucacaauggaaagaaaugcuggaucugguauuaucauuucagauacaccaguccacgauugcaauacaacuugucagacacccgagggugcuauaaacaccagccucccauuucagaauauacauccgaucacaauuggaaaauguccaaaguauguaaaaagcacaaaauugagacuggccacaggauugaggaaugucccaucuauucaaucuagaggccuauucggggccauugccggcuucauugaagggggguggacagggaugguagauggaugguacgguuaucaccaucaaaaugagcaggggucaggauaugcagccgaccugaagagcacacaaaaugccauugacaaaauuacuaacaaaguaaauucuguuauugaaaagaugaauacacaguucacagcaguggguaaagaguucaaccaccuggaaaaaagaauagagaauuuaaauaaaaaaguugaugaugguuuccuggacauuuggacuuacaaugccgaacugcugguucuauuggaaaaugaaagaacuuuggacuaccacgauucaaaugugaagaacuuguaugaaaagguaagaaaccaguuaaaaaacaaugccaaggaaauuggaaacggcugcuuugaauuuuaccacaaaugcgauaacacgugcauggaaagugucaaaaaugggacuuaugacuacccaaaauacucagaggaagcaaaauuaaacagagaaaaaauagaugggguaaagcuggaaucaacaaggauuuaccagauuuuggcgaucuauucaacugucgccaguucauugguacugguagucucccugggggcaaucagcuucuggaugugcucuaaugggucucuacaguguagaauauguauuuaa

SEQ ID NO: 44420 - RNA, 1701 nt, Artificial Sequence; identical to SEQ ID NO: 44416
  derived and/or modified CDS sequence (wt) from hemagglutinin__InfluenzaA__AIC73777

SEQ ID NO: 44421 - RNA, 1701 nt, Artificial Sequence
  derived and/or modified CDS sequence (wt) from hemagglutinin__InfluenzaA__AIC73778
augaagacuaucauugcuuugagcuacauucuaugucugguuuucgcucaaaaacuuccuggaaaugacaauagcacggcaacgcugugccuugggcaccaugcaguaccaaacggaacgauagugaaaacaaucacgaaugaccgaauugaaguuacuaaugcuacugagcugguucagaauuccucaauaggugaaauaugcgacaguccucaucagauccuugauggagaaaacugcacacuaauagaugcucuauugggagacccucagugugauggcuuucaaaauaagaaaugggaccuuuuuguugaacgaagcaaagcccacagcaacuguuacccuuaugaugugccggauuaugccucccuuaggucacuaguugccucauccggcacacuagaguuuaacaaugaaagcuucaauuggacuggagucacucaaaacggaacaaguucugcuugcauaaggagaucuaauaguaguuucuuuaguagauuaaauugguugacccacuuaaacuucaaauacccagcauugaacgugacuaugccaaacaaugaacaauuugacaaauuguacauuugggggguucaccacccggguacggacaaggaccaaaucuuccuguaugcucaaucaucaggaagaaucacaguaucuaccaaaagaagccaacaagcuguaaucccaaauaucggaucuagacccagaauaaggaauaucccuagcagaauaagcaucuauuggacaauaguaaaaccgggagacauacuuuugauuaacagcacagggaaucuaauugcuccuagggguuacuucaaaauacgaagugggaaaagcucaauaaugagaucagaugcacccauuggcaaaugcaagucugaaugcaucacuccaaauggaagcauucccaaugacaaaccauuccaaaauguaaacagaaucacauacggggccugucccagauauguuaagcaaagcacucugaaacuggcaacaggaaugcgaaauguaccagagaaacaaacuagaggcauauuuggcgcaauagcggguuucauagaaaaugguugggagggaaugguggaugguugguacgguuucaggcaucaaaauucugagggaagaggacaagcagcagaucucaaaagcacucaagcagcaaucgaucaaaucaaugggaagcugaaucgauugaucgggaaaaccaacgagaaauuccaucagauugaaaaagaauucucagaaguagaagggagaauucaggaccuugagaaauauguugaggacacuaaaauagaucucuggucauacaacgcggagcuucuuguugcccuggagaaccaacauacaauugaucuaacugacucagaaaugaacaaacuguuugaaaaaacaaagaagcaacugagggaaaaugcugaggauaugggcaaugguuguuucaaaauauaccacaaaugugacaaugccugcauaggaucaauaagaaauggaacuuaugaccacaauguguacagggaugaagcauuaaacaaccgguuccagaucaagggaguugagcugaagucaggguacaaagauuggauccuauggauuuccuuugccauaucauguuuuuugcuuuguguugcuuuguugggguucaucaugugggccugccaaaagggcaacauuaggugcaacauuugcauuuga

SEQ ID NO: 44422 - RNA, 1701 nt, Artificial Sequence; identical to SEQ ID NO: 44421
  derived and/or modified CDS sequence (wt) from hemagglutinin__InfluenzaA__AIC73779

SEQ ID NO: 44423 - RNA, 1701 nt, Artificial Sequence; identical to SEQ ID NO: 44421
  derived and/or modified CDS sequence (wt) from hemagglutinin__InfluenzaA__AIC73780

SEQ ID NO: 44424 - RNA, 1701 nt, Artificial Sequence
  derived and/or modified CDS sequence (wt) from hemagglutinin__InfluenzaA__AIC73781
augaaggcaauacuaguaguucugcuauauacauuugcaaccgcaaaugcagacacauuauguauagguuaucaugcgaacaauucaacagacacuguagacacaguacuagaaaagaauguaacaguaacacacucuguuaaccuucuagaagacaagcauaacgggaaacuaugcaaacuaagagggguagccccauugcauuuggguaaauguaacauugcuggcuggauccugggaaauccagagugugaaucacucuccacagcaaguucaugguccuacauuguggaaacaucuaauucagacaauggaacguguuacccaggagauuucaucaauuaugaggagcuaagagagcaauugagcucagugucaucauuugaaagguuugagauauuccccaagacaaguucauggcccaaucaugacucgaacaaagguguaacggcagcauguccucacgcuggagcaaaaagcuucuacaaaaauuuaauauggcuaguuaaaaaaggaaauucauauccaaagcucagccaauccuacauuaaugauaaagggaaagaaguccucgugcuguggggcauucaccacccaucuacuacugcugaccaacaaagucucuaucagaaugcagaugcauauguuuuuguggggacaucaagauacagcaagaaguucaagccggaaauagcaauaagacccaaagugagggaucaagaagggagaaugaacuauuacuggacacuaguagagccgggagacaaaauaacauucgaagcaacuggaaaucuagugguaccgagauaugcauucacaauggaaagaaaugcuggaucugguauuaucauuucagauacaccaguccacgauugcaauacaacuugucagacacccgagggugcuauaaacaccagccucccauuucagaauauacauccgaucacaauuggaaaauguccaaaguauguaaaaagcacaaaauugagacuggccacaggauugaggaaugucccgucuauucaaucuagaggccuauucggggccauugccggcuucauugaaggaggguggacagggaugguagauggaugguacgguuaucaccaucaaaaugagcaggggucaggauaugcagccgaccugaagagcacacaaaaugccauugacaagauuacuaacaaaguaaauucuguuauugaaaagaugaauacacaguucacagcaguggguaaagaguucaaccaccuggaaaaaagaauagagaauuuaaauaaaaaaguugaugaugguuuccuggacauuuggacuuacaaugccgaacuguugguucuauuggaaaaugaaagaacuuuggacuaccacgauucaaaugugaagaacuuguaugaaaagguaagaaaccaguuaaaaaacaaugccaaggaaauuggaaacggcugcuuugaauuuuaccacaaaugcgauaacacgugcauggaaagugucaaaaaugggacuuaugacuacccaaaauauucagaggaagcaaaauuaaacagagaaaaaauagaugggguaaagcuggaaucaacaaggauuuaccagauuuuggcgaucuauucaacugucgccaguucauugguacugguagucucccugggggcaaucagcuucuggaugugcucuaaugggucucuacaguguagaauauguauuuaa

SEQ ID NO: 44425 - RNA, 1701 nt, Artificial Sequence
  derived and/or modified CDS sequence (wt) from hemagglutinin__InfluenzaA__AIC73782
augaagacuaucauugcuuugagcuacauucuaugucugguuuucgcucaaaaacuuccuggaaaugacaacagcacggcaacgcugugccuugggcaccaugcaguaccaaacggaacgauagugaaaacaaucacgaaugaccgaauugaaguuacuaaugcuacugagcugguucagaauuccucaauaggugaaauaugcgacaguccucaucagauccuugauggagaaaacugcacacuaauagaugcucuauugggagacccucagugugauggcuuucaaaauaagaaaugggaccuuuuuguugaacgaagcaaagcccacagcaacuguuacccuuaugaugugccggauuaugccucccuuaggucacuaguugccucauccggcacacuagaguuuaacaaugaaagcuucaauuggacuggagucacucaaaacggaacaaguucugcuugcauaaggagaucuaauaguaguuucuuuaguagauuaaauugguugacccacuuaaacuucaaauacccagcauugaacgugacuaugccaaacaaugaacaauuugacaaauuguacauuugggggguucaccacccggguacggacaaggaccaaaucuuccuguaugcucaaucaucaggaagaaucacaguaucuaccaaaagaagccaacaagcuguaaucccaaauaucggaucuagacccagaauaaggaauaucccuagcagaauaagcaucuauuggacaauaguaaaaccgggagacauacuuuugauuaacagcacagggaaucuaauugcuccuagggguuacuucaaaauacgaagugggaaaagcucaauaaugagaucagaugcacccauuggcaaaugcaagucugaaugcaucacuccaaauggaagcauucccaaugacaaaccauuccaaaauguaaacagaaucacauacggggccugucccagauauguuaagcaaagcacucugaaacuggcaacaggaaugcgaaauguaccagagaaacaaacuagaggcauauuuggcgcaauagcggguuucauagaaaaugguugggagggaaugguggaugguugguacgguuucaggcaucaaaauucugagggaagaggacaagcagcagaucucaaaagcacucaagcagcaaucgaucaaaucaaugggaagcugaaucgauugaucgggaaaaccaacgagaaauuccaucagauugaaaaagaauucucagaaguagaagggagaauucaggaccuugagaaauauguugaggacacuaaaauagaucucuggucauacaacgcggagcuucuuguugcccuggagaaccaacauacaauugaucuaacugacucagaaaugaacaaacuguuugaaaaaacaaagaagcaacugagggaaaaugcugaggauaugggcaaugguuguuucaaaauauaccacaaaugugacaaugccugcauaggaucaauaagaaauggaacuuaugaccacaauguguacagggaugaagcauuaaacaaccgguuccagaucaagggaguugagcugaagucaggguacaaagauuggauccuauggauuuccuuugccauaucauguuuuuugcuuuguguugcuuuguugggguucaucaugugggccugccaaaagggcaacauuaggugcaacauuugcauuuga

SEQ ID NO: 44426 - RNA, 1701 nt, Artificial Sequence; identical to SEQ ID NO: 44421
  derived and/or modified CDS sequence (wt) from hemagglutinin__InfluenzaA__AIC73783

SEQ ID NO: 44427 - RNA, 1701 nt, Artificial Sequence; identical to SEQ ID NO: 44421
  derived and/or modified CDS sequence (wt) from hemagglutinin__InfluenzaA__AIC73784

SEQ ID NO: 44428 - RNA, 1701 nt, Artificial Sequence
  derived and/or modified CDS sequence (wt) from hemagglutinin__InfluenzaA__AIC73785
augaaggcaauacuaguaguucugcuauauacauuugcaaccgcaaaugcagacacauuauguauagguuaucaugcgaacaauucaacagauacuguagacacaguacuagaaaagaauguaacaguaacacacucuguuaaccuucuagaagacaagcauaacgggaaacuaugcaaacuaagagggguagccccauugcauuuggguaaauguaacauugcuggcuggauccugggaaauccagagugugaaucacucuccacagcaaguucaugguccuacauuguggaaacaucuaguucagacaauggaacauguuacccaggagauuucaucaauuaugaggagcuaagagagcaauugagcucagugucaucauuugaaagguuugagauauuccccaagacgaguucauggcccaaucaugacucgaacaaagguguaacggcagcauguccucacgcuggagcaaaaagcuucuacaaaaauuuaauauggcuaguuaaaaaaggaaauucauacccaaagcucagccaauccuacauuaaugauaaagggaaagaaguccucgugcuguggggcauucaccauccaucuacuacugcugaccaacaaagucucuaucagaaugcagaugcauauguuuuuguggggacaucaagauacagcaagaaguucaagccggaaauagcaauaagacccaaagugagggaucaagaagggagaaugaacuauuacuggacacuaguagagccgggagacaaaauaacauucgaagcaacuggaaaucuagugguaccgagauaugcauucacaauggaaagaaaugcuggaucugguauuaucauuucagauacaccaguccacgauugcaauacaacuugucagacacccgaaggugcuauaaacaccagccucccauuucagaauauacauccgaucacaauuggaaaauguccaaaguauguaaaaagcacaaaauugagacuggccacaggauugaggaaugucccgucuauucaaucuagaggccuauucggggccauugccggcuucauugaagggggguggacagggaugguagauggaugguacggcuaucaccaucaaaaugagcaggggucaggauaugcagccgaccugaagagcacacaaaaugccauugacaagauuacuaacaaaguaaauucuguuauugaaaagaugaauacacaguucacagcaguggguaaagaguucaaccaccuggaaaaaagaauagagaauuuaaauaaaaaaguugaugaugguuuccuggacauuuggacuuacaaugccgaacuguugguuuuauuggaaaaugaaagaacuuuggacuaccacgauucaaaugugaagaacuuguaugaaaagguaagaaaccaguuaaaaaacaaugccaaggaaauuggaaacggcugcuuugaauuuuaccacaaaugcgauaacacgugcauggaaagugucaaaaaugggacuuaugacuacccaaaauacucagaggaagcaaaauuaaacagagaaaaaauagaugggguaaagcuggaaucaacaaggauuuaccagauuuuggcgaucuauucaacugucgccaguucauugguacugguagucucccugggggcaaucagcuucuggaugugcucuaaugggucucuacaguguagaauauguauuuaa

SEQ ID NO: 44429 - RNA, 1701 nt, Artificial Sequence; identical to SEQ ID NO: 44421
  derived and/or modified CDS sequence (wt) from hemagglutinin__InfluenzaA__AIC73786

SEQ ID NO: 44430 - RNA, 1701 nt, Artificial Sequence
  derived and/or modified CDS sequence (wt) from hemagglutinin__InfluenzaA__AIC73787
augaaggcaauacuaguaguucugcuauacacauuugcaaccgcaaaugcagacacauuauguauagguuaucaugcgaacaauucaacagacacuguagacacaguacuagaaaagaauguaacaguaacacacucuguuaaccuucuagaagacaagcauaacgggaaacuaugcaaacuaagagggguagccccauugcauuuggguaaauguaacauugcuggcuggauccugggaaauccagagugugaaucacucuccacagcaaguucaugguccuacauuguggaaacaucuaguucagacaauggaacguguuacccaggagauuucaucaauuaugaggagcuaagggagcaauugagcucagugucaucauuugagagauuugagauauuccccaagacaaguucauggcccaaucaugacucgaacaaagguguaacggcagcauguccucacgcuggagcaaaaagcuucuacaaaaauuuaauauggcuaguuaaaaaaggaaauucauacccaaagcucagccaauccuacauuaaugauaaagggaaagaaguccucguacuguggggcauucaccauccaucuacuacugcugaccaacaaagucucuaucagaaugcagaugcauauguuuuuguggggacaucaagauacagcaagaaguucaagccggaaauagcaauaagacccaaagugagagaucaagaagggagaaugaacuauuacuggacacuaguagagccgggagacaaaauaacauucgaagcaacuggaaaucuagugguaccgagauaugcauucacaauggaaagaaaugcuggaucugguauuaucauuucagauacaccaguccacgauugcaauacaacuugucagacacccgagggugcuauaaacaccagccucccauuucagaauauacauccgaucacaauugggaaauguccaaaguauguaaaaagcacaaaauugagacuggccacaggauugaggaaugucccaucuauucaaucuagaggccuauucggggccauugccggcuucauugaagggggguggacagggaugguagauggaugguacgguuaucaccaucaaaaugagcaggggucaggauaugcagccgaccugaagagcacacaaaaugccauugacaaaauuacuaacaaaguaaauucuguuauugaaaagaugaauacacaguucacagcaguggguaaagaguucaaccacuuggaaaaaagaauagagaauuuaaauaaaaaaguugaugaugguuuccuggacauuuggacuuacaaugccgaacugcugguucuauuggaaaaugaaagaacuuuggacuaccacgauucaaaugugaagaacuuguaugaaaagguaagaaaccaguuaaaaaacaaugccaaggaaauuggaaacggcugcuuugaauuuuaccacaaaugcgauaacacgugcauggaaagugucaaaaaugggacuuaugacuacccaaaauacucagaggaagcaaaauuaaacagagaaaaaauagaugggguaaagcuggaaucaacaaggauuuaccagauuuuggcgaucuauucaacugucgccaguucauugguacugguagucucccugggggcaaucagcuucuggaugugcucuaaugggucucuacaguguagaauauguauuuaa

SEQ ID NO: 44431 - RNA, 1701 nt, Artificial Sequence; identical to SEQ ID NO: 44418
  derived and/or modified CDS sequence (wt) from hemagglutinin__InfluenzaA__AIC73788

SEQ ID NO: 44432 - RNA, 1701 nt, Artificial Sequence
  derived and/or modified CDS sequence (wt) from hemagglutinin__InfluenzaA__AIC73789
augaagacuaucauugcuuugagcuacauucuaugucugguuuucgcucaaaaaccuccuggaaaugacaauagcacggcaacgcugugccuugggcaccaugcaguaccaaacggaacgauagugaaaacaaucacgaaugaccgaauugaaguuacuaaugcuacugagcugguucagaauuccucaauaggugaaauaugcgacaguccucaucagauccuugauggagaaaacugcacacuaauagaugcucuauugggagacccucagugugauggcuuucaaaauaagaaaugggaccuuuuuguugaacgaagcaaagccuacagcaacuguuacccuuaugaugugccggauuaugccucccuuaggucacuaguugccucauccggcacacuggaguuuaacaaugaaagcuucaauugggcuggagucacucaaaacggaacaaguucugcuugcauaaggggaucuaauaguaguuucuuuaguagauuaaauugguugacccacuuaaacuucaaauacccagcauugaacgugacuaugccaaacaaugaacaauuugacaaauuguacauuugggggguucaccacccggguacggacaaggaccaaaucuuccuguaugcucaaucaucaggaagaaucacaguaucuaccaaaagaagucaacaagcuguaaucccgaauaucggaucuagacccagaauaaggaauaucccuagcagaauaagcaucuauuggacaauaguaaaaccgggagacauacuuuugauuaacagcacagggaaucuaauugcuccuagggguuacuucaaaauacgaagugggaaaagcucaauaaugagaucagaugcacccauuggcaaaugcaagucugaaugcaucacuccaaauggaagcauucccaaugacaaaccauuccaaaauguaaacaggaucacauacggggcuugucccagauauguuaagcaaagcacucugaaauuggcaacaggaaugcgaaauguaccagagaaacaaacuagaggcauauuuggcgcaauagcggguuucauagaaaaugguugggagggaaugguggaugguugguacgguuucaggcaccaaaauucugagggaagaggacaagcagcagaucucaaaagcacucaagcagcaaucgaucaaaucaaugggaagcugaaucgauugaucgggaaaaccaacgagaaauuccaucagauugaaaaagaauucucagaaguagaagggagaauucaggaccuugagaaauauguugaggacacaaaaauagaucucuggucauacaacgcggagcuucuuguugcccuggagaaccaacauacaauugaucuaacugacucagaaaugaacaaacuguuugaaaaaacaaagaagcaacugagggaaaaugcugaggauaugggcaaugguuguuucaaaauauaccacaaaugugacaaugccugcauaggaucaaucagaaauggaacuuaugaccacgauguauacagggaugaagcauuaaacaaccgguuucagaucaagggaguugagcugaagucaggguacaaagauuggauccuauggauuuccuuugccauaucauguuuuuugcuuuguguuguuuuguugggguucaucaugugggccugccaaaagggcaacauuaggugcaacauuugcauuuga

SEQ ID NO: 44433 - RNA, 1701 nt, Artificial Sequence
  derived and/or modified CDS sequence (wt) from hemagglutinin__InfluenzaA__AIC73790
augaaggcaauacuaguaguucugcuauauacauuugcaaccacaaaugcagacacauuauguauagguuaucaugcgaacaauucaacagacacuguagacacaguacuagaaaagaauguaacaguaacacacucuguuaaccuucuagaagacaagcauaacgggaaacuaugcaaacuaagagggguagccccauugcauuuggguaaauguaacauugcuggcuggauccugggaaauccagagugugaaucacucuccacagcaaguucaugguccuacauuguggaaacaucuaguucagacaauggaacguguuacccaggagauuucaucaauuaugaggagcuaagagagcaauugagcucagugucaucauuugaaagguuugagauauuccccaagacaaguucauggcccaaucaugacucgaacaaagguguaacggcagcaugcccucacgcuggagcaaaaagcuucuacaaaaauuuaauauggcuaguuaaaaaaggaaauucauacccaaagcuccgccaauccuacauuaaugauaaagggaaagaaguccucgugcuguggggcauucaccacccaucuacuacuacugaccaacaaagucucuaucagaaugcagaugcauauguuuuuguggggacaucaagauacagcaagaaguucaagccggaaauagcaauaagacccaaagugagggaucaagaagggagaaugaacuauuacuggacacuaguagagccgggagacaaaauaacauucgaagcaacuggaaaucuagugguaccgagauaugcauucacaauggaaagaaaugcuggaucugguauuaucauuucagauacaccaguccacgauugcaauacaacuugucagacacccgagggugcuauaaacaccagccucccauuucagaauauacauccgaucacaauuggaaaauguccaaaguauguaaaaagcacaaaauugagacuggccacaggauugaggaaugucccgucuauucaaucuagaggccuauucggggccauugccggcuucauugaaggaggguggacagggaugguagauggaugguacgguuaucaccaucaaaaugagcaggggucaggauaugcagccgaccugaagagcacacaaaaugccauugacaagauuacuaacaaaguaaauucuguuauugaaaagaugaauacacaguucacagcaguggguaaagaguucaaccaccuggaaaaaagaauagagaauuuaaauaaaaaaguugaugaugguuuccuggacauuuggacuuacaaugccgaacuguugguucuauuggaaaaugaaagaacuuuggacuaccacgauucaaaugugaagaacuuguaugaaaagguaagaaaccaguuaaaaaacaaugccaaggaaauuggaaacggcugcuuugaauuuuaccacaaaugcgauaacacgugcauggaaagugucaaaaaugggacuuaugacuacccaaaauacucagaggaagcaaaauuaaacagagaaaaaauagaugggguaaagcuggaaucaacaaggauuuaccagauuuuggcgaucuauucaacugucgccaguucauugguacugguagucucccugggggcaaucagcuucuggaugugcucuaaugggucucuacaguguagaauauguauuuaa

SEQ ID NO: 44434 - RNA, 1701 nt, Artificial Sequence
  derived and/or modified CDS sequence (wt) from hemagglutinin__InfluenzaA__AIC73791
augaaggcaauacuaguaguucugcuauauacauuugcaaccgcaaaugcagacacauuauguauagguuaucaugcgaacaauucaacagauacuauagacacaguacuagaaaagaauguaacaguaacacacucuguuaaccuucuagaagacaagcauaacgggaaacuaugcaaacuaagagggguagccccauugcauuuggguaaauguaacauugcuggcuggauccugggaaauccagagugugaaucacucuccacagcaaguucaugguccuacauuguggaaacaucuaguucagacaauggaacauguuacccaggagauuucaucaauuaugaggagcuaagagagcaauugagcucagugucaucauuugaaagguuugagauauuccccaagacgaguucauggcccaaucaugacucgaacaaagguguaacggcagcaugcccucacgcuggagcaaaaagcuucuacaaaaauuuaauauggcuaguuaaaaaaggaaauucauacccaaagcucagccaauccuacauuaaugauaaagggaaagaaguccucgugcuguggggcauucaccauccaucuacuacugcugaccaacaaagucucuaucagaaugcagaugcauauguuuuuguggggacaucaagauacagcaagaaguucaagccggaaauagcaauaagacccaaagugagggaucaagaagggagaaugaacuauuacuggacacuaguagagccgggagacaaaauaacauucgaagcaacuggaaaucuagugguaccgagauaugcauucacaauggaaagaaaugcuggaucugguauuaucauuucagauacaccaguccacgauugcaauacaacuugucagacacccgaaggugcuauaaacaccagccucccauuucagaauauacauccgaucacaauuggaaaauguccaaaguauguaaaaagcacaaaauugagacuggccacaggauugaggaaugucccgucuauucaaucuagaggccuauucggggccauugccggcuucauugaagggggguggacagggaugguagauggaugguacgguuaucaccaucaaaaugagcaggggucaggauaugcagccgaccugaagagcacacaaaaugccauugacaagauuacuaacaaaguaaauucuguuauugaaaagaugaauacacaguucacagcaguggguaaagaguucaaccaccuggaaaaaagaauagagaauuuaaauaaaaaaguugaugaugguuuccuggacauuuggacuuacaaugccgaacuguugguucuauuggaaaaugaaagaacuuuggacuaccacgauucaaaugugaagaacuuguaugaaaagguaagaaaccaguuaaaaaacaaugccaaggaaauuggaaacggaugcuuugaauuuuaccacaaaugcgauaacacgugcauggaaagugucaaaaaugggacuuaugacuacccaaaauacucagaggaagcaaaauuaaacagagaaaaaauagaugggguaaagcuggaaucaacaaggauuuaccagauuuuggcgaucuacucaacugucgccaguucauugguacugguagucucccugggggcaaucagcuucuggaugugcucuaaugggucucuacaguguagaauauguauuuaa

SEQ ID NO: 44435 - RNA, 1701 nt, Artificial Sequence; identical to SEQ ID NO: 44428
  derived and/or modified CDS sequence (wt) from hemagglutinin__InfluenzaA__AIC73792

SEQ ID NO: 44436 - RNA, 1701 nt, Artificial Sequence
  derived and/or modified CDS sequence (wt) from hemagglutinin__InfluenzaA__AIC73793
augaaggcaauacuaguaguucugcuauauacauuugcaaccgcaaaugcagacacauuauguauagguuaucaugcgaacaauucaacagacacuguagacacaguacuagaaaagaauguaacaguaacacacucuguuaaccuucuagaagacaagcauaacgggaaacuaugcaaacuaagagggguagccccauugcauuuggguaaauguaacauugcuggcuggauccugggaaauccagagugugaaucacucuccacagcaaguucaugguccuacauuguggaaacaucuaguucagacaauggaacguguuacccaggagauuucaucaauuaugaggagcuaagagagcaauugagcucagugucaucauuugaaagguuugagauauuccccaagacaaguucauggcccaaucaugacucgaacaaagguguaacggcagcauguccucacgcuggagcaaaaagcuucuacaaaaauuuaauauggcuaguuaaaaaaggaaauucauacccaaagcucagccaauccuacauuaaugauaaagggaaagaaguccucgugcuguggggcauucaccacccaucuacuacugcugaccaacaaagucucuaucagaaugcagaugcauauguuuuuguggggacaucaagauacagcaagaaguucaagccggaaauagcaauaagacccaaagugagggaucaagaagggagaaugaacuacuacuggacacuaguagagccgggagacaaaauaacauucgaagcaacuggaaaucuagugguaccgagauaugcauucacaauggaaagaaaugcuggaucugguauuaucauuucagauacaccaguccacgauugcaauacaacuugucagacacccgagggugcuauaaacaccagccuuccauuucagaauauacauccgaucacaauuggaaaauguccaaaguauguaaaaagcacaaaauugagacuggccacaggauugaggaaugucccgucuauucaaucuagaggccuauucggggccauugccggcuucauugaagggggguggacagggaugguagauggaugguacgguuaucaccaucaaaaugagcaggggucaggauaugcagccgaccugaagagcacacaaaaugccauugacaagauuacuaacaaaguaaauucuguuauugaaaagaugaauacacaguucacagcaguggguaaagaguucaaccaccuggaaaaaagaauagagaauuuaaauaaaaaaguugaugaugguuuccuggacauuuggacuuacaaugccgaacuguugguucuauuggaaaaugaaagaacuuuggauuaccacgauucaaaugugaagaacuuguaugaaaagguaagaaaccaguuaaaaaacaaugccaaggaaauuggaaacggcugcuuugaauuuuaccacaaaugcgauaacacgugcauggaaagugucaaaaaugggacuuaugacuacccaaaauacucagaggaggcaaaauuaaacagagaaaaaauagaugggguaaaacuggaaucaacaaggguuuaccagauuuuggcgaucuauucaacugucgccaguucauugguacugguagucucccugggggcaaucagcuucuggaugugcucuaaugggucucuacaguguagaauauguauuuaa

SEQ ID NO: 44437 - RNA, 1701 nt, Artificial Sequence
  derived and/or modified CDS sequence (wt) from hemagglutinin__InfluenzaA__AIC73794
augaagacuaucauuggagugagcuacauucuaugucugguuuucgcucaaaaacuuccuggaaaugacaauagcacggcaacgcugugccuugggcaccaugcaguaccaaacggaacgauagugaaaacaaucacgaaugaccgaauugaaguuacuaaugcuacugagcugguucagaauuccucaauaggugaaauaugcgacaguccucaucagauccuugauggagaaaacugcacacuaauagaugcucuauugggagacccucagugugauggcuuucaaaauaagaaaugggaccuuuuuguugaacgaagcaaagccuacagcaacuguuacccuuaugaugugccggauuaugccucccuuaggucacuaguugccucauccggcacacuggaguuuaacaaugaaagcuucaauugggcuggagucacucaaaacggaacaaguucuucuugcauaaggggaucuaauaguaguuucuuuaguagauuaaauugguugacccacuuaaacuccaaauacccagcauuaaacgugacuaugccaaacaaugaacaauuugacaaauuguacauuugggggguucaccacccggguacggacaaggaccaaaucuuccuguaugcacaaucaucaggaagaaucacaguaucuaccaaaagaagccaacaagcuguaaucccgaauaucggaucuagacccagaauaagggauaucccuagcagaauaagcaucuauuggacaauaguaaaaccgggagacauacuuuugauuaacagcacagggaaucuaauugcuccuagggguuacuucaaaauacgaagugggaaaagcucaauaaugagaucagaugcacccauuggcaaaugcaagucugaaugcaucacuccaaauggaagcauucccaaugacaaaccauuccaaaauguaaacaggaucacauacggggccugucccagauauguuaagcaaagcacucugaaauuggcaacaggaaugcgaaauguaccagagagacaaacuagaggcauauuuggcgcaauagcggguuucauagaaaaugguugggagggaaugguggaugguugguacggcuucaggcaucaaaauucugagggaagaggacaagcagcagaucucaaaagcacucaagcagcaaucgaucaaaucaaugggaagcugaaucgauugaucgggaaaaccaacgagaaauuccaucagauugaaaaagaauucucagaaguagaagggagaauucaggaccuugagaaauauguugaggacacaaaaauagaucucuggucauacaacgcggagcuucuuguugcccuggagaaccaacauacaauugaucuaacugacucagaaaugaacaaacuguuugaaaaaacaaagaagcaacugagggaaaaugcugaggauaugggcaaugguuguuucaaaauauaccacaaaugugacaaugccugcauaggaucaaucagaaauggaacuuaugaccacgauguauacagggaugaagcauuaaacaaccgguuccagaucaagggaguugagcugaagucaggguacaaagauuggauccuauggauuuccuuugccauaucauguuuuuugcuuuguguugcuuuguugggguucaucaugugggccugccaaaagggcaacauuaggugcaacauuugcauuuga

SEQ ID NO: 44438 - RNA, 1701 nt, Artificial Sequence
  derived and/or modified CDS sequence (wt) from hemagglutinin__InfluenzaA__AIC73796
augaaggcaauacuaguaguucugcuauauacauuugcaaccgcaaaugcagacacauuauguauagguuaucaugcgaacaauucaacagauacuguagacacaguacuagaaaagaauguaacaguaacacacucuguuaaccuucuagaagacaagcauaacgggaaacuaugcaaacuaagagggguagccccauugcauuuggguaaauguaacauugcuggcuggauccugggaaauccagagugugaaucacucuccacagcaaguucaugguccuacauuguggaaacaucuaguucagacaauggaacauguuacccaggagauuucaucaauuaugaggagcuaagagagcaauugagcucagugucaucauuugaaagguuugagauauuccccaagacgaguucauggcccaaucaugacucgaacaaagguguaacggcagcaugcccucacgcuggagcaaaaagcuucuacaaaaauuuaauauggcuaguuaaaaaaggaaauucauacccaaagcucagccaauccuacauuaaugauaaagggaaagaaguccucgugcuguggggcauucaccauccaucuacuacugcugaccaacaaagucucuaucagaaugcagaugcauauguuuuuguggggacaucaagauacagcaagaaguucaagccggaaauagcaauaagacccaaagugagggaucaagaagggagaaugaacuauuacuggacacuaguagagccgggagacaaaauaacauucgaagcaacuggaaaucuagugguaccgagauaugcauucacaauggaaagaaaugcuggaucugguauuaucauuucagauacaccaguccacgauugcaauacaacuugucagacacccgaaggugcuauaaacaccagccucccauuucagaauauacauccgaucacaauuggaaaauguccaaaguauguaaaaagcacaaaauugagacuggccacaggauugaggaaugucccgucuauucaaucuagaggccuauucggggccauugccggcuucauugaagggggguggacagggaugguagauggaugguacgguuaucaccaucaaaaugagcaggggucaggauaugcagccgaccugaagagcacacaaaaugccauugacaagauuacuaacaaaguaaauucuguuauugaaaagaugaauacacaguucacagcaguggguaaagaguucaaccaccuggaaaaaagaauagagaauuuaaauaaaaaaguugaugaugguuuccuggacauuuggacuuacaaugccgaacuguugguucuauuggaaaaugaaagaacuuuggacuaccacgauucaaaugugaagaacuuguaugaaaagguaagaaaccaguuaaaaaacaaugccaaggaaauuggaaacggaugcuuugaauuuuaccacaaaugcgauaacacgugcauggaaagugucaaaaaugggacuuaugacuacccaaaauacucagaggaagcaaaauuaaacagagaaaaaauagaugggguaaagcuggaaucaacaaggauuuaccagauuuuggcgaucuacucaacugucgccaguucauugguacugguagucucccugggggcaaucagcuucuggaugugcucuaaugggucucuacaguguagaauauguauuuaa

SEQ ID NO: 44439 - RNA, 1701 nt, Artificial Sequence
  derived and/or modified CDS sequence (wt) from hemagglutinin__InfluenzaA__AIC73797
augaagacuaucauugcuuugagcuacauucuaugucugguuuucgcucaaaaacuuccuggaaaugacaauagcacggcaacgcugugccuugggcaccaugcaguaccaaacggaacgauagugaaaacaaucacgaaugaccgaauugaaguuacuaaugcuacugagcugguucagaauuccucaauaggugaaauaugcgacaguccucaucagauccuugauggagaaaacugcacacuaauagaugcucuauugggagacccucagugugauggcuuucaaaauaagaaaugggaccuuuuuguugaacgaagcaaagccuacagcaacuguuacccuuaugaugugccggauuaugccucccuuaggucacuaguugccucauccggcacacuggaguuuaacaaugaaagcuucaauugggcuggagucacucaaaacggaacaaguucuucuugcauaaggggaucuaauaguaguuucuuuaguagauuaaauugguugacccacuuaaacuccaaauacccagcauuaaacgugacuaugccaaacaaugaacaauuugacaaauuguacauuugggggguucaccacccggguacggacaaggaccaaaucuuccuguaugcacaaucaucaggaagaaucacaguaucuaccaaaagaagccaacaagcuguaaucccgaauaucggaucuagacccagaauaagggauaucccuagcagaauaagcaucuauuggacaauaguaaaaccgggagacauacuuuugauuaacagcacagggaaucuaauugcuccuagggguuacuucaaaauacgaagugggaaaagcucaauaaugagaucagaugcacccauuggcaaaugcaagucugaaugcaucacuccaaauggaagcauucccaaugacaaaccauuccaaaauguaaacaggaucacauacggggccugucccagauauguuaagcaaagcacucugaaauuggcaacaggaaugcgaaauguaccagagagacaaacuagaggcauauuuggcgcaauagcggguuucauagaaaaugguugggagggaaugguggaugguugguacggcuucaggcaucaaaauucugagggaagaggacaagcagcagaucucaaaagcacucaagcagcaaucgaucaaaucaaugggaagcugaaucgauugaucgggaaaaccaacgagaaauuccaucagauugaaaaagaauucucagaaguagaagggagaauucaggaccuugagaaauauguugaggacacaaaaauagaucucuggucauacaacgcggagcuucuuguugcccuggagaaccaacauacaauugaucuaacugacucagaaaugaacaaacuguuugaaaaaacaaagaagcaacugagggaaaaugcugaggauaugggcaaugguuguuucaaaauauaccacaaaugugacaaugccugcauaggaucaaucagaaauggaacuuaugaccacgauguauacagggaugaagcauuaaacaaccgguuccagaucaagggaguugagcugaagucaggguacaaagauuggauccuauggauuuccuuugccauaucauguuuuuugcuuuguguugcuuuguugggguucaucaugugggccugccaaaagggcaacauuaggugcaacauuugcauuuga

SEQ ID NO: 44440 - RNA, 1701 nt, Artificial Sequence
  derived and/or modified CDS sequence (wt) from hemagglutinin__InfluenzaA__AIC73798
augaagacuaucauugcuuugagcuacauucuaugucugguuuucgcucaaaaacuuccuggaaaugacaauagcacggcaacgcugugccuugggcaccaugcaguaccaaacggaacgauagugaaaacaaucacgaaugaccgaauugaaguuacuaaugcuacugagcugguucagaauuccucaauaggugaaauaugcgacaguccucaucagauccuugauggagaaaacugcacacuaauagaugcucuauugggagacccucagugugauggcuuucaaaauaagaaaugggaccuuuuuguugaacgaagcaaagccuacagcaacuguuacccuuaugaugugccggauuaugccucccuuaggucacuaguugccucauccggcacacuggaguuuaacaaugaaagcuucaauugggcuggagucacucaaaacggaacaaguucuucuugcauaaggggaucuaauaguaguuucuuuaguagauuaaauugguugacccacuuaaacuccaaauacccagcauuaaacgugacuaugccaaacaaugaacaauuugacaaauuguacauuugggggguucaccacccggguacagacaaggaccaaaucuuccuguaugcacaaucaucaggaagaaucacaguaucuaccaaaagaagccaacaagcuguaaucccgaauaucggaucuagacccagaauaagggauaucccuagcagaauaagcaucuauuggacaauaguaaaaccgggagacauacuuuugauuaacagcacagggaaucuaauugcuccuagggguuacuucaaaauacgaagugggaaaagcucaauaaugagaucagaugcacccauuggcaaaugcaagucugaaugcaucacuccaaauggaagcauucccaaugacaaaccauuccaaaauguaaacaggaucacauacggggccugucccagauauguuaagcaaagcacucugaaauuggcaacaggaaugcgaaauguaccagagagacaaacuagaggcauauuuggcgcaauagcggguuucauagaaaaugguugggagggaaugguggaugguugguacggcuucaggcaucaaaauucugagggaagaggacaagcagcagaucucaaaagcacucaagcagcaaucgaucaaaucaaugggaagcugaaucgauugaucgggaaaaccaacgagaaauuccaucagauugaaaaagaauucucagaaguagaagggagaauucaggaccuugagaaauauguugaggacacaaaaauagaucucuggucauacaacgcggagcuucuuguugcccuggagaaccaacauacaauugaucuaacugacucagaaaugaacaaacuguuugaaaaaacaaagaagcaacugagggaaaaugcugaggauaugggcaaugguuguuucaaaauauaccacaaaugugacaaugccugcauaggaucaaucagaaauggaacuuaugaccacgauguauacagggaugaagcauuaaacaaccgguuccagaucaagggaguugagcugaagucaggguacaaagauuggauccuauggauuuccuuugccauaucauguuuuuugcuuuguguugcuuuguugggguucaucaugugggccugccaaaagggcaacauuaggugcaacauuugcauuuga

SEQ ID NO: 44441 - RNA, 1701 nt, Artificial Sequence
  derived and/or modified CDS sequence (wt) from hemagglutinin__InfluenzaA__AIC73800
augaagacuaucauugcuuugagcuacauucuaugucugguuuucgcucaaaaacuuccuggaaaugacaauagcacggcaacgcugugccuugggcaccaugcaguaccaaacggaacgauagugaaaacaaucacgaaugaccgaauugaaguuacuaaugcuacugagcugguucagaauuccucaauaggugaaauaugcgacaguccucaucagauccuugauggagaaaacugcacacuaauagaugcucuauugggagacccucagugugauggcuuucaaaauaagaaaugggaccuuuuuguugaacgaagcaaagccuacagcaacuguuacccuuaugaugugccggauuaugccucccuuaggucacuaguugccucauccggcacacuggaguuuaacaaugaaagcuucaauugggcuggagucacucaaaacggaacaaguucuucuugcauaaggggaucuaauaguaguuucuuuaguagauuaaauugguugacccacuuaaacuccaaauacccagcauuaaacgugacuaugccaaacaaugaacaauuugacaaauuguacauuugggggguucaccacccggguacggacaaggaccaaaucuuccuguaugcacaaucaucaggaagaaucacaguaucuaccaaaagaagccaacaagcuguaaucccgaauaucggaucuagacccagaauaagggauaucccuagcagaauaagcaucuauuggacaauaguaaaaccgggagacauacuuuugauuaacagcacagggaaucuaauugcuccuagggguuacuucaaaauacgaagugggaaaagcucaauaaugagaucagaugcacccauuggcaaaugcaagucugaaugcaucacuccaaauggaagcauucccaaugacaaaccauuccaaaauguaaacaggaucacauacggggcaugucccagauauguuaagcaaagcacucugaaauuggcaacaggaaugcgaaauguaccagagagacaaacuagaggcauauuuggcgcaauagcggguuucauagaaaaugguugggagggaaugguggaugguugguacggcuucaggcaucaaaauucugagggaagaggacaagcagcagaucucaaaagcacucaagcagcaaucgaucaaaucaaugggaagcugaaucgauugaucgggaaaaccaacgagaaauuccaucagauugaaaaagaauucucagaaguagaagggagaauucaggaccuugagaaauauguugaggacacaaaaauagaucucuggucauacaacgcggagcuucuuguugcccuggagaaccaacauacaauugaucuaacugacucagaaaugaacaaacuguuugaaaaaacaaagaagcaacugagggaaaaugcugaggauaugggcaaugguuguuucaaaauauaccacaaaugugacaaugccugcauaggaucaaucagaaauggaacuuaugaccacgauguauacagggaugaagcauuaaacaaccgguuccagaucaagggaguugagcugaagucaggguacaaagauuggauccuauggauuuccuuugccauaucauguuuuuugcuuuguguugcuuuguugggguucaucaugugggccugccaaaagggcaacauuaggugcaacauuugcauuuga

SEQ ID NO: 44442 - RNA, 1701 nt, Artificial Sequence; identical to SEQ ID NO: 44439
  derived and/or modified CDS sequence (wt) from hemagglutinin__InfluenzaA__AIC73801

SEQ ID NO: 44443 - RNA, 1701 nt, Artificial Sequence; identical to SEQ ID NO: 44440
  derived and/or modified CDS sequence (wt) from hemagglutinin__InfluenzaA__AIC73802

SEQ ID NO: 44444 - RNA, 1701 nt, Artificial Sequence; identical to SEQ ID NO: 44440
  derived and/or modified CDS sequence (wt) from hemagglutinin__InfluenzaA__AIC73803

SEQ ID NO: 44445 - RNA, 1701 nt, Artificial Sequence; identical to SEQ ID NO: 44439
  derived and/or modified CDS sequence (wt) from hemagglutinin__InfluenzaA__AIC73804

SEQ ID NO: 44446 - RNA, 1701 nt, Artificial Sequence; identical to SEQ ID NO: 44440
  derived and/or modified CDS sequence (wt) from hemagglutinin__InfluenzaA__AIC73805

SEQ ID NO: 44447 - RNA, 1701 nt, Artificial Sequence; identical to SEQ ID NO: 44440
  derived and/or modified CDS sequence (wt) from hemagglutinin__InfluenzaA__AIC73806

SEQ ID NO: 44448 - RNA, 1701 nt, Artificial Sequence
  derived and/or modified CDS sequence (wt) from hemagglutinin__InfluenzaA__AIC73807
augaaggcaauacuaguaguucugcuauauacauuugcaaccgcaaaugcagacacauuauguauagguuaucaugcgaacaauucaacagauacuguagacacaguacuagaaaagaauguaacaguaacacacucuguuaaccuucuagaagacaagcauaacgggaaacuaugcaaacuaagagggguagccccauugcauuuggguaaauguaacauugcuggcuggauccugggaaauccagagugugaaucacucuccacagcaaguucaugguccuacauuguggaaacaucuaguucagacaauggaacauguuacccaggagauuucaucaauuaugaggagcuaagagagcaauugagcucagugucaucauuugaaagguuugagauauuccccaagacgaguucauggcccaaucaugacucgaacaaagguguaacggcagcauguccucacgcuggagcaaaaagcuucuacaaaaauuuaauauggcuaguuaaaaaaggaaauucauacccaaagcucagccaauccuacauuaauaauaaagggaaagaaguccucgugcuguggggcauucaccauccaucuacuacugcugaccaacaaagucucuaucagaaugcagaugcauauguuuuuguggggacaucaagauacagcaagaaguucaagccggaaauagcaauaagacccaaagugagggaucaagaagggagaaugaacuauuacuggacacuaguagagccgggagacaaaauaacauucgaagcaacuggaaaucuagugguaccgagauaugcauucacaauggaaagaaaugcuggaucugguauuaucauuucagauacaccaguccacgauugcaauacaacuugucagacacccgaaggugcuauaaacaccagccucccauuucagaauauacauccgaucacaauuggaaaauguccaaaguauguaaaaagcacaaaauugagacuggccacaggauugaggaaugucccgucuauucaaucuagaggccuauucggggccauugccggcuucauugaagggggguggacagggaugguagauggaugguacgguuaucaccaucaaaaugagcaggggucaggauaugcagccgaccugaagagcacacaaaaugccauugacaagauuacuaacaaaguaaauucuguuauugaaaagaugaauacacaguucacagcaguggguaaagaguucaaccaccuggaaaaaagaauagagaauuuaaauaaaaaaguugaugaugguuuccuggacauuuggacuuacaaugccgaacuguugguucuauuggaaaaugaaagaacuuuggacuaccacgauucaaaugugaagaacuuguaugaaaagguaagaaaccaguuaaaaaacaaugccaaggaaauuggaaacggcugcuuugaauuuuaccacaaaugcgauaacacgugcauggaaagugucaaaaaugggacuuaugacuacccaaaauacucagaggaagcaaaauuaaacagagaaaaaauagaugggguaaagcuggaaucaacaaggauuuaccagauuuuggcgaucuauucaacugucgccaguucauugguacugguagucucccugggggcaaucagcuucuggaugugcucuaaugggucucuacaguguagaauauguauuuaa

SEQ ID NO: 44449 - RNA, 1701 nt, Artificial Sequence; identical to SEQ ID NO: 44439
  derived and/or modified CDS sequence (wt) from hemagglutinin__InfluenzaA__AIC73808

SEQ ID NO: 44450 - RNA, 1701 nt, Artificial Sequence
  derived and/or modified CDS sequence (wt) from hemagglutinin__InfluenzaA__AIC73809
augaaggcaauacuaguaguucugcuauauacauuugcaaccgcaaaugcagacacauuauguauagguuaucaugcgaacaauucaacagacacuguggacacaguacuagaaaagaauguaacaguaacacacucuguuaaccuucuagaagacaagcauaacgggaaacuaugcaaacuaagagggguagccccauugcauuuggguaaauguaacauugcuggcuggauccugggaaauccagagugugaaucacucuccacagcaaguucaugguccuacauuguggaaacaucuaguucagacaauggaacguguuacccaggagauuucaucaauuaugaggagcuaagagagcaauugagcucagugucaucauuugaaagguuugagauauuccccaagacaaguucauggcccaaucaugacucgaacaaagguguaacggcagcauguccucacgcuggagcaaaaagcuucuacaaaaauuuaauauggcuaguuaaaaaaggaaauucauacccaaagcuccgccaauccuacauuaaugauaaagggaaagaaguccucgugcuguggggcauucaccacccaucuacuacuacugaccaacaaagucucuaucagaaugcagaugcauauguuuuuguggggacaucaagauacagcaagaaguucaagccggaaauagcaauaagacccaaagugagggaucaagaagggagaaugaacuauuacuggacacuaguagagccgggagacaaaauaacauucgaagcaacuggaaaucuagugguaccgagauaugcauucacaauggaaagaaaugcuggaucugguauuaucauuucagauacaccaguccacgauugcaauacaacuugucagacacccgagggugcuauaaacaccagccucccauuucagaauauacauccgaucacaauuggaaaauguccaaaguauguaaaaagcacaaaauugagacuggccacaggauugaggaaugucccgucuauucaaucuagaggccuauucggggccauugccggcuucauugaaggaggguggacagggaugguagauggaugguacgguuaucaccaucaaaaugagcaggggucaggauaugcagccgaccugaagagcacacaaaaugccauugacaagauuacuaacaaaguaaauucuguuauugaaaagaugaauacacaguucacagcaguggguaaagaguucaaccaccuggaaaaaagaauagagaauuuaaauaaaaaaguugaugaugguuuccuggacauuuggacuuacaaugccgaacuguugguucuauuggaaaaugaaagaacuuuggacuaccacgauucaaaugugaagaacuuguaugaaaagguaagaaaccaguuaaaaaacaaugccaaggaaauuggaaacggcugcuuugaauuuuaccacaaaugcgauaacacgugcauggaaagugucaaaaaugggacuuaugacuacccaaaauacucagaggaagcaaaauuaaacagagaaaaaauagaugagguaaagcuggaaucaacaaggauuuaccagauuuuggcgaucuauucaacugucgccaguucauugguacugguagucucccugggggcaaucagcuucuggaugugcucuaaugggucucuacaguguagaauauguauuuaa

SEQ ID NO: 44451 - RNA, 1701 nt, Artificial Sequence
  derived and/or modified CDS sequence (wt) from hemagglutinin__InfluenzaA__AIC73810
augaaagcaauacuaguaguucugcuauacacauuugcaaccgcaaaugcagacacauuauguauagguuaucaugcgaacaauucaacagacacuguagacacaguacuagaaaagaauguaacaguaacacacucuguuaaccuucuagaagacaagcauaacgggaaacuaugcaaacuaagagggguagccccauugcauuuggguaaauguaacauugcuggcuggauccugggaaauccagagugugaaucacucuccacagcaaguucaugguccuacauuguggaaacaucuaguucagacaauggaacguguuacccaggagauuucaucaauuaugaggagcuaagagagcaauugagcucagugucaucauuugaaagauuugagauauuccccaagacaaguucauggcccaaucaugacucaaacaaagguguaacggcagcauguccucacgcuggagcaaaaagcuucuacaaaaauuuaauauggcuaguuaaaaaaggaaauucauacccaaagcucagccaauccuacauuaaugauaaagggaaagaaguccucgugcuguggggcauucaccauccaucuacuacugcugaccaacaaagucucuaucagaaugcagaugcauauguuuuuguggggacaucaagauacagcaagaaguucaagccggaaauagcaauaagacccaaagugagggaucaagaagggagaaugaacuauuacuggacacuaguagagccaggagacaaaauaacauucgaagcaacuggaaaucuagugguaccgagauaugcauucacaauggaaagaaaugcuggaucugguauuaucauuucagauacaccaguccacgauugcaauacaacuugucagacacccgagggugcuauaaacaccagccucccauuucagaauauacauccgaucacaauuggaaaauguccaaaguauguaaaaagcacaaaauugagacuggccacaggauugaggaaugucccaucuauucaaucuagaggccuauucggggccauugccggcuucauugaagggggguggacagggaugguagauggaugguacgguuaucaccaucaaaaugagcaggggucaggauaugcagccgaccugaagagcacacaaaaugccauugacaaaauuacuaacaaaguaaauucuguuauugaaaagaugaauacacaguucacagcaguggguaaagaguucaaccacuuggaaaaaagaauagagaauuuaaauaaaaaaguugaugaugguuuccuggacauuuggacuuacaaugccgaacugcugguucuauuggaaaaugaaagaacuuuggacuaccacgauucaaaugugaagaacuuguaugaaaagguaagaaaccaguuaaaaaacaaugccaaggaaauuggaaacggcugcuuugaauuuuaccacagaugcgauaacacgugcauggaaagugucaaaaaugggacuuaugacuacccaaaauacucagaggaagcaaaauuaaacagagaaaaaauagaugggguaaagcuggaaucaacaaggauuuaccagauuuuggcgaucuauucaacugucgccaguucauugguacugguagucucccugggggcaaucagcuucuggaugugcucuaaugggucucuacaguguagaauauguauuuaa

SEQ ID NO: 44452 - RNA, 1701 nt, Artificial Sequence
  derived and/or modified CDS sequence (wt) from hemagglutinin__InfluenzaA__AIC73813
augaaggcaauacuaguaguucugcuauauacauuugcaaccgcaaaugcagacacauuauguauagguuaucaugcaaacaauucaacagacacuguagacacaguacuagaaaagaauguaacaguaacacacucuguuaaccuucuagaagacaagcauaacgggaaacuaugcaaacuaagagggguagccccauugcauuuggguaaauguaacauugcuggcuggauccugggaaauccagagugugaaucacucuccacagcaaguucaugguccuacauuguggaaacaucuaguucagacaauggaacguguuacccaggagauuucaucaauuaugaggagcuaagagagcaauugagcucagugucaucauuugaaagguuugagauauuccccaaaacaaguucauggcccaaucaugacucgaacaaagguguaacggcagcauguccucacgcuggagcaaaaagcuucuacaaaaauuuaauauggcuaguuaaaaaaggaaauucauacccaaagcucagccaauccuacauuaaugauaaagggaaagaaguccucgugcuguggggcauucaccauccaucuacuacugcugaccaacaaagucucuaucagaaugcagaugcauauguuuuuguggggacaucaagauacagcaagaaguucaagccggaaauagcaauaagacccaaagugagggaucaagaagggagaaugaacuauuacuggacacuaguagagccgggagacaaaauaacauucgaagcaacuggaaaucuagugguaccgagauaugcauucacaauggaaagaaaugcuggaucugguauuaucauuucagauacaccaguccacgauugcaauacaacuugucagacacccgagggugcuauaaacaccagccucccauuucagaauauacauccgaucacaauuggaaaauguccaaaguauguaaaaagcacaaaauugagacuggccacaggauugaggaaugucccgucuauucaaucuagaggccuauucggggccauugccggcuucauugaagggggguggacagggaugguagauggaugguacgguuaucaccaucaaaaugagcaggggucaggauaugcagccgaccugaagagcacacaaaaugccauugacaagauuacuaacaaaguaaacucuguuauugaaaagaugaauacacaguucacagcaguggguaaagaguucaaccaccuggaaaaaagaauagagaauuuaaauaaaaaaguugaugaugguuuccuggacauuuggacuuacaaugccgaacuguugguucuauuggaaaaugaaagaacuuuggacuaccacgauucaaaugugaagaacuuguaugaaaagguaagaaaccaguuaaaaaacaaugccaaggaaauuggaaacggaugcuuugaauuuuaccacaaaugcgauaacacgugcauggaaagugucaaaaaugggacuuaugacuacccaaaauacucagaggaagcaaaauuaaacagagaaaaaauagaugggguaaagcuggaaucaacaaggauuuaccagauuuuggcgaucuauucaacugccgccaguucauugguacugguaaucucccugggggcaaucagcuucuggaugugcucuaaugggucucuacaguguagaauauguauuuaa

SEQ ID NO: 44453 - RNA, 1701 nt, Artificial Sequence
  derived and/or modified CDS sequence (wt) from hemagglutinin__InfluenzaA__AIC73815
augaagacuaucauugcuuugagcuacauucuaugucugguuuucgcucaaaaaauuccuggaaaugacaauagcacggcaacgcugugccuugggcaccaugcaguaccaaacggaacgauagugaaaacaaucacgaaugaccgaauugaaguuacuaaugcuacugagcugguucagaauuccucaauaggugaaauaugcgacaguccucaucagauccuugauggagaaaacugcacacuaauagaugcucuauugggagacccucagugugauggcuuucaaaauaagaaaugggaccuuuuuguugaacgaagcaaagccuacagcaacuguuacccuuaugaugugccggauuaugccucccuuaggucacuaguugccucauccggcacacuggaguuuaacaaugaaagcuucaauuggacuggagucacucaaaacggaacaaguucugcuugcauaaggagaucuaguaguaguuucuuuaguagauuaaauugguugacccacuuaaacuacacauacccagcauugaacgugacuaugccaaacaaugaacaauuugacaaauuguacauuugggggguucaccacccggguacggacaaggaccaaaucuuccuguaugcucaaucaucaggaagaaucacaguaucuaccaaaagaagccaacaagcuguaaucccaaauaucggaucuagacccagaauaagggauaucccuagcagaauaagcaucuauuggacaauaguaaaaccgggagacauacuuuugauuaacagcacagggaaucuaauugcuccuagggguuacuucaaaauacgaagugggaaaagcucaauaaugagaucagaugcacccauuggcaaaugcaagucugaaugcaucacuccaaauggaagcauucccaaugacaaaccauuccaaaauguaaacaggaucacauacggggccugucccagauauguuaagcauagcacucugaaauuggcaacaggaaugcgaaauguaccagagaaacaaacuagaggcauauuuggcgcaauagcggguuucauagaaaaugguugggagggaaugguggaugguugguacgguuucaggcaucaaaauucugagggaagaggacaagcagcagaucucaaaagcacucaagcagcaaucgaucaaaucaaugggaagcugaaucgauugaucgggaaaaccaacgagaaauuccaucagauugaaaaagaauucucagaaguagaaggaagaauucaggaccuugagaaauauguugaggacacuaaaauagaucucuggucauacaacgcggagcuucuuguugcccuggagaaccaacauacaauugaucuaacugacucagaaaugaacaaacuguuugaaaaaacaaagaagcaacugagggaaaaugcugaggauaugggcaaugguuguuucaaaauauaccacaaaugugacaaugccugcauaggaucaauaagaaauggaacuuaugaccacaauguguacagggaugaagcauuaaacaaccgguuccagaucaagggaguugagcugaagucaggguacaaagauuggauccuauggauuuccuuugccauaucauguuuuuugcuuuguguugcuuuguugggguucaucaugugggccugccaaaagggcaacauuaggugcaacauuugcauuuga

SEQ ID NO: 44454 - RNA, 1701 nt, Artificial Sequence; identical to SEQ ID NO: 43960
  derived and/or modified CDS sequence (wt) from hemagglutinin__InfluenzaA__AIC73817

SEQ ID NO: 44455 - RNA, 1701 nt, Artificial Sequence
  derived and/or modified CDS sequence (wt) from hemagglutinin__InfluenzaA__AIC73819
augaaggcaauacuaguaguucugcuauacacauuugcaaccgcaaaugcagacacauuauguauagguuaucaugcgaacaauucaacagacacuguagacacaguacuagaaaagaauguaacaguaacacacucuguuaaccuucuagaagacaagcauaacgggaaacuaugcaaacuaagagggguagccccauugcauuuggguaaauguaacauugcuggcuggauccugggaaauccagagugugaaucacucuccacagcaaguucaugguccuacauuguggaaacaucuaguucagacaauggaacguguuacccaggagauuucaucaauuaugaggagcuaagagagcaauugagcucagugucaucauuugaaagauuugagauauuccccaagacaaguucauggcccaaucaugacucgaacaaagguguaacggcagcauguccucacgcuggagcaaaaagcuucuacaaaaauuuaauauggcuaguuaaaaaaggaaauucauacccaaagcucagccaauccuacauuaaugauaaagggaaagaaguccucgugcuguggggcauucaccauccaucuacuacugcugaccaacaaagucucuaucagaaugcagaugcauauguuuucguggggacaucaagauacagcaagaaguucaagccggaaauagcaauaagacccaaaguaagggaucaagaagggagaaugaacuauuacuggacacuaguagagccgggagacaaaauaacauuugaagcaacuggaaaucuagugguaccgagauaugcauucacaauggaaagaaaugcuggaucugguauuaucauuucagauacaccaguccacgauugcaauacaacuugucagacacccgagggugcuauaaacaccagccucccauuucagaauauacauccgaucacaauuggaaaauguccaaaguauguaaaaagcacaaaauugagacuggccacaggauugaggaaugucccaucuauucaaucuagaggccuauucggggccauugccggcuucauugaagggggguggacagggaugguagauggaugguacgguuaucaccaucaaaaugagcaggggucaggauaugcagccgaccugaagagcacacaaaaugccauugacaaaauuacuaacaaaguaaauucuguuauugaaaagaugaauacacaguucacagcaguggguaaagaguucaaccacuuggaaaaaagaauagagaauuuaaauaaaaaaguugaugaugguuuccuggacauuuggacuuacaaugccgaacugcugguucuauuggaaaaugaaagaacuuuggacuaccacgauucaaaugugaagaacuuguaugaaaagguaagaaaccaguuaaaaaacaaugccaaggaaauuggaaacggcugcuuugaauuuuaccacaaaugcgauaacacgugcauggaaagugucaaaaaugggacuuaugacuacccaaaauacucagaggaagcaaaauuaaacagagaaaaaauagaugggguaaagcuggaaucaacaaggauuuaccagauuuuggcgaucuauucaacugucgccaguucauugguacugguagucucccugggggcaaucagcuucuggaugugcucuaaugggucucuacaguguagaauauguauuuaa

SEQ ID NO: 44456 - RNA, 1701 nt, Artificial Sequence
  derived and/or modified CDS sequence (wt) from hemagglutinin__InfluenzaA__AIC73820
augaagacuaucauugcuuugagcuacauucuaugucugguuuucgcucaaaaaauuccuggaaaugacaauagcacggcaacgcugugccuugggcaccaugcaguaccaaacggaacgauagugaaaacaaucacgaaugaccgaauugaaguuacuaaugcuacugagcugguucagaauuccucaauaggugaaauaugcgacaguccucaucagauccuugauggagaaaacugcacacuaauagaugcucuauugggagacccucagugugauggcuuucaaaauaagaaaugggaccuuuuuguugaacgaagcaaagccuacagcaacuguuacccuuaugaugugccggauuaugccucccuuaggucacuaguugccucauccggcacacuggaguuuaacaaugaaagcuucaauuggacuggagucacucaaaacggaacaaguucugcuugcauaaggagaucuaguaguaguuucuuuaguagauuaaauugguugacccacuuaaacuacacauacccagcauugaacgugacuaugccaaacaaugaacaauuugacaaauuguacauuugggggguucaccacccggguacggacaaggaccaaaucuuccuguaugcucaaucaucaggaagaaucacaguaucuaccaaaagaagccaacaagcuguaaucccaaauaucggaucuagacccagaauaagggauaucccuagcagaauaagcaucuauuggacaauaguaaaaccgggagacauacuuuugauuaacagcacagggaaucuaauugcuccuagggguuacuucaaaauacgaagugggaaaagcucaauaaugagaucagaugcacccauuggcaaaugcaagucugaaugcaucacuccaaauggaagcauucccaaugacaaaccauuccaaaauguaaacaggaucacauacggggccugucccagauauguuaagcauagcacucugaaauuggcaacaggaaugcgaaauguaccagagaaacaaacuagaggcauauuuggcgcaauagcggguuucauagaaaaugguugggagggaaugguggaugguugguacgguuucaggcaucaaaauucugagggaagaggacaagcagcagaucucaaaagcacucaagcagcaaucgaucaaaucaaugggaagcugaaucgauugaucgggaaaaccaacgagaaauuccaucagauugaaaaagaauucucagaaguagaaggaagaauucaggaccuugagaaauauauugaggacacuaaaauagaucucuggucauacaacgcggagcuucuuguugcccuggagaaccaacauacaauugaucuaacugacucagaaaugaacaaacuguuugaaaaaacaaagaagcaacugagggaaaaugcugaggauaugggcaaugguuguuucaaaauauaccacaaaugugacaaugccugcauaggaucaauaagaaauggaacuuaugaccacaauguguacagggaugaagcauuaaacaaccgguuccagaucaagggaguugagcugaagucaggguacaaagauuggauccuauggauuuccuuugccauaucauguuuuuugcuuuguguugcuuuguugggguucaucaugugggccugccaaaagggcaacauuaggugcaacauuugcauuuga

SEQ ID NO: 44457 - RNA, 1701 nt, Artificial Sequence; identical to SEQ ID NO: 43913
  derived and/or modified CDS sequence (wt) from hemagglutinin__InfluenzaA__AIC73821

SEQ ID NO: 44458 - RNA, 1701 nt, Artificial Sequence
  derived and/or modified CDS sequence (wt) from hemagglutinin__InfluenzaA__AIC73824
augaaggcaauacuaguaguucugcuauauacauuugcaaccgcaaaugcagauacauuauguauagguuaucaugcgaacaauucaacagacacuguagacacaguacuagaaaagaauguaacaguaacacacucuguuaaccuucuagaagacaagcauaacgggaaacuaugcaaacuaagagggguagccccauugcauuuggguaaauguaacauugcuggcuggauccugggaaauccagagugugaaucacucuccacagcaaguucaugguccuacauuguggaaacaucuaguucagacaauggaacguguuacccaggagauuucaucaauuaugaggagcuaagagagcaauugagcucagugucaucauuugaaagguuugagauauuccccaagacaaguucauggcccaaucaugacucgaacaaagguguaacggcagcauguccucacgcuggagcaaaaagcuucuacaaaaauuuaauauggcuaguuaaaaaaggaaauucauacccaaagcucagccaauccuacauuaaugauaaagggaaagaaguccucgugcuguggggcauucaccacccaucuacuacugcugaccaacaaagucucuaucagaaugcagaugcauauguuuuuguggggacaucaagauacagcaagaaguucaagccggaaauagcaauaagacccaaagugagggaucaagaagggagaaugaacuacuacuggacacuaguagagccgggagacaaaauaacauucgaagcaacuggaaaucuagugguaccgagauaugcauucacaauggaaagaaaugcugggucugguauuaucauuucagauacaccaguccacgauugcaauacaacuugucagacacccgagggugcuauaaacaccagccucccauuucagaauauacauccgaucacaauuggaaaauguccaaaguauguaaaaagcacaaaauugagacuggccacaggauugaggaaugucccgucuauucaaucuagaggccuauucggggccauugccggcuucauugaagggggguggacagggaugguagauggaugguacgguuaucaccaucaaaaugagcaggggucaggauaugcagccgaccugaagagcacacaaaaugccauugacaagauuacuaacaaaguaaauucuguuauugaaaagaugaauacacaguucacagcaguggguaaagaguucaaccaccuggaaaaaagaauagagaauuuaaauaaaaaaguugaugaugguuuccuggacauuuggacuuacaaugccgaacuguugguucuauuggaaaaugaaagaacuuuggacuaccacgauucaaaugugaagaacuuauaugaaaagguaagaaaccaguuaaaaaacaaugccaaggaaauuggaaacggcugcuuugaauuuuaccacaaaugcgauaacacgugcauggaaagugucaaaaaugggacuuaugacuacccaaaauacucagaggaggcaaaauuaaacagagaaaaaauagaugggguaaaacuggaaucaacaaggguuuaccagauuuuggcgaucuauucaacugucgccaguucauugguacugguagucucccugggggcaaucagcuucuggaugugcucuaaugggucucuacaguguagaauauguauuuaa

SEQ ID NO: 44459 - RNA, 1701 nt, Artificial Sequence; identical to SEQ ID NO: 43913
  derived and/or modified CDS sequence (wt) from hemagglutinin__InfluenzaA__AIC73825

SEQ ID NO: 44460 - RNA, 1701 nt, Artificial Sequence
  derived and/or modified CDS sequence (wt) from hemagglutinin__InfluenzaA__AIC73827
augaaggcaauacuaguaguucugcuauacacauuugcaaccgcaaaugcagacacauuauguauagguuaucaugcgaacaauucaacagacacuguagacacaguacuagaaaagaauguaacaguaacacacucuguuaaccuucuagaagacaagcauaacgggaaacuaugcaaacuaagagggguagccccauugcauuuggguaaauguaacauugcuggcuggauccugggaaauccagagugugaaccacucuccacagcaaguucaugguccuacauuguggaaacaucuaguucagacaauggaacguguuacccaggagauuucaucaauuaugaggagcuaagagagcaauugagcucagugucaucauuugaaagauuugagauauuccccaagacaaguucauggcccaaucaugacucgaacaaagguguaacggcagcauguccucacgcuggagcaaaaagcuucuacaaaaauuuaauauggcuaguuaaaaaaggaaauucauacccaaaacucagccaauccuacauuaaugauaaagggaaagaaguccucgugcuguggggcauucaccauccaucuacuacugcugaccaacaaagucucuaucagaaugcagaugcauauguuuuuguggggacaucaagauacagcaagaaguucaagccggaaauagcaauaagacccaaagugagggaucaagaagggagaaugaacuauuacuggacacuaguagagccgggagacaaaauaacauucgaagcaacuggaaaucuagugguaccgagauaugcauucacaauggaaagaaaugcuggaucugguauuaucauuucagauacaccaguccacgauugcaauacaacuugucagacacccgagggugcuauaaacaccagccucccauuucagaauauacauccgaucacaauuggaaaauguccaaaguauguaaaaagcacaaaauugagacuggccacaggauugaggaaugucccaucuauucaaucuagaggccuauucggggccauugccggcuucauugaagggggguggacagggaugguagauggaugguacgguuaucaccaucaaaaugagcaggggucaggauaugcagcagaccugaagagcacacaaaaugccauugacaaaauuacuaacaaaguaaauucuguuauugaaaagaugaauacacaguucacagcaguggguaaagaguucaaccacuuggaaaaaagaauagagaauuuaaauaaaaaaguugaugaugguuuccuggacauuuggacuuacaaugccgaacugcugguucuauuggaaaaugaaagaacuuuggacuaccacgauucaaaugugaagaacuuguaugaaaagguaagaaaccaguuaaaaaacaaugccaaggaaauuggaaacggcugcuuugaauuuuaccacaaaugcgauaacacgugcauggaaagugucaaaaaugggacuuaugacuacccaaaauacucagaggaagcaaaauuaaacagagaaaaaauagaugggguaaaacuggaaucaacaaggauuuaccagauuuuggcgaucuauucaacugucgccaguucauugauacugguagucucccugggggcaaucagcuucuggaugugcucuaaugggucucuacaguguagaauauguauuuaa

SEQ ID NO: 44461 - RNA, 1701 nt, Artificial Sequence
  derived and/or modified CDS sequence (wt) from hemagglutinin__InfluenzaA__AIC73828
augaaggcaauacuaguaguucugcuauauacauuugcaacugcaaaugcagacacauuauguauagguuaucaugcgaacaauucaacagacacuguagacacaguacuagaaaagaauguaacaguaacacacucuguuaaccuucuagaagacaagcauaacgggaaacuaugcaaacuaagagggguagccccauugcauuuggguaaauguaacauugcuggcuggauccugggaaauccagagugugaaucacucuccacagcaaguucaugguccuacauuguggaaacaucuaguucagacaauggaacguguuacccaggagauuucaucaauuaugaggagcuaagagagcaauugagcucagugucaucauuugaaagguuugagauauuccccaagacaaguucauggcccaaucaugacucgaacaaagguguaacggcagcauguccucacgcuggagcaaaaagcuucuacaaaaauuuaauauggcuaguuaaaaaaggaaauucauacccaaagcucagccaauccuacauuaaugauaaagggaaagaaguccucgugcuguggggcauucaccacccaucuacuacugcugaccaacaaagucucuaucagaaugcagaugcauauguuuuuguggggacaucaagauacagcaagaaguucaagccggaaauagcaauaagacccaaagugagggaucaagaagggagaaugaacuauuacuggacacuaguagagccgggagacaaaauaacauucgaagcaacuggaaaucuagugguaccgagauaugcauucacaauggaaagaaaugcuggaucugguauuaucauuucagauacaccaguccacgauugcaauacaacuugucagacacccgagggugcuauaaacaccagccucccauuucagaauauacauccgaucacaauuggaaaauguccaaaguauguaaaaagcacaaaauugagacuggccacaggauugaggaaugucccgucuauucaaucuagaggccuauucggggccauugccggcuucauugaaggaggguggacagggaugguagauggaugguacgguuaucaccaucaaaaugagcaggggucaggauaugcagccgaccugaagagcacacaaaaugccauugacaagauuacuaacaaaguaaauucuguuauugaaaagaugaauacacaguucacagcaguggguaaagaguucaaccaccuggaaaaaagaauagagaauuuaaauaaaaaaguugaugaugguuuccuggacauuuggacuuacaaugccgaacuguugguucuauuggaaaaugaaagaacuuuggacuaccacgauucaaaugugaagaacuuguaugaaaagguaagaaaccaguuaaaaaccaaugccaaggaaauuggaaacggcugcuuugaauuuuaccacaaaugcgauaacacgugcauggaaagugucaaaaaugggacuuaugacuacccaaaauacucagaggaagcaaaauuaaacagagaaaaaauagaugggguaaagcuggaaucaacaaggauuuaccagauuuuggcgaucuauucaacugccgccaguucauugguacugguagucucccugggggcaaucagcuucuggaugugcucuaaugggucucuacaguguagaauauguauuuaa

SEQ ID NO: 44462 - RNA, 1701 nt, Artificial Sequence
  derived and/or modified CDS sequence (wt) from hemagglutinin__InfluenzaA__AIC73830
augaaggcaauacuaguaguucugcuauauacauuugcaaccgcaaaugcagacacauuauguauagguuaucaugcgaacaauucaacagacacuguagacacaguacuagaaaagaauguaacaguaacacacucuguuaaccuucuagaagacaagcauaacgggaaacuaugcaaacuaaaagggguagccccauugcauuuggguaaauguaacauugcuggcuggauccugggaaauccagagugugaaucacucuccacagcaaguucaugguccuacauuguggaaacaucuaguucagacaauggaacguguuacccaggagauuucaucaauuaugaggagcuaagagagcaauugagcucagugucaucauuugaaagguuugagauauuccccaagacaaguucauggcccaaucaugacucgaacaaagguguaacggcagcauguccucacgcuggagcaaaaagcuucuacaaaaauuuaauauggcuaguuaaaaaaggaaauucauacccaaagcucagccaauccuacauuaaugauaaagggaaagaaguccucgugcuguggggcauucaccacccaucuacuacugcugaccaacaaagucucuaucagaaugcagaugcauauguuuuuguggggacaucaagauacagcaagaaauucaagccggaaauagcaauaagacccaaagugagggaucaagaagggagaaugaacuauuacuggacacuaguagagccgggagacaaaauaacauucgaagcaacuggaaaucuagugguaccgagauaugcauucacaauggaaagaaaugcuggaucugguauuaucauuucagauacaccaguccacgauugcaauacaacuugucagacacccgagggugcuauaaacaccagccucccauuucagaauauacauccgaucacaauuggaaaauguccaaaguauguaaaaagcacaaaauugagacuggccacaggauugaggaaugucccgucuauucaaucuagaggccuauucggggccauugccggcuucauugaaggaggguggacaggaaugguagauggaugguacgguuaucaccaucaaaaugagcaggggucaggauaugcagccgaccugaagagcacacaaaaugccauugacaagauuacuaacaaaguaaauucuguuauugaaaagaugaauacacaguucacagcaguggguaaagaguucaaccaccuggaaaaaagaauagagaauuuaaauaaaaaaguugaugaugguuuccuggacauuuggacuuacaaugccgaacuguugguucuauuggaaaaugaaagaacuuuggacuaccacgauucaaaugugaagaacuuguaugaaaagguaagaaaccaguuaaaaaacaaugccaaggaaauuggaaacggcugcuuugaauuuuaccacaaaugcgauaacacgugcauggaaagugucaaaaaugggacuuaugacuacccaaaauacucagaggaagcaaaauuaaacagagaaaaaauagaugggguaaagcuggaaucaacaaggauuuaccagauuuuggcgaucuauucaacugucgccaguucauugguacugguagucucccugggggcaaucagcuucuggaugugcucuaaugggucucuacaguguagaauauguauuuaa

SEQ ID NO: 44463 - RNA, 1701 nt, Artificial Sequence
  derived and/or modified CDS sequence (wt) from hemagglutinin__InfluenzaA__AIC73833
augaaggcaauacuaguaguucugcuauauacauuugcaaccgcaaaugcagacacauuauguauagguuaucaugcaaacaauucaacagacacuguagacacaguacuagaaaagaauguaacaguaacacacucuguuaaccuucuagaagacaagcauaacgggaaacuaugcaaacuaagagggguagccccauugcauuuggguaaauguaacauugcuggcuggauccugggaaauccagagugugaaucacucuccacagcaaguucaugguccuacauuguggaaacaucuaguucagacaauggaacguguuacccaggagauuucaucaauuaugaggagcuaagagagcaauugagcucagugucaucauuugaaagguuugagauauuccccaaaacaaguucauggcccaaucaugacucgaacaaagguguaacggcagcauguccucacgcuggagcaaaaagcuucuacaaaaauuuaauauggcuaguuaaaaaaggaaauucauacccaaagcucagccaauccuacauuaaugauaaagggaaagaaguccucgugcuguggggcauucaccauccaucuacuacugcugaccaacaaagucucuaucagaaugcagaugcauauguuuuuguggggacaucaagauacagcaagaaguucaagccggaaauagcaauaagacccaaagugagggaucaagaagggagaaugaacuauuacuggacacuaguagagccgggagacaaaauaacauucgaagcaacuggaaaucuagugguaccgagauaugcauucacaauggaaagaaaugcuggaucugguauuaucauuucagauacaccaguccacgauugcaauacaacuugucagacacccgagggugcuauaaacaccagccucccauuucagaauauacauccgaucacaauuggaaaauguccaaaguauguaaaaagcacaaaauugagacuggccacaggauugaggaaugucccgucuauucaaucuagaggccuauucggggccauugccggcuucauugaagggggguggacagggaugguagauggaugguacgguuaucaccaucaaaaugagcaggggucaggauaugcagccgaccugaagagcacacaaaaugccauugacaagauuacuaacaaaguaaacucugucauugaaaagaugaauacacaguucacagcaguggguaaagaguucaaccaccuggaaaaaagaauagagaauuugaauaaaaaaguugaugaugguuuccuggacauuuggacuuacaaugccgaacuguugguucuauuggaaaaugaaagaacuuuggacuaccacgauucaaaugugaagaacuuguaugaaaagguaagaaaccaguuaaaaaacaaugccaaggaaauuggaaacggcugcuuugaauuuuaccacaaaugcgauaacacgugcauggaaagugucaaaaaugggacuuaugacuacccaaaauacucagaggaagcaaaauuaaacagagaaaaaauagaugggguaaagcuggaaucaacaaggauuuaccagauuuuggcgaucuauucaacugccgccaguucauugguacugguagucucccugggggcaaucagcuucuggaugugcucuaaugggucucuacaguguagaauauguauuuaa

SEQ ID NO: 44464 - RNA, 1701 nt, Artificial Sequence
  derived and/or modified CDS sequence (wt) from hemagglutinin__InfluenzaA__AIC73834
augaaggcaauacuaguaguucugcuauacacauuugcaaccgcaaaugcagacacauuauguauagguuaucaugcgaacaauucaacagacacuguagacacaguacuagaaaagaauguaacaguaacacacucuguuaaccuucuagaagacaagcauaacgggaaacuaugcaaacuaagagggguagccccauugcauuuggguaaauguaacauugcuggcuggauccugggaaauccagagugugaaucacucuccacagcaaguucaugguccuacauuguggaaacaucuaguucagacaauggaacguguuacccaggagauuucaucaauuaugaggagcuaagagagcaauugagcucagugucaucauuugaaagauuugagauauuccccaagacaaguucauggcccaaucaugacucgaacaaagguguaacggcagcauguccucacgauggagcaaaaagcuucuacaaaaauuuaauauggcuaguuaaaaaaggaaauucauacccaaagcucagccaauccuacauuaaugauaaagggaaagaaguccucgugcuguggggcauucaccauccaucuacuacugcuggccaacaaagucucuaucagaaugcagaugcauauguuuucguggggacaucaagauacagcaagaaguucaagccggaaauagcaauaagacccaaagugagggaucaagaagggagaaugaacuauuacuggacacuaguagagccgggagacaaaauaacauucgaagcaacuggaaaucuagugguaccgagauaugcauucacaauggaaagaaaugcuggaucugguauuaucauuucagauacaccaguccacgauugcaauacaacuugucagacacccgagggugcuauaaacaccagccucccauuucagaauauacauccgaucacaauuggaaaauguccaaaguauguaaaaagcacaaaauugagacuggccacaggguugaggaaugucccaucuauucaaucuagaggccuauucggggccauugccggcuucauugaagggggguggacagggaugguagauggaugguacgguuaucaccaucaaaaugagcaggggucaggauaugcagccgaccugaagagcacacaaaaugccauugacaaaauuacuaacaaaguaaauucuguuauugaaaagaugaauacacaguucacagcaguggguaaagaguucaaccacuuggaaaaaagaauagagaauuuaaauaaaaaaguugaugaugguuuccuggacauuuggacuuacaaugccgaacugcugguucuauuggaaaaugaaagaacuuuggacuaccacgauucaaaugugaagaacuuguaugaaaagguaagaaaccaguuaaaaaacaaugccaaggaaauuggaaacggcugcuuugaauuuuaccacaaaugcgauaacacgugcauggaaagugucaaaaaugggacuuaugacuacccaaaauacucagaggaagcaaaauuaaacagagaaaaaauagaugggguaaagcuggaaucaacaaggauuuaccagauuuuggcgaucuauucaacugucgccaguucauugguacugguagucucccugggggcaaucagcuucuggaugugcucuaaugggucucuacaguguagaauauguauuuaa

SEQ ID NO: 44465 - RNA, 1701 nt, Artificial Sequence
  derived and/or modified CDS sequence (wt) from hemagglutinin__InfluenzaA__AIC73835
augaaggcaauacuaguaguucugcuauauacauuugcaaccgcaaaugcagacacauuauguauagguuaucaugcgaacaauucaacagacacuguagacacaguacuagaaaagaauguaacaguaacacacucuguuaaccuucuagaagacaagcauaacgggaaacuaugcaaacuaagagggguagccccauugcauuuggguaaauguaacauugcuggcuggauccugggaaauccagagugugaaucacucuccacagcaaguucaugguccuacauuguggaaacaucuaguucagacaauggaacguguuacccaggagauuucaucaauuaugaggagcuaagagagcaauugagcucaguaucaucauuugaaagguuugagauauuccccaagacaaguucauggcccaaucaugacucgaacaaagguguaacggcagcauguccucacgcuggagcaaaaagcuucuacaaaaauuuaauauggcuaguuaaaaaaggaaauucauacccaaagcucagccaauccuacauuaaugauaaagggaaagaaguccucgugcuguggggcauucaccacccaucuacuacugcugaccaacaaagucucuaucagaaugcagaugcauauguuuuuguggggacaucaagauacagcaagaaguucaagccggaaauagcaauaagacccaaagugagggaucaagaagggagaaugaacuauuacuggacacuaauagagccgggagacaaaauaacauucgaagcaacuggaaaucuagugguaccgagauaugcauucacaauggaaagaaaugcuggaucugguauuaucauuucagauacaccaguccacgauugcaauacaacuugucagacacccgagggugcuauaaacaccagccucccauuucagaauauacauccgaucacaauuggaaaauguccaaaguauguaaaaagcacaaaauugagacuggccacaggauugaggaaugucccgucuauucaaucuagaggccuauucggggccauugccggcuucauugaagggggguggacagggaugguagauggaugguacgguuaucaccaucaaaaugagcaggggucaggauaugcagccgaccugaagagcacacaaaaugccauugacaagauuacuaacaaaguaaauucuguuauugaaaagaugaauacacaguucacagcaguggguaaagaguucaaccaccuggaaaaaagaauagagaauuuaaauaaaaaaguugaugaugguuuccuggacauuuggacuuacaaugccgaacuguugguuuuauuggaaaaugaaagaacuuuggacuaccacgauucaaaugugaagaacuuguaugaaaagguaagaaaccaguuaaaaaacaaugccaaggaaauuggaaacggcugcuuugaauuuuaccacaaaugcgauaacacgugcauggaaagugucaaaaaugggacuuaugacuacccaaaauacucagaggaagcaaaauuaaacagagaaaaaauagaugggguaaagcuggaaucaacaaggauuuaccagauuuuggcgaucuauucaacugucgccaguucauugguacugguagucucccugggggcaaucagcuuauggaugugcucuaaugggucucuacaguguagaauauguauuuaa

SEQ ID NO: 44466 - RNA, 1701 nt, Artificial Sequence
  derived and/or modified CDS sequence (wt) from hemagglutinin__InfluenzaA__AIC73836
augaaggcaauacuaguaguucugcuauauacauuugcaaccgcaaaugcagacacguuauguauagguuaucaugcgaacaauucaacagacacuguagacacaguacuagaaaagaauguaacaguaacacacucuguuaaccuucuagaagacaagcauaacgggaaacuaugcaaacuaagagggguagccccauugcauuuggguaaauguaacauugcuggcuggauccugggaaauccagagugugaaucacucuccacagcaaguucaugguccuacauuguggaaacaucuaguucagacaauggaacguguuacccaggagauuucaucaauuaugaggagcuaagagagcaauugagcucagugucaucauuugaaagguuugagauauuccccaagacaaguucauggcccaaucaugacucgaacaaagguguaacggcagcauguccucacgcuggagcaaaaagcuucuacaaaaauuuaauauggcuaguuaaaaaaggaaauucauacccaaagaucagccaauccuacauuaaugauaaagggaaagaaguccucgugcuguggggcauucaccacccaucuacuacugcugaccaacaaagucucuaucagaaugcagaugcauauguuuuuguggggacaucaagauacagcaagaaguucaagccggaaauagcaauaagacccaaagugagggaucaagaagggagaaugaacuacuacuggacacuaguagagccgggagacaaaauaacauucgaagcaacuggaaaucuagugguaccgagauaugcauucacaauggaaagaaaugcuggaucugguauuaucauuucagauacaccaguccacgauugcaauacaacuugucagacacccgagggugcuauaaacaccagccucccauuucagaauauacauccgaucacaauuggaaaauguccaaaguauguaaaaagcacaaaauugagacuggccacaggauugaggaaugucccgucuauucaaucuagaggccuauucggggccauugccggcuucauugaagggggguggacagggaugguagauggaugguacgguuaucaccaucaaaaugagcaggggucaggauaugcagccgaccugaagagcacacaaaaugccauugacaagauuacuaacaaaguaaauucuguuauugaaaagaugaauacacaguucacagcaguggguaaagaguucaaccaccuggaaaaaagaauagagaauuuaaauaaaaaaguugaugaugguuuccuggacauuuggacuuacaaugccgaacuguugguucuauuggaaaaugaaagaacuuuggacuaccacgauucaaaugugaagaacuuguaugaaaagguaagaaaccaguuaaaaaacaaugccaaggaaauuggaaacggcugcuuugaauuuuaccacaaaugcgauaacacgugcauggaaagugucaaaaaugggacuuaugacuacccaaaauacucagaggaggcaaaauuaaacagagaaaaaauagaugggguaaaacuggaaucaacaaggauuuaccagauuuuggcgaucuauucaacugucgccaguucauugguacugguagucucccugggggcaaucagcuucuggaugugcucuaaugggucucuacaguguagaauauguauuuaa

SEQ ID NO: 44467 - RNA, 1701 nt, Artificial Sequence
  derived and/or modified CDS sequence (wt) from hemagglutinin__InfluenzaA__AIC73837
augaagacuaucauugcuuugagcuacauucuaugucugguuuucgcucaaaaacuuccuggaaaugacaauagcacggcaacgcugugccuugggcaccaugcaguaccaaacggaacgauagugaaaacaaucacgaaugaccgaauugaaguuacuaaugcuacugagcugguucagaauuccucaauaggugaaauaugcgacaguccucaucagauccuugauggagaaaacugcacacuaauagaugcucuauugggagacccucagugugauggcuuucaaaauaagaaaugggaccuuuuuguugaacgaagcaaggccuacagcaacuguuacccuuaugaugugccggauuaugccucccuuaggucacuaguugccucauccggcacacuggaguuuaacaaugaaagcuucaauugggcuggagucacucaaaacggaacaagcucugcuugcauaaggggaucuaauaguaguuucuuuaguagauuaaauugguugacccacuuaaacuucaaauacccagcauugaacgugacuaugccaaacaaugaacaauuugacaaauuguacauuugggggguucaccacccggguacggacaaggaccaaaucuuccuguaugcucaaucaucaggaagaaucacaguaucuaccaaaagaagccaacaagcuguaaucccgaauaucggaucuagacccagaauaaggaauaucccuagcagaauaagcaucuauuggacaauaguaaaaccgggagacauacuuuugauuaacagcacagggaaucuaauugcuccuagggguuacuucaaaauacgaagugggaaaagcucaauaaugagaucagaugcacccauuggcaaaugcaagucugaaugcaucacuccaaauggaagcauucccaaugacaaaccauuccaaaauguaaacaggaucacauacggggccugucccagauauguuaagcaaagcacucugaaauuggcaacaggaaugcgaaauguaccagagaaacaaacuagaggcauauuuggcgcaauagcggguuucauagaaaaugguugggagggaaugaaggaugguugguacgguuucaggcaucaaaauucugagggaagaggacaagcagcagaucucaaaagcacucaagcagcaaucgaucaaaucaaugggaagcugaaucgauugaucgggaaaaccaacgagaaauuccaucagauugaaaaagaauucucagaaguagaagggagaauucaggaccuugagaaauauguugaggacacaaaaauagaucucuggucauacaacgcggagcuucuuguugcccuggagaaccaacauacaauugaucuaacugacucagaaaugaacaaacuguuugaaaaaacaaagaagcaacugagggaaaaugcugaggauaugggcaaugguuguuucaaaauauaccacaaaugugacaaugccugcauaggaucaaucagaaauggaacuuaugaccacgauguauacagggaugaagcauuaaacaaccgguuccagaucaagggaguugagcugaagucaggguacaaagauuggauccuauggauuuccuuugccauaucauguuuuuugcuuuguguugcuuuguugggguucaucaugugggccugccaaaagggcaacauuaggugcaacauuugcauuuga

SEQ ID NO: 44468 - RNA, 1701 nt, Artificial Sequence
  derived and/or modified CDS sequence (wt) from hemagglutinin__InfluenzaA__AIC73838
augaagacuaucauugcuuugagcuacauucuaugucugguuuucgcucaaaaacuuccuggaaaugacaauagcacggcaacgcugugccuugggcaccaugcaguaccaaacggaacgauagugaaaacaaucacgaaugaccgaauugaaguuacuaaugcuacugagcugguucagaauuccucaauaggugaaauaugcaacaguccucaucagauccuugauggagaaaacugcacacuaauagaugcucuauugggagacccucagugugauggcuuucaaaauaagaaaugggaccuuuuuguugaacgaagcaaagccuacagcaacuguuacccuuaugaugugccggauuaugccucccuuaggucacuaguugccucauccggcacacuggaguuuaacaaugaaagcuucaauugggcuggagucacucaaaacggaacaaguucugcuugcauaaggggaucuaauaguaguuucuuuaguagauuaaauugguugacccacucaaacuucaaauacccagcauugaacgugacuaugccaaacaaugaacaauuugacaaauuguacauuugggggguucaccacccggguacggacaaggaccaaaucuuccuguaugcucagucaucaggaagaaucacaguaucuaccaaaagaagccaacaagcuguaaucccgaauaucggaucuagacccagaauaaggaauaucccuagcagaauaagcaucuauuggacaauaguaaaaccgggagacauacuuuugauuaacagcacagggaaucuaauugcuccuagggguuacuucaaaauacgaagugggaaaagcucaauaaugagaucagaugcacccauuggcaaaugcaagucugaaugcaucacuccaaauggaagcauucccaaugacaaaccauuccaaaauguaaacaggaucacauacggggccugucccagauauguuaagcaaagcacucugaaauuggcaacaggaaugcgaaauguaccagagaaacaaacuagaggcauauuuggcgcaauagcggguuucauagaaaaugguugggagggaaugauggaugguugguacgguuucaggcaucaaaauucugagggaagaggacaagcagcagaucucaaaagcacucaagcagcaaucgaucaaauuaaugggaagcugaaucgauugaucgggaaaaccaacgagaaauuccaucagauugaaaaagaauucucagaaguagaagggagaauucaggaccuugagaaauauguugaggacacaaaaauagaucucuggucauacaacgcggagcuucuuguugcccuggagaaccaacauacaauugaucuaacugacucagaaaugaacaaacuguuugaaaaaacaaagaagcaacugagagaaaaugcugaggaucugggcaaugguuguuucaaaauauaccacaaaugugacaaugccugcauaggaucaaucagaaauggaacuuaugaccacgauguauacagggaugaggcauuaaacaaccgguuccaaaucaagggaguugagcugaagucaggguacaaagauuggauccuauggauuuccuuugccauaucauguuuuuugcuuuguguugcuuuguugggguucaucaugugggccugccaaaagggcaacauuaggugcaacauuugcauuuga

SEQ ID NO: 44469 - RNA, 1701 nt, Artificial Sequence
  derived and/or modified CDS sequence (wt) from hemagglutinin__InfluenzaA__AIC73839
augaaggcaauacuaguaguucugcuauacacauuugcaaccgcaaaugcagacacauuauguauagguuaucaugcgaacaauucaacagacacuguagacacaguacuagaaaagaauguaacaguaacacacucuguuaaccuucuagaagacaagcauaacgggaaacuaugcaaacuaagagggguagccccauugcauuuggguaaauguaacauugcuggcuggauccugggaaauccagagugugaaucacucuccacagcaaguucaugguccuacauuguggaaacaucuaguucagacaauggaacguguuacccaggagauuucaucaauuaugaggagcuaagagagcaauugagcucagugucaucauuugaaagauuugagauauuccccaagacaaguucauggcccgaucaugacucgaacaaagguguaacggcagcauguccucacgcuggagcaaaaagcuucuacaaaaauuuaauauggcuaguuaaaaaaggaaauucauacccaaagcucagccaauccuacauuaaugauaaagggaaagaaguccucgugcuguggggcauucaccauccaucuacuacugcugaccaacaaagucucuaucagaaugcagaugcauauguuuuuguggggacaucaagauacagcaagaaguucaagccggaaauagcaauaagacccaaagugagggaucaagaagggagaaugaacuauuacuggacacuaguagagccgggagacaaaauaacauucgaagcaacuggaaaucuagugguaccgagauaugcauucacaauggaaagaaaugcuggaucugguauuaucauuucagauacaccaguccacgauugcaauacaacuugucagacacccgagggugcuauaaacaccagccucccauuucagaauauacauccgaucacaauuggaaaauguccaaaguauguaaaaagcacaaaauugagacuggccacaggauugaggaaugucccaucuauucaaucuagaggccuauucggggccauugccggcuucauugaagggggguggacagggaugguagauggaugguacgguuaucaccaucaaaaugagcaggggucaggauaugcagccgaccugaagagcacacaaaaugccauugacaaaauuacuaacaaaguaaauucuguuauugaaaagaugaauacacaguucacagcaguggguaaagaguucaaucaccuggaaaaaagaauagagaauuuaaauaaaaaaguugaugaugguuuccuggacauuuggacuuacaaugccgaacugcugguucuauuggaaaaugaaagaacuuuggacuaccacgauucaaaugugaagaacuuguaugaaaagguaagaaaccaguuaaaaaacaaugccaaggaaacuggaaacggcugcuuugaauuuuaccacaaaugcgauaacacgugcauggaaagugucaaaaaugggacuuaugacuacccaaaauacucagaggaagcaaaauuaaacagagaaaaaauagaugggguaaagcuggaaucaacaaggauuuaccagauuuuggcgaucuauucaacugucgccaguucauugguacugguagucucccugggggcaaucagcuucuggaugugcucuaaugggucucuacaguguagaauauguauuuaa

SEQ ID NO: 44470 - RNA, 1701 nt, Artificial Sequence
  derived and/or modified CDS sequence (wt) from hemagglutinin__InfluenzaA__AIC73840
augaaggcaauacuaguaguucugcuauauacauuugcaaccgcaaaugcagacacauuauguauagguuaucaugcgaacaauucaacagacacuguagacacaguacuagaaaagaauguaacaguaacacacucuguuaaccuucuagaagacaagcauaacgggaaacuaugcaaacuaagagggguagccccauugcauuuggguaaauguaacauugcuggcuggauccugggaaauccagagugugaaucacucuccacagcaaguucaugguccuacauuguggaaacaucuaguucagacaauggaacguguuacccaggagauuucaucaauuaugaggagcuaagagagcaauugagcucagugucaucauuugaaagguuugagauauuccccaagacaaguucauggcccaaucaugacucgaacaaagguguaacggcagcauguccucacgcuggagcaaaaagcuucuacaaaaauuuaauauggcuaguuaaaaaaggaaauucauacccaaagcucagccaauccuacauuaaugauaaagggaaagaaguccucgugcuguggggcauucaccacccaucuacuacugcugaccaacaaagucucuaucagaaugcagaugcauauguuuuuguggggacaucaagauacagcaagaaguucaagccggaaauagcaauaagacccaaagugagggaucaagaagggagaaugaacuauuacuggacacuaguagagccgggagacaaaauaacauucgaagcaacuggaaaucuagugguaccgagauaugcauucacaauggaaagaaaugcuggaucugguauuaucauuucagauacaccaguccaugauugcaauacaacuugucagacacccgagggugcuauaaacaccagccucccauuucagaauauacauccgaucacaauuggaaaauguccaaaguauguaaaaagcacaaaauugagacuggccacaggauugaggaaugucccgucuauucaaucuagaggccuauucggggccauugccggcuucauugaaggaggguggacagggaugguagauggaugguacgguuaucaccaucaaaacgagcaggggucaggauaugcagccgaccugaagagcacacaaaaugccauugacaagauuacuaacaaaguaaauucuguuauugaaaagaugaauacacaguucacagcaguggguaaagaguucaaccaccuggaaaaaagaauagagaauuuaaauaaaaaaguugaugaugguuuccuggacauuuggacuuacaaugccgaacuguugguucuauuggaaaaugaaagaacuuuggacuaccacgauucaaaugugaagaacuuguaugaaaagguaagaaaccaguuaaaaaacaaugccaaggaaauuggaaauggcugcuuugaauuuuaccacaaaugcgauaacacgugcauggaaagugucaaaaaugggacuuaugacuacccaaaauacucagaggaagcaaaauuaaacagagaaaaaauagaugggguaaagcuggaaucaacaaggauuuaccagauuuuggcgaucuauucaacugucgccaguucauugguacugguagucucccugggggcaaucagcuucuggaugugcucuaaugggucucuacaguguagaauauguauuuaa

SEQ ID NO: 44471 - RNA, 1701 nt, Artificial Sequence
  derived and/or modified CDS sequence (wt) from hemagglutinin__InfluenzaA__AIC73841
augaaggcaauacuaguaguucugcuauauacauuugcaaccgcaaaugcagacacuuuauguauagguuaucaugcgaacaauucaacagacacuguagacacaguacuagaaaagaauguaacaguaacacacucuguuaaccuucuagaagacaagcauaacgguaaacuaugcaaacuaagagggguagccccauugcauuuggguaaauguaacauugcuggcuggauccugggaaauccagagugugaaucacucuccacagcaaguucaugguccuacauuguggaaacaucuaguucagacaauggaacguguuacccaggagauuucaucaauuaugaggagcuaagagagcaauugagcucagugucaucauuugaaagguuugagauauuccccaagacaaguucauggcccaaucaugacucgaacaaagguguaacggcagcauguccucacgcuggagcaaaaagcuucuacaaaaauuuaauauggcuaguuaaaaaaggaaauucauacccaaagcucagucaauccuacauuaaugauaaagggaaagaaguccucgugcuguggggcauucaccauccaucuacuauugcugaccaacaaagucucuaucagaaugcagaugcauauguuuuuguggggacaucaagauacagcaagaaguucaagccggaaauagcaauaagacccaaagugagggaucaagaagggagaaugaacuauuacuggacacuaguagagccgggagacaaaauaacauucgaagcaacuggaaaucuagugguaccgagauaugcauucacaauggaaagaaaugcuggaucugguauuaucauuucagauacaccaguccacgauugcaauacaacuugucagacacccgagggugcuauaaacaccagccucccauuucagaauauacauccgaucacaauuggaaaauguccaaaguauguaaaaagcacaaaauugagacuggcaacaggauugaggaauauaccgucuauucaaucuagaggccuauucggggccauugccggcuucauugaagggggguggacagggaugguagauggaugguacgguuaucaccaucaaaaugagcaggggucaggauaugcagccgaccugaagagcacacaaaaugccauugacaagauuacuaacaaaguaaacucuguuauugaaaagaugaauacacaguucacagcaguggguaaagaguucaaccaccuggaaaaaagaauugagaauuuaaauaaaaaaguugaugaugguuuccuggacauuuggacuuacaaugccgaacuguugguucuauuggaaaaugaaagaacuuuggacuaccacgauucaaaugugaagaacuuguaugaaaagguaagaaaccaguuaaaaaacaaugccaaggaaauuggaaacggcugcuuugaauuuuaccacaaaugcgauaacacgugcauggaaagugucaaaaaugggacuuaugacuacccaaaauacucagaggaagcaaaauuaaacagagaaaaaauagaugggguaaagcuggaaucaacaaggauuuaccagauuuuggcgaucuauucaacugucgccaguucauugguacugguagucucccugggggcaaucagcuucuggaugugcucuaaugggucucuacaguguagaauauguauuuaa

SEQ ID NO: 44472 - RNA, 1701 nt, Artificial Sequence; identical to SEQ ID NO: 44467
  derived and/or modified CDS sequence (wt) from hemagglutinin__InfluenzaA__AIC73842

SEQ ID NO: 44473 - RNA, 1707 nt, Artificial Sequence
  derived and/or modified CDS sequence (wt) from hemagglutinin__InfluenzaA__AID48082
auggagaaaauagugcuucuuuuugcaauagucagucuuguuaaaagugaucagauuugcauugguuaccaugcaaacaacucgacagagcagguugacacaauaauggaaaagaacguuacuguuacacaugcccaagacauacuggaaaagacacacaacgggaagcucugcgaucuagauggagugaagccucuaauuuugagagauuguaguguagcuggauggcuccucggaaacccaaugugugacgaauucaucaaugugccggaauggucuuacauaguggagaaggccaauccagucaaugaccucuguuacccaggggauuucaaugacuaugaagaauugaaacaccuauugagcagaauaaaccauuuugagaaaauucagaucauccccaaaaguucuugguccagucaugaagccucauuaggggugagcucagcauguccauaccagggaaaguccuccuuuuucagaaaugugguauggcuuaucaaaaagaacaguacauacccaacaauaaagaggagcuacaauaauaccaaccaagaagaucuuuugguacugugggggauucaccauccuaaugaugcggcagagcagacaaagcucuaucaaaacccaaccaccuauauuuccguugggacaucaacacuaaaccagagauugguaccaagaauagcuacuagauccaaaguaaacgggcaaaguggaaggauggaguucuucuggacaauuuuaaaaccgaaugaugcaaucaacuucgagaguaauggaaauuucauugcuccagaauaugcauacaaaauugucaagaaaggggacucaacaauuaugaaaagugaauuggaauaugguaacugcaacaccaagugucaaacuccaaugggggcgauaaacucuaguaugccauuccacaauauacauccucucaccaucggggaaugccccaaauaugugaaaucaaacagauuaguccuugcgacugggcucagaaauagcccucaaagagagagaagaagaaaaaagagaggauuauuuggagcuauagcagguuuuauagagggaggauggcagggaaugguagaugguugguauggguaccaccauagcaaugagcaggggaguggguacgcugcagacaaagaauccacucaaaaggcaauagauggagucaccaauaaggucaacucgaucauugacaaaaugaacacucaguuugaggccguuggaagggaauuuaaccacuuagaaaggagaauagagaauuuaaacaagaagauggaagacggguuccuagaugucuggacuuauaaugcugaacuucugguucucauggaaaaugagagaacucuagacuuucaugacucaaaugucaagaaccuuuacgacaagguccgacuacagcuuagggauaaugcaaaggagcuggguaacgguuguuucgaguucuaucauaaaugugaugaugaauguauggaaaguguaagaaacggaacguaugacuacccgcaguauucagaagaagcaagacuaaaaagagaggaaauaaguggaguaaaauuggaaucgauaggaauuuaccaaauacugucaauuuauucuacaguggcgaguucccuagcacuggcaaucaugguagcuggucuauccuuauggaugugcuccaaugggucguuacaaugcagaauuugcauuuaa

SEQ ID NO: 44474 - RNA, 1701 nt, Artificial Sequence
  derived and/or modified CDS sequence (wt) from hemagglutinin__InfluenzaA__AID70444
augaaggcaguacuaguaguucugcuauauacauuugcaaccgcaaaugcagacacauuauguauagguuaucaugcgaacaauucaacagacacuguagacacaguacuagaaaagaauguaacaguaacacacucuguuaaccuucuagaagacaagcauaacgggaaacuaugcaaacuaagagggguagccccauugcauuuggguaaauguaacauugcuggcuggauccugggaaauccagagugugaaucacucgccacagcaagcucaugguccuacauaguggaaacaucuaauucagacaauggaacguguuacccaggagauuucaucgauuaugaggagcuaagagagcaguugagcucagugucaucauuugaaagguuugagauauuccccaagacaaguucauggcccaaucaugacucgaacaaagguguaacggcagcauguccucaugcuggagcaaaaagcuucuacaaaaauuuaauauggcuaguuaaaaaaggaaauucauacccaaagcucagcaaauccuacauuaaugauaaagggagagaaguccucgugcuauggggcauucaccauccaucuacuagugcugaccaacaaagucucuaucagaaugcagauacauauguuuuuguggggacaucaagauacagcaagaaguucaagccggaaauagcaauaagacccaaagugagggaucaagaagggagaaugaacuauuacuggacacuaguagagccgggagacaaaauaacauucgaagcaacuggaaaucuagugguaccgagauaugcauucgcaauggaaagaaaugcuggaucugguauuaucauuucagauacaccaguccacgauugcaauacaacuugucagacacccaagggugcuauaaacaccagccucccauuucagaauauacauccgaucacaauuggaaaauguccaaaauauguaaaaagcacaaaauugagacuggccacaggauugaggaaugucccuucuauucaaucuagaggccuauuuggggccauugccgguuucauugaagggggguggacagggaugguagauggaugguacgguuaucaccaucaaaaugagcaggggucaggauaugcagccgaccugaagagcacacagaaugccauugacgagauuacuaacaaaguaaauucuguuauugaaaagaugaauacacaguucacagcaguagguaaagaguucaaccaccuggaaaaaagaauagagaauuuaaauaaaaaaguugaugaugguuuccuggacauuuggacuuacaaugcagaacuguugguuguauuggaaaaugaaagaacuuuggaauaccaugauucaaaugugaagaacuuauaugaaaagguaagaagccaggugaaaaacaaugccaaggaaauuggaaacggcuguuuugaauuuuaccacaaaugcgauaacacgugcauggaaagugucaaaaaugggacuuaugacuacccaaaauacucagaggaagcaaaauuaaacagagaagaaauagauggggugaagcuggaaucaacaaggauuuaccagauuuuggcgaucuauucaacugucgccaguucauugguacugguagucucccugggggcaaucaguuucuggaugugcuuuaaugggucucuacaguguagaauauauauauaa

SEQ ID NO: 44475 - RNA, 1701 nt, Artificial Sequence
  derived and/or modified CDS sequence (wt) from hemagglutinin__InfluenzaA__AID70445
augaaggcaauacuaguaguucugcuauauacauuugcaaccgcaaaugcagacacauuauguauagguuaucaugcgaacaauucaacagacacuguagacacaguacuugaaaagaauguaacaguaacacacucuguuaaccuucuagaagacaagcauaacgggaaacuaugcaaacuaagagggguagccccauugcauuuggguaaauguaacauugcuggcuggauccugggaaauccagagugugaaucacucuccacagcaagcucaugguccuacauuguggaaacaucuaguucagacaauggaacguguuacccaggagauuucaucgauuaugaggagcuaagagagcaauugagcucagugucaucauuugaaagguuugagauauuccccaagacaaguucauggcccaaucaugacucgaacaaagguguaacggcagcauguccucaugcuggagcaaaaagcuucuacaaaaauuuaauauggcuaguuaaaaaaggaaauucauacccaaagcucagcaaauccuacauuaaugauaaagggaaagaaguccucgugcuauggggcauucaccauccaucuacuacugcugaccaacaaagucucuaucagaaugcagauacauauguuuuuguggggacaucaagauacagcaagaaguucaagccggaaauagcaauaagacccaaagugagggaucaagaagggagaaugaacuauuacuggacacuaguagagccgggagacaaaauaacauucgaagcaacuggaaaucuaguaguaccgagauaugcauucgcaauggaaagaaaugcuggaucugguauuaucauuucagauacaccaguccacgauugcaauacaacuugucagacacccaagggugcuauaaacaccagccuuccauuucagaauauacauccgaucacaauuggaaaauguccaaaauauguaaaaagcacaaaauugagacuggccacaggauugaggaaugucccuucuauucaaucuagaggccuauuuggggccauugccggcuucauugaagggggguggacagggaugguagauggaugguacgguuaucaccaucaaaaugagcaggggucaggauaugcagccgaccugaagagcacacagaaugccauugacaagauuacuaacaaaguaaauucuguuauugaaaagaugaauacacaguucacagcaguagguaaagaguucaaccaccuggaaaaaagaauagagaauuuaaauaaaaaaguugaugaugguuuccuggacauuuggacuuacaaugccgaacuguugguuguauuggaaaaugaaagaacuuuggaauaccacgauucaaaugugaagaacuuauaugaaaagguaagaaaccaguuaaaaaacaaugccaaggaaauuggaaauggcugcuuugaauuuuaccacaaaugcgauaacacgugcauggaaagugucaaaaaugggauuuaugacuacccaaaauacucagaggaagcaaaauuaaacagagaagaaauagaugggguaaagcuggaaucaacaaggauuuaccagauuuuggcgaucuauucaacugucgccaguucauugguacagguagucucccugggggcaaucaguuuuuggaugugcuuuaaugggucucuacaguguagaauauguauuuaa

SEQ ID NO: 44476 - RNA, 1701 nt, Artificial Sequence
  derived and/or modified CDS sequence (wt) from hemagglutinin__InfluenzaA__AID70446
augaaggcaguacuaguaguucugcuauauacauuugcaaccgcaaaugcagacacauuauguauagguuaucaugcgaacaauucaacagacacuguagacacaguacuagaaaagaauguaacaguaacacacucuguuaaucuucuagaagacaagcauaacgggaaacuaugcaaacuaagagggguagccccauugcauuuggguaaauguaacauugcuggcuggauccugggaaauccagagugugaaucacucuccacagcaagcucaugguccuacauuguggaaacaucuaguucagacaauggaacguguuacccaggagauuucaucgauuaugaggagcuaagagagcaauugagcucagugucaucauuugaaagguuugagauauuccccaagacaaguucauggcccaaucaugacucgaacaaagguguaacggcagcauguccucaugcuggagcaaaaagcuucuacaaaaauuuaauauggcuaguuaaaaaaggaaauucauacccaaagcucagcaaauccuacauuaaugauaaagggaaagaaauccucgugcuauggggcauucaccauccaucuacuacugcugaccaacaaagucucuaucagaaugcagauacauauguuuuuguggggacaucaagauacagcaagaaguucaagccggaaauagcaauaagacccaaagugagggaucaagaagggagaaugaacuauuacuggacacuaguagagccgggagacaaaauaacauucgaagcaacuggaaaucuggugguaccgagauaugcauucgcaauggaaagaaaugcuggaucugguauuaucauuucagguacaccaguccacgauugcaauacaacuugucagacacccaagggugcuauaaacaccagccucccguuucagaauauacauccgaucacaauuggaaaauguccaaaauauguaaaaagcacaaaauugagacuggccacaggauugaggaaugucccgucuauucaaucuagaggccuauuuggggccauugccggcuucauugaagggggguggacagggaugguagauggaugguacgguuaucaccaucaaaaugagcaggggucaggauaugcagccgaccugaagagcacacagaaugccauugacaagauuacuaacaaaguaaauucuguuauugaaaagaugaauacacaguucacagcaguagguaaagaguucaaccaccuggaaaaaagaauagagaauuuaaauaaaaaaguugaugaugguuuccuggacauuuggacuuacaaugccgaauuguugguuguauuggaaaaugaaagaacuuuggaauaccacgauucaaaugugaagaacuuauaugaaaagguaagaaaccaguuaaaaaacaaugccaaggaaauuggaaauggcugcuuugaauuuuaccacaaaugugauaacacgugcauggaaagugucaaaaaugggauuuaugacuacccaaaauacucagaggaagcaaaauuaaacagagaagaaauagaugggguaaagcuggaaucaacaaggauuuaccagauuuuggcgaucuauucaacugucgccaguucauugguacagguagucucccugggggcaaucaguuuuuggaugugcuuuaaugggucucuacaguguagaauauguauuuaa

SEQ ID NO: 44477 - RNA, 1701 nt, Artificial Sequence
  derived and/or modified CDS sequence (wt) from hemagglutinin__InfluenzaA__AID70447
augaaggcaauacuaguaguucugcuauauacauuugcaaccgcaaaugcagacacauuauguauagguuaccaugcgaacaauucaacagacacuguagacacaguacuagaaaagaauguaacaguaacacacucuguuaaucuucuagaagacaagcauaacgggaaacuaugcaaacuaagagggguagccccauugcauuuggguaaauguaacauugcuggcuggauccugggaaauccagagugugaaucacucuccacagcaagcucaugguccuacauuguggaaacaucuaguucagacaauggaacguguuacccaggagauuucaucgauuaugaggagcuaagagagcaauugagcucagugucaucauuugaaagguuugagauauuccccaagacaaguucauggcccaaucaugacucgaacaaagguguaacggcagcauguccucaagcuggagcaaaaggcuucuacaaaaauuuacuauggcuaguuaaaaaaggaaauucauacccaaagcucagcaaauccuacauuaaugauaaagggaaagaaguccucgugcuauggggcauucaccauccaucuacuacugcugaccaacaaagucucuaucagaaugcagauacauauguuuuuguggggacaucaagauacagcaagaaguucaagccggaaauagcaauaagacccaaagugagggaucaagaagggagaaugaacuauuacuggacacuaguagagccgggagacaaaauaacauucgaagcaacuggaaaucuagugguaccgagauaugcauucgcaauggaaagaaaugcuggaucugguauuaucauuucagauacaccaguccacgauugcaauacaacuugucagacacccaagggugcuauaaacaccagccucccauuucagaauauacauccgaucacaauuggaaaauguccaaaauauguaaaaagcacaaaguugagacuggccacaggauugaggaaugucccgucuauucaaucuagaggccuauuuggggccauugccggcuucauugaagggggguggacagggaugguagauggaugguacgguuaucaccaucaaaaugagcaggggucaggauaugcagccgaccugaagagcacacagaaugccauugacaagauuacuaacaaaguaaauucuguuauugaaaagaugaauacacaguucacuucaguagguaaagaguucaaccaccuggaaaaaagaauggagaauuuaaauaaaaaaguugaugaugguuuccuggacauuuggacuuacaaugccgaacuguugguuguauuggaaaaugaaagaacuuuggaauaccacgauucaaaugugaagaacuuauaugaaaagguaagaaaccaguuaaaaaacaaugccaaggaaauuggaaauggaugcuuugaauuuuaccacaaaugcgauaacacgugcauggaaagugucaaaaaugggauuuaugacuacccaaaauacucagaggaagcaaaauuaaacagagaagaaauagaugggguaaagcuggaaucaacaaggauuuaccagauuuuggcgaucuauucaacugucgccaguucauugguacugguagucucccugggggcaaucaguuuuuggaugugcuuuaaugggucucuacaguguagaauauguauuuaa

SEQ ID NO: 44478 - RNA, 1701 nt, Artificial Sequence
  derived and/or modified CDS sequence (wt) from hemagglutinin__InfluenzaA__AID70448
augaaggcaauacuaguaguucugcuauauacauuugcaaccgcaaaugcagacacauuauguauagguuaccaugcgaacaauucaacagacacuguagacacaguacuagaaaagaauguaacaguaacacacucuguuaaucuucuagaagacaagcauaacgggaaacuaugcaaacuaagagggguagccccauugcaucuggguaaauguaacauugcuggcuggauccugggaaauccagagugugaaucacucuccacagcaagcucaugguccuacauuguggaaacaucuaguucagacaauggaacguguuacccaggagauuucaucgauuaugaggagcuaagagagcaauugagcucagugucaucauuugaaagguuugagauauuccccaaaacaaguucauggcccaaucaugacucgaacaaagguguaacggcagcauguccucaugcuggagcaaaaggcuucuacaaaaauuuaauauggcuaguuaaaaaaggaaauucauacccaaagcucagcaaauccuacauuaaugauaaagggaaagaaguccucgugcuauggggcauucaccauccaucuacuacugcugaccaacaaagucucuaucagaaugcagauacauauguuuuuguggggacaucaagauacagcaagaaguucaagccggaaauagcaauaagacccaaagugagggaucaagaagggagaaugaacuauuacuggacacuaguagagccgggagacaaaauaacauucgaagcaacuggaaaucuagugguaccgagauaugcauucacaauggaaagagaugcuggaucugguauuaucauuucagauacaccaguccacgauugcaauacaacuugucagacacccaagggugcuauaaacaccagccucccauuucagaauauacauccgaucacaauuggaaaauguccaaaauauguaaaaagcacaaaauugagacuggccacaggauugaggaaugucccgucuauucaaucuagaggccuauuuggggccauugccggcuucauugaagggggguggacagggaugguagauggaugguacgguuaucaccaucaaaaugagcaggggucaggauaugcagccgaccugaagagcacacagaaugccauugacaagauuacuaacaaaguaaauucugucauugaaaagaugaauacacaguucacagcaguagguaaagaguucaaccaccuggaaaaaagaauagagaauuuaaauaaaaaaguugaugaugguuuccuggacauuuggacuuacaaugccgaauuguugguuguauuggaaaaugaaagaacuuuggaauaccaggauucaaaugugaagaacuuauaugaaaagguaagaaaccaguuaaaaaacaaugccaaggaaauuggaaauggcugcuuagaauuuuaccacaaauuugauaacacguguauggaaagugucaaaaaugggacuuaugacuacccaaaauacucagaggaagcaaaauuaaacagagaaaaaauagaugggguaaagcuggaaucaacaaggauuuaccagauuuuggcgaucuauucaacugucgccaguucauugguacugguagucucccuggggacaaucaguuuuuggaugugcuuuaaugggucucuacaguguagaauauguauuuaa

SEQ ID NO: 44479 - RNA, 1701 nt, Artificial Sequence
  derived and/or modified CDS sequence (wt) from hemagglutinin__InfluenzaA__AID70449
augaaggcaauacuaguaguucugcuauauacauuugcaaccgcaaaugcugacacauuauguauagguuaucaugcgaacaauucaacagacacuguagacacaguacuagaaaagaauguaacaguaacacacucuguuaaucuucuagaagacaagcauaacgggaaacuaugcaaacuaagagggguagccccauugcauuuggguaaauguaacauugcuggcuggaucuugggaaauccagagugugaaucacucuccacagcaagcucaugguccuacauuguggaaacaucuaguucagacaauggaacguguuacccaggagauuucaucgauuaugaggagcuaagagagcaauugagcucagugucaucauuugaaagguuugagauauuccccaagacaaguucauggcccaaucaugacucgaacaaagguguaacugcagcauguccucaugcuggagcaaaaagcuucuacaaaaauuuaauauggcuaguuaaaaaaggaaauucauacccaaagcucagcaaauccuacauuaaugauaaagggaaagaaguccucgugcuauggggcauucaccauccaucuacuacugcugaccaacaaagucucuaucagaaugcagauacauauguuuuuguggggacaucaagauacagcaagaaguucaagccggaaauagcaauaagacccaaagugagggaucaagaagggagaaugaacuauuacuggacacuaguagagccgggagacaaaauaacauucgaagcaacuggaaaucuagugguaccgagauaugcauucgcaauggaaagaaaugcuggaucugguauuaucauuucagauacaccaguccacgauugcaauacaacuugucagacacccaagggugcuauaaacaccagccucccauuucagaauauacauccgaucacaauuggaaaaugucccaaauauguaaaaagcacaaaauugagacuggccacaggauugaggaaugucccgucuauucaaucuagaggccuauuuggggccauugccggcuucauugaagggggcuggacagggaugguagauggaugguaugguuaucaccaucaaaaugagcaggggucaggauaugcagccgaccugaagagcacacagaaugccauugacaagauuacuaacaaaguaaauucuguuauugaaaagaugaauacacaguucacagcaguagguaaagaguucaaccaccuggaaaaaagaauagagaauuuaaauaaaaaaguugaugaugguuuccuggacauuuggacuuacaaugccgaacuguugguuguauuggaaaaugaaagaacuuuggaauaccacgauucaaaugugaagaacuuauaugaaaagguaagaaaccaguuaaaaaacaaugccaaggaaauuggaaauggcugcuuugaauuuuaccacaaaugcgauaacacgugcauggaaagugucaaaaaugggacuuaugacuacccaaaauacucagaggaagcaaaauuaaacagagaagaaauagaugggguaaagcuggaaucaacaaggauuuaccagauuuuggcgaucuauucaacugucgccaguucauuaguacugguaguuucccugggggcaaucaguuuuuggaugugcuuuaaugggucucuacaguguagaauauguguuuaa

SEQ ID NO: 44480 - RNA, 1701 nt, Artificial Sequence
  derived and/or modified CDS sequence (wt) from hemagglutinin__InfluenzaA__AID70450
augaaggcaauacuaguaguucugcuauauacauuugcaaccgcaaaugcagacacauuauguauagguuaccaugcgaacaauucaacagacacuguagacacaguacuagaaaagaauguaacaguaacacacucuguuaaucuucuagaagacaagcauaacgggaaacuaugcaaacuaagagggguagccccauugcaucuggguaaauguaacauugcuggcuggauccugggaaauccagagugugaaucacucuccacagcaagcucaugguccuacauuguggaaacaucuaguucagacaauggaacguguuacccaggagauuucaucgauuaugaggagcuaagagagcaauugagcucagugucaucauuugaaagguuugagauauuccccaagacaaguucauggcccaaucaugacucgaacaaaggaguaacggcagcauguccucaugcuggagcaaaaggcuucuacaaaaauuuaauauggcuaguuaaaaaaggaaauucauacccaaagcucagcaaauccuacauuaaugauaaagggaaagaaguccucgugcuauggggcauucaccauccaucuacuacugcugaccaacaaagucucuaucagaaugcagauacauauguuuuuguggggacaucaagauacagcaagaaguucaagccggaaauagcaauaagacccaaagugagggaucaagaagggagaaugaacuauuacuggacacuaguagagccgggagacaaaauaacauucgaagcaacuggaaaucuagugguaccgagauaugcauucgcaauggaaagagaugcuggaucugguauuaucauuucagauacaccaguccacgauugcaauacaacuugucagacauccaagggugcuauaaacaccagccucccauuucagaauauacauccgaucacaauuggaaaauguccaaaauauguaaaaagcacaaaauugagacuggccacaggauugaggaaugucccgucuauucaaucuagaggccuauuuggggccauugccggcuucauugaagggggguggacagggaugguagauggaugguacgguuaucaccaucaaaaugagcaggggucaggauaugcagccgaccugaagagcacacagaaugccauugacaagauuacuaacaaaguaaauucuguuauugaaaagaugaauacacaguucacagcaguagguaaagaguucaaccaccuggaaaaaagaauagagaauuuaaauaaaaaaguugaugaugguuuccuggacauuuggacuuacaaugccgaacuguugguuguauuggaaaaugaaagaacuuuggaauaccacgauucaaaugugaagaacuuauaugagaagguaagaaaccaguuaaaaaacaaugccaaggaaauuggaaauggcugcuuugaauuuuaccacaaauuugauaacacguguauggaaagugucaaaaaugggacuuaugacuacccaaaauacucagaggaagcaaaauuaaacagagaaaaaauagaugggguaaagcuggaaucaacaaggauuuaccagauuuuggcgaucuauucaacugucgccaguucauugguacagguagucucccugggggcaaucaguuuuuggaugugcuuuaaugggucucuacaguguagaauauguauuuaa

SEQ ID NO: 44481 - RNA, 1701 nt, Artificial Sequence
  derived and/or modified CDS sequence (wt) from hemagglutinin__InfluenzaA__AID70451
augaaggcaauacuaguaguuaugcuauauacauuugcaaccgcaaaugcagacacauuauguauagguuaucaugcgaacaauucaacagacacuguagacacaguacuagaaaagaauguaacaguaacacacucuguuaaucuucuagaagacaagcauaacgggaaacuaugcaaacuaagagggguagccccauugcauuuggguaaauguaacauugcuggcuggauccugggaaauccagagugugaaucacucuccacagcaagcucaugguccuacauuguggaaacaucuaguucagacaauggaacguguuacccaggagauuucaucgauuaugaggagcuaagagagcaauugagcucagugucaucauuugaaagguuugagauauuccccaaaacaaguucauggcccaaucaugacucgaacaaagguguaacggcagcauguccucaugcuggagcaaaaggcuucuacaaaaauuuaauauggcuaguuaaaaaaggaaauucauacccaaagcucagcaaauccuacauuaaugauaaagggaaagaaguccucgugcuauggggcauucaccauccaucuacuacugcugaccaacaaagucucuaucagaaugcagauacauauguuuuuguggggacaucaagauacagcaagaaguucaagccggaaauagcaauaagacccaaagugagggaucaagaagggagaaugaacuauuacuggacacuaguagagccgggagacaaaauaacauucgaagcaacuggaaaucuagugguaccgagauaugcauucgcaauggaaagaaaugcuggaucugguauuaucauuucagauacaccaguccacgauugcaauacaacuugucagacacccaagggugcuauaaacaccagccucccauuucagaauauacauccgaucacaauuggaaaauguccaaaauauguaaaaagcacaaaauugagacuggccacaggauugaggaaugucccgucuauucaaucuagaggccuauuuggggccauugccggcuucauugaagggggguggacagggaugguagauggaugguacgguuaucaccaucaaaaugagcaggggucaggauaugcagccgaccugaagagcacacagaaugccauugacaagauuacuaacaaaguaaauucuguuauugaaaagaugaauacacaguucacagcaguagguaaagaguucaaccaccuggaaaaaagaauagagaauuuaaauaaaaaaguugaugaugguuuccuggacauuuggacuuacaaugccgaacuguugguuguauuggaaaaugaaagaacuuuggaauaccacgauucaaaugugaagaacuuauaugaaaagguaagaaaccaguuaaaaaacaaugccaaggaaauuggaaauggcugcuuugaauuuuaccacaaguuugauaacacgugcauggaaagugucaaaaaugggacuuaugacuacccaaaauacucagaggaagcaaaauuaaacagagaagaaauagauggaguaaagcuggaaucaacaaggauuuaccagauuuuggcgaucuauucaacugucgccaguucauugguacugguagucucccugggggcaaucaguuuuuggaugugcuuuaaugggucucuacaguguagaauauguauuuaa

SEQ ID NO: 44482 - RNA, 1701 nt, Artificial Sequence
  derived and/or modified CDS sequence (wt) from hemagglutinin__InfluenzaA__AID70452
augaaggcaauacuaguaguucugcuauauacauuugcaaccgcaaaugcagacacauuauguauagguuaccaugcgaacaauucaacagacacuguagacacaguacuagaaaagaauguaacaguaacacacucuguuaaucuucuagaagacaagcauaacgggaaacuaugcaaacuaagagggguagccccauugcaucuggguaaauguaacauugcuggcuggauccugggaaauccagagugugaaucacucuccacagcaagcucaugguccuacauuguggaaacaucuaguucagacaauggaacguguuacccaggagauuucaucgauuaugaggagcuaagagagcaauugggcucagugucaucauuuaaaagguuugagauauuccccaagacaaguucauggcccaaucaugacucgaacaaagguguaacggcagcauguccucaugcuggagcaaaaggcuucuacaaaaauuuaauauggcuaguuaaaaaaggaaauucauacccaaagcucagcaaauccuacauuaaugauaaagggaaagaaguccucgugcuauggggcauucaccauccaucuacuacugcugaccaacaaagucucuaucagaaugcagauacauauguuuuuguggggacaucaagauacagcaagaaguucaagccggaaauagcaauaagacccaaagugagggaucaagaagggagaaugaacuauuacuggacacuaguagagccgggagacaaaauaacauucgaagcaacuggaaaucuagugguaccgagauaugcauucgcaauggaaagagaugcuggaucugguauuaucauuucagauacaccaguccacgauugcaauacaacuugucagacacccaagggagcuauaaacaccagccucccauuucagaauauacauccgaucacaauuggaaaauguccaaaauauguaaaaagcacaaaauugagacuggccacaggauugaggaaugucccgucuauucaaucuagaggccuauuuggggccauugccggcuucauugaagggggguggacagggaugguagauggaugguacgguuaucaccaucaaaaugagcaggggucaggauaugcagccgaccugaagagcacacagaaugccauugacaagauuacuaacaaaguaaauucuguuauugaaaagaugaauacacaguucacagcaguagguaaagaguucaaccaccuggaaaaaagaauagagaauuuaaauaaaaaaguugaugaugguuuccuggacauuuggacuuacaaugccgaacuguugguuguauuggaaaaugaaaggacuuuggaauaccacgauucaaaugugaagaacuuauaugagaagguaagaaaccaguuaaaaaacaaugccaaggaaauuggaaauggaugcuuugaauuuuaccacaaaugcgauaacacguguauggaaagugucaaaaaugggauuuaugacuacccaaaauacucagaggaagcaaaauuaaacagagaaaaaauagaugggguaaagcuggaaucaacaaggauuuaccagauuuuggcgaucuauucaacugucgccaguucauugguacugguagucucccugggggcaaucaguuuuuggaugcgcuuuaaugggucucuacaguguaguauauguauuuaa

SEQ ID NO: 44483 - RNA, 1701 nt, Artificial Sequence
  derived and/or modified CDS sequence (wt) from hemagglutinin__InfluenzaA__AID70453
augaaggcaauacuaguaguucugcuauauacauuugcaaccgcaaaugcagacacauuauguauagguuaccaugcgaacaauucaacagacacuguagacacagugcuagaaaagaauguaacaguaacacacucuguuaaucuucuagaagacaagcauaacgggaaacuaugcaaacuaagagggguagccccauugcauuuggguaaauguaacauugcuggcuggauccugggaaauccagagugugaaucgcucuccacagcaagcucaugguccuacauuguggaaacaucuaguucagacaauggaacguguuacccaggagauuucaucgauuaugaggagcuaagagagcaauugagcucagugucaucauuugaaagguuugagauauuccccaagacaaguucauggcccaaucaugacucgaacaaagguguaacggcagcauguccucaugcuggagcaaaaggcuucuacaaaaauuuaauauggcuaguuaaaaaaggaaauucauacccaaagcucagcaaauccuacauuaaugauaaagggaaagaaguccucgugcuauggggcauucaccauccaucuacuacugcugaccaacaaagucucuaucagaaugcagauacauauguuuuuguggggacaucaagauacagcaagaaguucaagccggaaauagcaauaagacccaaagugagggaucaagaagggagaaugaacuauuacuggacacuaguagagccgggagacaaaauaacauucgaagcaacuggaaaucuagugguaccgagauaugcauucgcaauggaaagagaugcuggaucugguauuaucauuucagauacaccaguccaagauugcaauacaacuugucagacacccaagggugcuauaaacaccagccucccauuucagaauauacauccgaucacaauuggaaaauguccaaaauauguaaaaagcacaaaauugagacuggucacaggauugaggaaugucccgucuauucaaucuagaggccuauuuggggccauugccggcuucauugaagggggguggacagggaugguagauggaugguacgguuaucaccaucaaaaugagcaggggucaggauaugcagccgaccugaagagcacacagaaugccauugacaagauuacuaacaaaguaaauucuguuauugaaaagaugaauacacaguucacagcaguagguaaagaguucaaccaccuggaaaaaagaauagagaauuuaaauaaaaaaguugaugaugguuuccuggacauuuggacuuacaaugccgaacuguugguuguauuggaaaaugaaagaacuuuggaauaccacgauucaaaucugaagaacuuauaugaaaagguaagaaaccaguuaaaaaacaaugccaaggaaauuggaaauggcugcuuugaauuuuaccacaaauuugauaacacguguauggaaagugucaaaaaugggacuuaugacuacccaaaauacucagaggaagcaaaauuaaacagagaagaaauagaugggguaaagcuggaaucaacaaggauuuaccagauuuuggcgaucuauucaacugucgccaguucauugguacagguagucucccugggugcaaucaguuuuuggaugcgcuuuaaugggucucuacauuguagaauauguauuuaa

SEQ ID NO: 44484 - RNA, 1701 nt, Artificial Sequence
  derived and/or modified CDS sequence (wt) from hemagglutinin__InfluenzaA__AID70454
augaaggcaauacuaguaguucugcuauauacauuugcaaccgcaaaugcagacacauuauguauagguuaucaugcgaacaauucaacagacacuguagacacaguacuagaaaagaauguaacaguaacacacucuguuaaccuucuagaagacaagcauaacgggaaacuaugcaaacuaagagggguagccccauugcauuuggguaaauguaacauugcuggcuggauccugggaaauccagagugugaaucacucuccacagcaagcucaugguccuacauuguggaaacaucuaguucagacaauggaacguguuacccaggagauuucaucaauuaugaggagcuaagagagcaauugagcucagugucaucauuugaaagguuugagauauuccccaagacaaguucauggcccaaucaugacucgaacaaagguguaacggcagcauguccucaugcuggagcaaaaagcuucuacaaaaauuuaauauggcuaguuaaaaaaggaaauucauacccaaagcucagcaaauccuacauuaaugauaaagggaaagaaguccucgugcuguggggcauucaccauccaucuacuacugcugaccaacaaagucucuaucagaaugcagaugcauauguuuuuguggggacaucaagauacagcaagaaguucaagccggaaauagcaauaagacccaaagugagggaucaagaagggagaaugaacuauuacuggacacuaguagagccgggagacaaaauaacauucgaagcaacuggaaaucuagugguaccgagauaugcauucgcaauggaaagaaaugcuggaucugguauuaucauuucagauacaccaguccacgauugcaauacaacuugucagacacccaagggugcuauaaacaccagccucccauuucagaauauacauccgaucacaauuggaaaauguccaaaauauguaaaaagcacaaaaaugagacuggccacaggauugaggaaugucccguguauucaaucuagaggccuauuuggggccauugccggcuucauugaagggggguggacagggaugguagauggaugguacgguuaucaccaucaaaaugagcaggggucaggauaugcagccgaccugaagagcacacagaaugccauugacaagauuacuaacaaaguaaauucuguuauugaaaagaugaauacacaguucacagcaguagguaaagaguucaaccaccuggaaaaaagaauagagaauuuaaauaaaaaaguugaugaugguuuccuggacauuuggacuuacaaugccgaacuguugguuguauuggaaaaugaaagaacuuuggacuaccacgauucaaaugugaagaacuuguaugaaaagguaagaaaccaguuaaaaaacaaugccaaggaaauuggaaacggcugcuuugaauuuuaccacaaaugcgauaacacgugcauggaaagugucaaaaaugggacuuaugacuacccaaaauacucagaggaagcaaaauuaaacagagaagaaauagaugggguaaagcuggaaucaacaaggauuuaccagauuuuggcgaucuauucaacugucgccaguucauugguacugguagucucccugggggcaaucaguuucuggaugugcucuaaugggucucuacaguguagaauauguauuuaa

SEQ ID NO: 44485 - RNA, 1701 nt, Artificial Sequence
  derived and/or modified CDS sequence (wt) from hemagglutinin__InfluenzaA__AID70455
augaaggcaauacuaguaguucugcuauauacauuugcaaccgcaaaugcagacacauuauguauagguuaccaugcgaacaauucaacagacacuguagacacaguacuagaaaagaauguaacaguaacacacucuguuaaucuucuagaagacaagcauaacgggaaacuaugcaaacuaggagggguagccccauugcauuuggguaaauguaacauugcuggcuggauccugggaaauccagagugugaaucacucuccacagcaagcucaugguccuacauuguggaaacaucuaguucagacaauggaacguguuacccaggagauuucaucgauuaugaggagcuaagagagcaauugagcucagugucaucauuugaaagguuugagauauuccccaagacaaguucauggcccaaucaugacucgaacaaagguguaacggcagcauguccucaugcuggagcaaaaggcuucuacaaaaauuuaauauggcuaguuaaaaaaggaaauucauacccaaagaucagcaaauccuacauuaaugauaaagggaaagaaguccucgugcuauggggcauucaccauccaucuacuacugcugaccaacaaagucucuaucagaaugcagauacauauauuuuugugggaacaucaagauacagcaagaaguucaagccggaaauagcaauaagacccaaagugagggaucaagaagggagaaugaacuauuacuggacacuaguagagccgggagacaaaauaacauucgaggcaacuggaaaucuagugguaccgagauaugcauucgcaauggaaagagaugcuggaucugguauuaucauuucagauacaccaguccacgauugcaauacaacuugucagacacccaagggugcuauaaacaccagccucccauuucagaauauacauccgaucacaauuggaaaauguccaaaauauguaaaaagcacaaaauugagacuggccacaggauugaggaaugucccgucuauucaaucuagaggccuauuuggggccauugccggcuucauugaagggggguggacaggaaugguagauggaugguacgguuaucaccaucaaaaugagcaggggucaggauaugcagccgaccugaagagcacacagaaugccauugacaagauuacuaacaaaguaaauucuguuauuaaaaagaugaauacacaguucacagcaguagguaaagaguucaaccaccuggaaaaaagaauagagaauuuaaauaaaaaaguugaugaugguuuccuggacauuuggacuuacaaugccgaacuguugguuguauuggaaaaugaaagaacuuuggaauaccacgauucaaaugugaagaacuuauaugaaaagguaagaaaccaguuaaaaaacaaugccaaggaaauuggaaauggaugcuuugaauuuuaccacaaauuugauaacacguguauggaaagugucaaaaaugggacuuaugacuacccaaaauacucagaggaagcaaaauuaaacagagaagaaauagaugggguaaagcuggaaucaacaaggauuuaccagauuuuggcgaucuauucaacugucgccaguucauugguacugguagucucccugggggcaaucaguuuuuggaugugcuuuaaugggucucuacaguguagaauauguauuuaa

SEQ ID NO: 44486 - RNA, 1701 nt, Artificial Sequence
  derived and/or modified CDS sequence (wt) from hemagglutinin__InfluenzaA__AID70456
augaaggcaauacuaguaguucugcuauauacauuugcaaccgcaaaugcagacacauuauguauagguuaucaugcgaacaauucaacagacacuguagacacaguacuagaaaagaauguaacaguaacacacucuguuaaucuucuagaagacaagcauaacgggaaacuaugcaaacuaagagggguagccccauugcauuuggguaaauguaacauugcuggcuggauccugggaaauccagagugugaaucacucuccacagcaagcucaugguccuacauuguggaaacaucuaguucagacaauggaacguguuacccaggagauuucaucgauuaugaggagcuaagagagcaauugagcucagugucaucauuugaaagguuugagauauuccccaagacaaguucauggcccaaucaugacucgaacaaagguguaacggcagcauguccucaugcuggagcaaaaagcuucuacaaaaauuuaauauggcuaguuaaaaaaggaaauucauacccaaagcucagcaaauccuacauuaaugauaaagggaaagaaguccucgugcuauggggcauucaccauccaucuacuacugcugaccaacaaagucucuaucagaaugcagauacauauguuuuuguggggacaucaagauacagcaagaaguucaagccggaaauagcaauaagacccaaagugagggaucaagaagggagaaugaacuauuacuggacacuaguagagccgggagacaaaauaacauucgaagcaacuggaaaucuagugguaccgagauaugcauucgcaauggaaagaaaugcuggaucugguauuaucauuucagauacaccaguccacgauugcaauacaacuugucagacacccaagggugcuauaaacaccagccucccauuucagaauauacauccgaucacaauuggaaaauguccaaaauauguaaaaagcacaaaauugagacuggccacaggauugaggaaugucccgucuauucaaucuagaggccuauuuggggccauugccggcuucauugaagggggcuggacagggaugguagauggaugguacgguuaucaccaucaaaaugagcaggggucaggauaugcagccgaccugaagagcacacagaaugccauugacaagauuacuaacaaaguaaauucuguuauugaaaagaugaauacacaguucacagcaguaguuaaagaguucaaccaccuggaaaaaagaauagagaauuuaaauaaaaaaguugaugaugguuuccuggacauuuggacuuacaaugccgaacuguugguuguauuggaaaaugaaagaacuuuggaauaccacgauucaaaucugaagaacuuauaugaaaagguaagaaaccaguuaaaaaacaaugccaaggaaauuggaaauggcugcuuugaauuuuaccacaaauuugauaacacgugcauggaaagugucaaaaaugggacuuaugacuacccaaaauacucagaggaagcaaaauuaaacagagaagaaauagaugggguaaagcuggaaucaacaaggauuuaccagauuuuggcgaucuauucaacugucgccaguucauugguacagguagucucccugggggcaaucaguuuuuggaugugcuuuaaugggucucuacaguguagaauauguauuuaa

SEQ ID NO: 44487 - RNA, 1701 nt, Artificial Sequence
  derived and/or modified CDS sequence (wt) from hemagglutinin__InfluenzaA__AID70457
augaaggcaauacuaguaguucugcuauauacauuugcaaccgcaaaugcagacacauuauguauagguuaccaugcgaacaauucaacagacacuguagacacaguacuagaaaagaauguaacaguaacacacucuguuaaucuucuagaagacaagcauaacgggaaacuaugcaaacuaagagggguagccccauugcaucuggguaaauguaacauugcuggcuggauccugggaaauccagagugugaaucacucuccacagcaagcucaugguccuacauuguggaaacaucuaguucagacaauggaacguguuacccaggagauuucaucgauuaugaggagcuaagagagcaauugagcucagugucaucauuugaaagguuugagauauuccccaagacaaguucauggcccaaucaugacucgaacaaagguguaacggcagcauguccucaugcuggagcaaaaggcuucuacaaaaauuuaauauggcuaguuaaaaaaggaaauucauacccaaagcucagcaaauccuacauuaaugauaaagggaaagaaguccucgugcuauggggcauucaccauccaucuacuacugcugaccaacaaagucucuaucagaaugcagauacauauguuuuuguggggacaucaagauacagcaagaaguucaagccggaaauagcaauaagacccaaagugagggaucaagaagggagaaugaacuauuacuggacacuaguagagccgggagacaaaauaacauucgaagcgacuggaaaucuagugguaccgagauaugcauucgcaauggaaagagaugcuggaucugguauuaucauuucagauacaccaguccacgauugcaauacaacuugucagacacccaagggugcuauaaacaccagucucccauuucagaauauacauccgaucacaauuggaaaauguccaaaauauguaaaaagcacaaaauugagacuggccacaggauugaggaaugucccgucuauucaaucuagaggccuauuuggggccauugccggcuucauugaagggggguggacagggaugguagauggaugguacgguuaucaccaucaaaaugagcaggggucaggauaugcagccgaccugaagagcacacagaaugccauugacaagauuacuaacaaaguaaauucuguuauugaaaagaugaauacacaguucacagcaguagguaaagaguucaaccaccuggaaaaaagaauagagaauuuaaauaaaaaaguugaugaugguuuccuggacauuuggacuuacaaugccgaacuguugguuguauuggaaaaugaaagaacuuuggaauaccacgauucaaaugugaagaacuuauaugagaagguaagaaaccaguuaaaaaacaaugccaaggaaauuggaaauggaugcuuugaauuuuaccacaaauuugauaacacguguauggaaagugucaaaaaugggacuuaugacuacccaaaauacucagaggaagcaaaauuaaacagagaaaaaauagaugggguaaagcuggaaucaacaaggauuuaccagauuuuggcgaucuauucaacugucgccaguucauugguacagguagucucccugggggcaaucaguuuuuggaagugcuuuaaugggucucuacaguguagaauauguaguuaa

SEQ ID NO: 44488 - RNA, 1701 nt, Artificial Sequence
  derived and/or modified CDS sequence (wt) from hemagglutinin__InfluenzaA__AID70458
augaagacuaucauugcuuugagcuacauucuaugucugguuuucgcucaaaaauuuccuggaaaugacaacagcauggcaacgcugugccuugggcaccaugcaguaccaaacggaacgauggugaaaacaauaacgaaugaccaaauugaaguuacuaaugcuacugagcugguucagaguuccucaacagguggaauaugcaacagcccucaucagauccuugauggaggaaacugcacacuaauagaugcucuauugggagacccucagugugauggcuuccagaauaagaaaugggaccuuuuuguugaacgcagcaaagccuacagcaacuguuacccuuaugaugugccggauuaugcaucccuuaggucaauaguugccucauccgguacacuggaauuuaacaaugaaagcuucaauuggacuggagucacucaaaauggaaaaagcgcuucuugcaaaaggggaucugacaacaguuucuuuaguagauugaauugguugacccacuuaaauuacaaauauccagcauugaaaguuacuaugccaaacaaugaaaaauuugacaaauuguacauuugggggguucaccacccggguacguacaaugaucaaaucagccuauaugcucaagcaucaggaauaaucacagucucuaccaaaagaaaccaacaaacugugaucccgaauaucggaucuagacccagaguaagggauauccccagcagaauaagcaucuauuggacaauagugaaaccgggagacauacuuuugauuaacagcacagggaaucuaauugcuccucgggguuacuucaaaauacaaagugggaaaagcucaauaaugagaucagaugcacccauuggcaaaugcaauucugaauguaucacuccaaauggaagcauucccaaugacaaaccauuucaaaauguaaauaggaucacauauggggccugucccagguauguuaagcaaaacacccuaaaauuggcaacaggaaugagaaauguuccagagaaacaaacuagaggcauauuuggcgcaaucgcggguuucauagaaaaugguugggagggaaugguugaugguugguacgguuucaggcaucaaaauucugagggaaugggacaagcagcagaucucaaaagcacucaagcagcgaucaaucaaaucaauggaaagcugaauagguugaucgggaaaaccauugagaaauuccaucagauugaaaaagaauucucagagguagaagggagaauucaggaccucgagaaauauguugaggacaccaaaauagaucucuggucauacaacgcggagcuucuuguugcccuggagaaccaacauacaauugaucuaacugacucagaaauggacaaacuguuugaaagaacaaagaagcaaaugagggaaaaugcugaagauaugggcaaugguuguuucaaaauauaccacaaaugugacaaugccugcauaggaucaaucagaaauggaauuuaugaccgugauauauacagggaugaagcauugagcaaccgguuccagaucaaagguguugagcugaaggcaggauacaaagauuggauccuauggauuuccuuugccauaucauguuuucugcucuguguuguuuuguugggguucaucaugugggccugccaaaagggcaaccuuaggugcaacauuugcauuuga

SEQ ID NO: 44489 - RNA, 1701 nt, Artificial Sequence
  derived and/or modified CDS sequence (wt) from hemagglutinin__InfluenzaA__AID70459
augaagacuaucauugcuuugagcuacauucuaugucugguuuucgcucaaaaaguuccuggaaaugacaacagcacggcaacgcugugccuugggcaccaugcagugccaaacggaacgauagugaaaacaaucacgaaugaccaaauugaaguuacuaaugcuacugagcugguucagaguuccucaacaggugaaauaugcaacaguccucaucagauccuugauggagaaaacugcacacuaauagaugcucuauugggagacccucagugugauggcuuccaaaacaagaaaugggaccuuuuuguugaacgaagcaaagcccacagcaacuguuacccuuaugaugugccggauuaugccucccuuaggucacuaguugccucauccggcacacuggaguuuaacaaugaaagcuucaauuggacuggagucacucaaaacggaacaagcucugcuugcauaaggagaucuaauaauaguuucuuuaguagauugaauugguugacccacuugaacuucaaauacccagcauugaacgugacuaugccaaacaaugaacaauuugacaaauuguacauuugggggguucaccacccggguacggacaaggaccaaaucuuccuguaugcucaagcaucaggaagaaucacaguaucuaccaaaaaaagccaacaagcuguaauuccgaauaucggaucuagacccagaguaaggaauaucccuagcagaguaagcaucuauuggacaauaguaaaaccgggagauauacuuuugauuaacagcacagggaaucuaauugcuccuagggguuacuucaaaauacgaagugggaaaagcucaauaaugagaucagaugcacccauuggcaaaugcaauucugcaugcaucacuccaaauggaagcauucccaaugacaaaccauuccaaaauguaaacaggaucacauacggggccugucccagauauguuaagcaaaacacucugaaauuggcaccaggaaugcgaaauguaccagagaaacaaacuagaggcauauuuggcgcaaucgcggguuucauagaaaaugguugggagggaaugguggaugguugguacgguuucaggcaucaaaauucugagggaagaggacaagcagcagaucucaaaagcacucaagcagcaauugaucaaaucaaugggaagcugaauagauugaucgggaaaaccaucgagaaauuccaucagauugaaaaugaauucucagaagucgaagggagaauucaggaccuugagaaauauguugaggacacuaaaauagaucucuggucauacaucgcggagcuucuuguugcccuggagaaccaacacacaauugaucuaacugacucagaaaugaacaaacuguuugaaaaaacaaagaagcaacugagggaaaaugcugaggauaugggcaaugguuguuucaaaauauaccacaaaugugacaaugccugcauaggaucaaucagaaauggaauuuaugaccacgauguguacagagaugaagcauuaaacaaccgauuccagaucaagggaguugagcugaagucaggguacaaagauuggauccuauggauuuccuuugccauaucauguuuucugcucuguguugcuuuguugggguucaucaugugggccugccaaaaaggcaacauuaggugcaacauuugcauuuga

SEQ ID NO: 44490 - RNA, 1701 nt, Artificial Sequence
  derived and/or modified CDS sequence (wt) from hemagglutinin__InfluenzaA__AID70460
augaagacuaucauugcuuugagcuacauucuaugucugguuuucgcucaaaaacuuccuggaaaugacaacagcacggcaacgcugugccuugggcaccaugcagugccaaacggaacgauagugaaaacaaucacgaaugaccaaauugaaguuacuaaugcuacugagcugguucagaguuccucaacaggugaaauaugcaacaguccucaucagauccuugauggagaaaacugcacacuaauagaugcucuauugggagacccucagugugauggcuuccaaaacaagaaaugggaccuuuuuguugaacgaagcaaagcccacagcaacuguuacccuuaugaugugccggauuaugccucccuuaggucacuaguugccucauccggcacacuggaguuuaacaaugaaagcuucaauuggacuggagucacucaaaacggaacaagcucugcuugcauaaggagaucuaauaauaguuucuuuaguagauugaauugguugacccacuugaacuucaaauacccagcauugaacgugacuaugccaaacaaugaacaauuugacaaauuguacauuugggggguucaccacccggguacggacaaggaccaaaucuuccuguaugcucaagcaucaggaagaaucacaguaucuaccaaaaaaagccaacaagcuguaauuccgaauaucggaucuagacccagaguaaggaauaucccuagcagaguaagcaucuauuggacaauaguaaaaccgggagauauacuuuugauuaacagcacagggaaucuaauugcuccuagggguuacuucaaaauacgaagugggaaaagcucaauaaugagaucagaugcacccauuggcaaaugcaauucugcaugcaucacuccaaauggaagcauucccaaugacaaaccauuccaaaauguaaacaggaucacauacggggccugucccagauauguuaagcaaaacacucugaaauuggcaacaggaaugcgaaauguaccagagaaacaaacuagaggcauauuuggcgcaauagcggguuucauagaaaaugguugggagggaaugguggauggaugguacgguuucaggcaucaaaauucugagggaaggggacaagcagcagaucucaaaagcacucaagcagcaauugaucaaaucaaugggaagcugaauagauugaucgggaaaaccaucgagaaauuccaucagauugaaaaagaauucucagaagucgaagggagaauucaggaccuugagaaauauguugaggacacuaaaauagaucucuggucauacaacgcggagcuucuuguugcccuggagaaccaacacacaauugaucuaacugacucugaaaugaacaaacuguuugaaaaaacaaagaagcaacugagggaaaaugcugaggauaugggcaaugguuguuucaaaauauaccacaaaugugacaaugccugcauaggaucaaucagaaauggaauuuaugaccacgauguguacagagaugaagcauuaaacaaccgauuccagaucaagggaguugagcugaagucaggguacaaagauuggauccuauggauuuccuuugccauaucauguuuucugcucuguguugcuuuguugggguucaucaugugggccugccaaaaaggcaacauuaggugcaacauuugcauuuga

SEQ ID NO: 44491 - RNA, 1701 nt, Artificial Sequence
  derived and/or modified CDS sequence (wt) from hemagglutinin__InfluenzaA__AID70461
augaagacuaucauugcuuugagcuacauucuaugucugguuuucgcucaaaaacuuccuggaaaugacaacagcacggcaacgcugugccuugggcaccaugcagugccaaacggaacgauagugaaaacaaucacgaaugaccaaauugaaguuacuaaugcuacugagcugguucagaguuccucaacaggugaaauaugcaacaguccucaucagauccuugauggagaaaacugcacacuaauagaugcucuauugggagacccucagugugauggcuuccaaaacaagaaaugggaccuuuuuguugaacgaagcaaagcccacagcaacuguuacccuuaugaugugccggauuaugccucccuuaggucacuaguugccucauccggcacacuggaguuuaacaaugaaagcuucaauuggacuggagucacucaaaacggaacaagcucugcuugcauaaggagaucuaauaauaguuucuuuaguagauugaauugguugacccacuugaacuucaaauacccagcauugaacgugacuaugccaaacaaugaacaauuugacaaauuguacauuugggggguucaccacccggguacggacaaggaccaaaucuuccuguaugcucaagcaucaggaagaaucacaguaucuaccaaaaaaagccaacaagcuguaauuccgaauaucggaucuagacccagaguaaggaauaucccuagcagaguaagcaucuauuggacaauaguaaaaccgggagauauacuuuugauuaacagcacagggaaucuaauugcuccuagggguuacuucaaaauacgaagugggaaaagcucaauaaugagaucagaugcacccauuggcaaaugcaauucugaaugcaucacuccaaauggaagcauucccaaugacaaaccauuccaaaauguaaacaggaucacauacggggccugucccagauauguuaagcaaaacacucugaaauuggcaacaggaaugcgaaauguaccagagaaacaaacuagaggcauauuuggcgcaauagcggguuucauagaaaaugguugggagggaaugguggaugguugguacgguuucaggcaucaaaauucugagggaaggggacaagcagcagaucucaaaagcacucaagcagcaauugaucaaaucaaugggaagcugaauagauugaucgggaaaaccaucgagaaauuccaucagauugaaaaagaauucucagaagucgaagggagaauucaggaccuugagaaauauauugaggacacuaaaauagaucuuuggucauacaacgcggagcuucuuguugcccuggagaaccaacacacaauugaucuaacugacucagaaaugaacaaacuguuugaaaaaacaaagaagcaacugagggaaaaugcugaggauaugggcaaugguuguuucaaaauauaccacaaaugugacaaugccugcauaggaucaaucagaaauggaauuuaugaccacgauguguacagagaugaagcauuaaacaaccgauuccagaucaagggaguugagcugaagucaggguacaaagauuggauccuauggauuuccuuugccauaucauguuuucugcuuuguguugcuuuguugggguucaucaugugggccugccaaaaaggcaacauuaggugcaucacuugcauuuga

SEQ ID NO: 44492 - RNA, 1701 nt, Artificial Sequence
  derived and/or modified CDS sequence (wt) from hemagglutinin__InfluenzaA__AID70463
augaagacuaucauugcuuugagcuacauucuaugucugguuuucgcucaaaaaauuccuggaaaugacaacagcacggcaacgcugugccuugggcaccaugcagugccaaacggaacgauagugaaaacaaucacgaaugaccaaauugaaguuacuaaugcuacugagcugguucagaguuccucaacaggugaaauaugcaacaguccucaucagauccuugauggagaaaacugcacacuaauagaugcucuauugggagacccucagugugauggcuuccaaaacaagaaaugggaccuuuuuguugaacgaagcaaagcccacagcaacuguuacccuuaugaugugccggauuaugccucccuuaggucacuaguugccucauccggcacacuggaguuuaacaaugaaagcuucaauuggacuggagucacucaaaacggaacaagcucugcuugcauaaggagaucuaauaauaguuucuuuaguagauugaauugguugacccacuugaacuucaaauacccagcauugaacgugacuaugccaaacaaugaacaauuugacaaauuguacauuugggggguucaccacccggguacggacaaggaccaaaucuuccuguaugcucaagcaucaggaagaaucacaguaucuaccaaaaaaagccaacaagcuguaauuccgaauaucggaucuagacccagaguaaggaauaucccuagcagaguaagcaucuauuggacaauaguaaaaccgggagauauacuuuugauuaacagcacagggaaucuaauugcuccuaggggcuacuucaaaauacgaagugggaaaagcucaauaaugagaucagaugcacccauuggcaaaugcaauucugcaugcaucacuccaaauggaagcauucccaaugacaaaccauuccaaaauguaaacaggaucacauacggggccugucccagauauguuaagcaaaacacucugaaauuggcaacaggaaugcgaaauguaccagagaaacaaacuagaggcauauuuggcgcaauagcggguuucauagaaaaugguugggagggaaugguggaugguugguacgguuucaggcaucaaaauucugagggaaggggacaagcagcagaucucaaaagcacucaagcagcaaucgaucaaaucaaugggaagcugaauagauugaucgggaaaaccaucgagaaauuccaucagauugaaaaagaauucucagaagucgaagggagaauucaggaccuugagaaauauguugaggacacuaaaauagaucucuggucauacaacgcggagcuucuuguugcccuggagaaccaacacacaauugaucuaacugacucagaaaugaacaaacuguuugaaaaaacaaagaagcaacugagggaaaaugcugaggauaugggcaaugguuguuucaaaauauaccacaaaugugacaaugccugcauaggaucaaucagaaauggaauuuaugaccacgauguguacagagaugaagcauuaaacaaccgauuccagaucaagggaguugagcugaagucaggguacaaagauuggauccuauggauuuccuuugccauaucauguuuuuugcuuuguguugcuuuguugggguucaucaugugggccugccaaaaaggcaacauuaggugcaacauuugcauuuga

SEQ ID NO: 44493 - RNA, 1701 nt, Artificial Sequence
  derived and/or modified CDS sequence (wt) from hemagglutinin__InfluenzaA__AID70464
augaagacuaucauugcuuugagcuacauucuaugucugguuuucgcucaaaaacuuccuggagaugacaacagcacggcaacgcugugccuugggcaccaugcagugccaaacggaacgauagugaaaacaaucacgaaugaccaaauugaaguuacuaaugcuacugagcugguucagaguuccucaacaggugaaauaugcaacaguccucaucagauccuugauggagaaaacugcacacuaauagaugcucuauugggagacccucagugugauggcuuccaaaacaagaaaugggaccuuuuuguugaacgaagcaaagcccacagcaacuguuacccuuaugaugugccggauuaugccucccuuaggucacuaguugccucauccggcacacuggaguuuaacaaugaaagcuucaauuggacuggagucacucaaaacggaacaagcucugcuugcauaaggagaucuaauaauaguuucuuuaguagauugaauugguugacccacuugaacuucaaauacccagcauugaacgugacuaugccaaacaaugaacaauuugacaaauuguacauuugggggguucaccacccggguacggacaaggaccaaaucuuccuguaugcucaagcaucaggaaggaucacaguaucuaccaaaaaaagccaacaagcuguaauuccgaauaucggaucuagacccagaguaaggaauaucccuagcagaguaagcaucuauuggacaauaguaaaaccgggagauauacuuuugauuaacagcacagggaaucuaauugcuccuagggguuacuucaaaauacgaagugggaaaagcucaauaaugagaucagaugcacccauuggcaaaugcaauucugcaugcaucacuccaaauggaagcauucccaaugacaaaccauuccaaaauguaaacaggaucacauacggggccugucccagauauguuaagcaaaacacucugaaauuggcaacaggaaugcgaaauguaccagagaaacaaacuagaggcauauuuggcgcaauagcggguuucauagaaaaugguugggagggaaugguggaugguugguacgguuucaggcaucaaaauucugagggaaggggacaagcagcagaucucaaaagcacucaagcagcaaucgaucaaaucaaugggaagcugaauagauugaucgggaaaaccaucgagaaauuccaucagauugaaaaagaauucucagaagucgaagggagaauucaggaccuugagaaauauguugaggacacuaaaauagaucuuuggucauacaacgcggagcuucuuguugcccuggagaaccaacacacaauugaucuaacugacucagaaaugaacaaacuguuugaaaaaacaaagaagcaacugagggaaaaugcugaggauaugggcaaugguuguuucaaaauauaccacaaaugugacaaugccugcauaggaucaaucagaaauggaacuuaugaccacgauguguacagagaugaagcauuaaacaaccgauuccagaucaagggaguugagcugaagucaggguacaaagauuggauccuauggauuuccuuugccauaucauguuuuuugcuuuguguugcuuuguugggguucaucaugugggccugccaaaaaggcaacauuaggugcaacauuugcauuuga

SEQ ID NO: 44494 - RNA, 1701 nt, Artificial Sequence
  derived and/or modified CDS sequence (wt) from hemagglutinin__InfluenzaA__AID70465
augaagacuaucauugcuuugagcuacauucuaugucugguuuucgcucaaaaacuuccuggagaugacaacagcacggcaacgcugugccuugggcaccaugcagugccaaacggaacgauagugaaaacaaucacgaaugaccaaauugaaguuacuaaugcuacugagcugguucagaguuccucaacaggugaaauaugcaacaguccucaucagauccuugauggagaaaacugcacacuaauagaugcucuauugggagacccucagugugauggcuuccaaaacaagaaaugggaccuuuuuguugaacgaagcaaagcccacagcaacuguuacccuuaugaugugccggauuaugccucccuuaggucacuaguugccucauccggcacacuggaguuuaacaaugaaagcuucaauuggacuggagucacucaaaacggaacaagcucugcuugcauaaggagaucuaauaauaguuucuuuaguagauugaauugguugacccacuugaacuucaaauacccagcauugaacgugacuaugccaaacaaugaacaauuugacaaauuguacauuugggggguucaccacccggguacggacaaggaccaaaucuuccuguaugcucaagcaucaggaagaaucacaguaucuaccaaaaaaagccaacaagcuguaauuccgaauaucggaucuagacccagaguaaggaauaucccuagcagaguaagcaucuauuggacaauaguaaaaccgggagauauacuuuugauuaacagcacagggaaucuaauugcuccuagggguuacuucaaaauacgaagugggaaaagcucaauaaugagaucagaugcacccauuggcaaaugcaauucugcaugcaucacuccaaauggaagcauucccaaugacaaaccauuccaaaauguaaacaggaucacauacggggccugucccagauauguuaagcaaaacacucugaaauuggcaacaggaaugcgaaauguaccagagaaacaaacuagaggcauauuuggcgcaauagcggguuucauagaaaaugguugggagggaaugguggauggaugguacgguuucaggcaucaaaauucugagggaaggggacaagcagcagaucucaaaagcacucaagcagcaaucgaucaaaucaaugggaagcugaauagauugaucgggaaaaccaucgagaaauuccaucagauugaaaaagaauuuucagaaguagaagggagaauucaggaccuugagaaauauguugaggacacuaaaauagaucucuggucauacaacgcggagcuucuuguugcccuggagaaccaccacgcaauugaucuaacugacucagaaaugaacaaacuguuugaaaaaacaaagaagcaaaugagggaaaaugcugaggauaugggcaaugguuguuucaaaauauaccucaaaugugacaaugccugcauaggaucaaucagaaauggaauuuaugaccacgauguguacagagaugaagcauuaaacaaccgauuccagaucaagggaguugagcugaagucaggguacaaagauuggauccuauggauuuccuuuaccgaaucauguuuucugcucuguguugcuuuguugggguucaucaugugggccugccaaaaaggcaacauuaggugcaacauuugcauuuga

SEQ ID NO: 44495 - RNA, 1701 nt, Artificial Sequence
  derived and/or modified CDS sequence (wt) from hemagglutinin__InfluenzaA__AID70466
augaagacuaucauugcuuugagcuacauucuaugucugguuuucgcucaaaaacuuccuggaaaugacaacagcacggcaacgcugugccuugggcaccaugcagugccaaacggaacgauagugaaaacaaucacgaaugaccaaauugaaguuacuaaugcuacugagcugguucagaguuccucaacaggugaaauaugcaacaguccucaucagauccuugauggagaaaacugcacacuaauagaugcucuauugggagacccucagugugauggcuuccaaaacaagaaaugggaccuuuuuguugaacgaagcaaagcccacagcaacuguuacccuuaugaugugccggauuaugccucccuuaggucacuaguugccucauccggcacacuggaguuuaacaaugaaagcuucaauuggacuggagucacucaaaacggaacaagcucugcuugcauaaggagaucuaauaauaguuucuuuaguagauugaauugguugacccacuugaacuucaaauacccagcauugaacgugacuaugccaaacaaugaacaauuugacaaauuguacauuugggggguucaccacccggguacggacaaggaccaaaucuuccuguaugcucaagcaucaggaagaaucacaguaucuaccaaaaaaagccaacaagcuguaauuccgaauaucggaucuagacccagaguaaggaauaucccuagcagaguaagcaucuauuggacaauaguaaaaccgggagauauacuuuugauuaacagcacagggaaucuaauugcuccuagggguuacuucaaaauacgaagugggaaaagcucaauaaugagaucagaugcacccauuggcaaaugcaauucugcaugcaucacuccaaauggaagcauucccaaugacaaaccauuccaaaauguaaacaggaucacauacggggccugucccagauauguuaagcaaaacacucugaaauuggcaacaggaaugcgaaauguaccagagaaacaaacuagaggcauauuuggcgcaauagcggguuucauagaaaaugguugggagggaaugguggauggaugguacgguuucaggcaucaaaauucugagggaaggggacaagcagcagaucucaaaagcacucaagcagcaauugaucaaaucaaugggaagcugaauagauugaucgggaaaaccaucgagaaauuccaucagauugaaaaugaauucucagaagucgaagggagaauucaggaccuugagaaauauguugaggacacuaaaauagaucuuuggucauacaucggggagcuucuuguugcccuggagaaccaacacacaauugaucuaacugacucugaaaugaacaaacuguuugaaaaaacaaagaagcaacugagggaaaaugcugaggauaugggcaaugguuguuucaaaauauaccacaaaugugacaaugccugcauaggaucaaucagaaauggaauuuaugaccacgauguguacagagaugaagcauuaaacaaccgauuccagaucaagggaguugagcugaagucaggguacaaagauuggauccuauggauuuccuuugccauaucauguuuucugcucuguguugcuuuguugggguucaucaugugggccugccaaaaaggcaacauuaggugcaacauuugcauuuga

SEQ ID NO: 44496 - RNA, 1701 nt, Artificial Sequence
  derived and/or modified CDS sequence (wt) from hemagglutinin__InfluenzaA__AID70467
augaagacuaucauugcuuugagcuacauucuaugucugguuuucgcucaaaaacuuccuggaaaugacaacagcacggcaacgcugugccuugggcaccaugcagugccaaacggaacgauagugaaaacaaucacgaaugaccaaauugaaguuacuaaugcuacugagcugguucagaguuccucaacaggugaaauaugcaacaguccucaucagauccuugauggagaaaacugcacacuaauagaugcucuauugggagacccucagugugauggcuuccaaaacaagaaaugggaccuuuuuguugaacgaagcaaagcccacagcaacuguuacccuuaugaugugccggauuaugccucccuuaggucacuaguugccucauccggcacacuggaguuuaacaaugaaagcuucaauuggacuggagucacucaaaacggaacaagcucugcuugcauaaggagaucuaauaauaguuucuuuaguagauugaauugguugacccacuugaacuucaaauacccagcauugaacgugacuaugccaaacaaugaacaauuugacaaauuguacauuugggggguucaccacccggguacggacaaggaccaaaucuuccuguaugcucaagcaucaggaagaaucacaguaucuaccaaaaaaagccaacaagcuguaauuccgaauaucggaucuagacccagaguaaggaauaucccuagcagaguaagcaucuauuggacaauaguaaaaccgggagauauacuuuugauuaacagcacagggaaucuaauugcuccuagggguuacuucaaaauacgaagugggaaaagcucaauaaugagaucagaugcacccauuggcaaaugcaauucugcaugcaucacuccaaauggaagcauucccaaugacaaaccauuccaaaauguaaacaggaucacauacggggccugucccagauauguuaagcaaaacacucugaaauuggcaacaggaaugcgaaauguaccagagaaacaaacuagaggcauauuuggcgcaauagcggguuucauagaaaaugguugggagggaaugguggaugguugguacgguuucaggcaucaaaauugugagggaaggggacaagcagcagaucucaaaagcacucaagcagcaauugaucaaaucaaugggaagcugaauagauugaucgggaaaaccaucgagaaauuccaucagauugaaaaugaauucucagaagucgaagggagaauucagggccuugagaaauauguugaggacacuaaaauagaucuuuggucauauaucgcggagcuuauuguugcccuggagaaccaacacacaauugaucuaacugacucugaaaugaacaaacuguuugaaaaaacaaagaagcaaaugagggaaaaugcugaggauaugggcaaugguuguuucaaaauauaccacaaaugugacaaugccugcauaggaucaaucagaaauggaauuuaugaccacgauguguacagagaugaagcauuaaacaaccgauuccagaucaagggaguugagcugaagucaggguacaaagauuggauccuauggauuuccuuugccauaucauguuuucugcucuguguugcuuuguugggguucaucaugugggccugccaaaaaggcaacauuaggugcaacauuugcauuuga

SEQ ID NO: 44497 - RNA, 1701 nt, Artificial Sequence
  derived and/or modified CDS sequence (wt) from hemagglutinin__InfluenzaA__AID70468
augaagacuaucauugcuuugagcuacauucuaugucugguuuucgcucaaaagcuucccggaaaugacaacagcacggcaacgcugugccuugggcaccaugcagugccaaacggaacgauagugaaaacaaucacgaaugaccaaauugaaguuacuaaugcuacugagcugguucagaguuccucaacaggugaaauaugcaacaguccucaucagauccuugauggagaaaacugcacacuaauagaugcucuauugggagacccucagugugauggauuccaaaacaagaaaugggaccuuuuuguugaacgaagcaaagcccacagcaacuguuacccuuaugaugugccggauuaugccucccuuaggucacuaguugccucauccggcacacuggaguuuaacaaugaaagcuucaauuggacuggagucacucaaaacggaacaagcucugcuugcauaaggagaucuaauaauaguuucuuuaguagauugaauugguugacccacuugaacuucaaauacccagcauugaacgugacuaugccaaacaaugaacaauuugacaaauuguacauuugggggguucaccacccggguacggacaaggaccaaaucuuccuguaugcucaagcaucaggaagaaucacaguaucuaccaaaagaagccaacaagcuguaauuccgaauaucggaucuagacccagaguaaggaauaucccuagcagaguaagcaucuauuggacaauaguaaaaccgggagauauacuuuugauuaacagcacagggaaucuaauugcuccuagggguuacuucaaaauacgaagugggaaaagcucaauaaugagaucagaugcacccauuggcaaaugcaauucugcaugcaucacuccaaauggaagcauucccaaugacaaaccauuccaaaauguaaacaggaucacauacggggccugucccagauauguuaagcaaaacacucugaaauuggcuacaggaaugcgaaauguaccagagaaacaaacuagaggcauauuuggagcaauagcggguuucauagaaaaugguugggagggaaugguggauggaugguacgguuucaggcaucaaaauugugagggaaggggacaagcagcagaucucaaaagcacucaagcagcaauugaucaaaucaaugggaagcugaauagauugauggggaaauccaucgagaaauuccaucagauugaaaaugaauucucagaaguagaagggagaauucagggccuugagaaauauguugaggacacuaaaauagaucuuuggucauacaacggggagcuuauuguugcccuggagaaccaacacgcaauugaucuaacugacucugaaaugaacaaacuguuugaaaaaacaaagaagcaaaugagggaaaaugcugaggauaugggcaaugguuguuucaaaauauaccucaaaugugacaaugccugcauaggaucaaucagaaauggaauuuaugaccacgauguguacagagaugaagcauuaaacaaccgauuccagaucaagggaguugagcugaagucaggguacaaagauuggauccuauggauuuccuuuaccauaucauguuuucugcucuguguugcuuuguugggguucaucaugugggcccgccaaaaaggcaacauuaggugcaacauuugcauuuga

SEQ ID NO: 44498 - RNA, 1701 nt, Artificial Sequence
  derived and/or modified CDS sequence (wt) from hemagglutinin__InfluenzaA__AID70469
augaagacuaucauugcuuugagcuacauucuaugucugguuuucgcucaaaaaguucccggaaaugagaacagcacggcaacgcugugccuugggcaccaugcagugccaaacggaacgauagugaaaacaaucacgaaugaccaaauugaaguuacuaaugcuacugagcugguucagaguuccucaacaggugaaauaugcaacaguccucaucagauccuugauggagaaaacugcacacuaauagaugcucuauugggagacccucagugugauggauuccaaaacaagaaaugggaccuuuuuguugaacgaagcaaagcccacagcaacuguuacccuuaugaugugccggauuaugccucccuuaggucacuaguugccucauccggcacacuggaguuuaacaaugaaagcuucaauuggacuggagucacucaaaacggaacaagcucugcuugcauaaggagaucuaauaauaguuucuuuaguagauugaauugguugacccacuugaacuucaaauacccagcauugaacgugacuaugccaaacaaugaacaauuugacaaauuguacauuugggggguucaccacccggguacggacaaggaccaaaucuuccuguaugcucaagcaucaggaagaaucacaguaucuaccaaaagaagccaacaagcuguaauuccgaauaucggaucuagacccagaguaaggaauaucccuagcagaguaagcaucuauuggacaauaguaaaaccgggagauauacuuuugauuaacagcacagggaaucuaauugcuccuagggguuacuucaaaauacgaagugggaaaagcucaauaaugagaucagaugcacccauuggcaaaugcaauucugcaugcaucacuccaaauggaagcauucccaaugacaaaccauuccaaaauguaaacaggaucacauacggggccugucccagauauguuaagcaaaacacucugaaauuggcaacaggaaugcgaaauguaccagagaaacaaacuagaggcauauuuggcgcaauagcggguuucauagaaaaugguugggagggaaugguggaugguugguacgguuucaggcaucaaaauugugagggaaggggacaagcagcagaucucaaaagcacucaagcagcaauugaucaaaucaaugggaagcugaauagauugaucgggaaaaccaucgagaaauuccaucagauugaaaaagaauucucagaagucgaagggagaauucagggccuugagaaauauguugaggacacuaaaauagaucuuuggucauacaacgcggagcuucuuguugcccuggagaaccaacacacaauugaucuaacugacucagaaaugaacaaacuguuugaaaaaacaaagaagcaaaugagggaaaaugcugaggauaugggcaaugguuguuucaaaauauaccacaaaugugacaaugccugcauaggaucaaucagaaauggaauuuaugaccacgauguguacagagaugaagcauuaaacaaccgauuccagaucaagggaguugagcugaagucaggguacaaagauuggauccuauggauuuccuuuaccauaucauguuuucugcucuguguugcuuuguugggguucaucaugugggccugccaaaaaggcaacauuaggugcaacauuugcauuuga

SEQ ID NO: 44499 - RNA, 1701 nt, Artificial Sequence
  derived and/or modified CDS sequence (wt) from hemagglutinin__InfluenzaA__AID70470
augaagacuaucauugcuuugagcuacauucuaugucugguuuucgcucaaaagguucccggaaaugagaacagcacggcaacgcugugccuugggcaccaugcagugccaaacggaacgauagugaaaacaaucacgaaugaccaaauugaaguuacuaaugcuacugagcugguucagaguuccucaacaggugaaauaugcaacaguccucaucagauccuugauggagaaaacugcacacuaauagaugcucuauugggagacccucagugugauggauuccaaaacaagaaaugggaccuuuuuguugaacgaagcaaagcccacagcaacuguuacccuuaugaugugccggauuaugccucccuuaggucacuaguugccucauccggcacacuggaguuuaacaaugaaagcuucaauuggacuggagucacucaaaacggaacaagcucugcuugcauaaggagaucuaauaauaguuucuuuaguagauugaauugguugacccacuugaacuucaaauacccagcauugaacgugacuaugccaaacaaugaacaauuugacaaauuguacauuugggggguucaccacccggguacggacaaggaccaaaucuuccuguaugcucaagcaucaggaagaaucacaguaucuaccaaaagaagccaacaagcuguaauuccgaauaucggaucuagacccagaguaaggaauaucccuagcagaguaagcaucuauuggacaauaguaaaaccgggagauauacuuuugauuaacagcacagggaaucuaauugcuccuagggguuacuucaaaauacgaagugggaaaagcucaauaaugagaucagaugcacccauuggcaaaugcaauucugcaugcaucacuccaaauggaagcauucccaaugacaaaccauuccaaaauguaaacaggaucacauacggggccugucccagauauguuaagcaaaacacucugaaauuggcaacaggaaugcgaaauguaccagagaaacaaacuagaggcauauuuggcgcaauagcggguuucauagaaaaugguugggagggaaugguggauggaugguacgguuucaggcaucaaaauugugagggaaggggacaagcagcagaucucaaaagcacucaagcagcaauugaucaaaucaaugggaagcugaauagauugaucgggaaaaccaucgagaaauuccaucagauugaaaaagaauucucagaagucgaagggagaauucagggccuugagaaauauguugaggacacuaaaauagaucuuuggucauacaacggggagcuucuuguugcccuggagaaccaccacacaauugaucuaacugacucugaaaugaacaaacuguuugaaaaaacaaagaagcaaaugagggaaaaugcugaggauaugggcaaugguuguuucaaaauauaccacaaaugugacaaugccugcauaggaucaaucagaaauggaauuuaugaccacgauguguacagagaugaagcauuaaacaaccgauuccagaucaagggaguugagcugaagucaggguacaaagauuggauccuauggauuuccuuuaccauaucauguuuucugcucuguguugcuuuguugggguucaucaugugggccugccaaaaaggcaacauuaggugcaacauuugcauuuga

SEQ ID NO: 44500 - RNA, 1701 nt, Artificial Sequence
  derived and/or modified CDS sequence (wt) from hemagglutinin__InfluenzaA__AID70471
augaagacuaucauugcuuugagcuacauucuaugucugguuuucacucaaaaacuucccggaaaugacaacagcacggcaacgcugugccuugggcaccaugcagugccaaacggaacgauagugaaaacaaucacgaaugaccaaauugaaguuacuaaugcuacugagcugguucagaguuccucaacaggugaaauaugcaacaguccucaucagauccuugauggagaaaacugcacacuaauagaugcucuauugggagacccucagugugauggcuuccaaaacaagaaaugggaccuuuuuguugaacgaagcaaagcccacagcaacuguuacccuuaugaugugccggauuaugccucccuuaggucacuaguugccucauccggcacacuggaguuuaacaaugaaagcuucaauuggacuggagucacucaaaacggaacaagcucugcuugcauaaggagaucuaauaauaguuucuuuaguagauugaauugguugacccacuugaacuucaaauacccagcauugaacgugacuaugccaaacaaugaacaauuugacaaauuguacauuugggggguucaccacccggguacggacaaggaccaaaucuuccuguaugcucaagcaucaggaagaaucacaguaucuaccaaaaaaagccaacaagcuguaauuccgaauaucggaucuagacccagaguaaggaauaucccuagcagaguaagcaucuauuggacaauaguaaaaccgggagauauacuuuugauuaacagcacagggaaucuaauugcuccuagggguuacuucaaaauacgaagugggaaaagcucaauaaugagaucagaugcacccauuggcaaaugcaauucugcaugcaucacuccaaauggaagcauucccaaugacaaaccauuccaaaauguaaacaggaucacauacggggccugucccagauauguuaagcaaaacacuuugaaauuggcaacaggaaugcgaaauguaccagagaaacaaacuagaggcauauuuggcgcaauagcggguuucauagaaaaugguugggagggaaugguggaugguugguacgguuucagacaucaaaauucugagggaaggggacaagcagcagaucucaaaagcacucaagcagcaauugaucaaaucaaugggaagcugaauagauugaucgggaaaaccaucgagaaauuccaucagauugaaaaugaauucucagaagucgaagggagaauucaggaccuugagaaauauguugaggacacuaaaauagaucuuuggucauacaacgcggagcuuauuguugcccuggagaaccaccacacaauugaucuaacugacucugaaaugaacaaacuguuugaaaaaacaaagaagcaaaugagggaaaaugcugaggauaugggcaaugguuguuucaaaauauaccacaaaugugacaaugccugcauaggaucaaucagaaauggaauuuaugaccacgauguguacagagaugaagcauuaaacaaccgauuccagaucaagggaguugagcugaagucaggguacaaagauuggauccuauggauuuccuuugccauaucauguuuucugauuuguguugcuuuguugggguucaucaugugggcuugccaaaaaggcaaccuuaggugcaacauuugcauuuga

SEQ ID NO: 44501 - RNA, 1701 nt, Artificial Sequence
  derived and/or modified CDS sequence (wt) from hemagglutinin__InfluenzaA__AID70472
augaagacuaucauugcuuugagcuacauucuaugucugguuuucgcucaaaaacuuccuggaaaugacaacagcacggcaacgcugugccuugggcaccaugcagugccaaacggaacgauagugaaaacaaucacgaaugaccaaauugaaguuacuaaugcuacugagcugguucagaguuccucaacaggugaaauaugcaacaguccucaucagauccuugauggagaaaacugcacacuaauagaugcucuauugggagacccucagugugauggcuuccaaaacaagaaaugggaccuuuuuguugaacgaagcaaagcccacagcaacuguuacccuuaugaugugccggauuaugccucccuuaggucacuaguugccucauccggcacacuggaguuuaacaaugaaagcuucaauuggacuggagucacucaaaacggaacaagcucugcuugcauaaggagaucuaauaauaguuucuuuaguagauugaauugguugacccacuugaacuucaaauacccagcauugaacgugacuaugccaaacaaugaacaauuugacaaauuguacauuugggggguucaccacccggguacggacaaggaccaaaucuuccuguaugcucaagcaucaggaagaaucacaguaucuaccaaaaaaagccaacaagcuguaauuccgaauaucggaucuagacccagaguaaggaauaucccuagcagaguaagcaucuauuggacaauaguaaaaccgggagauauacuuuugauuaacagcacagggaaucuaauugcuccuagggguuacuucaaaauacgaagugggaaaagcucaauaaugagaucagaugcacccauuggcaaaugcaauucugcaugcaucacuccaaauggaagcauucccaaugacaaaccauuccaaaauguaaacaggaucacauacggggccugucccagauauguuaagcaaaacacucugaaauuggcaacaggaaugcgaaauguaccagagaaacaaacuagaggcauauuuggcgcaauagcggguuucauagaaaaugguugggagggaaugguggaugguugguacgguuucagacaucaaaauucugagggaaggggacaagcagcagaucucaaaagcacucaagcagcaaucgaucaaaucaaugggaagcugaauagauugaucgggaaaaccaucgagaaauuccaucagauugaaaaagaauucucagaagucgaagggagaauucaggaccuugagaaauauguugaggacacuaaaauagaucucuggucauacaacgcggagcuucuuguugcccuggagaaccaccacacaauugaucuaacugacucagaaaugaacaaacuguuugaaaaaacaaagaagcaaaugagggaaaaugcugaggauaugggcaaugguuguuucaaaauauaccacaaaugugacaaugccugcauaggaucaaucagaaauggaauuuaugaccacgauguguacagagaugaagcauuaaacaaccgauuccagaucaagggaguugagcugaagucaggguacaaagauuggauccuauggauuuccuuugccauaucauguuuucugcucuguguugcuuuguugggguucaucaugugggccugccaaaaaggcaacauuaggugcaacauuugcauuuga

SEQ ID NO: 44502 - RNA, 1701 nt, Artificial Sequence
  derived and/or modified CDS sequence (wt) from hemagglutinin__InfluenzaA__AID70473
augaagacuaucauugcuuugagcuacauucuaugucugguuuucgcucaaaaacuuccuggaaaugacaacagcacggcaacgcugugccuugggcaccaugcagugccaaacggaacgauagugaaaacaaucacgaaugaccaaauugaaguuacuaaugcuacugagcugguucagaguuccucaacaggugaaauaugcaacaguccucaucagauccuugauggagaaaacugcacacuaauagaugcucuauugggagacccucagugugauggcuuccaaaacaagaaaugggaccuuuuuguugaacgaagcaaagcccacagcaacuguuacccuuaugaugugccggauuaugccucccuuaggucacuaguugccucauccggcacacuggaguuuaacaaugaaagcuucaauuggacuggagucacucaaaacggaacaagcucugcuugcauaaggagaucuaauaauaguuucuuuaguagauugaauugguugacccacuugaacuucaaauacccagcauugaacgugacuaugccaaacaaugaacaauuugacaaauuguacauuugggggguucaccacccggguacggacaaggaccaaaucuuccuguaugcucaagcaucaggaagaaucacaguaucuaccaaaaaaagccaacaagcuguaauuccgaauaucggaucuagacccagaguaaggaauaucccuagcagaguaagcaucuauuggacaauaguaaaaccgggagauauacuuuugauuaacagcacagggaaucuaauugcuccuagggguuacuucaaaauacgaagugggaaaagcucaauaaugagaucagaugcacccauuggcaaaugcaauucugcaugcaucacuccaaauggaagcauucccaaugacaaaccauuccaaaauguaaacaggaucacauacggggccugucccagauauguuaagcaaaacacucugaaauuggcaacaggaaugcgaaauguaccagagaaacaaacuagaggcauauuuggcgcaauagcggguuucauagaaaaugguugggagggaaugguggaugguugguacgguuucaggcaucaaaauugugagggaaggggacaagcagcagaucucaaaagcacucaagcagcaauugaucaaaucaaugggaagcugaauagauugaucgggaaaaccaucgagaaauuccaucagauugaaaaagaauucucagaagucgaagggagaauucagggccuugagaaauauguugaggacacuaaaauagaucucuggucauacaacgcggagcuucuuguugcccuggagaaccaacacacaauugaucuaacugacucugaaaugaacaaacuuuuugaaaaaacaaagaagcaaaugagggaaaaugcugaggauaugggcaaugguuguuucaaaauauaccacaaaugugacaaugccugcauaggaucaaucagaaauggaauuuaugaccacgauguguacagagaugaagcauuaaacaaccgauuccagaucaagggaguugagcugaagucaggguacaaagauuggauccuauggauuuccuuugccauaucauguuuuuugcucuguguugcuuuguugggguucaucaugugggccugccaaaaaggcaacauuaggugcaacauuugcauuuga

SEQ ID NO: 44503 - RNA, 1701 nt, Artificial Sequence
  derived and/or modified CDS sequence (wt) from hemagglutinin__InfluenzaA__AID70474
augaagacuaucauugcuuugagcuacauucuaugucugguuuucgcucaaaaacuuccuggaaaugacaacagcacggcaacgcugugccuugggcaccaugcagugccaaacggaacgauagugaaaacaaucacgaaugaccaaauugaaguuacuaaugcuacugagcugguucagaguuccucaacaggugaaauaugcaacaguccucaucagauccuugauggagaaaacugcacacuaauagaugcucuauugggagacccucagugugauggcuuccaaaacaagaaaugggaccuuuuuguugaacgaagcaaagcccacagcaacuguuacccuuaugaugugccggauuaugccucccuuaggucacuaguugccucauccggcacacuggaguuuaacaaugaaagcuucaauuggacuggagucacucaaaacggaacaagcucugcuugcauaaggagaucuaauaauaguuucuuuaguagauugaauugguugacccacuugaacuucaaauacccagcauugaacgugacuaugccaaacaaugaacaauuugacaaauuguacauuugggggguucaccacccggguacggacaaggaccaaaucuuccuguaugcucaagcaucaggaagaaucacaguaucuaccaaaaaaagccaacaagcuguaauuccgaauaucggaucuagacccagaguaaggaauaucccuagcagaguaagcaucuauuggacaauaguaaaaccgggagauauacuuuugauuaacagcacagggaaucuaauugcuccuagggguuacuucaaaauacgaagugggaaaagcucaauaaugagaucagaugcacccauuggcaaaugcaauucugcaugcaucacuccaaauggaagcauucccaaugacaaaccauuccaaaauguaaacaggaucacauacggggccugucccagauauguuaagcaaaacacucugaaauuggcaacaggaaugcgaaauguaccagagaaacaaacuagaggcauauuuggcgcaauagcggguuucauagaaaauguuugggagggaaugguggauggaugguucgguuucagacaucaaauuugugagggaaggggacaagcagcgggucucgaaagcacucaagcagccauugaucaaaucaaugggaagaugaauagauugauggggaaaaccaucgggaaauuccaucagauuguaaaugaauucucagaagucgaagggagaauucaggaccuugagaaauauguugaggacacuaaaauagaucucuggucauacaucggggagcuucuuguugcccuugagaaccaccacgcaauugaucuaacugacucagaaaugaacaaacuguuugaaaaaacaaagaagcaaaugagggaaaaugcugaggauaugggcaaugguuguuucaaaauauaccacaaaugugacaaugccugcauaggaucaaucagaaauggaauuuaugaccgcgauguguacagagaugaagcauuaaacaaccgauuccacaucaagggaguugagcugaagucaggguacaaagauuggaucauauggauuuccucuaccgaaucauguuuuuugcucuguguugcuuuguugggguucaucaugugggcuugccaaaaaggcaacauuagaagcaacauuugcauuuga

SEQ ID NO: 44504 - RNA, 1701 nt, Artificial Sequence
  derived and/or modified CDS sequence (wt) from hemagglutinin__InfluenzaA__AID70475
augaagacuaucauugcuuugagcuacaugcuaugucugguguucgcucaaaaacuucccggaaaugacaacagcacggcaacgcugugccuugggcaccaugcagugccaaacggaacgauagugaaaacaaucacgaaugaccaaauugaaguuacuaaugcuacugagcugguucagaguuccucaacaggugaaauaugcaacaguccucaucagauccuugauggagaaaacugcacacuaauagaugcucuauugggagacccucagugugauggcuuccaaaacaagaaaugggaccuuuuuguugaacgaagcaaagcccacagcaacuguuacccuuaugaugugccggauuaugccucccuuaggucacuaguugccucauccggcacacuggaguuuaacaaugaaagcuucaauuggacuggagucacucaaaacggaacaagcucugcuugcauaaggagaucuaauaauaguuucuuuaguagauugaauugguugacccacuugaacuucaaauacccagcauugaacgugacuaugccaaacaaugaacaauuugacaaauuguacauuugggggguucaccacccggguacggacaaggaccaaaucuuccuguaugcucaagcaucaggaagaaucacaguaucuaccaaaaaaagccaacaagcuguaauuccgaauaucggaucuagacccagaguaaggaauaucccuagcagaguaagcaucuauuggacaauaguaaaaccgggagauauacuuuugauuaacagcacagggaaucuaauugcuccuagggguuacuucaaaauacgaagugggaaaagcucaauaaugagaucagaugcacccauuggcaaaugcaauucugcaugcaucacuccaaauggaagcauucccaaugacaaaccauuccaaaauguaaacaggaucacauacggggccugucccagauauguuaagcaaaacacucugaaauuggcaacaggaaugcgaaauguaccagagaaacaaacuagaggcauauuuggagcaauagcggguuucauagaaaauguuugggagggaaugguggaugguugguacgguuucaggcaucaaaauugugagggaaggggacaagcagcagaucucaaaagcgcucaagcagccauugauccaaucaaugggaagcugaauagauugauggggaaaaccaucgggaaauuccaccagauugaaaaagaauucucagaaguagaagggagaauucaggaccuugagaaauauguugaggacacuaaaauagaucuuuggucauacaacggggagcuucuuguugcccuggagaaccaacacgcaauugaucuaacugacucagaaaugaacaaaguguuugaaaaaacaaagaagcaacugagggaaaaugcugaggauaugggcaaugguuguuucaaaauauaccacaaaugugacaaugccugcauaggaucaaucagaaauggaauuuaugaucacgauguguacagaaaugaagcauuaaacaaccgauuccagaucaagggaguugagcugaagucaggguacaaagauuggauccuauggauuuccuuugccauaucauguuuucuucucaguguugcuucguugggguucaucaugugggccuaccaaaaaggcaacauuaggugcaacauuugcauuuga

SEQ ID NO: 44505 - RNA, 1701 nt, Artificial Sequence
  derived and/or modified CDS sequence (wt) from hemagglutinin__InfluenzaA__AID70476
augaagacuaucauugcuuugagcuacauucuaugucugguuuucgcucaaaaacuucccggaaaugaaaacagcacggcaacgcugggccuugggcaccaugcagugccaaacggaacgauagugaaaacaaucacgaaugaccaaauugaaguuacuaaugcuacugagcugguucagaguuccucaacaggugaaauaugcaacaguccucaucagauccuugauggagaaaacugcacacuaauagaugcucuauugggagacccucagugugaugacuuccaaaacaagaaaugggaccuuuuuguugaacgaagcaaagcccacagcaacuguuacccuuaugaugugccggauuaugccucccuuaggucacuaguugccucauccggcacacuggaguuuaacaaugaaagcuucaauuggacuggagucacucaaaacggaacaagcucugcuugcauaaggagaucuaauaauaguuucuuuaguagauugaauugguugacccacuugaacuucaaauacccagcauugaacgugacuaugccaaacaaugaacaauuugacaaauuguacauuugggggguucaccacccggguacggacaaggaccaaaucuuccuguaugcucaagcaucaggacgaaucacaguaucuaccaaaaaaagccaacaagcuguaauuccgaauaucggaucuagacccagaguaaggaauaucccuagcagaguaagcaucuauuggacaauaguaaaaccgggagauauacuuuugauuaacagcacagggaaucuaauugcuccuagggguuacuucaaaauacgaagugggaaaagcucaauaaugagaucagaugcacccauuggcaaaugcaauucugcaugcaucacuccaaauggaagcauucccaaugacaaaccauuccaaaauguaaacaggaucacauacggggccugucccagauauguuaagcaaaacaaucugaaauuggcuacaggaaugcgaaauguaccagagaaacaaacuagaggcauauuuggcgcaauagcggguuucauagaaaaugguugggagggaaugguggaugguugguacgguuucaggcaucaaaauucugagggaaggggacaagcagcagaucucaaaagcacucaagcagcaauugaucaaaucaaugggaagcugaauagauugaucgggaaaaccaucgaaaaauuccaucagauugaaaaagaauucucagaaguagaagggagaauucagggccgugagaaauauguugaggacacuaaaauagaucuuuggucauacaucggggaguuuauuguugcccuggagaaccaacacacaauugaucuaacugacucugaaaugaacaaacuguuugaaaaaacaaagaagcaaaugagggaaaaugcugaggauaugggcaaugguuguuucaaaauauaccacaaaugugacaaugccugcauaggaucaaucagaaauggaauuuaugaccacgauguguacagagaugaagcguuaaacaaccgauuccagaucaagggaguugagcugaagucaggguacaaagauuggauccuauggauuuccuuugccauaucauguuuucugcucuguguugcuuuguugggguucaucaugugggccugccaaaaaggcaacauuaggugcaacauuugcauuuga

SEQ ID NO: 44506 - RNA, 1701 nt, Artificial Sequence
  derived and/or modified CDS sequence (wt) from hemagglutinin__InfluenzaA__AID70477
augaagacuaucauugcuuugagcuacauucuaugucugguuuucgcucaaaaacuuccuggaaaugacagcagcacgggaacgcugugccuugggcaccaugcagugccaaacggaacgauagugaaaacaaucacgaaugaccaaauugaaguuacuaaugcuacugagcugguucagaguuccucaacgggugaaauaugcaacaggccucaucagauccuugauggagaaaacugcacacuaauagaugcucuauugggagacccucagugugauggcuuccaaaacaagaaaugggaccuuuuuguugaacgaagcaaagcccacagcaacuguuacccuuaugaugugccggauuaugccucccuuaggucacuaguugccucauccggcacacuggaguuuaacaaugaaagcuucaauuggacuggagucacucaaaacggaacaagcucugcuugcauaaggagaucuaauaauaguuucuuuaguauauugaauugguugacccacuugaacuucaaauacccagcauugaacgugacuaugccaaacaaugaacaauuugacaaauuguacauuugggggguucaccacccggguacggacaaggaccaaaucuuccuguaugcucaagcaucaggaagaaucacaguaucuaccaaaaaaagccaacaagcuguaauuccgaauaucggaucuagacccagaguaaggaauaucccuagcagaguaagcaucuauuggacaauaguaaaaccgggagagauacuuuugauuaacagcacagggaaucuaauugcuccuagggguuacuucaaaauacgaagugggaaaagcucaauaaugagaucagaugcacccauuggcaaaugcuauucugcaugcaucacuccaaauggaagcauucccaaugacaaaccauuccaaaauguaaacaggaucacauacggggccugucccagauauguuaagcaacacccucugaaauuggcaacaggaaugcgaaauguaccagagaaacaaacuagaggcauauuuggagcaauagcggguuucauagaaaaugguugggagggaaugguggauggaugguacgguuucaggcaucaaauuugugagggaaggggacaagcagcagaucucaaaagcacucaagcagcaauugaucaaaucaaugggaagcugaauagauugaucgggaaaaccaucgagaaauuccaucagauugaaaaagaauucucagaaguagaauggagaauucagggccuugagaaauauguugaggacacuaaaguagaucuuuggucauauaacggggagcuuauuguugcccuggagaaccaccacacaauugaucuaacugacucugaaaugaacaaacuguuugaaaaaacaaagaagcaaaugagggaaaaugcugaggauaugggcaaugguuguuucaaaauauaccucaaaugugacaaugccugcauaggaucaaucagaaauggaauuuaugaccacgauguguacagagaugaagcauuaaacaaccgauuccagaucaagggaguugagcugaagucaggguacaaagauuggauccuauggauuuccuuuaccgaaucauguuuucugcucaguguugcuuuguugggguucaucaugugggccugccaaaaaggcaacauuaggugcaacauuugcauuuga

SEQ ID NO: 44507 - RNA, 1701 nt, Artificial Sequence
  derived and/or modified CDS sequence (wt) from hemagglutinin__InfluenzaA__AID70478
augaagacuaucauugcuuugagcuacauucuaugucugguuuucgcucaaaaacuuccuggaaaugacaacagcacggcaacgcugugccuugggcaccaugcagugccaaacggaacgauagugaaaacaaucacgaaugaccaaauugaaguuacuaaugcuacugagcugguucagaguuccucaacaggugaaauaugcaacaguccucaucagauccuugauggagaaaacugcacacuaauagaugcucuauugggagacccucagugugauggcuuccaaaacaagaaaugggaccuuuuuguugaacgaagcaaagcccacagcaacuguuacccuuaugaugugccggauuaugccucccuuaggucacuaguugccucauccggcacacuggaguuuaacaaugaaagcuucaauuggacuggagucacucaaaacggaacaagcucugcuugcauaaggagaucuaauaauaguuucuuuaguagauugaauugguugacccacuugaacuucaaauacccagcauugaacgugacuaugccaaacaaugaacaauuugacaaauuguacauuugggggguucaccacccggguacggacaaggaccaaaucuuccuguaugcucaagcaucaggaagaaucacaguaucuaccaaaaaaagccaacaagcuguaauuccgaauaucggaucuagacccagaguaaggaauaucccuagcagaguaagcaucuauuggacaauaguaaaaccgggagauauacuuuugauuaacagcacagggaaucuaauugcuccuagagguuacuucaaaauacgaagugggaaaagcucaauaaugagaucagaugcacccauuggcaaaugcaauucugcaugcaucacuccaaauggaagcauucccaaugacaaaccauuccaaaauguaaacaggaucacauacggggccugucccagauauguuaagcaaaacacucugaaauuggcaacaggaaugcgaaauguaccagagaaacaaacuagaggcauauuuggagcaauagcggguuucauagaaaaugguugggagggaaugguggauggaugguacgguuucaggcaucaaaauugugagggaaggggacaagcagcagaucucgaaagcacucaagcagcaauugaucaaaucaaugggaagaugaauagauugauggggaaaaccaucgagaaauuccaucagauugaaaaagaauuuucagaaguagaagggagaauucagggccgugagaaauauguugaggacacuaaaauagaucuuuggucauauaacggggagcuucuuguugaccuggagaaccaacacacaauugaucuaacugacucagaaaugaacaaaguguuugaaaaaacaaagaagcaaaugagggaaaaugcugaggauaugggcaaugguuguuucaaaauauaccacaaaugugacaaugccugcauaggaucaaucagaaauggaauuuaugaccacgauguguacagagaugaagcauuaaacaaccgauuccagaucaagggaguugagcugaagucaggguacaaagauuggauccaauggauuuccuuuaccauaucauguuuucugcucuguguuucuuuguugggguucaucaugugggcuugccaaaaaggcaacauuaggugcaacauuugcauuuga

SEQ ID NO: 44508 - RNA, 1701 nt, Artificial Sequence
  derived and/or modified CDS sequence (wt) from hemagglutinin__InfluenzaA__AID70632
augaaggcaauacuaguaguucugcuauauacauuugcaaccgcaaaugcagacacauuauguauagguuaucaugcgaacaauucaacagauacuguagacacaguacuagaaaagaauguaacaguaacacacucuguuaaccuucuagaagacaagcauaacgggaaacuaugcaaacuaagagggguagccccauugcauuuggguaaauguaacauugcuggcuggauccugggaaauccagagugugaaucacucuccacagcaaguucaugguccuacauuguggaaacaucuaguucagacaauggaacauguuacccaggagauuucaucaauuaugaggagcuaagagagcaauugagcucagugucaucauuugaaagguuugagauauuccccaagacgaguucauggcccaaucaugacucgaacaaagguguaacggcagcauguccucacgcuggagcaaaaagcuucuacaaaaauuuaauauggcuaguuaaaaaaggaaauucauacccaaagcucagccaauccuacauuaaugauaaagggaaagaaguccucgugcuguggggcauucaccauccaucuacuacugcugaccaacaaagucucuaucagaaugcagaugcauauguuuuuguggggacaucaagauacagcaagaaguucaagccggaaauagcaauaagacccaaagugagggaucaagaagggagaaugaacuauuacuggacacuaguagagccgggagacaaaauaacauucgaagcaacuggaaaucuagugguaccgagauaugcauucacaauggaaagaaaugcuggaucugguauuaucauuucagauacaccaguccacgauugcaauacaacuugucagacacccgaaggugcuauaaacaccagccucccauuucagaauauacauccgaucacaauuggaaaauguccaaaguauguaaaaagcacaaaauugagacuggccacaggauugaggaaugucccgucuauucaaucuagaggccuauucggggccauugccggcuucauugaagggggguggacagggaugguagauggaugguacgguuaucaccaucaaaaugagcaggggucaggauaugcagccgaccugaagagcacacaaaaugccauugacaagauuacuaacaaaguaaauucuguuauugaaaagaugaauacacaguucacagcaguggguaaagaguucaaccaccuggaaaaaagaauagagaauuuaaauaaaaaaguugaugaugguuuccuggacauuuggacuuacaaugccgaacuguugguucuauuggaaaaugaaagaacuuuggacuaccacgauucaaaugugaagaacuuguaugaaaagguaagaaaccaguuaaaaaacaaugccaaggaaauuggaaacggcugcuuugaauuuuaccacaaaugcgauaacacgugcauggaaagugucaaaaaugggacuuaugacuacccaaaauacucagaggaagcaaaauuaaacagagaaaaaauagaugggguaaagcuggaaucaacaaggauuuaccagauuuuggcgaucuauucaacugucgccaguucauugguacugguagucucccugggggcaaucagcuucuggaugugcucuaaugggucucuacaguguagaauauguauuuaa

SEQ ID NO: 44509 - RNA, 1683 nt, Artificial Sequence
  derived and/or modified CDS sequence (wt) from hemagglutinin__InfluenzaA__AID70634
augaacacucaaauccugguauucgcucugauugcgaucauuccaacaaaugcagacaaaaucugccucggacaucaugccgugucaaacggaaccaaaguaaacacauuaacugaaagaggaguggaagucgucaaugcaacugaaacaguggaacgaacaaacauccccaggaucugcucaaaagggaaaaggacaguugaccucggucaauguggacuccuggggacaaucacuggaccaccucaaugugaccaauuccuagaauuuucagccgauuuaauuauugagaggcgagaaggaagugaugucuguuauccugggaaauucgugaacgaagaagcucugaggcaaauucucagagaaucaggcggaauugacaaggaagcaaugggauucacauacaguggaauaagaacuaauggagcaaccagugcauguaggagaucaggaucuucauucuaugcagaaaugaaauggcuccugucaaacacagauaaugcugcauucccgcagaugacuaagucauauaaaaauacaagaaaaagcccagcucuaauaguauggggaauccaucauuccgugucaacugcagagcaaaccaagcuauaugggaguggaaacaaacuggugacagucgggaguucuaauuaucaacaaucuuuuguaccgaguccaggagcgagaccacaaguuaauggucuaucuggaagaauugacuuucauuggcuaaugcuaaaucccaaugauacagucacuuucaguuucaauggggcuuucauagcuccagaccgugcaagcuuccugagaggaaaaucuaugggaauccagaguggaguacagguugaugccaauugugaaggggacugcuaucauaguggagggacaauaauaaguaacuugccauuucagaacauagauagcagagcaguuggaaaauguccgagauauguuaagcaaaggagucugcugcuagcaacagggaugaagaauguuccugagauuccaaagggaagaggccuauuuggugcuauagcggguuucauugaaaauggaugggaaggccuaauugaugguugguaugguuucagacaccagaaugcacagggagagggaacugcugcagauuacaaaagcacucaaucggcaauugaucaaauaacaggaaaauuaaaccggauuauagaaaaaaccaaccaacaauuugaguugauagacaaugaauucaaugagguagagaagcaaaucaguaaugugauaaauuggaccagagauucuauaacagaaguguggucauacaaugcugaacucuugguagcaauggagaaccagcauacaauugaucuggcugauucagaaauggacaaacuguacgaacgagugaaaagacagcuaagagagaaugcugaagaagauggcacugguugcuuugaaauauuucacaagugugaugaugacuguauggccaguauuagaaauaacaccuaugaucacagcaaauacagggaagaggcaaugcaaaauagaauacagauugacccagucaaacuaagcagcggcuacaaagaugugauacuuugguuuagcuucggggcaucauguuucauacuucuagccauuguaaugggccuugucuucauauguguaaagaauggaaacaugcggugcacuauuuguauauaa

SEQ ID NO: 44510 - RNA, 1701 nt, Artificial Sequence
  derived and/or modified CDS sequence (wt) from hemagglutinin__InfluenzaA__AIF72902
augaagacuaucauugcuuugagcuacauucuaugucugguuuucgcucaaaaacuuccuggaaaugacaacagcacggcaacgcugugccuugggcaccaugcaguaccaaacggaacgauagugaaaacaaucacgaaugaccaaauugaaguuacuaaugcuacugagcugguucagaguuccucagcaggugaaauaugcgacaguccucaucagauccuugauggagaaaacugcacacuaauagaugcucuauugggagacccucagugugauggcuuccaaaauaagaaaugggaccuuuuuguugaacgaagcagagccuacagcaacuguuacccuuaugaugugccggauuaugccucccuuaggucacuaguugccucauccggcacacuggaguuuaacaaugaaagcuucaauuggacuggagucacucaaaacggaacaagcucugcuugcauaaggagaucuaauaauaguuucuuuaguagauugaauugguugacccacuuaaacuucaaauacccagcauugaacgugacuaugccaaacaaugaacaauuugacaaauuguacauuugggggguucaccacccggguacggacaaggaccaaaucuuccuguaugcucaagcaucaggaagaaucacaguaucuaccaaaagaagccaacaagcuguaaucccgaauaucggaucuagacccagaguaaggaauaucccuagcagaauaagcaucuauuggacaauaguaaaaccgggagacauacuuuugauuaacagcacagggaaucuaauugcuccuagggguuacuucaaaauacgaagugggaaaagcucaauaaugagaucagaugcacccauuggcaaaugcaauucugaaugcaucacuccaaauggaagcauucccaaugacaaaccauuccaaaauguaaacaggaucacauacggggccugucccagauauguuaagcaaagcacucugaaauuggcaacaggaaugcgaaauguaccagagaaacaaacuagaggcauauucggcgcaauagcggguuucauagaaaaugguugggagggaaugguggaugguugguacgguuucaggcaucaaaauucugagggaagaggacaagcagcagaucucaaaagcacucaagcagcaaucgaucaaaucaauggaaagcugaauagauugaucgggaaaaccaacgagaaauuccaucagauugaaaaagaauucucagaagucgaagggagaauucaggaccuugagaaauauguugaggacacuaaaauagaucucuggucauacaacgcggagcuucuuguugcccuggagaaccaacauacaauugaucuaacugacucagaaaugaacaaacuguuugaaaaaacaaagaagcaacugagggaaaaugcugaggauaugggcaaugguuguuucaaaauauaccacaaaugugacaaugccugcauaggaucaaucagaaauggaacuuaugaccacgauguauacagagaugaagcauuaaacaaccgguuccagaucaagggaguugagcugaagucaggguacaaagauuggauccuauggauuuccuuugccauaucauguuuuuugcuuuguguugcuuuguugggguucaucaugugggccugccaaaaaggcaacauuaggugcaacauuugcauuuga

SEQ ID NO: 44511 - RNA, 1701 nt, Artificial Sequence
  derived and/or modified CDS sequence (wt) from hemagglutinin__InfluenzaA__AIF72903
augaagacuaucauugcuuugagcuacauucuaugucugguuuucgcucaagaacuuccuggaaaugacaacagcacggcaacgcugugccuugggcaccaugcaguaccaaacggaacgauagugaaaacaaucacgaaugaccaaauugaaguuacuaaugcuacugagcugguucagaguuccucagcaggugaaauaugcgacaguccucaucagauccuugauggagaaaacugcacacuaauagaugcucuauugggagacccucagugugauggcuuccaaaauaagaaaugggaccuuuuuguugaacgaagcagagccuacagcaacuguuacccuuaugaugugccggauuaugccucccuuaggucacuaguugccucauccggcacacuggaguuuaacaaugaaagcuucaauuggacuggagucacucaaaacggaacaagcucugcuugcauaaggagaucuaauaauaguuucuuuaguagauugaauugguugacccacuuaaacuucaaauacccagcauugaacgugacuaugccaaacaaugaacaauuugacaaauuguacauuugggggguucaccacccggguacggacaaggaccaaaucuuccuguaugcucaagcaucaggaagaaucacaguaucuaccaaaagaagccaacaagcuguaaucccgaauaucggaucuagacccagaguaaggaauaucccuagcagaauaagcaucuauuggacaauaguaaaaccgggagacauacuuuugauuaacagcacagggaaucuaauugcuccuagggguuacuucaaaauacgaagugggaaaagcucaauaaugagaucagaugcacccauuggcaaaugcaauucugaaugcaucacuccaaauggaagcauucccaaugacaaaccauuccaaaauguaaacaggaucacauacggggccugucccagauauguuaagcaaagcacucugaaauuggcaacaggaaugcgaaauguaccagagaaacaaacuagaggcauauuuggcgcaauagcggguuucauagaaaaugguugggagggaaugguggaugguugguacgguuucaggcaucaaaauucugagggaagaggacaagcagcagaucucaaaagcacucaagcagcaaucgaucaaaucaauggaaagcugaauagauugaucgggaaaaccaacgagaaauuccaucagauugaaaaagaauucucagaagucgaagggagaauucaggaccuugagaaauauguugaggacacuaaaauagaucucuggucauacaacgcggagcuucuuguugcccuggagaaccaacauacaauugaucuaacugacucagaaaugaacaaacuguuugaaaaaacaaagaagcaacugagggaaaaugcugaggauaugggcaaugguuguuucaaaauauaccacaaaugugacaaugccugcauaggaucaaucagaaauggaacuuaugaccacgauguauacagagaugaagcauuaaacaaccgguuccagaucaagggaguugagcugaagucaggguacaaagauuggguccuauggauuuccuuugccauaucauguuuuuugcuuuguguugcuuuguugggguucaucaugugggccugccaaaaaggcaacauuaggugcaacauuugcauuuga

SEQ ID NO: 44512 - RNA, 1701 nt, Artificial Sequence
  derived and/or modified CDS sequence (wt) from hemagglutinin__InfluenzaA__AIF72904
augaagacuaucauugcuuugagcuacauucuaugucugguuuucgcucaagaacuuccuggaaaugacaacagcacggcaacgcugugccuugggcaccaugcaguaccaaacggaacgauagugaaaacaaucacgaaugaccaaauugaaguuacuaaugcuacugagcugguucagaguuccucagcaggugaaauaugcgacaguccucaucagauccuugauggagaaaacugcacacuaauagaugcucuauugggagacccucagugugauggcuuccaaaauaagaaaugggaccuuuuuguugaacgaagcagagccuacagcaacuguuacccuuaugaugugccggauuaugccucccuuaggucacuaguugccucauccggcacacuggaguuuaacaaugaaagcuucaauuggacuggagucacucaaaacggaacaagcucugcuugcauaaggagaucuaauaauaguuucuuuaguagauugaauugguugacccacuuaaacuucaaauacccagcauugaacgugacuaugccaaacaaugaacaauuugacaaauuguacauuugggggguucaccacccggguacggacaaggaccaaaucuuccuguaugcucaagcaucaggaagaaucacaguaucuaccaaaagaagccaacaagcuguaaucccgaauaucggaucuagacccagaguaaggaauaucccuagcagaauaagcaucuauuggacaauaguaaaaccgggagacauacuuuugauuaacagcacagggaaucuaauugcuccuagggguuacuucaaaauacgaagugggaaaagcucaauaaugagaucagaugcacccauuggcaaaugcaauucugaaugcaucacuccaaauggaagcauucccaaugacaaaccauuccaaaauguaaacaggaucacauacggggccugucccagauauguuaagcaaagcacucugaaauuggcaacaggaaugcgaaauguaccagagaaacaaacuagaggcauauuuggcgcaauagcggguuucauagaaaaugguugggagggaaugauggaugguugguacgguuucaggcaucaaaauucugagggaagaggacaagcagcagaucucaaaagcacucaagcagcaaucgaucaaaucaauggaaagcugaauagauugaucgggaaaaccaacgagaaauuccaucagauugaaaaagaauucucagaagucgaagggagaauucaggaccuugagaaauauguugaggacacuaaaauagaucucuggucauacaacgcggagcuucuuguugcccuggagaaccaacauacaauugaucuaacugacucagaaaugaacaaacuguuugaaaaaacaaagaagcaacugagggaaaaugcugaggauaugggcaaugguuguuucaaaauauaccacaaaugugacaaugccugcauaggaucaaucagaaauggaacuuaugaccacgauguauacagagaugaagcauuaaacaaccgguuccagaucaagggaguugagcugaagucaggguacaaagauuggguccuauggauuuccuuugccauaucauguuuuuugcuuuguguugcuuuguugggguucaucaugugggccugccaaaaaggcaacauuaggugcaacauuugcauuuga

SEQ ID NO: 44513 - RNA, 1701 nt, Artificial Sequence
  derived and/or modified CDS sequence (wt) from hemagglutinin__InfluenzaA__AIF72905
augaagacuaucauugcuuugagcuacauucugugucugguuuucgcucaaaaacuuccuggaaaugacaacagcacggcaacgcugugccuugggcaccaugcaguaccaaacggaacgauagugaaaacaaucacgaaugaccaaauugaaguuacuaaugccacugagcugguucagaguuccucagcaggugaaauaugcgacaguccucaucagauccuugauggagaaaacugcacacuaauagaugcucuauugggagacccucagugugauggcuuccaaaauaagaaaugggaccuuuuuguugaacgaagcagagccuacagcaacuguuacccuuaugaugugccggauuaugccucccuuaggucacuaguugccucauccggcacacuggaguuuaaaaaugaaaguuucaauuggacuggagucacucaaaacggaacaagcucugcuugcauaaggagaucuaauaauaguuucuuuaguagauugaauugguugacccacucaaacuucaaauacccagcauugaacgugacuaugccaaacaaugaacaauuugacaaauuguacauuugggggguucaccacccggguacagacaaggaccaaaucuuccuguaugcucaagcaucaggaagaaucacaguaucuaccaaaagaagccaacaagcuguaaucccgaauaucggaucuagacccagaguaaggaauaucccuagcagaauaagcaucuauuggacaauaguaaaaccgggagacauacuuuugauuaacagcacagggaaucuaauugcuccuagggguuacuuuaaaauacgaagugggaaaagcucaauaaugagaucagaugcacccauuggcaaaugcaauucugaaugcaucacuccaaauggaagcauucccaaugacaaaccauuccaaaauguaaacaggaucacauacggggccugucccagauauguuaagcaaagcacucugaaauuggcaacaggaaugcgaaauguaccagagaaacaaacuagaggcauauucggcgcaauagcggguuucauagaaaaugguugggagggaaugauggaugguugguacgguuucaggcaucaaaauucugagggaagaggacaagcagcagaucucaaaagcacucaagcagcaaucgaucaaaucaauggaaagcugaauagauugaucgggaaaaccaacgagaaauuccaucagauugaaaaagaauucucagaagucgaagggagaauucaggaccuugagaaauauguugaggacacuaaaauagaucucuggucauacaacgcggagcuucuuguugcccuggagaaccaacauacaauugaucuaacugacucagaaaugaacaaacuguuugaaaaaacaaagaagcaacugagggaaaaugcugaggauaugggcaaugguuguuucaaaauauaccacaaaugugacaaugccugcauaggaucaaucagaaauggaacuuaugaccacgauguauacagagaugaagcauuaaacaaccgguuccagaucaagggaguugagcugaagucaggguacaaagauuggauccuauggauuuccuuugccauaucauguuuuuugcuuuguguugcuuuguugggguucaucaugugggccugccaaaaaggcaacauuaggugcaacauuugcauuuga

SEQ ID NO: 44514 - RNA, 1701 nt, Artificial Sequence
  derived and/or modified CDS sequence (wt) from hemagglutinin__InfluenzaA__AIF72906
augaagacuaucauugcuuugagcuacauucuaugucugguuuucgcucaaaaacuuccuggaaaugacaacagcacggcaacgcugugccuugggcaccaugcaguaccaaacggaacgauagugaaaacaaucacgaaugaccaaauugaaguuacuaaugcuacugaacugguucagaguuccucaacaggugaaauaugcgacaguccucaucagauccuugauggagaaaacugcacacuaauagaugcucuauugggagacccucagugugauggcuuccaaaauaagaaaugggaccuuuuuguugaacgaagcaaagccuacagcaacuguuacccuuaugaugugccggauuaugccucccuuaggucacuaguugccucauccggcacacuggaguuuaacaaugaaagcuucaauuggacuggagucacucaaaacggaacaagcucugcuugcauaaggagaucuaauaauaguuucuuuaguagauugaauugguugacccacuuaaacuucaaauacccagcauugaacgugacuaugccaaacaaugaacaauuugacaaauuguacauuugggggguucaccacccggguacggacaaggaccaaaucuuccuguaugcucaagcaucaggaagaaucacaguaucuaccaaaagaagccaacaagcuguaaucccgaauaucggaucuagacccagaguaaggaauaucccuagcagaauaagcaucuauuggacaauaguaaaaccgggagacauacuuuugauuaacagcacagggaaucuaauugcuccuagggguuacuucaaaauacgaagugggaaaagcucaauaaugagaucagaugcacccauuggcaaaugcaauucugaaugcaucacuccaaauggaagcauucccaaugacaaaccauuccaaaauguaaacaggaucacauacggggccugucccagauauguuaagcaaaacacucugaaauuggcaacaggaaugcgaaauguaccagagaaacaaacuagaggcauauuuggcgcaauagcggguuucauagaaaaugguugggagggaaugguggaugguugguacgguuucaggcaucaaaauucugagggaagaggacaagcagcagaucucaaaagcacucaagcagcaaucgaucaaaucaaugggaagcugaauagauugaucgggaaaaccaacgagaaauuccaucagauugaaaaagaauucucagaagucgaagggagaauucaggaccuugagaaauauguugaggacacuaaaauagaucucuggucauacaacgcggagcuucuuguugcccuggagaaccaacauacaauugaucuaacugacucagaaaugaacaaacuguuugaaaaaacaaagaagcaacugagggaaaaugcugaggauaugggcaaugguuguuucaaaauauaccacaaaugugacaaugccugcauaggaucaaucagaaauggaacuuaugaccacgauguauacagagaugaagcauuaaacaaccgguuccagaucaagggaguugaacugaagucaggguacaaagauuggauccuauggauuuccuuugccauaucauguuuuuugcuuuguguugcuuuguugggguucaucaugugggccugccaaaaaggcaacauuaggugcaacauuugcauuuga

SEQ ID NO: 44515 - RNA, 1701 nt, Artificial Sequence; identical to SEQ ID NO: 35611
  derived and/or modified CDS sequence (wt) from hemagglutinin__InfluenzaA__AIF72907

SEQ ID NO: 44516 - RNA, 1701 nt, Artificial Sequence; identical to SEQ ID NO: 35611
  derived and/or modified CDS sequence (wt) from hemagglutinin__InfluenzaA__AIF72908

SEQ ID NO: 44517 - RNA, 1701 nt, Artificial Sequence
  derived and/or modified CDS sequence (wt) from hemagglutinin__InfluenzaA__AIF72909
augaagacuaucauugcuuugagcuacauucuaugucugguuuucgcucaaaaacuuccuggaaaugacaacagcacggcaacgcugugccuugggcaccaugcaguaccaaacggaacgauagugaaaacaaucacgaaugaccaaauugaaguuacuaaugcuacugagcugguucagaguuccucagcaggugaaauaugcgacgguccucaucagauccuugauggagaaaacugcacacuaauagaugcucuauugggagacccucagugugauggcuuccaaaauaagaaaugggaccuuuuuguugaacgaagcagagccuacagcaacuguuacccuuaugaugugccggauuaugccucccuuaggucacuaguugccucauccggcacacuggaguuuaacaaugaaagcuucaauuggacuggaaccacucaaaacggaacaagcucugcuugcauaaggagaucuaauaauaguuucuuuaguagauugaauugguugacccacuuaaacuucaaauacccagcauugaacgugacuaugccaaacaaugaacaauuugacaaauuguacauuugggggguucaccacccggguacggacaaggaccaaaucuuccuguaugcucaagcaucaggaagaaucacaguaucuaccaaaagaagccaacaagcuguaaucccgaauaucggaucuagacccagaguaaggaauaucccuagcagaauaagcaucuauuggacaauaguaaaaccgggagacauacuuuugauuaacagcacagggaaucuaauugcuccuagggguuacuucaaaauacgaagugggaaaagcucaauaaugagaucagaugcacccauuggcaaaugcaauucugaaugcaucacuccaaauggaagcauucccaaugacaaaccauuccaaaauguaaacaggaucacauacggggccugucccagauauguuaagcaaagcacucugaaauuggcaacaggaaugcgaaauguaccagagaaacaaacuagaggcauauuuggcgcaauagcggguuucauagaaaaugguugggagggaaugguggaugguugguacgguuucaggcaucaaaauucugagggaagaggacaagcagcagaucucaaaagcacucaagcagcaaucgaucaaaucaauggaaagcugaauagauugaucgggaaaaccaacgagaaauuccaucagauugaaaaagaauucucagaagucgaagggagaauucaggaccuugagaaauauguugaggacacuaaaauagaucucuggucauacaacgcggagcuucuuguugcccuggagaaccaacauacaauugaucuaacugacucagaaaugaacaaacuguuugaaaaaacaaagaagcaacugagggaaaaugcugaggauaugggcaaugguuguuucaaaauauaccacaaaugugacaaugccugcauaggaucaaucagaaauggaacuuaugaccacgauguauacagagaugaagcauuaaacaaccgguuccagaucaagggaguugagcugaagucaggguacaaagauuggauccuauggauuuccuuugccauaucauguuuuuugcuuuguguugcuuuguugggguucaucaugugggccugccaaaaaggcaacauuaggugcaacauuugcauuuga

SEQ ID NO: 44518 - RNA, 1701 nt, Artificial Sequence
  derived and/or modified CDS sequence (wt) from hemagglutinin__InfluenzaA__AIF72910
augaagacuaucauugcuuugagcuacauucuaugucugguuuucgcucaaaaacuuccuggaaaugacaacagcacggcaacgcugugccuugggcaccaugcaguaccaaacggaacgauagugaaaacaaucacgaaugaccaaauugaaguuacuaaugcuacugagcugguucagaguuccucaacaggugaaauaugcgacaguccucaucagauccuugauggagaaaacugcacacuaauagaugcucuauugggagacccucagugugauggcuuccaaaauaagaaaugggaccuuuuuguugaacgaagcaaagccuacagcaacuguuacccuuaugaugugccggauuaugccucccuuaggucacuaguugccucauccggcacacuggaguuuaacaaugaaagcuucaauuggacuggagucacucaaaacggaacaagcucugcuugcauaaggagaucuaauaauaguuucuuuaguagauugaauugguugacccacuuaaacuucaaauacccagcauugaacgugacuaugccaaacaaugaacaauuugacaaauuguacauuugggggguucaccacccggguacggacaaggaccaaaucuuccuguaugcucaagcaucaggaagaaucacaguaucuaccaaaagaagccaacaagcuguaaucccgaauaucggaucuagacccagaguaaggaauaucccuagcagaauaagcaucuauuggacaauaguaaaaccgggagacauacuuuugauuaacagcacagggaaucuaauugcuccuagggguuacuucaaaauacgaagugggaaaagcucaauaaugagaucagaugcacccauuggcaaaugcaauucugaaugcaucacuccaaauggaagcauucccaaugacaaaccauuccaaaauguaaacaggaucacauacggggccugucccagauauguuaagcaaaacacucugaaauuggcaacaggaaugcgaaauguaccagagaaacaaacuaggggcauauuuggcgcaauagcggguuucauagaaaaugguugggagggaaugguggaugguugguacgguuucaggcaucaaaauucugagggaagaggacaagcagcagaucucaaaagcacucaagcagcaaucgaucaaaucaaugggaagcugaauagauugaucgggaaaaccaacgagaaauuccaucagauugaaaaagaauucucagaagucgaagggagaauucaggaccuugagaaauauguugaggacacuaaaauagaucucuggucauacaacgcggagcuucuuguugcccuggagaaccaacauacaauugaucuaacugacucagaaaugaacaaacuguuugaaaaaacaaagaagcaacugagggaaaaugcugaggauaugggcaaugguuguuucaaaauauaccacaaaugugacaaugccugcauaggaucaaucagaaauggaacuuaugaccacgauguauacagagaugaagcauuaaacaaccgguuccagaucaagggaguugagcugaagucaggguacaaagauuggauccuauggauuuccuuugccauaucauguuuuuugcuuuguguugcuuuguugggguucaucaugugggccugccaaaaaggcaacauuaggugcaacauuugcauuuga

SEQ ID NO: 44519 - RNA, 1701 nt, Artificial Sequence
  derived and/or modified CDS sequence (wt) from hemagglutinin__InfluenzaA__AIF72911
augaagacuaucauugcuuugagcuacauucuaugucugguuuucgcucaaaaacuuccuggaaaugacaacagcacggcaacgcugugccuugggcaccaugcaguaccaaacggaacgauagugaaaacaaucacgaaugaccaaauugaaguuacuaaugcuacugagcugguucagaguuccucaacaggugaaauaugcgacaguccucaucagauccuugacggagaaaacugcacacuaauagaugcucuauugggagacccucagugugauggcuuccaaaauaagaaaugggaccuuuuuguugaacgaagcaaagccuacagcaacuguuacccuuaugaugugccggauuaugccucccuuaggucacuaguugccucauccggcacacuggaguuuaacaaugaaagcuucaauuggacuggagucacucaaaacggaacaagcucugcuugcauaaggagaucuaauaauaguuucuuuaguagauugaauugguugacccacuuaaacuucaaauacccagcauugaacgugacuaugccaaacaaugaacaauuugacaaauuguacauuugggggguucaccacccggguacggacaaggaccaaaucuuccuguaugcucaagcaucaggaagaaucacagugucuaccaaaagaagccaacaagcuguaaucccgaauaucggaucuagacccagaguaaggaauaucccuagcagaauaagcaucuauuggacaauaguaaaaccgggagacauacuuuugauuaacagcacagggaaucuaauugcuccuagggguuacuucaaaauacgaagugggaaaagcucaauaaugagaucagaugcacccauuggcaaaugcaauucugaaugcaucacuccaaauggaagcauucccaaugacaaaccauuccaaaauguaaacaggaucacauacggggccugucccagauauguuaagcaaaacacucugaaauuggcaacaggaaugcgaaauguaccagagaaacaaacuagaggcauauuuggcgcaauagcggguuucauagaaaaugguugggagggaaugguggaugguugguacgguuucaggcaucaaaauucugagggaagaggacaagcagcagaucucaaaagcacucaagcagcaaucgaucaaaucaaugggaagcugaauagauugaucgggaaaaccaacgagaaauuccaucagauugaaaaagaauucucagaagucgaagggagaauucaggaccuugagaaauauguugaggacacuaaaauagaucucuggucauacaacgcggagcuucuuguugcccuggagaaccaacauacaauugaucuaacugacucagaaaugaacaaacuguuugaaaaaacaaagaagcaacugagggaaaaugcugaggauaugggcaaugguuguuucaaaauauaccacaaaugugacaaugccugcauaggaucaaucagaaauggaacuuaugaccacgauguauacagagaugaagcauuaaacaaccgguuccagaucaagggaguugagcugaagucaggguacaaagauuggauccuauggauuuccuuugccauaucauguuuuuugcuuuguguugcuuuguugggguucaucaugugggccugccaaaaaggcaacauuaggugcaacauuugcauuuga

SEQ ID NO: 44520 - RNA, 1701 nt, Artificial Sequence
  derived and/or modified CDS sequence (wt) from hemagglutinin__InfluenzaA__AIF72912
augaagacuaucauugcuuugagcuacauucuaugucugguuuucgcucaaaaacuuccuggaaaugacaacagcacggcaacgcugugccuugggcaccaugcaguaccaaacggaacgauagugaaaacaaucacgaaugaccaaauugaaguuacuaaugcuacugagcugguucagaguuccucagcaggugaaauaugcgacaguccucaucagauccuugauggagaaaacugcacacuaauagaugcucuauugggagacccucagugugauggcuuccaaaauaagaaaugggaccuuuuuguugaacgaagcagagccuacagcaacuguuacccuuaugaugugccggauuaugccucccuuaggucacuaguugccucauccggcacacuggaguuuaacaaugaaagcuucaauuggacuggagucacucaaaacggaacaagcucugcuugcauaaggagaucuaauaauaguuucuuuaguagauugaauugguugacccacuuaaacuucaaauacccagcauugaacgugacuaugccaaacaaugaacaauuugacaaauuguacauuugggggguucaccacccggguacggacaaggaccaaaucuuccuguaugcucaagcaucaggaagaaucacaguaucuaccaaaagaagccaacaagcuguaaucccgaauaucggaucuagacccagaguaaggaauaucccuagcagaauaagcaucuauuggacaauaguaaaaccgggagacauacuuuugauuaacagcacagggaaucuaauugcuccuagggguuacuucaaaauacgaagugggaaaagcucaauaaugagaucagaugcacccauuggcaaaugcaauucugaaugcaucacuccaaauggaagcauucccaaugacaaaccauuccaaaauguaaacaggaucacauacggggccugucccagauauguuaagcaaagcacucugaaauuggcaacaggaaugcgaaauguaccagagaaacaaacuagaggcauauuuggcgcaauagcggguuucauagaaaaugguugggagggaaugguggaugguugguacgguuucaggcaucaaaauucugagggaagaggacaagcagcagaucucaaaagcacucaagcagcaaucgaucaaaucaauggaaagcugaauagauugaucgggaaaaccaacgagaaauuccaucagauugaaaaagaauucucagaagucgaagggagaauucaggaccuugagaaauauguugaggacacuaaaauagaucucuggucauacaacgcggagcuucuuguugcccuggagaaccaacauacaauugaucuaacugacucagaaaugaacaaacuguuugaaaaaacaaagaagcaacugagggaaaaugcugaggauaugggcaaugguuguuucaaaauauaccacaaaugugacaaugccugcauaggaucaaucagaaauggaacuuaugaccacgauguauacagagaugaagcauuaaacaaccgguuccagaucaagggaguugagcugaagucaggguacaaagauuggauccuauggauuuccuuugccauaucauguuuuuugcuuuguguugcuuuguugggguucaucaugugggccugccaaaaaggcaacauuaggugcaacauuugcauuuga

SEQ ID NO: 44521 - RNA, 1701 nt, Artificial Sequence; identical to SEQ ID NO: 35611
  derived and/or modified CDS sequence (wt) from hemagglutinin__InfluenzaA__AIF72913

SEQ ID NO: 44522 - RNA, 1701 nt, Artificial Sequence
  derived and/or modified CDS sequence (wt) from hemagglutinin__InfluenzaA__AIF72914
augaagacuaucauugcuuugagcuacauucuaugucugguuuucgcucaaaaacuuccuggaaaugacaacagcacggcaacgcugugccuugggcaccaugcaguaccaaacggaacgauagugaaaacaaucacgaaugaccaaauugaaguuacuaaugcuacugagcugguucagaguuccucaacaggugaaauaugcgacaguccucaucagauccuugauggagaaaacugcacacuaauagaugcucuauugggagacccucagugugauggcuuccaaaauaagaaaugggaccuuuuuguugaacgaagcaaagccuacagcaacuguuacccuuaugaugugccggauuaugccucccuuaggucacuaguugccucauccggcacacuggaguuuaacaaugaaagcuucaauuggacuggagucacucaaaacggaacaagcucugcuugcauaaggagaucuaauaauaguuucuuuaguagauugaauugguugacccacuuaaacuucaaauacccagcauugaacgugacuaugccaaacaaugaacaauuugacaaauuguacauuugggggguucaccacccggguacggacaaggaccaaaucuuccuguaugcucaagcaucaggaagaaucacaguaucuaccaaaagaagccaacaagcuguaaucccgaauaucggaucuagacccagaguaaggaauaucccuagcagaauaagcaucuauuggacaauaguaaaaccgggagacauacuuuugauuaacagcacagggaaucuaauugcuccuagggguuacuucaaaauacgaggugggaaaagcucaauaaugagaucagaugcacccauuggcaaaugcaauucugaaugcaucacuccaaauggaagcauucccaaugacaaaccauuccaaaauguaaacaggaucacauauggggccugucccagauauguuaagcaaaacacucugaaauuggcaacaggaaugcgaaauguaccagagaaacaaacuagaggcauauuuggcgcaauagcggguuucauagaaaaugguugggagggaaugguggacgguugguacgguuucaggcaucaaaauucugagggaagaggacaagcagcagaucucaaaagcacucaagcagcaaucgaucaaaucaaugggaagcugaauagauugaucgggaaaaccaacgagaaauuccaucagauugaaaaagaauucucagaggucgaagggagaauucacgaccuugagaaauauguugaggacacuuuauucgaucucuggguauacaacucggagcuucuuguugcccugcagaaccaacauacaauugaucuaccugacucagaaaugaacaaacuguuugaaaaaacaaagaagcaacugagggaaaaugcugaggauaugggcaaugguuguuucaaaauauaccacaaaugugacaaugccugcauaggaucaaucagaaauggaacuuaugaccacgauguauacagagaugaagcauuaaacaaccgguuucagaucaagggaguugagcugaagucaggguacaaagauuggauccuauggauuuccuuugccauaucauguuuuuugcuuuguguugcuuuguugggguucaucaugugggccugccaaaaaggcaacauuaggugcaacauuugcauuuga

SEQ ID NO: 44523 - RNA, 1701 nt, Artificial Sequence
  derived and/or modified CDS sequence (wt) from hemagglutinin__InfluenzaA__AIF72915
augaagacuaucauugcuuugagcuacauucuaugucugguuuucgcucaaaaacuuccuggaaaugacaacagcacggcaacgcugugccuugggcaccaugcaguaccaaacggaacgauagugaaaacaaucacgaaugaccaaauugaaguuacuaaugcuacugagcugguucagaguuccucaacaggugaaauaugcgacaguccucuucagauccuugauggagaaaacugcacacuaauagaugcucuauugggagacccucagugugauggcuuccaaaauaagaaaugggaccuuuuuguugaacgaagcaaagccuacagcaacuguuacccuuaugaugugccggauuaugccucccuuaggucacuaguugccucaucaggcacacuggaguuuaacaaugaaagcuucaauuggacuggagucacucaaaacggaacaagcucugcuugcauaaggagaucuaauaauaguuucuuuaguagauugaauugguugacccacuuaaacuucaaauacccagcauugaacgugacuaugccaaacaaugaacaauuugacaaauuguacauuugggggguucaccacccggguacggacaaggaccaaaucuuccuguaugcucaagcaucaggaagaaucacaguaucuaccaaaagaagccaacaagcuguaaucccgaauaucggaucuagacccagaguaaggaauaucccuagcagaauaagcaucuauuggacaauaguaaaaccgggagacauacuuuugauuaacagcacagggaaucuaauugcuccuagggguuacuucaaaauacgaagugggaaaagcucaauaaugagaucaaaugcacccauuggcaaaugcaauucugaaugcauuacuccaaauggaagcauucccaaugacaaaccauuccaaaauguaaacaggaucacauacggugccugucccagauauguuaagcaaaacacucugaaauuggcaacaggaaugcgaaauguaccagagaaacaaacuagaggcauauuuggcgcaauagcggguuucauagaaaaugguugggagggaaugguggaugguugguacgguuucaggcaucaaaauucugagggaagaggacaagcagcagaucucaaaagcacucaagcagcaaucgaucaaaucaaugggaagcugaauagauugaucgggaaaaccaacgagaaauuccaucagauugaaaaagaauucucagaagucgaagggagaauucaggaccuugagaaauauguugaggacacuaaaauagaucucuggucauacaacgcggagcuucuuguugcccuggagaaccaacauacaauugaucuaacugacucagaaaugaacaaacuguuugaaaaaacaaagaagcaacugagggaaaaugcugaggauaugggcaaugguuguuucaaaauauaccacaaaugugacaaugccugcauaggaucaaucagaaauggaacuuaugaccacgauguauacagagaugaagcauuaaacaaccgguuccagaucaagggaguugagcugaagucaggguacaaagauuggauccuauggauuuccuuugccauaucauguuuuuugcuuuguguugcuuuguugggguucaucaugugggccugccaaaaaggcaacauuaggugcaacauuugcauuuga

SEQ ID NO: 44524 - RNA, 1701 nt, Artificial Sequence
  derived and/or modified CDS sequence (wt) from hemagglutinin__InfluenzaA__AIF72916
augaagacuaucauugcuuugagcuacauucuaugucugguuuucgcucaaaaacuuccuggaaaugacaacagcacggcaacgcugugccuugggcaccaugcaguaccaaacggaacgauagugaaaacaaucacgaaugaccaaauugaaguuacuaaugcuacugagcugguucagaguuccucaacaggugaaauaugcgacaguccucaucagauccuugauggagaaaacugcacacuaauagaugcucuauugggagacccucagugugauggcuuccaaaauaagaaaugggaccuuuuuguugaacgaagcaaagccuacagcaacuguuacccuuaugaugugccggauuaugccucccuuaggucacuaguugccucauccggcacacuggaguuuaacaaugaaagcuucaauuggacuggagucacucaaaacggaacaagcucugcuugcauaaggagaucuaauaauaguuucuuuaguagauugaauugguugacccacuuaaacuucaaauacccagcauugaacgugacuaugccaaacaaugaacaauuugacaaauuguacauuugggggguucaccacccggguacggacaaggaccaaaucuuccuguaugcucaagcaucaggaagaaucacaguaucuaccaaaagaagccaacaagcuguaaucccgaauaucggaucuagacccagaguaaggaauaucccuagcagaauaagcaucuauuggacaauaguaaaaccgggagacauacuuuugauuaacagcacagggaaucuaauugcuccuagggguuacuucaaaauacgaagugggaaaagcucaauaaugagaucagaugcacccauuggcaaaugcaauucugaaugcaucacuccaaauggaagcauucccaaugacaaaccauuccaaaauguaaacaggaucacauacggggccugucccagauauguuaagcaaaacacucugaaauuggcaacaggaaugcgaaauguaccagagaaacaaacuagaggcauauuuggcgcaauagcggguuucauagaaaaugguugggagggaaugguggaugguugguacgguuucaggcaucaaaauucugagggaagaggacaagcagcagaucucaaaagcacucaagcagcaauagaucaaaucaaugggaagcugaauagauugaucgggaaaaccaacgagaaauuccaucagauugaaaaagaauucucagaagucgaagggagaauucaggaccuugagaaauauguugaggacacuaaaauagaucucuggucauacaacgcggagcuucuuguugcccuggagaaccaacauacaauugaucuaacugacucagaaaugaacaaacuguuugaaaaaacaaagaagcaacugagggaaaaugcugaggauaugggcaaugguuguuucaaaauauaccacaaaugugacaaugccugcauaggaucaaucagaaauggaacuuaugaccacgauguauacagagaugaagcauuaaacaaccgguuccagaucaagggaguugagcuaaagucaggguacaaagauuggauccuauggauuuccuuugccauaucauguuuuuugcuuuguguugcuuuguugggguucaucaugugggccugccaaaaaggcaacauuaggugcaacauuugcauuuga

SEQ ID NO: 44525 - RNA, 1701 nt, Artificial Sequence
  derived and/or modified CDS sequence (wt) from hemagglutinin__InfluenzaA__AIF72917
augaagacuaucauugcuuugagcuacauucuaugucugguuuucgcucaaaaacuuccuagaaaugacaacagcacggcaacgcugugccuugggcaccaugcaguaccaaacggaacgauagugaaaacaaucacgaaugaccaaauugaaguuacuaaugcuacugagcugguucagaguuccucaacaggugaaauaugcgacaguccucaucagauccuugauggagaaaacugcacacuaauagaugcucuauugggagacccucagugugauggcuuccaaaauaagaaaugggaccuuuuuguugaacgaagcaaagccuacagcaacuguuacccuuaugaugugccggauuaugccucccuuaggucacuaguugccucauccggcacacuggaguuuaaaaaugaaagcuucaauuggacuggagucacucaaaacggaacaagcucugcuugcauaaggagaucuaauaauaguuucuuuaguagauugaacugguugacccacuuaaacuucaaauacccagcauugaacgugacuaugccaaacaaugaacaauuugacaaacuguacauuugggggguucaccacccggguacggacaaggaccaaaucuuccuguaugcucaagcaucaggaagaaucacaguaucuaccaaaagaagccaacaagcuguaaucccgaauaucggaucuagacccagaguaaggaauaucccuagcagaauaagcaucuauuggacaauaguaaaaccgggagacauacuuuugauuaacagcacagggaaucuaauugcuccuagggguuacuucaaaauacgaagugggaaaagcucaauaaugagaucagaugcacccauuggcaaaugcaauucugaaugcaucacuccaaauggaagcauucccaaugacaaaccauuccaaaauguaaacaggaucacauacggggccugucccagauauguuaagcaaaacacucugaaauuggcaacaggaaugcgaaauguaccagagaaacaaacuagaggcauauuuggcgcaauagcagguuucauagaaaaugguugggagggaaugguggaugguugguacgguuucaggcaucaaaauucugagggaagaggacaagcagcagaucucaaaagcacucaagcagcaaucgaucaaaucaaugggaagcugaauagauugaucgggaaaaccaacgagaaauuccaucagauugagaaagaauucucagaagucgaagggagaauucaggaccuugagaaauauguugaggacacuaaaauagaucucuggucauacaacgcggagcuucuuguugcccuggagaaccaacauacaauugaucuaacugacucagaaaugaacaaacuguuugaaaaaacaaagaagcaacugagggaaaaugcugaggauaugggcaaugguuguuucaaaauauaccacaaaugugacaaugccugcauaggaucaaucagaaauggaacuuaugaccacgauguauacagagaugaagcauuaaacaaccgguuccagaucaagggaguugagcugaagucaggauacaaagauuggauccuauggauuuccuuugccauaucauguuuuuugcuuuguguugcuuuguugggguucaucaugugggccugccaaaaaggcaacauuaggugcgacauuugcauuuga

SEQ ID NO: 44526 - RNA, 1683 nt, Artificial Sequence
  derived and/or modified CDS sequence (wt) from hemagglutinin__InfluenzaA__AIG44693
auggagacagcaucacugauaacuauacuacuaguaguaacaguaagcaaugcagauaagaucugcaucggcuaucaaucaacaaacuccacagaaacuguagacacacuaacagaaaacaaugucccugugacacaugccaaagaacugcuccacacagagcauaaugggaugcugugugcaacaagcuugggacaaccucuuauucuagacacuuguaccauugaaggacuaaucuacggcaauccuucuugugaucuauuguugggaggaagagaaugguccuauaucgucgagagaccaucagcuguuaacggauuguguuaucccgggaauguugaaaaucuagaagagcuaaggucacucuuuaguucugcuaggucuuaucaaaggauccagauuuucccagacacaaucuggaaugugucuuacagugggacaagcaaagcauguucagauucauucuacagaagcaugagaugguugacucaaaaggacaacgcuuacccuauucaagacgcccaauacacaaauaaucaagaaaagaacauucuuuucauguggggcauaaaucacccacccacugauacugcacagacaaaucuguacacaagaaccgacacaacaacgaguguggcaacagaagaaauaaauaggaccuucaaaccauugauaggaccaaggccucuuguccacgguuugaugggaagaauuaauuauuauuggucgguauuaaaaccgggucaaacacugcgaauaaaaucuaauggaaaucuaauagcuccaugguauggacacauucucucaggaaagagccacgggagaauccugaagacugauuuaaaaagagguaacugcacagugcaaugucagacagagaaggguggcuuaaacacaacauugccauuccaaaaugugaguaaguaugcauuuggaaacuguucgaaauacauuggcauaaagagucucaaacuugcaguuggucugaggaaugugccuucuagaucuaguagaggacuauucggggccauagcaggauucauagagggagguuggucaggacuaguugcugguugguauggauuccagcauucaaaugaccaagggguugguauggcagcagauagagacucaacccaaaaggcaauugauaaaauaacauccaaagugaauaacauagucgacaaaaugaacaagcaguaugaaauuaucgaucaugaauucagcgagguugaaacuagacuuaacaugauuaauaauaagauugaugaucaaauccaagauauaugggcauauaaugcagaauugcuaguucugcuugaaaaccagaaaacacucgaugagcaugaugcaaauguaaacaauuuguacaauaaagugaagagggcguuggguuccaaugcgguggaagaugggaaaggauguuucgagcuauaccacaaaugugaugaccagugcauggagacaauucggaacgggaccuacaacagaaggaaguaucaagaggagucaaaauuagaaaaacagaaaauagagggggucaagcuggaaucugaaggaacuuacaaaauccucaccauuuauucgacugucgccucaucucuugugauugcaaugggguuugcugccuucuuguucugggccauguccaaugggucuugcagaugcaacauuuguauauaa

SEQ ID NO: 44527 - RNA, 1701 nt, Artificial Sequence
  derived and/or modified CDS sequence (wt) from hemagglutinin__InfluenzaA__AIJ10728
augaagacuaucauugcuuugagcuacauucuaugucugguuuucgcucaaaaacuuccuggaaaugacaacagcacggcaacgcugugccuugggcaccaugcagugccaaacggaacaauagugaaaacaaucacgaaugaccaaauugaaguuacuaaugcuacugagcugguucagaguuccucaacaggugaaauaugcaacaguccucaucagauccuugauggagaaaacugcacacuaauagaugcucuauugggagacccucagugugauggcuuccaaaacaagaaaugggaccuuuuuguugaacgaagcaaagcccacagcaacuguuacccuuaugaugugccggauuaugccucccuuaggucacuaguugccucauccggcacacuggaguuuaacaaugaaagcuucaauuggacuggagucacucaaaacggaacaagcucugcuugcauaaggagaucuaauaauaguuucuuuaguagauugaauugguugacccacuugaacuucaaauacccagcauugaacgugacuaugccaaacaaugaacaauuugacaaauuguacauuugggggguucaccacccggguacggacaaggaccaaaucuuccuguaugcucaagcaucaggaagaaucacaguaucuaccaaaagaagccaacaagcuguaauuccgaauaucggaucuagacccagaguaaggaauaucccuagcagaguaagcaucuauuggacaauaguaaaaccgggagauauacuuuugauuaacagcacagggaaucuaauugcuccuagggguuacuucaaaauacgaagugggaaaagcucaauaaugagaucagaugcacccauuggcaaaugcaauucugcaugcaucacuccaaauggaagcauucccaaugacaaaccauuccaaaauguaaacaggaucacauacggggccugucccagauauguuaagcaaaacacucugaaauuggcaacaggaaugcgaaauguaccagagaaacaaacuagaggcauauuuggcgcaauagcggguuucauagaaaaugguugggagggaaugguggaugguugguacgguuucaggcaucaaaauucugagggaaggggacaagcagcagaucucaaaagcacucaagcagcaaucgaucaaaucaaugggaagcuaaauagauugaucgggaaaaccaacgagaaauuccaucagauugaaaaagaauucucagaagucgaagggagaauucaggaccuugagaaauauguugaggacacuaaaauagaucucuggucauacaacgcggagcuucuuguugcccuggagaaccaacacacaauugaucuaacugacucagaaaugaacaaacuguuugaaaaaacaaagaagcaacugagggaaaaugcugaggauaugggcaaugguuguuucaaaauauaccacaaaugugacaaugccugcauaggaucaaucagaaauggaacuuaugaccacgauguguacagagaugaagcauuaaacaaccgauuccagaucaagggaguugagcugaagucaggguacaaagauuggauccuauggauuuccuuugccauaucauguuuuuugcuuuguguugcuuuguugggguucaucaugugggccugccaaaaaggcaacauuaggugcaacauuugcauuuga

SEQ ID NO: 44528 - RNA, 1701 nt, Artificial Sequence
  derived and/or modified CDS sequence (wt) from hemagglutinin__InfluenzaA__AIJ10729
augaagacuaucauugcuuugagcuacauucuaugucugguuuucgcucaaaaacuuccuggacaugacaacagcacggcaacgcugugccuugggcaccaugcagugccaaacggaacgauagugaaaacaaucacgaaugaccaaauugaaguuacuaaugcuacugagcugguucagaguuccucaacaggugaaauaugcaacaguccucaucagauccuugauggagaaaacugcacacuaauagaugcucuauugggagacccucagugugauggcuuccaaaacaagaaaugggaccuuuuuguugaacgaagcaaagcccacagcaacuguuacccuuaugaugugccggauuaugccucccuuaggucacuaguugccucauccggcacacuggaguuuaacaaugaaagcuucaauuggacuggagucacucaaaacggaacaagcucugcuugcauaaggagaucuaauaauaguuucuuuaguagauugaauugguugacccacuuaaacuucaaauacccagcauugaacgugacuaugccaaacaaugaacaauuugacaaauuguacauuugggggguucaccacccggguacggacaaggaccaaaucuuccuguaugcucaagcaucaggaagaaucacaguaucuaccaaaagaagccaacaagcuguaauuccgaauaucggaucuagacccagaguaaggaauaucccuagcagaguaagcaucuauuggacaauaguaaaaccgggagacauacuuuugauuaacagcacagggaaucuaauugcuccuagggguuacuucaaaauacgaagugggaaaagcucaauaaugagaucagaugcacccauuggcaaaugcaauucugcaugcaucacuccaaauggaagcauucccaaugacaaaccauuccaaaauguaaacaggaucacauacggggccugucccagauauguuaagcaaaacacucugaaauuggcaacaggaaugagaaauguaccagagaaacaaacuaaaggcauauuuggcgcaauagcggguuucauagaaaaugguugggagggaaugguggaugguugguacgguuucaggcaucaaaauucugagggaaggggacaagcagcagaucucaaaagcacucaagcagcaaucgaucaaaucaaugggaagcugaauagauugaucgggaaaaccaacgagaaauuccaucagauugaaaaagaauucucagaagucgaagggagaauucaggaccuugagaaauauguugaggacacuaaaauagaucucuggucauacaacgcggagcuucuuguugcccuggagaaccaacacacaauugaucuaacugacucagaaaugaacaaacuguuugaaaaaacaaagaagcaacugagggaaaaugcugaggauaugggcaaugguuguuucaaaauauaccacaaaugugacaaugccugcauaggaucaaucagaaauggaacuuaugaccacgauguguacagagaugaagcauuaaacaaccgauuccagaucaagggaguugagcugaagucaggguacaaagauuggauccuauggauuuccuuugccauaucauguuuuuugcuuuguguugcuuuguugggguucaucaugugggccugccaaaaaggcaacauuaggugcaacauuugcauuuga

SEQ ID NO: 44529 - RNA, 1701 nt, Artificial Sequence
  derived and/or modified CDS sequence (wt) from hemagglutinin__InfluenzaA__AIJ10730
augaagacuaucauugcuuugagcuacauucuaugucugguuuucgcucaaaaacuuccuggaaaugacaacagcacggcaacgcugugccuugggcaccaugcagugccaaacggaacgauagugaaaacaaucacgaaugaccaaauugaaguuacuaaugcuacugagcugguucagaguuccucaacaggugaaauaugcaacaguccucaucagauccuugauggggaaaacugcacacuaauagaugcucuauugggagacccucagugugauggcuuccaaaacaagaaaugggaccuuuuuguugaacgaagcaaagcccacagcaacuguuacccuuaugaugugccggauuaugccucccuuaggucacuaguugccucauccggcacacuggaguuuaacaaugaaagcuucaauuggacuggagucacucaaaacggaacaagcucugcuugcauaaggagaucuaauaauaguuucuuuaguagauugaauugguugacccacuuaaacuucaaauacccagcauugaacgugacuaugccaaacaaugaacaauuugacaaauuguacauuugggggguucaccacccggguacggacaaggaccaaaucuuccuguaugcucaagcaucaggaagaaucacaguaucuaccaaaagaagccaacaagcuguaauuccgaauaucggaucuagacccagaguaaggaauaucccuagcagaguaagcaucuauuggacaauaguaaaaccgggagacauacuuuugauuaacagcacagggaaucuaauugcuccuagggguuacuucaaaauacgaagugggaaaagcucaauaaugagaucagaugcacccauuggcaaaugcaauucugcaugcaucacuccaaauggaagcauucccaaugacaaaccauuccaaaauguaaacaggaucacauacggggccugucccagauauguuaagcaaaacacucugaaauuggcaacaggaaugagaaauguaccagagaaacaaacuagaggcauauuuggcgcaauagcggguuucauagaaaaugguugggagggaaugguggaugguugguacgguuucaggcaucaaaauucugagggaaggggacaagcagcagaucucaaaagcacucaagcagcaaucgaucaaaucaaugggaagcugaauagauugaucgggaaaaccaacgagaaauuccaucagauugaaaaagaauucucagaagucgaagggagaauucaggaccuugagaaauauguugaggacacuaaaauagaucucuggucauacaacgcggagcuucuuguugcccuggagaaccaacacacaauugaucuaacugacucagaaaugaacaaacuguuugaaaaaacaaagaagcaacugagggaaaaugcugaggauaugggcaaugguuguuucaaaauauaccacaaaugugacaaugccugcauaggaucaaucagaaauggaacuuaugaccacgauguguacagagaugaagcauuaaacaaccgauuccagaucaagggaguugagcugaagucaggguacaaagauuggauccuauggauuuccuuugccauaucauguuuuuugcuuuguguugcuuuguugggguucaucaugugggccugccaaaaaggcaacauuaggugcaacauuugcauuuga

SEQ ID NO: 44530 - RNA, 1701 nt, Artificial Sequence; identical to SEQ ID NO: 42608
  derived and/or modified CDS sequence (wt) from hemagglutinin__InfluenzaA__AIJ10731

SEQ ID NO: 44531 - RNA, 1701 nt, Artificial Sequence
  derived and/or modified CDS sequence (wt) from hemagglutinin__InfluenzaA__AIJ10732
augaagacuaucauugcuuugagcuacauucuaugucugguuuucgcucaagaacuuccuggaaaugacaacagcacggcaacgcugugccuugggcaccaugcagugccaaacggaacgauagugaaaacaaucacgaaugaccaaauugaaguuacuaaugcuacugagcugguucagaguuccucaacaggugaaauaugcaacaguccucaucagauccuugauggagaaaacugcacacuaauagaugcucuauugggagacccucagugugauggcuuccaaaacaagaaaugggaccuuuuuguugaacgaagcaaagcccacagcaacuguuacccuuaugaugugccggauuaugccucccuuaggucacuaguugccucauccggcacacuggaguuuaacaaugaaagcuucaauuggacuggagucacucaaaacggaacaagcucugcuugcauaaggagaucuaauaauaguuucuuuaguagauugaauugguugacccacuuaaacuucagauacccagcauugaacgugacuaugccaaacaaugaacaauuugacaaauuguacauuugggggguucaccacccggguacggacaaggaccaaaucuuccuguaugcucaagcaucaggaagaaucacaguaucuaccaaaagaagccaacaagcuguaauuccgaauaucggaucuagacccagaguaaggaauaucccuagcagaguaagcaucuauuggacaauaguaaaaccgggagacauacuuuugauuaacagcacagggaaucuaauugcuccuagggguuacuucaaaauacgaagugggaaaagcucaauaaugagaucagaugcacccauuggcaaaugcaauucugcaugcaucacuccaaauggaagcauucccaaugacaaaccauuccaaaauguaaacaggaucacauacggggccugucccagauauguuaagcaaaacacucugaaauuggcaacaggaaugagaaauguaccagagaaacaaacuagaggcauauuuggcgcaauagcggguuucauagaaaaugguugggagggaaugguggaugguugguacgguuucaggcaucaaaauucugagggaaggggacaagcagcagaucucaaaagcacucaagcagcaaucgaucaaaucaaugggaagcugaauagauugaucgggaaaaccaacgagaaauuccaucagauugaaaaagaauucucagaagucgaagggagaauucaggaccuugagaaauauguugaggacacuaaaauagaucucuggucauacaacgcggagcuucuuguugcccuggagaaccaacacacaauugaucuaacugacucagaaaugaacaaacuguuugaaaaaacaaagaagcaacugagggaaaaugcugaggauaugggcaaugguuguuucaaaauauaccacaaaugugacaaugccugcauaggaucaaucagaaauggaacuuaugaccacgauguguacagagaugaagcauuaaacaaccgauuccagaucaagggaguugagcugaagucaggguacaaagauuggauccuauggauuuccuuugccauaucauguuuuuugcuuuguguugcuuuguugggguucaucaugugggccugccaaaaaggcaacauuaggugcaacauuugcauuuga

SEQ ID NO: 44532 - RNA, 1701 nt, Artificial Sequence
  derived and/or modified CDS sequence (wt) from hemagglutinin__InfluenzaA__AIJ10733
augaagacuaucauugcuuugagcuacauucuaugucugguuuucgcucaagaacuuccuggaaaugacaacagcacggcaacgcugugccuugggcaccaugcagugccaaacggaacgauagugaaaacaaucacgaaugaccaaauugaaguuacuaaugcuacugagcugguucagaguuccucaacaggugaaauaugcaacaguccucaucagauccuugauggagaaaacugcacacuaauagaugcucuauugggagacccucagugugauggcuuccaaaacaagaaaugggaccuuuuuguugaacgaagcaaagcccacagcaacuguuacccuuaugaugugccggauuaugccucccuuaggucacuaguugccucauccggcacacuggaguuuaacaaugaaagcuucaauuggacuggagucacucaaaacggaacaagcucugcuugcauaaggagaucuaauaauaguuucuuuaguagauugaauugguugacccacuuaaacuucagauacccagcauugaacgugacuaugccaaacaaugaacaauuugacaaauuguacauuugggggguucaccacccggguacggacaaggaccaaaucuuccuguaugcucaagcaucaggaagaaucacaguaucuaccaaaagaagccaacaagcuguaauuccgaauaucggaucuagacccagaguaaggaauaucccuagcagaguaagcaucuauuggacaauaguaaaaccgggagauauacuuuugauuaacagcacagggaaucuaauugcuccuagggguuacuucaaaauacgaagugggaaaagcucaauaaugagaucagaugcacccauuggcaaaugcaaaucugcaugcaucacuccaaauggaagcauucccaaugacaaaccauuccaaaauguaaacaggaucacauacggggccugucccagauauguuaagcaaaacacucugaaauuggcaacaggaaugcgaaauguaccagagaaacaaacuagaggcauauuuggcgcaauagcggguuucauagaaaaugguugggagggaaugguggaugguugguacgguuucaggcaucaaaauucugagggaaggggacaagcagcagaucucaaaagcacucaagcagcaaucgaucaaaucaaugggaagcugaauagauugaucgggaaaaccaacgagaaauuccaucagauugaaaaagaauucucagaagucgaagggagaauucaggaccuugagaaauauguugaggacacuaaaauagaucucuggucauacaaugcggagcuucuuguugcccuggagaaccaacacacaauugaucuaacugacucagaaaugaacaaacuguuugaaaaaacaaagaagcaacugagggaaaaugcugaggauaugggcaaugguuguuucaaaauauaccacaaaugugacaaugccugcauaggaucgaucagaaauggaacuuaugaccacgauguguacagagaugaagcauuaaacaaccgauuccagaucaagggaguugagcugaagucaggguacaaagauuggauccuauggauuuccuuugccauaucauguuuuuugcuuuguguugcucuguugggguucaucaugugggccugccaaaaaggcaacauuaggugcaacauuugcauuuga

SEQ ID NO: 44533 - RNA, 1701 nt, Artificial Sequence
  derived and/or modified CDS sequence (wt) from hemagglutinin__InfluenzaA__AIJ10734
augaagacuaucauugcuuugagcuacauucuaugucugguuuucgcucaaaaacuuccugaaaaugacaacagcacggcaacgcugugccuugggcaccaugcagugccaaacggaacgauagugaaaacaaucacgaaugaccaaauugaaguuacuaaugcuacugagcugguucagaguuccucaacaggugaaauaugcaacaguccucaucagauccuugauggagaaaacugcacacuaauagaugcucuauugggagacccucagugugauggcuuccaaaacaagaaaugggaccuuuuuguugaacgaagcaaagcccacagcaacuguuacccuuaugaugugccggauuaugccucccuuaggucacuaguugccucauccggcacacuggaguuuaacaaugaaagcuucaauuggacuggagucacucaaaacggaacaagcucugcuugcauaaggagaucuaauaauaguuucuuuaguagauugaauugguugacccacuuaaacuucaaauacccagcauugaacgugacuaugccaaacaaugaacaauuugacaaauuauacauuugggggguucaccacccggguacggacaaggaccaaaucuuccuguaugcucaagcaucaggaagaaucacaguaucuaccaaaagaagccaacaagcuguaauuccgaauauaggaucuagacccagaguaaggaauaucccuagcagaauaagcaucuauuggacaauaguaaaaccgggagacauacuuuugauuaacagcacagggaaucuaauugcuccuagggguuacuucaaaauacgaagugggaaaagcucaauaaugagaucagaugcacccauuggcaaaugcaauucuacaugcaucacuccaaauggaagcauucccaaugacaaaccauuccaaaauguaaacaggaucacauacggggccugucccagauauguuaagcaaaacacucugaaauuggcaacaggaaugagaaauguaccagagaaacaaacuagaggcauauuuggcgcaauagcggguuucauagaaaaugguugggagggaaugguggaugguugguacgguuucaggcaucaaaauucugagggaaggggacaagcagcagaucucaaaagcacucaagcagcaaucgaucaaaucaaugggaagcugaauagauugaucgggaaaaccaacgagaaauuccaucagauugaaaaagaauucucagaagucgaagggagaauucaggaccuugagaaauauguugaggacacuaaaauagaucucuggucauacaacgcggagcuucuuguugcccuggagaaccaacacacaauugaucuaacugacucagaaaugaacaaacuguuugaaaaaacaaagaagcaacugagggaaaaugcugaggauaugggcaaugguuguuucaaaauauaccacaaaugugacaaugccugcauaggaucaaucagaaauggaaccuaugaccacgauguguacagagaugaagcauuaaacaaccgauuccagaucaagggaguugagcugaagucaggguacaaagauuggauccuauggauuuccuuugccauaucauguuuuuugcuuuguguugcuuuguugggguucaucaugugggccugccaaaaaggcaacauuaggugcaacauuugcauuuga

SEQ ID NO: 44534 - RNA, 1701 nt, Artificial Sequence
  derived and/or modified CDS sequence (wt) from hemagglutinin__InfluenzaA__AIJ10735
augaagacuaucauugcuuugagcuacauucuaugucugauuuucgcucaaaaacuuccugaaaaugacaacagcacggcaacgcugugccuugggcaccaugcagugccaaacggaacgauagugaaaacaaucacgaaugaccaaauugaaguuacuaaugcuacugagcugguucagaguuccucaacaggugaaauaugcaacaguccucaucagauccuugauggagaaaacugcacacuaauagaugcucuauugggagacccucagugugauggcuuccaaaacaagaaaugggaccuuuuuguugaacgaagcaaagcccacagcaacuguuacccuuaugaugugccggauuaugccucccuuaggucacuaguugccucauccggcacacuggaguuuaacaaugaaagcuucaauuggacuggagucacucaaaacggaacaagcucugcuugcauaaggagaucuaauaauaguuucuuuaguagauugaauugguugacccacuuaaacuucaaauacccagcauugaacgugacuaugccaaacaaugaacaauuugacaaauuauacauuugggggguucaccacccggguacggacaaagaccaaaucuuccuguaugcucaagcaucaggaagaaucacaguaucuaccaaaagaagccaacaagcuguaauuccgaauaucggaucuagacccagaguaaggaauaucccuagcagaguaagcaucuauuggacaauaguaaaaccgggagacauacuuuugauuaacagcacagggaaucuaauugcuccuagggguuacuucaaaauacgaagugggaaaagcucaauaaugagaucagaugcacccauuggcaaaugcaauucuacaugcaucacuccaaauggaagcauucccaaugacaaaccauuccaaaauguaaacaggaucacauacggggccugucccagauauguuaagcaaaacacucugaaauuggcaacaggaaugagaaauguaccagagaaacaaacuagaggcauauuuggcgcaauagcggguuucauagaaaaugguugggagggaaugguggaugguugguacgguuucaggcaucaaaauucugagggaaagggacaagcagcagaucucaaaagcacucaagcagcaaucgaucaaaucaaugggaagcugaauagauugaucgggaaaaccaacgagaaauuccaucagauugaaaaagaauucucagaagucgaagggagaauucaggaccuugagaaauauguugaggacacuaaaauagaucucuggucauacaacgcggagcuucuuguugcccuggagaaccaacacacaauugaucuaacugacucagaaaugaacaaacuguuugaaaaaacaaagaagcaacugagggaaaaugcugaggauaugggcaaugguuguuucaaaauauaccacaaaugugacaaugccugcauaggaucaaucagaaauggaaccuaugaccacgauguguacagagaugaagcauuaaacaaccgauuccagaucaagggaguugagcugaagucaggguacaaagauuggauccuauggauuuccuuugccauaucauguuuuuugcuuuguguugcuuuguugggguucaucaugugggccugccaaaaaggcaacauuaggugcaacauuugcauuuga

SEQ ID NO: 44535 - RNA, 1701 nt, Artificial Sequence
  derived and/or modified CDS sequence (wt) from hemagglutinin__InfluenzaA__AIJ10736
augaagacuaucauugcuuugagcuacauucuaugucugguuuucgcucaaaaacuuccuggaaaugacaauagcacggcaacgcugugccuugggcaccaugcaguaccaaacggaacgauagugaaaacaaucacgaaugaccgaauugaaguuacuaaugcuacugagcugguucagaauuccacaauaggugaaauaugcgacaguccucaucagauccuugauggagaaaacugcacacuaauagaugcucuauugggagacccucagugugauggcuuccaaaauaagaaaugggaccuuuuuguugaacgaagcaaagccuacagcaacuguuacccuuaugaugugccggauuaugccucccuuaggucacuaguugccucauccggcacauuggaguuuaacaaugaaagcuucaauuggacuggagucacucaaaacggaacaaguucugcuugcauaaggagaucuaauaauaguuucuuuaguagauuaaauugguugacccacuuaaacuucaaauacccagcauugaacgugacuaugccaaacaaugaacaauuugacaaauuguacauuugggggguucaccacccggguacggacaaggaccaaaucuuccuguaugcucaaucaucaggaagaaucacaguaucuaccaaaagaagccaacaagcuguaaucccgaauaucggaucuagacccagaauaaggaauaucccuagcagaauaagcaucuauuggacaauaguaaaaccgggagacauacuuuugauuaacagcacagggaaucuaauugcuccuagggguuacuucaaaauacgaagugggaaaagcucaauaaugagaucagaugcacccauuggcaaaugcaagucugaaugcaucacuccaaauggaagcauucccaaugacaaaccauuccaaaauguaaacaggaucacauacggggccugucccagauauguuaagcaaagcacucugaaauuggcaacaggaaugcgaaauguaccagagaaacaaacuagaggcauauuuggcgcaauagcggguuucauagaaaaugguugggagggaaugguggaugguugguacgguuucaggcaucaaaauucugagggaagaggacaagcagcagaucucaaaagcacucaagcagcaaucgaucaaaucaaugggaagcugaaucgauugaucgggaaaaccaacgagaaauuccaucagauugaaaaagaauucucagaaguagaaggaagaauucaggaccuugagaaauauguugaggacacuaaaauagaucucuggucauacaacgcggagcuucuuguugcccuggagaaccaacauacaauugaucuaacugacucagaaaugaacaaacuguuugaaaaaacaaagaagcaacugagggaaaaugcugaggauaugggcaaugguuguuucaaaauauaccacaaaugugacaaugccugcauaggaucaaucagaaauggaacuuaugaccacgauguauacagagaugaagcauuaaacaaccgguuccagaucaagggaguugagcugaagucaggguacaaagauuggauccuauggauuuccuuugccauaucauguuuuuugcuuuguguugcuuuguugggguucaucaugugggccugccaaaaaggcaacauuaggugcaacauuugcauuuga

SEQ ID NO: 44536 - RNA, 1701 nt, Artificial Sequence
  derived and/or modified CDS sequence (wt) from hemagglutinin__InfluenzaA__AIJ10737
augaagacuaucauugcuuugagcuacauucuaugucugguugucgcucaaaaacuuccuggaaaugacaauagcacggcaacgcugugccuugggcaccaugcaguaccaaacggaacgauagugaaaacaaucacgaaugaccgaauugaaguuacuaaugcuacugagcugguucagaauuccucaauaggugaaauaugcgacaguccucaucaaauccuugauggagaaaacugcacacuaauagaugcucuauugggagacccucagugugauggcuuccaaaauaagaaaugggaccuuuuuguugaacgaagcaaagccuacagcaacuguuacccuuaugaugugccggauuaugccucccuuaggucacuaguugccucauccggcacacuggaguuuaacaaugaaagcuucaauuggacuggagucacucaaaacggaacaaguucugcuugcauaaggagaucuaauaauaguuucuuuaguagauuaaauugguugacccacuuaaacuucaaauacccagcauugaacgugacuaugccaaacaaugaacaauuugacaaauuguacauuugggggguucaccacccggguacggacaaggaccaaaucuuccuguaugcucaaucaucaggaagaaucacaguaucuaccaaaagaagccaacaagcuguaaucccgaauaucggaucuagacccagaauaaggaauaucccuagcagaauaagcaucuauuggacaauaguaaaaccgggagacauacuuuugauuaacagcacagggaaucuaauugcuccuagggguuacuucaaaauacgaagugggaaaagcucaauaaugagaucagaugcacccauuggcaaaugcaagucugaaugcaucacuccaaauggaagcauucccaaugacaaaccauuccaaaauguaaacaggaucacauacggggccugucccagauauguuaagcaaagcacucugaaauuggcaacaggaaugcgaaauguaccagagaaacaaacuagaggcauauuuggcgcaauagcggguuucauagaaaaugguugggagggaaugguggaugguugguacgguuucaggcaucaaaauucugagggaagaggacaagcagcagaucucaaaagcacucaagcagcaaucgaucaaaucaaugggaagcugaaucgauugaucgggaaaaccaaugagaaauuccaucagauugaaaaagaauucucagaaguagaagggagaauucaggaccuugagaaauauguugaggacacuaaaauagaucucuggucauacaacgcggagcuucuuguugcccuggagaaccaacauacaauugaucuaacugacucagaaaugaacaaacuguuugaaaaaacaaagaagcaacugagggaaaaugcugaggauaugggcaaugguuguuucaaaauauaccacaaaugugacaaugccugcauaggaucaaucagaaauggaacuuaugaccacgauguauacagagaugaagcauuaaacaaccgguuccagaucaagggaguugagcugaagucaggguacaaagauuggauccuauggauuuccuuugccauaucauguuuuuugcuuuguguugcuuuguugggguucaucaugugggccugccaaaaaggcaacauuaggugcaacauuugcauuuga

SEQ ID NO: 44537 - RNA, 1701 nt, Artificial Sequence
  derived and/or modified CDS sequence (wt) from hemagglutinin__InfluenzaA__AIJ10738
augaagacuaucauugcuuugagcuacauucuaugucugguuuucgcucaaaaacuuccuggaaaugacaauagcacggcaacgcugugccuugggcaccaugcaguaccaaacggaacgauagugaaaacaaucacgaaugaccgaauugaaguuacuaaugcuacugagcugguucagaauuccucaauaggugaaauaugcgacaguccucaucagauccuugauggagaaaacugcacacuaauagaugcucuauugggagacccucagugugauggcuuccaaaauaagaaaugggaccuuuuuguugaacgaagcaaagccuacagcaacuguuacccuuaugaugugccggauuaugccucccuuaggucacuaguugccucauccggcacacuggaguuuaacaaugaaagcuucaauuggacuggagucacucaaaacggaacaaguucugcuugcauaaggagaucuaauaauaguuucuuuaguagauuaaauugguugacccacuuaaacuucaaauacccagcauugaacgugacuaugccaaacaaugaacauuuugacaaauuguacauuugggggguucaccacccggguacggacaaggaccaaaucuuccuguaugcucaaucaucaggaagaaucacaguaucuaccaaaagaagccaacaagcuguaaucccgaauaucggaucuagacccagaauaaggaauaucccuagcagaauaagcaucuauuggacaauaguaaaaccgggagacauacuuuugauuaacagcacagggaaucuaauugcuccuagggguuacuucaaaauacgaagugggaaaagcucaauaaugagaucagaugcacccauuggcaaaugcaagucugaaugcaucacuccaaauggaagcauucccaaugacaaaccauuccaaaauguaaacaggaucacauacggggccugucccagauauguuaagcaaagcacucugaaauuggcaacaggaaugcgaaauguaccagagaaacaaacuagaggcauauuuggcgcaauagcggguuucauagaaaaugguugggagggaaugguggaugguugguacgguuucaggcaucaaaauucugagggaagaggacaagcagcagaucucaaaagcacucaagcagcaaucgaucaaaucaaugggaagcugaaucgauugaucgggaaaaccaacgagaaauuccaucagauugaaaaagaauucucagaaguagaagggagaauucaggaccuugagaaauauguugaggacacuaaaauagaucucuggucauacaacgcggagcuucuuguugcccuggagaaccaacauacaauugaucuaacugacucagaaaugaacaaacuguuugaaaaaacaaagaagcaacugagagaaaaugcugaggauaugggcaaugguuguuucaaaauauaccacaaaugugacaaugccugcauaggaucaaucagaaauggaacuuaugaccacgauguauacagagaugaagcauuaaacaaccgguuccagaucaagggaguugagcugaagucaggguacaaagauuggauccuauggauuuccuuugccauaucauguuuuuugcuuuguguugcuuuguugggguucaucaugugggccugccaaaagggcaacauuaggugcaacauuugcauuuga

SEQ ID NO: 44538 - RNA, 1701 nt, Artificial Sequence
  derived and/or modified CDS sequence (wt) from hemagglutinin__InfluenzaA__AIJ10740
augaagacuaucauugcuuugagcuacauucuaugucugguuuucgcucaaaaacuuccuggaaaugacaauagcacggcaacgcugugccuugggcaccaugcaguaccaaacggaacgauagugaaaacaaucacgaaugaccgaauugaaguuacuaaugcuacugagcugguucagaauuccucaauaggugaaauaugcgacaguccucaucagauccuugauggagaaaacugcacacuaauagaugcucuauugggagacccucagugugauggcuuccaaaauaagaaaugggaccuuuuuguugaacgaagcaaagccuacagcaacuguuacccuuaugauguaccggauuaugccucccuuaggucacuaguugccucauccggcacacuggaguuuaacaaugaaagcuucaauuggacuggagucacucaaaacggaacaaguucugcuugcauaaggagaucuaauaauaguuucuuuaguagauuaaauugguugacccacuuaaacuucaaauacccagcauugaacgugacuaugccaaacaaugaacaauuugacaaauuguacauuugggggguucaccacccggguacggacaaggaccaaaucuuccuguaugcucaaucaucaggaagaaucacaguaucuaccaaaagaagccaacaagcuguaaucccgaauaucggaucuagacccagaauaaggaauaucccuagcagaauaagcaucuauuggacaauaguaaaaccgggagacauacuuuugaucaacagcacagggaaucuaauugcuccuagggguuacuucaaaauacgaagugggaaaagcucaauaaugagaucagaugcacccauuggcaaaugcaagucugaaugcaucacuccaaauggaagcauucccaaugacaaaccauuccaaaauguaaacaggaucacauacggggccugucccagauauguuaagcaaagcacucugaaauuggcaacaggaaugcgaaauguaccagagaaacaaacuagaggcauauuuggcgcaauagcggguuucauagaaaaugguugggagggaaugguggaugguugguacgguuucaggcaucaaaauucugagggaagaggacaagcagcagaucucaaaagcacucaagcagcaaucgaucaaaucaaugggaagcugaaucgauugaucgggaaaaccaacgagaaauuccaucagauugaaaaagaauucucagaaguagaagggagaauucaggaccuugagaaauauguugaggacacuaaaauagaucucuggucauacaacgcggagcuucuuguugcccuggagaaccaacauacaauugaucuaacugacucagaaaugaacaaacuguuugaaaaaacaaagaagcaacugagagaaaaugcugaggauaugggcaaugguuguuucaaaauauaccacaaaugugacaaugccugcauaggaucaaucagaaauggaacuuaugaccacgauguauacagagaugaagcauuaaacaaccgguuccagaucaagggaguugagcugaagucaggguacaaagauuggauccuauggauuuccuuugccauaucauguuuuuugcuuuguguugcuuuguugggguucaucaugugggccugccaaaagggcaacauuaggugcaacauuugcauuuga

SEQ ID NO: 44539 - RNA, 1701 nt, Artificial Sequence
  derived and/or modified CDS sequence (wt) from hemagglutinin__InfluenzaA__AIJ10741
augaagacuaucauugcuuugagcuacauucuaugucugguuuucgcucaaaaacuuccuggaaaugacaauagcacggcaacguugugccuugggcaccaugcaguaccaaauggaacgauagugaaaacaaucacgaaugaccgaauugaaguuacuaaugcuacugagcugguucagaauuccucaauaggugaaauaugcgacaguccccaucagauccuugauggagaaaacugcacacuaauagaugcucuauugggagacccucagugugauggcuuccaaaauaagaaaugggaccuuuuuguugaacgaagcaaagccuacagcaacuguuacccuuaugaugugccggauuaugccucccuuaggucacuaguugccucauccggcacacuggaguuuaacaaugaaagcuucaauuggacuggagucacucaaaacggaacaaguucugcuugcauaaggagaucuaauaauaguuucuuuaguagauuaaauugguugacccacuuaaacuucaaauacccagcauugaacgugacuaugccaaacaaugaacaauuugacaaauuguacauuugggggguucaccacccggguacggacaaggaccaaaucuuccuguaugcucaaucaucaggaagaaucacaguaucuaccaaaagaagccaacaagcuguaaucccgaauaucggaucuagacccagaauaaggaauaucccuagcagaauaagcaucuauuggacaauaguaaaaccgggagacauacuuuugauuaacagcacagggaaucuaauugcuccuagggguuacuucaaaauacgaagugggaaaagcucaauaaugagaucagaugcacccauuggcaaaugcaagucugaaugcaucacuccaaauggaagcauucccaaugacaaaccauuccaaaauguaaacaggaucacauacggggccugucccagauauguuaagcaaagcacucugaaauuggcaacaggaaugcgaaauguaccagagaaacaaacuagaggcauauuuggcgcaauagcggguuucauagaaaaugguugggagggaaugguggaugguugguacgguuucaggcaucaaaauucugagggaagaggacaagcagcagaucucaaaagcacucaagcagcaaucgaucaaaucaaugggaagcugaaucgauugaucgggaaaaccaacgagaaauuccaucagauugaaaaagaauucucagaaguagaagggagaauucaggaccuugagaaauauguugaggacacuaaaauagaucucuggucauacaacgcggagcuucuuguugcccuggagaaccaacauacaauugaucuaacugacucagaaaugaacaaacuguuugaaaaaacaaagaagcaacugagagaaaaugcugaggauaugggcaaugguuguuucaaaauauaccacaaaugugacaaugccugcauaggaucaaucagaaauggaacuuaugaccacgauguauacagagaugaagcauuaaacaaccgguuccagaucaagggaguugagcugaagucaggguacaaagauuggauccuauggauuuccuuugccauaucauguuuuuugcuuuguguugcuuuguugggguucaucaugugggccugccaaaagggcaacauuaggugcaacauuugcauuuga

SEQ ID NO: 44540 - RNA, 1701 nt, Artificial Sequence
  derived and/or modified CDS sequence (wt) from hemagglutinin__InfluenzaA__AIJ10742
augaagacuaucauugcuuugagcuacauucuaugucugguuuucgcucaaaaacuuccuggaaaugacaauagcacggcaacgcugugccuugggcaccaugcaguaccaaacggaacgauagugaaaacaaucacgaaugaccgaauugaaguuacuaaugcuacugagcugguucagaauuccucaauaggugaaauaugcgacaguccucaucagauccuugauggagaaaacugcacacuaauagaugcucuauugggagacccucagugugauggcuuccaaaauaagaaaugggaccuuuuuguugaacgaagcaaagccuacagcaacuguuacccuuaugaugugccggauuaugccucccuuaggucacuaguugccucauccggcacacuggaguuuaacaaugaaagcuucaauuggacuggagucacucaaaacggaacaaguucugcuugcauaaggagaucuaauaauaguuucuuuaguagauuaaauugguugacccacuuaaacuucaaauacccagcauugaacgugacuaugccaaacaaugaacaauuugacaaauuguacauuugggggguucaccacccggguacggacaaggaccaaaucuuccuguaugcucaaucaucaggaagaaucacaguagcuaccaaaagaagccaacaagcuguaaucccgaauaucggaucuagacccagaauaaggaauaucccuagcagaauaagcaucuauuggacaauaguaaaaccgggagacauacuuuugauuaacagcacagggaaucuaauugcuccuagggguuacuucaaaauacgaagugggaaaagcucaauaaugagaucagaugcacccauuggcaaaugcaagucugaaugcaucacuccaaauggaagcauucccaaugacaaaccauuccaaaauguaaacaggaucacauacggggccugucccagauauguuaagcaaagcacucugaaauuggcaacaggaaugcgaaauguaccagagaaacaaacuagaggcauauuuggcgcaauagcggguuucauagaaaaugguugggagggaaugguggaugguugguacgguuucaggcaucaaaauucugagggaagaggacaagcagcagaucucaaaagcacucaagcagcaaucgaucaaaucaaugggaagcugaaucgauugaucgggaaaaccaacgagaaauuccaucagauugaaaaagaauucucagaaguagaagggagaauucaggaccuugagaaauauguugaggacacuaaaauagaucucuggucauacaacgcggagcuucuuguugcccuggagaaccaacauacaauugaucuaacugacucagaaaugaacaaacuguuugaaaaaacaaagaagcaacugagggaaaaugcugaggauaugggcaaugguuguuucaaaauauaccacaaaugugacaaugccugcauaggaucaaucagaaauggaacuuaugaccacgauguauacagagaugaagcacuaaacaaccgguuccagaucaagggaguugagcugaagucaggguacaaagauuggauccuauggauuuccuuugccauaucauguuuuuugcuuuguguugcuuuguugggguucaucaugugggccugccaaaagggcaacauuaggugcaacauuugcauuuga

SEQ ID NO: 44541 - RNA, 1701 nt, Artificial Sequence
  derived and/or modified CDS sequence (wt) from hemagglutinin__InfluenzaA__AIJ10743
augaagacuaucauugcuuugagcuacauucuaugucugguuuucgcucaaaaacuuccuggaaaugacaauagcacggcaacgcugugccuugggcaccaugcaguaccaaacggaacgauagugaaaacaaucacgaaugaccgaauugaaguuacuaaugcuacugagcugguucagaauuccucaauaggugaaauaugcgacaguccucaucagauccuugauggagaaaacugcacacuaauagaugcucuauugggagacccucagugugauggcuuccaaaauaagaaaugggaccuuuuuguugaacgaagcaaagccuacagcaacuguuacccuuaugaugugccggauuaugccucccuuaggucacuaguugccucauccggcacacuggaguuuaacaaugaaagcuucaauuggacuggagucacucaaaacggaacaaguucugcuugcauaaggagaucuaauaauaguuucuuuaguagauuaaauugguugacccacuuaaacuucaaauacccagcauugaacgugacuaugccaaacaaugaacaauuugacaaauuguacauuuggggaguucaccacccggguacggacaaggaccaaaucuuccuguaugcucaaucaucaggaagaaucacaguaucuaccaaaagaagccaacaagcuguaaucccgaauaucggaucuagacccagaauaaggaauaucccuagcagaauaagcaucuauuggacaauaguaaaaccgggagacauacuuuugauuaacagcacagggaaucuaauugcuccuagggguuacuucaaaauacgaagugggaaaagcucaauaaugagaucagaugcacccauuggcaaaugcaagucugaaugcaucacuccaaauggaagcauucccaaugacaaaccauuccaaaauguaaacaggaucacauacggggccugucccagauauguuaagcaaagcacucugaaauuggcaacaggaaugcgaaauguaccagagaaacaaacuagaggcauauuuggcgcaauagcggguuucauagaaaaugguugggaggggaugguggaugguugguacgguuucaggcaucaaaauucugagggaagaggacaagcagcagaucucaaaagcacucaagcagcaaucgaucaaaucaaugggaagcugaaucgauugaucgggaaaaccaacgagaaauuccaucagauugaaaaagaauucucagaaguagaagggagaauucaggaccuugagaaauauguugaggacauuaaaauagaucucuggucauacaacgcggagcuucuuguugcccuggagaaccaacauacaauugaucuaacugacucagaaaugaacaaacuguuugaaaaaacaaagaagcaacugagggaaaaugcugaggauaugggcaaugguuguuucaaaauauaccacaaaugugacaaugccugcauaggaucaaucagaaauggaacuuaugaccacgauguauacagagaugaagcauuaaacaaccgguuccagaucaagggaguugagcugaagucaggguacaaagauuggauccuauggauuuccuuugccauaucauguuuuuugcuuuguguugcuuuguugggguucaucaugugggccugccaaaagggcaacauuaggugcaacauuugcauuuga

SEQ ID NO: 44542 - RNA, 1701 nt, Artificial Sequence
  derived and/or modified CDS sequence (wt) from hemagglutinin__InfluenzaA__AIJ10744
augaagacuaucauugcuuugagcuacauucuaugucugguuuucgcucaaaaacuuccuggaaaugacaauagcacggcaacgcugugccuugggcaccaugcaguaccaaacggaacgauagugaaaacaaucacgaaugaccgaauugaaguuacuaaugcuacugagcugguucagaauuccucaauaggugaaauaugcgacaguccucaucagauccuugauggagaaaacugcacacuaauagaugcucuauugggagacccucagugugauggcuuccaaaauaagaaaugggaccuuuuuguugaacgaagcaaagccuacagcaacuguuacccuuaugaugugccggauuaugccucccuuaggucacuaguugccucauccggcacacuggaguuuaacaaugaaagcuucaauuggacuggagucacucaaaacggaacaaguucugcuugcauaaggagaucuaauaauaguuucuuuaguagauuaaauugguugacccacuuaaacuucaaauacccagcauugaacgugacuaugccaaacaaugaacaauuugacaaauuguacauuugggggguucaccacccggguacggacaaggaccaaaucuuccuguaugcucaaucaucaggaagaaucacaguaucuaccaaaagaagccaacaagcuguaaucccgaauaucggaucuagacccagaauaaggaauaucccuagcagaauaagcaucuauuggacaauaguaaaaccgggagacauacuuuugauuaacagcacagggaaucuaauugcuccuagggguuacuucaaaauacgaagugggaaaagcucaauaaugagaucagaugcacccauuggcaaaugcaagucugaaugcaucacuccaaauggaagcauucccaaugacaaaccauuccaaaauguaaacaggaucacauacggggccugucccagauauguuaagcaaagaacucugaaauuggcaacaggaaugcgaaauguaccagagaaacaaacuagaggcauauuuggcgcaauagcggguuucauagaaaaugguugggagggaaugguggaugguugguacgguuucaggcaucaaaauucugagggaagaggacaagcagcagaucucaaaagcacucaagcagcaaucgaucaaaucaaugggaagcugaaucgauugaucgggaaaaccaacgagaaauuccaucagauugaaaaagaauucucagaaguagaagggagaauucaggaccuugagaaauauguugaggacacuaaaauagaucucuggucauacaacgcggagcuucuuguugcccuggagaaccaacauacaauugaucuaacugacucagaaaugaacaaacuguuugaaaaaacaaagaagcaacugagggaaaaugcugaggauaugggcaaugguuguuucaaaauauaccacaaaugugacaaugccugcauaggaucaaucagaaauggaacuuaugaccacgauguauacagagaugaagcauuaaacaaccgguuccagaucaagggaguugagcugaagucaggguacaaagauuggauccuauggauuuccuuugccauaucauguuuuuugcuuuguguugcuuuguugggguucaucaugugggccugccaaaagggcaacauuaggugcaacauuugcauuuga

SEQ ID NO: 44543 - RNA, 1701 nt, Artificial Sequence; identical to SEQ ID NO: 42030
  derived and/or modified CDS sequence (wt) from hemagglutinin__InfluenzaA__AIJ10745

SEQ ID NO: 44544 - RNA, 1701 nt, Artificial Sequence
  derived and/or modified CDS sequence (wt) from hemagglutinin__InfluenzaA__AIJ10747
augaagaccaucauugcuuugagcuacauucuaugucugguuuucgcucaaaaacuuccuggaaaugacaauagcacggcaacgcugugccuugggcaccaugcaguaccaaacggaacgauagugaaaacaaucacgaaugaccgaauugaaguuacuaaugcuacugagcugguucagaauuccucaauaggugaaauaugcgacaguccucaucagauccuugauggagaaaacugcacacuaauagaugcucuauugggggacccucagugugaugacuuccaaaauaagaaaugggaccuuuuuguugaacgaagcaaagccuacagcaacuguuacccuuaugaugugccggauuaugccucccuuaggucacuaguugccucauccggcacacuggaguuuaacaaugaaaacuucaauuggacuggagucacucaaaacggaacaaguucugcuugcauaaggagaucuaauaauaguuucuuuaguagauuaaauugguugacccacuuaaacuucaaauacccagcauugaacgugacuaugccaaacaaugaacaauuugacaaauuguacauuugggggguucaccacccggguacggacaaggaccaaaucuuccuguaugcucaaucaucaggaagaaucacaguaucuaccaaaagaagccaacaagcuguaaucccgaauaucggaucuagacccagaauaaggaauaucccuagcagaauaagcaucuauuggacaauaguaaaaccgggagacauacuuuugauuaacagcacugggaaucuaauugcuccuagggguuacuucaaaauacgaagugggaaaagcucaauaaugagaucagaugcacccauuggcaaaugcaagucugaaugcaucacuccaaauggaagcauucccaaugacaaaccauuccaaaauguaaacaggaucacauacggggccugucccagauauguuaagcaaagcacucugaaauuggcaacaggaaugcgaaauguaccagagaaacaaacuagaggcauauuuggcgcaauagcggguuucauagaaaaugguugggagggaaugguggaugguugguacgguuucaggcaucaaaauucugagggaagaggacaagcagcagaucucaaaagcacucaagcagcaaucgaucaaaucaaugggaagcugaaucgauugaucgggaaaaccaacgagaaauuccaucagauugaaaaagaauucucagaaguagaagggagaauucaggaccuugagaaauauguugaggacacuaaaauagaucucuggucauacaacgcggagcuucuuguugcccuggagaaccaacauacaauugaucuaacugacucagaaaugaacaaacuguuugaaaaaacaaagaagcaacugagggaaaaugcugaggauaugggcaaugguuguuucaaaauauaccacaaaugugacaaugccugcauaggaucaaucagaaauggaacuuaugaccacgauguauacagagaugaagcauuaaacaaccgguuccagaucaagggaguugagcugaaaucaggguacaaagauuggauccuauggauuuccuuugccauaucauguuuuuugcuuuguguugcuuuguugggguucaucaugugggccugccaaaagggcaacauuaggugcaacauuugcauuuga

SEQ ID NO: 44545 - RNA, 1701 nt, Artificial Sequence
  derived and/or modified CDS sequence (wt) from hemagglutinin__InfluenzaA__AIJ10748
augaagaccaucauugcuuugagcuacauucuaugucugguuuucgcucaaaaacuuccuggaaaugacaauagcacggcaacgcugugccuugggcaccaugcaguaccaaacggaacgauagugaaaacaaucacgaaugaccgaauugaaguuacuaaugcuacugagcugguucagaauuccucaauaggugaaauaugcgacaguccucaucagauccuugauggagaaaacugcacacuaauagaugcucuauugggagacccucagugugaugacuuccaaaauaagaaaugggaccuuuuuguugaacgaagcaaagccuacagcaacuguuacccuuaugaugugccggauuaugccucccuuaggucacuaguugccucauccggcacacuggaguuuaacaaugaaaacuucaauuggacuggagucacucaaaacggaacaaguucugcuugcauaaggagaucuaauaauaguuucuuuaguagauuaaauugguugacccacuuaaacuucaaauacccagcauugaacgugacuaugccaaacaaugaacaauuugacaaauuguacauuugggggguucaccacccggguacggacaaggaccaaaucuuccuguaugcucaaucaucaggaagaaucacaguaucuaccaaaagaagccaacaagcuguaaucccgaauaucggaucuagacccagaauaaggaauaucccuagcagaauaagcaucuauuggacaauaguaaaaccgggagacauacuuuugauuaacagcacugggaaucuaauugcuccuagggguuacuucaaaauacgaagugggaaaagcucaauaaugagaucagaugcacccauuggcaaaugcaagucugaaugcaucacuccaaauggaagcauucccaaugacaaaccauuccaaaauguaaacaggaucacauacggggccugucccagauauguuaagcaaagcacucugaaauuggcaacaggaaugcgaaauguaccagagaaacaaacuagaggcauauuuggcgcaauagcggguuucauagaaaaugguugggagggaaugguggaugguugguacgguuucaggcaucaaaauucugagggaagaggacaagcagcagaucucaaaagcacucaagcagcaaucgaucaaaucaaugggaagcugaaucgauugaucgggaaaaccaacgagaaauuccaucagauugaaaaagaauucucagaaguagaagggagaauucaggaccuugagaaauauguugaggacacuaaaauagaucucuggucauacaacgcggagcuucuuguugcccuggagaaccaacauacaauugaucuaacugacucagaaaugaacaaacuguuugaaaaaacaaagaagcaacugagggaaaaugcugaggauaugggcaaugguuguuucaaaauauaccacaaaugugacaaugccugcauaggaucaaucagaaauggaacuuaugaccacgauguauacagagaugaagcauuaaacaaccgguuccagaucaagggaguugagcugaaaucaggguacaaagauuggauccuauggauuuccuuugccauaucauguuuuuugcuuuguguugcuuuguugggguucaucaugugggccugccaaaagggcaacauuaggugcaacauuugcauuuga

SEQ ID NO: 44546 - RNA, 1701 nt, Artificial Sequence
  derived and/or modified CDS sequence (wt) from hemagglutinin__InfluenzaA__AIJ10750
augaagacuaucauugcuuugagcuacauucuaugucugguuuucgcucaaaaacuuccuggaaaugacaauagcacggcaacgcugugccuugggcaccaugcaguaccaaacggaacgauagugaaaacaaucacgaaugaccgaauugaaguuacuaaugcuacugagcugguucagaauuccucaauaggugaaauaugcgacaguccucaucagauccuugauggagaaaacugcacacuaauagaugcucuauugggagacccucagugugauggcuuucaaaauaagaaaugggaccuuuuuguugaacgaagcaaagccuacagcaacuguuacccuuaugauguaccggauuaugccucccuuaggucacuaguugccucauccggcacacuggaguuuaacaaugaaagcuucaauuggacuggagucacucaaaacggaacaaguucugcuugcauaaggagaucuaauaguaguuucuuuaguagauuaaauugguugacccacuuaaacuucaaauacccagcauugaacgugacuaugccaaacaaugaacaauuugacaaauuguacauuugggggguucaccacccggguacggacaaggaccaaaucuuccuguaugcucaaucaucaggaagaaucacaguaucuaccaaaagaagccaacaagcuguaaucccaaauaucggaucuagacccagaauaaggaauaucccuagcagaauaagcaucuauuggacaauaguaaaaccgggagacauacuuuugauuaacagcacagggaaucuaauugcuccuagggguuacuucaaaauacgaagugggaaaagcucaauaauaagaucagaugcacccauuggcaaaugcaagucugaaugcaucacuccaaauggaagcauucccaaugacaaaccauuccaaaauguaaacaggaucacauacggggccugucccagauauguuaagcaaagcacucugaaauuggcaacaggaaugcgaaauguaccagagaaacaaacuagaggcauauuuggcgcaauagcggguuucauagaaaaugguugggagggaaugguggaugguugguacgguuucaggcaucaaaauucugagggaagaggacaagcagcagaucucaaaagcacucaagcagcaaucgaucaaaucaaugggaagcugaaucgauugaucgggaaaaccaacgagaaauuccaucagauugaaaaagaauucucagaaguagaagggagaauucaggaccuugagaaauauguugaggacacuaaaauagaucucuggucauacaacgcggagcuucuuguugcccuggagaaccaacauacaauugaucuaacugacucagaaaugaacaaacuguuugaaaaaacaaagaagcaacugagggaaaaugcugaggauaugggcaaugguuguuucaaaauauaccacaaaugugacaaugccugcauaggaucaauaagaaauggaacuuaugaccacaauguguacagggaugaagcauuaaacaaccgguuccagaucaagggaguugagcugaagucaggguacaaagauuggauccuauggauuuccuuugccauaucauguuuuuugcuuuguguugcuuuguugggguucaucaugugggccugccaaaagggcaacauuaggugcaacauuugcauuuga

SEQ ID NO: 44547 - RNA, 1701 nt, Artificial Sequence
  derived and/or modified CDS sequence (wt) from hemagglutinin__InfluenzaA__AIJ10752
augaagacuaucauugcuuugagcuacauucuaugucugguuuucgcucaaaaacuuccuggaaaugacaauagcacggcaacgcugugccuugggcaccaugcaguaccaaacggaacgauagugaaaacaaucacgaaugaccgaauugaaguuacuaaugcuacugagcugguucagaauuccucaauaggugaaauaugcgacaguccucaucagauccuugauggagaaaacugcacacuaauagaugcucuauugggagacccucagugugauggcuuccaaaauaagaaaugggaccuuuuuguugaacgaagcaaagccuacagcaacuguuacccuuaugaugugccggauuaugccucccuuaggucacuaguugccucauccggcacacuggaguuuaacaaugaaagcuucaauuggacuggagucacucaaaacggaacaaguucugcuugcauaaggagaucuaauaguaguuucuuuaguagauuaaauugguugacccacuuaaauuucaaauacccagcauugaacgugacuaugccaaacaaugaacaauuugacaaauuguacauuugggggguucaccacccggguacggacaaggaccaaaucuuccuguaugcucaaucaucaggaagaaucacaguaucuaccaaaagaagccaacaagcuguaaucccuaauaucggaucuagacccagaauaaggaauaucccuaguagaauaagcaucuauuggacaauaguaaaaccgggagacauacuuuugauuaacagcacagggaaucuaauugcuccuagggguuacuucaaaauacgaagugggaaaagcucaauaaugagaucagaugcacccauuggcaaaugcaagucugaaugcaucacuccaaauggaagcauucccaaugacaaaccauuccaaaauguaaacaggaucacauacggggccugucccagauauguuaagcaaagcacucugaaauuggcaacaggaaugcgaaauguaccagagaaacaaacuagaggcauauuuggcgcaauagcggguuucauagaaaaugguugggagggaaugguggaugguugguacgguuucaggcaucaaaauucugagggaagaggacaagcagcagaucucaaaagcacucaagcagcaaucgaucaaaucaaugggaagcugaaucgauugaucgggaaaaccaacgagaaauuccaucagauugaaaaagaauucucagaaguagaagggagaauucaggaccuugagaaauauguugaggacacuaaaauagaucucuggucauacaacgcggagcuucuuguugcccuggagaaccaacauacaauugaucuaacugauucagaaaugaacaaacuguuugaaaaaacaaagaagcaacugagggaaaaugcugaggauaugggcaaugguuguuucaaaauauaccacaaaugugacaaugccugcauaggaucaaucagaaauggaacuuaugaccacgauguauacagagaugaagcauuaaacaaccgguuccagaucaagggaguugagcugaagucaggguacaaagauuggauccuauggauuuccuuugccaugucauguuuuuugcuuuguguugcuuuguugggguucaucaugugggccugccaaaagggcaacauuaggugcaacauuugcauuuga

SEQ ID NO: 44548 - RNA, 1701 nt, Artificial Sequence
  derived and/or modified CDS sequence (wt) from hemagglutinin__InfluenzaA__AIJ10753
augaagacuaucauugcuuugagcuacauucuaugucugguuuucgcucaaaaacuuccuggaaaugacaauagcacggcaacgcugugccuugggcaccaugcaguaccaaacggaacgauagugaaaacaaucacgaaugaccgaauugaaguuacuaaugcuacugagcugguucagaauuccucaauaggugaaauaugcgacaguccucaucaaauccuugauggagaaaacugcacacuaauagaugcucuauugggagacccucagugugauggcuuucaaaauaagaaaugggaccuuuuuguugaacgaagcaaagccuacagcaacuguuacccuuaugaugugccggauuaugccucccuuaggucacuaguugccucauccggcacacuggaguuuaacaaugaaagcuucaauugggcuggagucacucaaaacggaacaaguucuucuugcauaaggggaucuaauaauaguuucuuuaguagauuaaauugguugacccacuuaaacuucaaauacccagcauugaacgugacuaugccaaacaaugaacaauuugacaaauuguacauuugggggguucaccacccggguacggacaaggaccaaaucuuccuguaugcucaaucaucaggaagaaucacaguaucuaccaaaagaagccaacaagcuguaaucccgaauaucggaucuagacccagaauaaggaauaucccuagcagaauaagcaucuauuggacaauaguaaaaccgggagacauacuuuugauuaacagcacagggaaucuaauugcuccuagggguuacuucaaaauacgaagugggaaaagcucaauaaugagaucagaugcacccauuggcaaaugcaagucugaaugcaucacuccaaauggaagcauucccaaugacaaaccauuccaaaauguaaacaggaucacauacggggccugucccagauauguuaagcaaagcacucugaaauuggcaacaggaaugcgaaauguaccagagaaacaaacuagaggcauauuuggcgcaauagcggguuucauagaaaaugguugggagggaaugauggaugguugguacgguuucaggcaucaaaauucugagggaagaggacaagcagcagaucucaaaagcacucaagcagcaaucgaucaaaucaaugggaagcugaaucgauugaucgggaaaaccaacgagaaauuccaucagauugaaaaagaauucucagaaguagaagggagaauucaggaccuugagaaauauguugaggacacaaaaauagaucucuggucauacaacgcggagcuucuuguugcccuggagaaccaacauacaauugaucuaacugacucagaaaugaacaaacuguuugaaaaaacaaagaagcaacugagggaaaaugcugaggauaugggcaaugguuguuucaaaauauaccacaaaugugacaaugccugcauaggaucaaucagaaauggaacuuaugaccacgauguauacagggaugaagcauuaaacaaccgguuccagaucaagggaguugagcugaagucaggguacaaagauuggauccuauggauuuccuuugccauaucauguuuuuugcuuuguguugcuuuguugggguucaucaugugggccugccaaaagggcaacauuaggugcaacauuugcauuuga

SEQ ID NO: 44549 - RNA, 1701 nt, Artificial Sequence
  derived and/or modified CDS sequence (wt) from hemagglutinin__InfluenzaA__AIJ10754
augaagacuaucauugcuuugagcuacauucuaugucugguuuucgcucaaaaacuuccuggaaaugacaauagcacggcaacgcugugccuugggcaccaugcaguaccaaacggaacgauagugaaaacaaucacgaaugaccgaauugaaguuacuaaugcuacugagcugguucagaauuccucaauaggugaaauaugcgacaguccucaucagauccuugauggagaaaacugcacacuaauagaugcucuauugggagacccucagugugauggcuuucaaaauaagaaaugggaccuuuuuguugaacgaagcaaagccuacagcaacuguuacccuuaugaugugccggauuaugccucccuuaggucacuaguugccucauccggcacacuggaguuuaacaaugaaagcuucaauugggcuggagucacucaaaacggaacaaguucugcuugcauaaggggaucuaauaguaguuucuuuaguagauuaaauugguugacccacuuaaacuucaaauacccagcuuugaacgugacuaugccaaacaaugaacaauuugacaaauuguacauuugggggguucaccacccggguacggacaaggaccaaaucuuccuguaugcucaaucaucaggaagaaucacaguaucuaccaaaagaagccaacaagcuguaaucccgaauaucggaucuagacccagaauaaggaauaucccuagcagaauaagcaucuauuggacaauaguaaaaccgggagacauacuuuugauuaacagcacagggaaucuaauugcuccuagggguuacuucaaaauacgaagugggaaaagcucaauaaugagaucagaugcacccauuggcaaaugcaagucugaaugcaucacuccaaauggaagcauucccaaugacaaaccauuccaaaauguaaacaggaucacauacggggccugucccagauauguuaagcaaagcacucugaaauuggcaacaggaaugcgaaauguaccagagaaacaaacuagaggcauauuuggcgcaauagcggguuucauagaaaaugguugggagggaaugguggaugguugguacgguuucaggcaucaaaauucugagggaagaggacaagcagcagaucucaaaagcacucaagcagcaaucgaucaaaucaaugggaagcugaaucgauugaucgggaaaaccaacgagaaauuccaucagauugaaaaagaauucucagaaguagaagggagaauucaggaccuugagaaauauguugaggacacaaaaauagaucucuggucauacaacgcggagcuucuuguugcccuggagaaccaacauacaauugaucuaacugacucagaaaugaacaaacuguuugaaaaaacaaagaagcaacugagggaaaaugcugaggauaugggcaaugguuguuucaaaauauaccacaaaugugacaaugccugcauaggaucaaucagaaauggaacuuaugaccacgauguauacagggaugaagcauuaaacaaucgguuccagaucaagggaguugagcugaagucaggguacaaagauuggauccuauggauuuccuuugccauaucauguuuuuugcuuuguguugcuuuguugggguucaucaugugggccugccaaaaaggcaacauuaggugcaacauuugcauuuga

SEQ ID NO: 44550 - RNA, 1701 nt, Artificial Sequence
  derived and/or modified CDS sequence (wt) from hemagglutinin__InfluenzaA__AIJ10755
augaagacuaucauugcuuugagcuacauucuaugucugguuuucgcucaaaaacuuccuggaaaugacaauagcacggcaacgcugugccuugggcaccaugcaguaccaaacggaacgauagugaaaacaaucacgaaugaccgaauugaaguuacuaaugcuacugagcugguucagaauuccucaauaggugaaauaugcgacaguccucaucagauccuugauggagaaaacugcacacuaauagaugcucuauugggagacccucagugugauggcuuucaaaauaagaaaugggaccuuuuuguugaaagaagcaaagccuacagcaacuguuacccuuaugaugugccggacuaugccucccuuagaucacuaguugccucauccggcacacuggaguuuaacaaugaaagcuucaauugggcuggagucacucaaaacggaacaaguucugcuugcauaaggggaucuaauaguaguuucuuuaguagauuaaauugguugacccacuuaaacuucaaauacccagcauugaacgugacuaugccaaacaaugaacaauuugacaaauuguacauuugggggguucaccacccggguacggacaaggaccaaaucuuccuguaugcucaaucaucaggaagaaucacaguaucuaccaaaagaagccaacaagcuguaaucccgaauaucggaucuagacccagaauaaggaauaucccuagcagaauaagcauuuauuggacaauaguaaaaccgggagacauacuuuugauuaacagcacagggaaucuaauugcuccuagggguuacuucaaaauacgaagugggaaaagcucaauaaugagaucagaugcacccauuggcaaaugcaagucugaaugcaucacuccaaauggaagcauucccaaugacaaaccauuccaaaauguaaacaggaucacauacggugccugucccagauauguuaagcaaagcacucugaaauuggcaacaggaaugcgaaauguaccagagaaacaaacuagaggcauauuuggcgcaauagcggguuucauagaaaaugguugggagggaaugguggaugguugguacgguuucaggcaucaaaauucugagggaagaggacaagcagcagaucucaaaagcacucaaucagcaaucgaucaaaucaauggaaagcugaaccgauugaucgggaaaaccaacgagaaauuccaucagauugaaaaagaauucucagaaguagaagggagaauucaggaccuugagaaauauguugaggacacaaaaauagaucucuggucauacaacgcggagcuucuuguugcccuggagaaccaacauacaauugaucuaacugacucagaaaugaacaaacuguuugaaaaaacaaagaagcaacugagggaaaaugcugaggauaugggcaaugguuguuucaaaauauaccacaaaugugacaaugccugcauaggaucaaucagaaauggaacuuaugaccacgauguauacagggaugaagcauuaaacaaccgguuccagaucaagggaguugagcugaagucaggguacaaagauuggauccuauggauuuccuuugccauaucauguuuuuugcuuuguguugcuuuguugggguucaucaugugggccugccaaaagggcaacauuaggugcaacauuugcauuuga

SEQ ID NO: 44551 - RNA, 1701 nt, Artificial Sequence
  derived and/or modified CDS sequence (wt) from hemagglutinin__InfluenzaA__AIJ10756
augaagacuaucauugcuuugagcuacauucuaugucugguuuucgcucaaaaacuuccuggaaaugacaauagcacggcaacgcugugccuugggcaccaugcaguaccaaacggaacgauagugaaaacaaucacgaaugaccgaauugaaguuacuaaugcuacugagcugguucagaauuccucaauaggugaaauaugcgacaguccucaucagauccuugauggagaaaacugcacacuaauagaugcucuauugggagacccucagugugauggcuuucaaaauaagaaaugggaccuuuuuguugaacgaagcaaagccuacagcaacuguuacccuuaugaugugccggauuaugccucccuuaggucacuaguugccucauccggcacacuggaguuuaacaaugaaagcuucaauugggcuggagucacucaaaacggaacaaguucugcuugcauaaggggaucuaauaguaguuucuuuaguagauuaaauugguugacccacuuaaacuucaaauacccagcauugaacgugacuaugccaaacaaugaacaauuugacaaauuguacauuugggggguucaccacccggguacggacaaggaccaaaucuuccuguaugcucaaucaucaggaagaaucacaguaucuaccaaaagaagccaacaagcuguaaucccgaauaucggaucuagacccagaauaaggaauaucccuagcagaauaagcaucuauuggacaauaguaaaaccgggagacauacuuuugauuaacagcacagggaaucuaauugcuccuagggguuacuucaaaauacgaagugggaaaagcucaauaaugagaucagaugcacccauuggcaaaugcaagucugaaugcaucacuccaaauggaagcauucccaaugacaaaccauuccaaaauguaaacaggaucacauacggggccugucccagauauguuaagcaaagcacucugaaauuggcaacaggaaugcgaaauguaccagagaaacaaacuagaggcauauuuggcgcaauagcagguuucauagaaaaugguugggagggaaugguggaugguugguacgguuucaggcaucaaaauucugagggaagaggacaagcagcagaucucaaaagcacucaagcagcaaucgaucaaaucaaugggaagcugaaucgauugaucgggaaaaccaacgagaaauuccaucagauugaaaaagaauucucagaaguagaagggagaauucaggaccuugagaaauauguugaggacacaaaaauagaucucuggucauacaacgcggagcuucuuguugcccuggagaaccaacauacaauugaucuaacugacucagaaaugaacaaacuguuugaaaaaacaaagaagcaacugagggaaaaugcugaggauaugggcaaugguuguuucaaaauauaccacaaaugugacaaugccugcauaggaucaaucagaaauggaacuuaugaccacgauguguacagggaugaagcauuaaacaaccgguuccagaucaagggaguugagcugaagucaggguacaaagauuggauccuauggauuuccuuugccauaucauguuuuuugcuuuguguugcuuuguugggguucaucaugugggccugccaaaagggcaacauuaggugcaacauuugcauuuga

SEQ ID NO: 44552 - RNA, 1701 nt, Artificial Sequence
  derived and/or modified CDS sequence (wt) from hemagglutinin__InfluenzaA__AIJ10757
augaagacuaucauugcuuugagcuacauucuaugucugguuaucgcucaaaaacuuccuggaaaugacaauagcacggcaacgcugugccuugggcaccaugcaguaccaaacggaacgauagugaaaacaaucacgaaugaccgaauugaaguuacuaaugcuacugagcugguucagaauuccucaauaggugaaauaugcgacaguccucaucagauccuugauggagaaaacugcacacuaauagaugcucuauugggagacccucagugugauggcuuucaaaauaagaaaugggaccuuuuuguugaacgaagcaaagccuacagcaacuguuacccuuaugaugugccggauuaugccucccuuaggucacuaguugccucauccggcacacuggaguuuaacaaugaaagcuucaauugggcuggagucacucaaaacggaacaaguucugcuugcauaaggggaucuaauaguaguuucuuuaguagauuaaauugguugacccacuuaaacuucaaauacccagcauugaacgugacuaugccaaacaaugaacaauuugacaaauuguacauuugggggguucaccacccggguacggacaaggaccaaaucuuccuguaugcucaaucaucaggaagaaucacaguaucuaccaaaagaagccaacaagcuguaaucccgaauaucggaucuagacccagaauaaggaauaucccuagcagaauaagcaucuauuggacaauaguaaaaccgggagacauacuuuugauuaacagcacagggaaucuaauugcuccuagggguuacuucaaaauacgaagugggaaaagcucaauaaugagaucagaugcacccauuggcaaaugcaagucugaaugcaucacuccaaauggaagcauucccaaugacaaaccauuccaaaauguaaacaggaucacauacggggccugucccagauauguuaagcaaagcacucugaaauuggcaacaggaaugcgaaauguaccagagaaacaaacuagaggcauauuuggcgcaauagcggguuucauagaaaaugguugggagggaaugguggaugguugguacgguuucaggcaucaaaauucugagggaagaggacaagcagcagaucucaaaagcacucaagcagcaaucgaucaaaucaaugggaagcugaaucgauugaucgggaaaaccaacgagaaauuccaucagauugaaaaagaauucucagaaguagaagggagaauucaggaccuugagaaauauguugaggacacaaaaauagaucucuggucauacaacgcggagcuucuuguugcccuggagaaccaacauacaauugaucuaacugacucagaaaugaacaaacuguuugaaaaaacaaagaagcaacugagggaaaaugcugaggauaugggcaaugguuguuucaaaauauaccacaaaugugacaaugccugcauaggaucaaucagaaauggaacuuaugaccacgauguauacagggaugaagcauuaaacaaccgguuccagaucaagggaguugagcugaagucaggguacaaagauuggauccuauggauuuccuuugccauaucauguuuuuugcuuuguguuguuuuguugggguucaucaugugggccugccaaaagggcaacauuaggugcaacauuugcauuuga

SEQ ID NO: 44553 - RNA, 1701 nt, Artificial Sequence
  derived and/or modified CDS sequence (wt) from hemagglutinin__InfluenzaA__AIJ10758
augaagacuaucauugcuuugagcuacauucuaugucugguuuucgcucaaaaacuuccuggaaaugacaauagcacggcaacgcugugccuugggcaccaugcaguaccaaacggaacgauagugaaaacaaucacgaaugaccgaauugaaguuacuaaugcuacugagcugguucagaauuccucaauaggugaaauaugcgacaguccucaucagauccuugauggagaaaacugcacacuaauagaugcucuauugggagacccucagugugauggcuuucaaaauaagaaaugggaccuuuuuguugaacgaagcaaagccuacagcaacuguuacccuuaugaugugccggauuaugccucccuuaggucacuaguugccucauccggcacacuggaguuuaacaaugaaagcuucaauugggcuggagucacucaaaacggaacaaguucugcuugcauaaggggaucuaauaguaguuucuuuaguagauuaaauugguugacccacucaaacuucaaauacccagcauugaacgugacuaugccaaacaaugaacaauuugacaaauuguacauuugggggguucaccacccggguacggacaaggaccaaaucuuccuguaugcucaaucaucaggaagaaucacaguaucuaccaaaagaagccaacaagcuguaaucccgaauaucggaucuagacccagaauaaggaauaucccuagcagaauaagcaucuauuggacaauaguaaaaccgggagacauacuuuugauuaacagcacagggaaucuaauugcuccuagggguuacuucaaaauacgaagugggaaaagcucaauaaugagaucagaugcacccauuggcaaaugcaagucugaaugcaucacuccaaauggaagcauucccaaugacaaaccauuccaaaauguaaacaggaucacauacggggccugucccagauauguuaagcaaagcacucugaaauuggcaacaggaaugcgaaauguaccagagaaacaaacuagaggcauauuuggcgcaauagcggguuucauagaaaaugguugggagggaaugauggaugguugguacgguuucaggcaucaaaauucugagggaagaggacaagcagcagaucucaaaagcacucaagcagcaaucgaucaaaucaaugggaagcugaaucgauugaucgggaaaaccaacgagaaauuccaucagauugaaaaagaauucucagaaguagaagggagaauucaggaccuugagaaauauguugaggacacaaaaauagaucucuggucauacaacgcggagcuucuuguugcccuggagaaccaacauacaauugaucuaacugacucagaaaugaacaaacuguuugaaaaaacaaagaagcaacugagggaaaaugcugaggauaugggcaaugguuguuucaaaauauaccacaaaugugacaaugccugcauaggaucaaucagaaauggaacuuaugaccacgauguauacagggaugaagcauuaaacaaccgguuccagaucaagggaguugagcugaagucaggguacaaagauuggauccuauggauuuccuuugccauaucauguuuuuugcuuuguguugcuuuguugggguucaucaugugggccugccaaaagggcaacauuaggugcaacauuugcauuuga

SEQ ID NO: 44554 - RNA, 1701 nt, Artificial Sequence
  derived and/or modified CDS sequence (wt) from hemagglutinin__InfluenzaA__AIJ10759
augaagacuaucauugcuuugagcuacauucuaugucugguuuuugcucaaaaacuuccuggaaaugacaauagcacggcaacgcugugccuugggcaccaugcaguaccaaauggaacgauagugaaaacaaucacgaaugaccgaauugaaguuacuaaugcuacugagcugguucagaauuccucaauaggugaaauaugcgacaguccucaucagauccuugauggagaaaacugcacacuaauagaugcucuauugggagacccucagugugauggcuuucaaaauaagaaaugggaccuuuuuguugaacggagcaaagccuacagcaacuguuacccuuaugaugugccggauuaugccucccuuaggucacuaguugccucauccggcacacuggaguuuaacaaugaaagcuucaauugggcuggagucacucaaaacggaacaaguucugcuugcauaaggggaucuaauaguaguuucuuuaguagauuaaauugguugacccacuuaaacuucaaauacccagcauugaacgugacuaugccaaacaaugaacaauuugacaaauuguacauuugggggguucaccacccggguacggacaaggaccaaaucuuccuguaugcucaaucaucaggaagaaucacaguaucuaccaaaagaagccaacaagcuguaaucccgaauaucggaucuagacccagaauaaggaauaucccuagcagaauaagcaucuauuggacaauaguaaaaccgggagacauacuuuugauuaacagcacagggaaccuaauugcuccuagggguuacuucaaaauacgaagugggaaaagcucaauaaugagaucagaugcacccauuggcaaaugcaagucugaaugcaucacuccaaauggaagcauucccaaugacaaaccauuccaaaauguaaacaggaucacauacggggccugucccagauauguuaagcaaagcacucugaaauuggcaacaggaaugcgaaauguaccagagaaacaaacuagaggcauauuuggcgcaauagcggguuucauagaaaaugguugggagggaaugguggaugguugguacgguuucaggcaucaaaauucugagggaagaggacaagcagcagaucucaaaagcacucaagcagcaaucgaucaaaucaaugggaagcugaaucgauugaucgggaaaaccaacgagaaauuccaucagauugaaaaagaauucucagaaguagaagggagaauucaggaccuugagaaauauguugaggacacaaaaauagaucucuggucauacaacgcggagcuucuuguugcccuggagaaccaacauacaauugaucuaacugacucagaaaugaacaaacuguuugaaaaaacaaagaagcaacugagggaaaaugcugaggauaugggcaaugguuguuucaaaauauaccacaaaugugacaaugccugcauaggaucaaucagaaauggaacuuaugaccacgauguauacagggaugaagcauuaaacaaccgguuccagaucaagggaguugagcugaagucaggguacaaagauuggauccuauggauuuccuuugccauaucauguuuuuugcuuuguguugcuuuguugggguucaucaugugggccugccaaaaaggcaacauuaggugcaacauuugcauuuga

SEQ ID NO: 44555 - RNA, 1701 nt, Artificial Sequence
  derived and/or modified CDS sequence (wt) from hemagglutinin__InfluenzaA__AIJ10760
augaagacuaucauugcuuugagcuacauucuaugucugguuaucgcucaaaaacuuccuggaaaugacaauagcacggcaacgcugugccuugggcaccaugcaguaccaaacggaacgauagugaaaacaaucacgaaugaccgaauugaaguuacuaaugcuacugagcugguucagaauuccucaauaggugaaauaugcgacaguccucaucagauccuugauggagaaaacugcacacuaauagaugcucuauugggagacccucagugugauggcuuucaaaauaagaaaugggaccuuuuuguugaacgaagcaaagccuacagcaacuguuacccuuaugaugugccggauuaugccucccuuaggucacuaguugccucauccggcacacuggaguuuaacaaugaaagcuucaauugggcuggagucacucaaaacggaacaaguucugcuugcauaaggggaucuaauaguaguuucuuuaguagauuaaauugguugacccacuuaaacuucaaauacccagcauugaacgugacuaugccaaacaaugaacaauuugacaaauuguacauuugggggguucaccacccggguacggacaaggaccaaaucuuccuguaugcucaaucaucaggaagaaucacaguaucuaccaaaagaagccaacaagcuguaaucccgaauaucggaucuagacccagaauaaggaauaucccuagcagaauaagcaucuauuggacaauaguaaaaccgggagacauacuuuugauuaacagcacagggaaucuaauugcuccuagggguuacuucaaaauacgaagugggaaaagcucaauaaugagaucagaugcacccauuggcaaaugcaagucugaaugcaucacuccaaauggaagcauucccaaugacaaaccauuccaaaauguaaacaggaucacauacggggccugucccagauauguuaagcaaagcacucugaaauuggcaacaggaaugcgaaauguaccagagaaacaaacuagaggcauauuuggcgcaauagcggguuucauagaaaaugguugggagggaaugguggaugguugguacgguuucaggcaucaaaauucugagggaagaggacaagcagcagaucucaaaagcacucaagcagcaaucgaucaaaucaaugggaagcugaaucgauugaucgggaaaaccaacgagaaauuccaucagauugaaaaagaauucucagaaguagaagggagaauucaggaccuugagaaauauguugaggacacaaaaauagaucucuggucauacaacgcggagcuucuuguugcccuggagaaccaacauacaauugaucugacugacucagaaaugaacaaacuguucgaaaaaacaaagaagcaacugagggaaaaugcugaggauaugggcaaugguuguuucaaaauauaccacaaaugugacaaugccugcauaggaucaaucagaaauggaacuuaugaccacgauguauacagggaugaagcauuaaacaaccgguuccagaucaagggaguugagcugaagucaggguacaaagauuggauccuauggauuuccuuugccauaucauguuuuuugcuuuguguugcuuuguugggguucaucaugugggccugccaaaagggcaacauuaggugcaacauuugcauuuga

SEQ ID NO: 44556 - RNA, 1701 nt, Artificial Sequence
  derived and/or modified CDS sequence (wt) from hemagglutinin__InfluenzaA__AIJ10761
augaagacuaucauugcuuugagcuacauucuaugucugguuuucgcucaaaaacuuccuggaaaugacaauagcacggcaacgcugugccuugggcaccaugcaguaccaaacggaacgauagugaaaacaaucacgaaugaccgaauugaaguuacuaaugcuacugagcugguucagaauuccucaauaggugaaauaugcgacaguccucaucagauccuugauggagaaaacugcacacuaauagaugcucuauugggagacccucagugugauggcuuucaaaauaagaaaugggaccuuuuuguugaacgaagcaaagccuacagcaacuguuacccuuaugaugugccggauuaugccucccuuaggucacuaguugccucauccggcacacuggaguuuaacaaugaaagcuucaauugggcuggagucacucaaaacggaacaaguucugcuugcauaaggggaucuaauaguaguuucuuuaguagauuaaauugguugacccacuuaaacuucaaauacccagcauugaacgugacuaugccaaacaaugaacaauuugacaaauuguacauuugggggguucaccacccggguacggacaaggaccaaaucuuccuguaugcucaaucaucaggaagaaucacaguaucuaccaaaagaagccaacaagcuguaaucccgaauaucggaucuagacccagaauaagaaauaucccuagcagaauaagcaucuauuggacaauaguaaaaccgggagacauacuuuugauuaacagcacagggaaucuaauugcuccuagggguuacuucaaaauacgaagugggaaaagcucaauaaugagaucagaugcacccauuggcaaaugcaagucugaaugcaucacuccaaauggaagcauucccaaugacaaaccauuccaaaauguaaacaggaucacauacggggccugucccagauauguuaagcaaagcacucugaaauuggcaacaggaaugcgaaauguaccagagaaacaaacuagaggcauauuuggcgcaauagcggguuucauagaaaaugguugggagggaaugguggaugguugguacgguuucaggcaucaaaauucugagggaagaggacaagcagcagaucucaaaagcacucaagcagcaaucgaucaaauuaaugggaagcugaaucgauugaucgggaaaaccaacgagaaauuccaucagauugaaaaagaauucucagaaguagaagggagaauucaggaucuugagaaauauguugaggacacaaaaauagaucucuggucauacaacgcggagcuucuuguugcccuggagaaccaacauacaauugaucuaacugacucagaaaugaacaaacuguuugaaaaaacaaagaagcaacugagggaaaaugcugaggauaugggcaaugguuguuucaaaauauaccacaaaugugacaaugccugcauaggaucaaucagaaauggaacuuaugaccacgauguauacaggaaugaagcauuaaacaaacgguuccagaucaagggaguugagcugaagucaggguacaaagauuggauccuauggauuuccuuugccauaucauguuuuuugcuuuguguuguuuuguugggguucaucaugugggccugccaaaagggcaacauuaggugcaacauuugcauuuga

SEQ ID NO: 44557 - RNA, 1701 nt, Artificial Sequence
  derived and/or modified CDS sequence (wt) from hemagglutinin__InfluenzaA__AIJ10762
augaagacuaucauugcuuugagcuacauucuaugucugguuuucgcucaaaaacuuccuggaaaugacaauagcacggcaacgcugugccuugggcaccaugcaguaccaaacggaacgauagugaaaacaaucacgaaugaccgaauugaaguuacuaaugcuacugagcugguucagaauuccucaauaggugaaauaugcgacaguccucaucagauccuugauggagaaaacugcacacuaauagaugcucuauugggagacccucagugugauggcuuucaaaauaagaaaugggaccuuuuuguugaacgaagcaaagccuacagcaacuguuacccuuaugaugugccggauuaugccucccuuaggucacuaguugccucauccggcacacuggaguuuaacaaugaaagcuucaauugggcuggagucacucaaaacggaacaaguucugcuugcauaagggggucuaauaguaguuucuuuaguagauuaaauugguugacccacuuaaacuucaaauacccagcauugaacgugacuaugccaaacaaugaacaauuugacaaauuguacauuugggggguucaccacccggguacggacaaggaccaaaucuuccuguaugcucaaucaucaggaagaaucacaguaucuaccaaaagaagccaacaagcuguaaucccgaauaucggaucuagacccagaauaaggaauaucccuagcagaauaagcaucuauuggacaauaguaaaaccgggagacauacuuuugauuaacagcacagggaaucuaauugcuccuagggguuacuuuaaaauacgaagugggaaaagcucaauaaugagaucagaugcacccauuggcaaaugcaagucugaaugcaucacuccaaauggaagcauuccuaaugacaaaccauuccaaaauguaaacaggaucacauacggggccugucccagauauguuaagcaaagcacucugaaauuggcaacaggaaugcgaaauguaccagagaaacaaacuagaggcauauuuggcgcaauagcggguuucauagaaaaugguugggagggaaugguggaugguugguacgguuucaggcaucaaaauucugagggaagaggacaagcagcagaucucaaaagcacucaagcagcaaucgaucaaaucaaugggaagcugaaucgauugaucgggaaaaccaacgagaaauuccaucagauugaaaaagaauucucagaaguagaagggagaauucaggaccuugagaaauauguugaggacacaaaaauagaucucuggucauacaacgcggagcuucuuguugcccuggagaaccaacauacaauugaucuaacugacucagaaaugaacaaacuguuugaaaaaacaaagaagcaacugagggaaaaugcugaggauaugggcaaugguuguuucaaaauauaccacaaaugugacaaugccugcauaggaucaaucagaaauggaacuuaugaccacgauguauacagggaugaagcauuaaacaaccgguuccagaucaagggaguugagcugaagucaggguacaaagauuggauccuauggauuuccuuugccauaucauguuuuuugcuuuguguuguuuuguugggguucaucaugugggccugccaaaagggcaacauuaggugcaacauuugcauuuga

SEQ ID NO: 44558 - RNA, 1701 nt, Artificial Sequence
  derived and/or modified CDS sequence (wt) from hemagglutinin__InfluenzaA__AIJ10763
augaagacuaucauugcuuugagcuacauucuaugucugguuuucgcucaaaaacuuccuggaaaugacaauagcacggcaacgcugugccuugggcaccaugcaguaccaaacggaacgauagugaaaacaaucacgaaugaccgaauugaaguuacuaaugcuacugagcugguucagaauuccucaauaggugaaauaugcgacaguccucaucagauccuugauggagaaaacugcacacuaauagaugcucuauugggagacccucagugugauggcuuucaaaauaagaaaugggaccuuuuuguugaacgaagcaaagccuacagcaacuguuacccuuaugaugugccggauuaugccucccuuaggucacuaguugccucauccggcacacuggaguuuaacaaugaaagcuucaauugggcuggagucacucaaaacggaacaaguucugcuugcauaaggggaucuaauaguaguuucuuuaguagauuaaauugguugacccacuuaaacuucaaauacccagcauugaacgugacuaugccaaacaaugaacaauuugacaaauuguacauuugggggguucaccacccggguacggacaaggaccaaaucuuccuguaugcucaaucaucaggaagaaucacaguaucuaccaaaagaagccaacaagcuguaaucccgaauaucggaucuagacccagaauaaggaauaucccuagcagaauaagcaucuauuggacaauaguaaaaccgggagacauacuuuugauuaacagcacagggaaucuaauugcuccuagggguuacuucaaaauacgaagugggaaaagcucaauaaugagaucagaugcacccauuggcaaaugcaagucugaaugcaucacuccaaauggaagcauucccaaugacaaaccauuccaaaauguaaacaggaucacauacggggccugucccagauauguuaagcaaagcacucugaaauuggcaacaggaaugcgaaauguaccagagaaacaaacuagaggcauauuuggcgcaauagcggguuucauagaaaaugguugggagggaaugguggaugguugguacgguuucaggcaccaaaauucugagggaagaggacaagcagcagaucucaaaagcacucaagcagcaaucgaucaaaucaaugggaagcugaaucgauugaucgggaaaaccaacgagaaauuccaucagauugaaaaagaauucucagaaguagaagggagaauucaggaccuugagaaauauguugaggacacaaaaauagaucucuggucauacaacgcggagcuacuuguugcccuggagaaccaacauacaauugaucuaacugacucagaaaugaacaaacuguuugaaaaaacaaagaagcaacugagggaaaaugcugaggauaugggcaaugguuguuucaaaauauaccacaaaugugacaaugccugcauaggaucaaucagaaauggaacuuaugaccacgauguauacagggaugaagcauuaaacaaccgguuccagaucaagggaguugagcugaagucaggguacaaagauuggauccuauggauuuccuuugccauaucauguuuuuugcuuuguguuguuuuguugggguucaucaugugggccugccaaaagggcaacauuaggugcaacauuugcauuuga

SEQ ID NO: 44559 - RNA, 1701 nt, Artificial Sequence
  derived and/or modified CDS sequence (wt) from hemagglutinin__InfluenzaA__AIJ10764
augaagacuaucauugcuuugagcuacauucuaugucugguuuucgcucaaaaacuuccuggaaaugacaauagcacggcaacgcugugccuugggcaccaugcaguaccaaacggaacgauagugaaaacaaucacgaaugaccgaauugaaguuacuaaugcuacugagcugguucagaauuccucaauaggugaaauaugcgacaguccucaucagauccuugauggagaaaacugcacacuaauagaugcucuauugggagacccucagugugauggcuuucaaaauaagaaaugggaccuuuuuguugaacgaagcaaagccuacagcaacuguuacccuuaugaugugccggauuaugccucccuuaggucacuaguugccucauccggcacacuggaguuuaacaaugaaagcuucaauugggcuggagucacucaaaacggaacaaguucugcuugcauaaggggaucuaauaguaguuucuuuaguagauuaaauugguugacccacuuaaacuucaaauacccagcauugaacgugacuaugccaaacaaugaacaauuugacaaauuguacauuugggggguucaccacccggguacggacaaggaccaaaucuuccuguaugcucaaucaucaggaagaaucacaguaucuaccaaaagaagccaacaagcuguaaucccgaauaucggaucuagacccagaauaagaaauaucccuagcagaauaagcaucuauuggacaauaguaaaaccgggagacauacuuuugauuaacagcacagggaaucuaauugcuccuagggguuacuucaaaauacgaagugggaaaagcucaauaaugagaucagaugcacccauuggcaaaugcaagucugaaugcaucacuccaaauggaagcauucccaaugacaaaccauuccaaaauguaaacaggaucacauacggggccugucccagauauguuaagcaaagcacucugaaauuggcaacaggaaugcgaaauguaccagagaaacaaacuagaggcauauuuggcgcaauagcggguuucauagaaaaugguugggagggaaugguggaugguugguacgguuucaggcaucaaaauucugagggaagaggacaagcagcagaucucaaaagcacucaagcagcaaucgaucaaauuaaugggaagcugaaucgauugaucgggaaaaccaacgagaaauuccaucagauagaaaaagaauucucagaaguagaagggagaauucaggaucuugagaaauauguugaggacacaaaaauagaucucuggucauacaacgcggagcuucuuguugcccuggagaaccaacauacaauugaucuaacugacucagaaaugaacaaacuguuugaaaaaacaaagaagcaacugagggaaaaugcugaggauaugggcaaugguuguuucaaaauauaccacaaaugugacaaugccugcauaggaucaaucagaaauggaacuuaugaccacgauguauacagggaugaagcauuaaacaaccgguuccagaucaagggaguugagcugaagucaggguacaaagauuggauccuauggauuuccuuugccauaucauguuuuuugcuuuguguuguuuuguugggguucaucaugugggccugccaaaagggcaacauuaggugcaacauuugcauuuga

SEQ ID NO: 44560 - RNA, 1701 nt, Artificial Sequence
  derived and/or modified CDS sequence (wt) from hemagglutinin__InfluenzaA__AIJ10765
augaagacuaucauugcuuugagcuacauucuaugucugguuuucgcucaaaaacuuccuggaaaugacaauagcacggcaacgcugugccuugggcaccaugcaguaccaaacggaacgauagugaaaacaaucacgaaugaccgaauugaaguuacuaaugcuacugagcugguucagaauuccucaauaggugaaauaugcgacaguccucaucagauccuugauggagaaaacugcacacuaauagaugcucuauugggagacccucagugugauggcuuucaaaauaagaaaugggaccuuuuuguugaacgaagcaaagccuacagcaacuguuacccuuaugaugugccggauuaugccucccuuaggucacuaguugccucauccggcacacuggaguuuaacaaugaaagcuucaauugggcuggagucacucaaaacggaacaaguucugcuugcauaagggggucuaauaguaguuucuuuaguagauuaaauugguugacccacuuaaacuucaaauacccagcauugaacgugacuaugccaaacaaugaacaauuugacaaauuguacauuugggggguucaccacccggguacggacaaggaccaaaucuuccuguaugcucaaucaucaggaagaaucacaguaucuaccaaaagaagccaacaagcuguaaucccgaauaucggaucuagacccagaauaaggaauaucccuagcagaauaagcaucuauuggacaauaguaaaaccaggagacauacuuuugauuaacagcacagggaaucuaauugcuccuagggguuacuucaaaauacgaagugggaaaagcucaauaaugagaucagaugcacccauuggcaaaugcaagucugaaugcaucacuccaaauggaagcauucccaaugacaaaccauuccaaaauguaaacaggaucacauacggggccugucccagauauguuaagcaaagcacucugaaauuggcaacaggaaugcgaaauguaccagagaaacaaacuagaggcauauuuggcgcaauagcggguuucauagaaaaugguugggagggaaugguggaugguugguacgguuucaggcaucaaaauucugagggaagaggacaagcagcagaucucaaaagcacucaagcagcaaucgaucaaaucaaugggaagcugaaucgauugaucgggaaaaccaacgagaaauuccaucagauugaaaaagaauucucagaaguagaagggagaauucaggaccuugagaaauauguugaggacacaaaaauagaucucuggucauacaacgcggagcuucuuguugcccuggagaaccaacauacaauugaucuaacugacucagaaaugaacaaacuguuugaaaaaacaaagaagcaacugagggaaaaugcugaggauaugggcaaugguuguuucaaaauauaccacaaaugugacaaugccugcauaggaucaaucagaaauggaacuuaugaccacgauguauacagggaugaagcauuaaacaaccgguuccagaucaagggaguugagcugaagucaggguacaaagauuggauccuauggauuuccuuugccauaucauguuuuuugcuuuguguuguuuuguugggguucaucaugugggccugccaaaagggcaacauuaggugcaacauuugcauuuga

SEQ ID NO: 44561 - RNA, 1701 nt, Artificial Sequence; identical to SEQ ID NO: 44558
  derived and/or modified CDS sequence (wt) from hemagglutinin__InfluenzaA__AIJ10766

SEQ ID NO: 44562 - RNA, 1701 nt, Artificial Sequence
  derived and/or modified CDS sequence (wt) from hemagglutinin__InfluenzaA__AIJ10767
augaagacuaucauugcuuugagcuacauucuaugucugguuuucgcucaaaaacuuccuggaaaugacaauagcacggcaacgcugugccuugggcaccaugcaguaccaaacggaacgauagugaaaacaaucacgaaugaccgaauugaaguuacuaaugcuacugagcugguucagaauuccucaauaggugaaauaugcgacaguccucaucagauccuugauggagaaaacugcacacuaauagaugcucuauugggagacccucagugugauggcuuucaaaauaagaaaugggaccuuuuuguugaacgaagcaaagccuacagcaacuguuacccuuaugaugugccggauuaugccucccuuaggucacuaguugccucauccggcacacuggaguuuaacaaugaaagcuucaauugggcuggagucacucaaaacggaacaaguucugcuugcauaaggggaucuaauaguaguuucuuuaguagauuaaauugguugacccacuuaaacuucaaauacccagcauugaacgugacuaugccaaacaaugaacaauuugacaaauuguacauuugggggguucaccacccggguacggacaaggaccaaaucuuccuguaugcucaaucaucaggaagaaucacaguaucuaccaaaagaagccaacaagcuguaaucccgaauaucggaucuagacccagaauaaggaauaucccuagcagaauaagcaucuauuggacaauaguaaaaccgggagacauacuuuugauuaacagcacagggaaucuaauugcuccuagggguuacuucaaaauacgaagugggaaaagcucaauaaugagaucagaugcacccauuggcaaaugcaagucugaaugcaucacuccaaauggaagcauucccaaugacaaaccauuccaaaauguaaacaggaucacauacggggccugucccagauauguuaagcaaagcacucugaaauuggcaacaggaaugcgaaauguaccagagaaacaaacuagaggcauauuuggcgcaauagcggguuucauagaaaaugguugggagggaaugguggaugguugguacgguuucaggcaccaaaauucugagggaagaggacaagcagcagaucucaaaagcacucaagcagcaaucgaucaaaucaaugggaagcugaaucgauugaucgggaaaaccaacgagaaauuccaucagauugaaaaagaauucucagaaguagaagggagaauucaggaccuugagaaauauguugaggacacaaaaauagaucucuggucauacaacgcggagcuacuuguugcccuggagaaccaacauacaauugaucuaacugacucagaaaugaacaaacuguuugaaaaaacaaagaagcaacugagggaaaaugcugaggauaugggcaaugguuguuucaaaauauaccacaaaugugacaaugccugcauaggaucaaucagaaauggaacuuaugaccacgauguauacagggaugaagcauuaaacaaccgauuccagaucaagggaguugagcugaagucaggguacaaagauuggauccuauggauuuccuuugccauaucauguuuuuugcuuuguguuguuuuguugggguucaucaugugggccugccaaaagggcaacauuaggugcaacauuugcauuuga

SEQ ID NO: 44563 - RNA, 1701 nt, Artificial Sequence
  derived and/or modified CDS sequence (wt) from hemagglutinin__InfluenzaA__AIJ10768
augaagacuaucauugcuuugagcuacauucuaugucugguuuucgcucaaaaacuuccuggaaaugacaauagcacggcaacgcugugccuugggcaccaugcaguaccaaacggaacgauagugaaaacaaucacgaaugaccgaauugaaguuacuaaugcuacugagcugguucagaauuccucaauaggugaaauaugcgacaguccucaucagauccuugauggagaaaacugcacacuaauagaugcucuauugggagacccucagugugauggcuuucaaaauaagaaaugggaccuuuuuguugaacgaagcaaagccuacagcaacuguuacccuuaugaugugccggauuaugccucccuuaggucacuaguugccucauccggcacacuggaguuuaacaaugaaagcuucaauugggcuggagucacucaaaacggaacaaguucugcuugcauaaggggaucuaauaguaguuucuuuaguagauuaaauugguugacccacuuaaacuucaaauacccagcauugaacgugacuaugccaaacaaugaacaauuugacaaauuguacauuugggggguucaccacccggguacggacaaggaccaaaucuuccuguaugcucaaucaucaggaagaaucacaguaucuaccaaaagaagccaacaagcuguaaucccgaauaucggaucuagacccagaauaagaaauaucccuagcagaauaagcaucuauuggacaauaguaaaaccgggagacauacuuuugauuaacagcacagggaaucuaauugcuccuagggguuacuucaaaauacgaagugggaaaagcucaauaaugagaucagaugcacccauuggcaaaugcaagucugaaugcaucacuccaaauggaagcauucccaaugacaaaccauuccaaaauguaaacaggaucacauacggggccugucccagauauguuaagcaaagcacucugaaauuggcaacaggaaugcgaaauauaccagagaaacaaacuagaggcauauuuggcgcaauagcggguuucauagaaaaugguugggagggaaugguggaugguugguacgguuucaggcaucaaaauucugagggaagaggacaagcagcagaucucaaaagcacucaagcagcaaucgaucaaauuaaugggaagcugaaucgauugaucgggaaaaccaacgagaaauuccaucagauugaaaaagaauucucagaaguagaagggagaauucaggaucuugagaaauauguugaggacacaaaaauagaucucuggucauacaacgcggagcuucuuguugcccuggagaaccaacauacaauugaucuaacugacucagaaaugaacaaacuguuugaaaaaacaaagaagcaacugagggaaaaugcugaggauaugggcaaugguuguuucaaaauauaccacaaaugugacaaugccugcauaggaucaaucagaaauggaacuuaugaccacgauguauacagggaugaagcauuaaacaaccgguuccagaucaagggaguugagcugaagucaggguacaaagauuggauccuauggauuuccuuugccauaucauguuuuuugcuuuguguuguuuuguugggguucaucaugugggccugccaaaagggcaacauuaggugcaacauuugcauuuga

SEQ ID NO: 44564 - RNA, 1701 nt, Artificial Sequence
  derived and/or modified CDS sequence (wt) from hemagglutinin__InfluenzaA__AIJ10769
augaagacuaucauugcuuugagcuacauucuaugucugguuuucgcucaaaaacuuccuggaaaugacaauagcacggcaacacugugccuugggcaccaugcaguaccaaacggaacgauagugaaaacaaucacgaaugaccgaauugaaguuacuaaugcuacugagcugguucagaauuccucaauaggugaaauaugcgacaguccucaucagauccuugauggagaaaacugcacacuaauagaugcucuauugggagacccucagugugauggcuuucaaaauaagaaaugggaccuuuuuguugaacgaagcaaagccuacagcaacuguuacccuuaugaugugccggauuaugccucccuuaggucacuaguugccucauccggcacacuggaguuuaacaaugaaagcuucaauugggcuggagucacucaaaacggaacaaguucugcuugcauaagggggucuaauaguaguuucuuuaguagauuaaauugguugacccacuuaaacuucaaauacccagcauugaacgugacuaugccaaacaaugaacaauuugacaaauuguacauuugggggguucaccacccggguacggacaaggaccaaaucuuccuguaugcucaaucaucaggaagaaucacaguaucuaccaaaagaagccaacaagcuguaaucccgaauaucggaucuagacccagaauaaggaauaucccuagcagaauaagcaucuauuggacaauaguaaaaccgggagacauacuuuugauuaacagcacagggaaucuaauugcuccuagggguuacuucaaaauacaaagugggaaaagcucaauaaugagaucagaugcacccauuggcaaaugcaagucugaaugcaucacuccaaauggaagcauucccaaugacaaaccauuccaaaauguaaacaggaucacauacggggccugucccagauauguuaagcaaagcacucugaaauuggcaacaggaaugcgaaauguaccagagaaacaaacuagaggcauauuuggcgcaauagcggguuucauagaaaaugguugggagggaaugguggaugguugguacgguuucaggcaucaaaauucugagggaagaggacaagcagcagaucucaaaagcacucaagcagcaaucgaucaaaucaaugggaagcugaaucgauugaucgggaaaaccaacgagaaauuccaucagauugaaaaagaauucucagaaguagaagggagaauucaggaccuugagaaauauguugaggacacaaaaauagaucucuggucauacaacgcggagcuucuuguugcccuggagaaccaacauacaauugaucuaacugacucagaaaugaacaaacuguuugaaaaaacaaagaagcaacugagggaaaaugcugaggauaugggcaaugguuguuucaaaauauaccacaaaugugacaaugccugcauaggaucaaucagaaauggaacuuaugaccacgauguauacagggaugaagcauuaaacaaccgguuccagaucaagggaguugagcugaagucaggguacaaagauuggauccuauggauuuccuuugccauaucauguuuuuugcuuuguguuguuuuguugggguucaucaugugggccugccaaaagggcaacauuaggugcaacauuugcauuuga

SEQ ID NO: 44565 - RNA, 1701 nt, Artificial Sequence; identical to SEQ ID NO: 44562
  derived and/or modified CDS sequence (wt) from hemagglutinin__InfluenzaA__AIJ10770

SEQ ID NO: 44566 - RNA, 1701 nt, Artificial Sequence; identical to SEQ ID NO: 44559
  derived and/or modified CDS sequence (wt) from hemagglutinin__InfluenzaA__AIJ10771

SEQ ID NO: 44567 - RNA, 1701 nt, Artificial Sequence
  derived and/or modified CDS sequence (wt) from hemagglutinin__InfluenzaA__AIJ10772
augaagacuaucauugcuuugagcuacauucuaugucugguuuucgcucaaaaacuuccuggaaaugacaauagcacggcaacgcugugccuugggcaccaugcaguaccaaacggaacgauagugaaaacaaucacaaaugaccgaauugaaguuacuaaugcuacugagcugguucagaauuccucaauaggugaaauaugcgacaguccucaucagauccuugauggagaaaacugcacacuaauagaugcucuauugggagacccucagugugauggcuuucaaaauaagaaaugggaccuuuuuguugaacgaagcaaagccuacagcaacuguuacccuuaugaugugccggauuaugccucccuuaggucacuaguugccucauccggcacacuggaguuuaacaaugaaagcuucaauugggcuggagucacucaaaacggaacaaguucugcuugcauaaggggaucuaauaguaguuucuuuaguagauuaaauugguugacccacuuaaacuucaaauacccagcauugaacgugacuaugccaaacaaugaacaauuugacaaauuguacauuugggggguucaccacccggguacggacaaggaccaaaucuuccuguaugcucaaucaucaggaagaaucacaguaucuaccaaaagaagccaacaagcuguaaucccgaauaucggaucuagacccagaauaaggaauaucccuagcagaauaagcaucuauuggacaauaguaaaaccgggagacauacuuuugauuaacagcacagggaaucuaauugcuccuagggguuacuucaaaauacgaagugggaaaagcucaauaaugagaucagaugcacccauuggcaaaugcaagucugaaugcaucacuccaaauggaagcauucccaaugacaaaccauuccaaaauguaaacaggaucacauacggggccugucccagauauguuaagcaaagcacucugaaauuggcaacaggaaugcgaaauguaccagagaaacaaacuagaggcauauuuggcgcaauagcggguuucauagaaaaugguugggagggaaugguggaugguugguacgguuucaggcaccaaaauucugagggaagaggacaagcagcagaucucaaaagcacucaagcagcaaucgaucaaaucaaugggaagcugaaucgauugaucgggaaaaccaacgagaaauuccaucagauugaaaaagaauucucagaaguagaagggagaauucaggaccuugagaaauauguugaggacacaaaaauagaucucuggucauacaacgcggagcuacuuguugcccuggagaaccaacauacaauugaucuaacugacucagaaaugaacaaacuguuugaaaaaacaaagaagcaacugagggaaaaugcugaggauaugggcaaugguuguuucaaaauauaccacaaaugugacaaugccugcauaggaucaaucagaaauggaacuuaugaccacgauguauacagggaugaagcauuaaacaaccgguuccagaucaagggaguugagcugaagucaggguacaaagauuggauccuauggauuuccuuugccauaucauguuuuuugcuuuguguuguuuuguugggguucaucaugugggccugccaaaagggcaacauuaggugcaacauuugcauuuga

SEQ ID NO: 44568 - RNA, 1701 nt, Artificial Sequence
  derived and/or modified CDS sequence (wt) from hemagglutinin__InfluenzaA__AIJ10773
augaagacuaucauugcuuugagcuacauucuaugucugguuuucgcucaaaaacuuccuggaaaugacaauagcacggcaacgcugugccuugggcaccaugcaguaccaaacggaacgauagugaaaacaaucacgaaugaccgaauugaaguuacuaaugcuacugagcugguucagaauuccucaauaggugaaauaugcgacaguccucaucagauccuugauggagaaaacugcacacuaauagaugcucuauugggagacccucagugugauggcuuucaaaauaagaaaugggaccuuuuuguugaacgaagcaaagccuacagcaacuguuacccuuaugaugugccggauuaugccucccuuaggucacuaguugccucauccggcacacuggaguuuaacaaugaaagcuucaauugggcuggagucacucaaaacggaacaaguucugcuugcauaaggggaucuaauaguaguuucuuuaguagauuaaauugguugacccauuuaaacuucaaauacccagcauugaacgugacuaugccaaacaaugaacaauuugacaaauuguacauuugggggguucaccacccggguacggacaaggaccaaaucuuccuguaugcucaaucaucaggaagaaucacaguaucuaccaaaagaagccaacaagcuguaaucccgaauaucggaucuagacccagaauaaggaauaucccuagcagaauaagcaucuauuggacaauaguaaaaccgggagacauacuuuugauuaacagcacagggaaucuaauugcuccuagggguuacuucaaaauacgaagugggaaaagcucaauaaugagaucagaugcacccauuggcaaaugcaagucugaaugcaucacuccaaauggaagcauucccaaugacaaaccauuccaaaauguaaacaggaucacauacggggccugucccagauauguuaagcaaagcacucugaaauuggcaacaggaaugcgaaauguaccagagaaacaaacuagaggcauauuuggcgcaauagcggguuucauagaaaaugguugggagggaaugguggaugguugguacgguuucaggcaccaaaauucugagggaagaggacaagcagcagaucucaaaagcacucaagcagcaaucgaucaaaucaaugggaagcugaaucgauugaucgggaaaaccaacgagaaauuccaucagauugaaaaagaauucucagaaguagaagggagaauucaggaccuugagaaauauguugaggacacaaaaauagaucucuggucauacaacgcggagcuucuuguugcccuggagaaccaacauacaauugaucuaacugacucagaaaugaacaaacuguuugaaaaaacaaagaagcaacugagggaaaaugcugaggauaugggcaaugguuguuucaaaauauaccacaaaugugacaaugccugcauaggaucaaucagaaauggaacuuaugaccacgauguauacagggaugaagcauuaaacaaccgguuccagaucaagggaguugagcugaagucaggguacaaagauuggauccuauggauuuccuuugccauaucauguuuuuugcuuuguguuguuuuguugggguucaucaugugggccugccaaaagggcaacauuaggugcaacauuugcauuuga
